United States Patent Application Publication US 2008/0113342 A1 - sequence listing, part 2

SEQ ID NO: 3560 - DNA, 614 bp, Arabidopsis thaliana
  unsure (1)..(614): unsure at all n locations
gtnnnnnnnnnnnnnnnnnnnnnnnctaaagctgtaaaaatgatggctgccacctgctgtttattcagtgtccagtatgcgcggaaaaatacaaaggttgttgtagtgagatttgctgcgaagaaagcgcgttaccgccagaagaacagcgacgccgtcgggcaggacgtgaaaatggcaataagatctttaataagtctcgtggacgtctgaatacaacactgtgcattcctgatccaacagaataaatatcattgccggatgcgtgccatccggcaacatttcacgcttacttctgctgtacgccttccactgaaataatcagatccacttcctgagaagctggacctaaatctgtcttgatattgaagtccttgagcttaattttgccttcggcctcgaagcctgcacgtttaccaccccatgggtcgtcgccctgaccaattaatttcgcttccagcgtgacgggtttggttagccattcagcgtcagatcgccggtaatatcagttcgtcatcgtctttcttcacgctggtggaggtgaatgttgcctgtgatatttgcggtattgaagaatctcactgcgaagatgtttacgcgtctgcgtgattagt

SEQ ID NO: 3561 - DNA, 534 bp, Arabidopsis thaliana columbia
tattaaatcactctttaatcttttctcacatattcagtataaaaacatattgtgtccctctccaaaacttttatcacaaaactatcatatctaagtctaaaacaccaaaccacctctctgtctctctctcttgtctccatcgccagagccttcacggttaacattgttcgtcatcatgtcatccggagaaagagctttacaccttacaacacccgacgatgaagctataagaacgtgccatttacttctacggtttggagattttaggggagttcgagacatcgtcaacacgaacaaggcagtaatcagtgaacggctagatacgtttgagaaagcggcacgtatctcggatgttctctcggccgcagagaccccgcttcccaacggggcgactgattggtacggcatcattcgaatgaaacagccgggaccgattgtaggggaggacttcgagaagttgatgaatctcttgaactcgagtaacaatcctttcccgttttgccaggaagctcgtgttaaagcctcgttagcttg

SEQ ID NO: 3562 - DNA, 541 bp, Arabidopsis thaliana
tctggttgtagattactccgacagtggagaagctagagaaaatgatacattgcaaagtttacaggacgtgactccaattgggcccataccattcaaccatgaggctgagatgcacaaactcgaagaagaaatcggcgaggttctaagagcgctgagaaaggctcaggaatttgagtaccaaattgcagaaggcaaacttcatgctcagaaagaatgtctgagtgatctgtataggcagctcgagaaggagaagtcagagctgtcgaggcgagtatcaggtacagatgcgaatagcttgatgacgaatgtgctgaagagattggatcagattagaaaagaagtcacaaagcttaaagaaatggaagaagtagccaagggatttggtaggacacctagaggggttcttgaagagtactttcatctaaacatcgaggactaagatttatataagcacatccataattgtacattcgttatgacgtttgttttgtaagtttttgattctcctcgtaaatctgagttttggatggtcatttgttta

SEQ ID NO: 3563 - DNA, 1073 bp, Arabidopsis thaliana
tcaataaatcatactataccctcaaataatgtagactacttgtattaaatctctaacattacccttcacataatgcaataccaataagtacaggattttaggttaatacatgctagacactttaaaatcaagttatggagaatttaggtaactacagttgtgtataacatgatataaaagtaagatactatgtattttataaaagcacgaaatgcactgattacctgggactgcctatcgactttccagacaatatccaacttcaagctccatagacgctctatttccttctgtgtttcctccatatctgagtcatcatcttcgtcaacctcagggaattgcaattccctaattcgaggcacactttcaaggaacaatagttggattgcgtgtgagaatccctgaaccgtgacatatttctgcataagcttatcagcaccccttgctgtaacactcttcaacgtcaataaaaaagatgtagttccccacggatgattaagaaacttatccagattttctgccatgtccgcatgtaccggagatattttgcttctatccgacgtcgggcacaagacgccatcaatgagggctagagtagcgtaccgtagacgaattccttgatcttcaaccattcgtttcttcagcctaccaacaacccactcaacagatacatcactccagtcaaataagttgtaccaatacttgccaggaagtaattttcgtttcccctttctctctttgacatgagggagtttgttgtagttgagcccagttactctttcaaactcagatatcgaaaaccgaattggggaaccagagaatattacccagatttcattttccttgctaacaactagctgcctcgttagaagaaagtgaataagcttcccagaatacgcggctccctccgggatatcaaataattttccaaactgcgatttccgtagaatcttcatgtcgtcttcatctagagcgttggcgatgtcatcgattaaagataactcattgtaagactggactctttcaccgtttggttcagatccagcccgaaacaaccgacgaggaagagggtg

SEQ ID NO: 3564 - DNA, 957 bp, Arabidopsis thaliana
tgttagaaaaaaacataaattcgaataataatatccttcaatagttatactagtattaccagtattgcattatttattcatttgttatactagtattatcaggattgcataattctttcatcagttatactagtatgacccttatgccagcgaattaaaatatagtattactgaaggaaagtttagtgttacatagttgcacaacgcgaataaagtttacaaatcataaaatcaaatactatgggtgccaaataacaaccattgcagcgcctgcctcggcctccttttgttagagtcctttgacgttttggatgtctttctctggtggatagaaacctaagcacttttgttctacccttcttctttttccgaggcagatgtaataccttcaatgctttgatgtcatctgggatatcccactgtgatataaccggagcatcaccttggctacaccgttgtgtaaacgaaaccagctagggtagctagtccagtctctccgggtccttcgatccccatgaggcctgttgcatctcgtcaagcaaacctcatgaaagaatggaatctcaagcaaggccagctacatcccacttgatagtagcatgcttatggatcgacttggataactttcacaattaagggacgagttgtgacgatgaagagcagaaaaatttagtgatgaactaatttcataccagagatgctttttaaggtcaaaattggggccttgatttcgatttcccaatgagacaaaaaagaactaaatctagaacatagaacctaaacaaatctcaccaaatagcaattaagggactgtaaccgaaaaacaaaaacaagcaaaaagctcgacatcgggacttcactcggcggagagagagagagagagagagagagagagagagagagagagagagagagagagagagagagagagagagagagagagagagagagagagag

SEQ ID NO: 3565 - DNA, 584 bp, Arabidopsis thaliana columbia
aaaatctctattgctttatcttgcaccaaaggatgaccttcagctaaaccgcggacaagagagtctaaatttgaaggaacttcaccgaatgcagaaaaagggttatgtgacaagttagcaccatatttagctttggctagtaaagagagtacttctaagacgtcgatgaaagcgctgttgttcaggtcagttgcgtttaagagatcaatgagttcagaaacagcaaatcgacactgctcatttcctttaaatacatcactgacttgaaaatgcttgagtaattgatgaagagcatgtgaagcatttcttttaccttgcagtgttccctctctcagtactctggtcaaagcagaaacaacgtcatcgtttaatgcttcagctgcaacatttgggtctgaaagaaggttcgcaagagtggacatgggattctctgttgactcgatggggtttgtttttgctgactttatcaatggtttgatcacttcgacttctggaccggataatttctttgttgcagtttttttctttgttggattagatagagagcccaaggcatgcgctaactgcgttgcacagcgtgagtg

SEQ ID NO: 3566 - DNA, 621 bp, Arabidopsis thaliana
gaagaagaaataagagctaaagaggaagcctgtgcagatatccagaaagctctgaacgattggctcgctaaccgagtcatcgtaaaaaagaaaaacaggaagtggaaagtatgcatcgactttacggacctgaaaagcatgtcttaaagactgtttcccactcccgcatatcgattgactggtcgcattgttcttcatggacacattctctgggtacaactaaatacttaccgacaaaaaaaaaacggcgttcattacggactgaggcacttactgctataaagtaatgccctttggtttgaaaaatgacggagctacctaccaacgattggtgaacagaaagttcaccgaccagctcaggaacacgatggaagtttacatcgatgacatgttggtcaaattggcttacgaaaaggaccacatcccacgattaagagaatgctttaaaatcctaaacaaatttgaaatgaagctaaatcccgagaaatgctctttcgaggtcccatcaggagaattcctcggatacctggtaaccgaaagaggctttgaggccaatcgtaagcagattgccgccttcattgaaatgccatcaccaaaaaaggcacgagaggtccaaaggct

SEQ ID NO: 3567 - DNA, 859 bp, Arabidopsis thaliana
  unsure (1)..(859): unsure at all n locations
gagagaaaatggaccccaaaacacagtctgaccttgatctatccaccaaaatctgtcccctctacccaaaaccttaagggaacagtccagctagcattcccacatcatataatccattatcggcatttatggagtaagcttcaagctcaaatgaatacactttgggaagaagaaacaagaatctattgagcaatgtcacatcacttccgtattactactactagtttacctaaatggttgtgacccgtgagatattcttccccacacgaaaataaagtttacatatcttcaaggcagtgaaattaccaaactagtggttttgttctttgtcacaccacaaaacctttttcatataagaggaatttagcactaaacccttatcaaaccacatgatcaaattatagaaaaaaaatcactttttgggggttggtcttaataaagaaagattctgtctttaagcacaaatgaagatctaattattgattagctttttgattaaaaggtcaattatctaaagacaaaccttatcacagcctgggaccagttcctgtagcagcttcattcgtgcgtttatcttctcccttcttgcctataatcaagagttaatgattaattagcatattgccactaattaattaatacaaaccatgtctgtgagattgtgaattactctctctgctaagctatggttatcagtagcttgaccacgacgagctctgacatgaacatatggcaacttgtctgactccacggagctcttgttcttcttcgtcgagcttttgacctagaaattaaggaatanagaaattagggactaatctctcttgtttaattaacaagtttgattgtgtgacaattg

SEQ ID NO: 3568 - DNA, 1085 bp, Arabidopsis thaliana
tctctacatcctagtcgttgtggattatgtctctaaatgggtagaagctataactagtccgaagaacgattcagtagttgtcatgaaactcttcaagtctatcatcttccctcattttggagtgccacgcattgtcattagtgacggaggtaaccatttcattaacaagattcttgcaaaattgcttttacaatatggagttcagcatcgggttgctactccctaccacacacaaacgagcggccaagttgaagttttcaacaggcaaatcaaagagattcttgagaaaacaatgggtaaagcggaaaaagaatggtcctactagttagatgatgcactgtgggcttacatgacaactttcaaaactccgcttcggaccacactttttcatcttctatatggtaaaacttgtcatcttctagtggaattagagcactaagcagcttgggcagtcaagataatgaatttcgacatcaaatcagcgggagaaaggagacttattcagttgaatgagcttgatgaaatacgaattcatgcctatgacaactcgaagctctacaaggaacgcacaaaagcttaccacgacaagaagatcctcactcggacctttgagcctaatgaccaggtacttctttatgatcctagattgacaatatttcctggaaaattgtcttcccgttggtcagatctctacacagtccactcggttaggccatatggaacagtcattctcaaaaacaagaatgaaaaaccatttgctgtgaatggacagagagtcaaacactactcggctgaaggccagattccagtagaaaagcctttggatcttcaggacccacctgttgattaaacaactgcagaatcaagctattgactataaactagcgcttagtgggaggcaacccactagtcagtacttctcctttttattcatttcattcatttgattcttaacttacgatttttgattttataggactttttgttcagataaaaaaaaaacaaacgcaatggtgtcgatcgacaccctcattttccaggtaagtcgttttaactaaaacttcatcttcttcattaaatttttt

SEQ ID NO: 3569 - DNA, 891 bp, Arabidopsis thaliana
tgaattctgatcaaaactcaagaaatctgcgagggaagaaatcttttggccgccattgaaaccaatagcacacacgatgactgtgagagaagaagccgcatagcctaaatatgagagaagaagccgcatagactaaattgaaatcactctaattgatcctcgatacgactgaagaatgaagaaaccacacacaatcaaatccactgaaatcaaacctcatcgatacttaaagagcttcaatttcagactgattctagggttggaacaatcgctctcccttcgattcgatttcaatttcaatccacattttaagtgggtttcgctgcatataaatttttcttttttttatttttcttgagctgttctacttaaacgacgctttttttctggtccgaattgggccggcctgctaacaaccgcacgttacaaatcgaagctcatatctgctttacaaagcccaacgttttaacggaccggacgcggtcatttaacttaagtagtatttgtgaaagtatcacgtatgttcagaaataaagtactgtatttgtgttatttggtttggaagtacagttcatgtataaatttatggttgtttgtaacgaggtcgtaacaataatgattaaggggtttagggagaacggagtaacttctttattaatgacgaacggaaagatagtaattaacagaacggaaaaccgtaagtacagaacggagaaccgaaagtacaggtcggaaaacagatattgatggtcggaaaaccagaaaatacagaacggaaaaccagaaagtaagagataaagagctaggcagcaattctctcttaaattctctgagtggtgacttaggttctggaccctcttcttagtagtgtccctcttatttataggcaag

SEQ ID NO: 3570 - DNA, 1228 bp, Arabidopsis thaliana
atatcacgttctcaagtgtaattaataggattaacacgaatttcttacccagaacacagattatttccccttgaatccttcaaactttgtaaaacagcaactgaaaacttcagatacttcaccgtaacacaatttcgattttcgtttttttcccagaattctaatctcaattatgtaaatatcttacaatataatctctattataataggtaatcatgagttttagttttgtcgaaactttttagcattaaaaacttctgaacccaaccaattttaaatttttttaattccaatctcaagtgtcaaattcgccgaaacccagaaaacatttaatgcatttctcgtcgatgaacagtgtacgtacaaacccggttctcttggattccaacgacgcggtccgtacgtacaaaccggattcagtttcgtcaagggcattttggtcagtttttggctgaatggctaagaaatgaaaggcccaacccacaatgtcaaaatctgaaatgaaaagtgggtcaacggctactgtgcgcaatttacctatttatcaatcgctcttctcgtcttcttcttcctattgtccccatcgtctgccgactagatctgcttcgcttcctcacttccgttcaaggatcatcatctcaaatctccatctcgctcaaagaaaccctaactcttacgcaagtcagtttcttcctcttctctaatcctcactttccatttcttcgttacttaacatttcgtttcgttgcttgaagctcgtcttcacggtttgtttgatggataaccttcttgttgttcttttttctgttacagttttacgtatgcttcggattgtgaaattgctgcaatttcgtttccttttgttacgtagaaactagagagttctgatttcgagatctgatatttcgaggtcttgatttagtccaagcttttacgatgatgtgaaatgtcttatggtgatctcatttctgtgaaaatattgtgtagatggttgttgtatagataactggagagattcatgaatcatgtagattatcttgttgagttttttgcagattcttctggatattagtgtgttaatggagggagttggaggtgacgctgcttcaatggcatcatcacctgtacaacaacgagcgaatgaggcgtggaggctgtatcagtattacttagacaagactaagcctcacgcggttaataggtggatcgggactcttgtgaggggatc

SEQ ID NO: 3571 - DNA, 1413 bp, Arabidopsis thaliana
ggtattgagccaaggattgagcattatggctgtctaatagatcttttaggcagggcaggtcggtttgatgaagctttagaagttatgtccacgatgaagatgaaagcggatgaggctatttggggatcactgcttaatgcttgtaagatacatggccatctggatttggctgaagttgctgtaaaaaacctggttgctttaaatcctaataatggaggttatgtcgctatgatggcaaatttatatggagagatgggtaattgggaagaggcacgtagagctagaaagatgatcaagcaccaaaatgcttataaaccaccaggctggagtcggattgagatcgataacgaggtccatcagttctactctcttgacaaatcacatccggagactgaggagatatacatgatacttgacagtctgatctctttctgacacttttggaaggtcctagtttctctatatgacttgacacagctgcactctgctttataacagcgagcttcgtgcgaaattgttggtttgcaatatgtatggcttcagagaaaagcaggcattttcttcattgatctacacaggttacatactttgtttctgatacacaaatgctggtacggtaattttgttgtactgtaagaagaggaactagtacgtgataagccagcaaacaacatgttgcttgattagaaagtaagtcttgccattcctttctaacatgctatcacgtggtttctttctgtgattccagcaaaaaacttttagtttacaggtccatggacaatcaaacattcgagaagaggaagtctcttacgccaagcattagtactatttaattatgatcttttagttttctaacactttcctcatgtatctttattgagaatgatcaataaacaaggcacgcaatatagagactttgttacagaatatattcgcgtgtagaacgagattacatagattctacagacattaaacacgggtcttgattcaaccatagttcttttgtgactaagcagaactgactttgccagtttgatcctcttcgaacgcaatatcaacaacccttggacctttgactttgtcttgggaaagcttactgatggtaatggtgaggcaccgttttcaagtttggccttgacagagtccagatccacattatcaagcctctggtgatgacctttgttgtagttttcttctctatgaaggttaaggtgcaagtctctggtgaatatatatatgcgtgtaatgaagtgaatagtgacacagattcttgacagagaaattgagaatggtctacacataagcttggtttgagaattcaagggtcttctgtactgttccagttccagacacttcatgtcaatctatagtgtatgtagaagcccaatacaaaatgggccgatgattctagtt

SEQ ID NO: 3572 - DNA, 576 bp, Arabidopsis thaliana
gtgcatatgtaatcgccagtcctgctaagcctttaagaagcaaaataccgagaaaggcgtgggagatttttagttgtgcatctgcaccaaaacaaaatcaataataaaaaggggtggtgactcacttggattaatgactccttcaggggcagaaactaagataacaagtgaagaagcgaatgcgaaagtggataaaagttcaaggcggaacagagccattccattgcaccggtcgaatggaacttcagccgtgaataacaatcactaagtctcatgatgtcaccacggaaccttggttcttgatcaaaactcctgatagttgttatccctgaaagtgtttcagaaaaatgatgtaccacaggagatctgcttattccagctaatcttgcgagttctcgagctgcggatatgtaatattgctgcgtccatagattaaattaacaagtgtgagaaccacaaaagcattagtatgtttcatactattaagtaagatgctaaaagttaatttgtgacttatgtattatgaaaattacccggtacaggcacatgcagcgacgacagggatgaagcaataag

SEQ ID NO: 3573 - DNA, 786 bp, Arabidopsis thaliana
gaggataaagaatagttgtttctctggtggatcatccgagcaagcacggcaggtttaactcttctctcgagtctttgtacttttgaagggaatttcagaaccgcagttttcactgatgccttactgaaacagactaaagatttctggagagaagctcggatattggcgaatcttcaccatcctaacgtagtggccttttatggagttgtaccagatggacctggtggaacaatggcaacagtgactgagtatatggtgaacggatctttgaggcatgtcttgcagagaaaagacaggtacacaataatctgtcaaatctttgtatgaccttttgtgatatgacattctgagtttactgatggaaaaactttgggcacagattacttgataggcgcaaaaaactgatgataactcttgattctgcatttggcatggagtatctacatatgaaaaatattgttcattttgatcttaaatgcgataacttgcttgtaaacttgagggatccacaacgacccatttgcaaggtaacacttttccccaaaatcaggtaatttcaagccaagttgtatgagtaaagtgctgtatttattagtctcactgttgaatttgcaggttggagatttcggattgtcgagaataaaacgaaacacgcttgtctctggtggagtaagaggaacccttccatggatggcccagagctgctaaacggaagcagcaatcgggtctcagagaaagtatgttgttgagtcaaaatcaaacattgaaaatgttaagagtctttgt

SEQ ID NO: 3574 - DNA, 1011 bp, Arabidopsis thaliana
ccaaataaatgcttagctacatcattagtctattagaatcggttaaaaagtctccactaaggcactaaccaatcatttaattattttggtattctattactatccttctgaagtatataattagtcgagtgaaaacgttatcaaccaaatcatactaaaaatcacatactaaactcaccttcaccttcacatactaaaaaaaggattatggaaccaaaactaaaagacttgagaaactataagataagaaacttctacatagtttcctctttgcttaccattaaaatacaaatgattgaataggctatactatagctgctatagtaacaatgtactgtcggtggagaagataacgtggcatgagtacttcacagctggaccgtaagattacgactacctttattaaattcctcatcggatccaacggttaccgtacaccaccactttctctgctgtcccactcttcccagctgtccttattcccttttttttattttatttctttttctaaaagatccctaacaaattattttggtaggaaaatatttgctgccttacatcaatcaattctgtattaagaaaacaaaaatgttcaaatacatttcaagattaacacaatcacgattaactttaaattaacgcggtataataggctgtccttttttcggtttttgcttgtcttaagagaaacgaatcatttagattttataataatcctaaaagaaacgaatcatataaaatgtatgggagaaagaaaaaaataatttcattaaaaataataataatagtcacggttaatgtacaagcttggctttagtattgtatccgtaataagaaagataccatctaacgaacttcttcaacccggtttccaaatcggttgtcggtttatacccgaattcatttcgggctgagctaatattggcatgtgtgaacggtacgtcgccgtttcctggcatctccacgaagttcctcttcgctttcacctttaaatgcttctccaatatatcc

SEQ ID NO: 3575 - DNA, 450 bp, Arabidopsis thaliana columbia
gtttaaaagatttatatatggaccataatatgctttgaaaaaagctgatgtgacgtaacgggaatcaaaatcctttccacatcattttcttcccctataaaacaaccgtcactcactccttctctactataacacacactcgcttgttcacgcacaacaaaaagcaagaatatataccactttgtgaacttcagagatcctatagcaatggcgaacctaccgattcttttggattactggccaagtatgttcgggatgagggctagagttgcgttgcgagagaaaggtgttgagtttgaatacagagaggaagatttctcgaacaagagccctttactcctccagagtaatcccattcacaagaaaatcccggttctggtccacaacggtaaactggtatgtgaatctcttaacgttgtccagtacgtcgacgaggcttggcccgagaag

SEQ ID NO: 3576 - DNA, 748 bp, Arabidopsis thaliana
ctggttcaagtagctactgactcttcaatcaaatgcatttcgcatttttcgtgctccatgtcattctttgtgccaccccaattggccgaattttgaatagagaagaaccatctatctttacttactcgacttgtactggcaattccaaaactgatcctgcaaactcttaatctaaccactgtggtttcaatcctgatttaggcttctacagaccaaagtgccgtggatttgagattaccaagtcaattttcaaatcttgcaattgctgctgtaaacatcttggggattattggagtgatgggacaggttgcttggcaggtccttatcgtcttcatccctgtcatcgctgcatgcacctggtatcgggtattcttcataacactgacaaacttagattaaagcttagcttcatacctttgtcttgtatagctcatggaaatcacgataagataatctaggagacttaatgcaatcattgatactacacatactaactttcttgaagttctcactttagtcttgatattgatttaatgtatgtatgcagcaatattacatatctgcggctcgggaactagcaagattatctggaataagcagatcgcctttggtgcagcatttttctgaaacactttcagggataacaactataaggagctttgatcaagaaccaagattccgcactgatatcatgagacttaacgattgttattctcggctgaggttcatgccatttctgcaatggagt

SEQ ID NO: 3577 - DNA, 573 bp, Arabidopsis thaliana
agtctcacagaaggagcatccaaaatcttcatatcgtaaaactctctgttcgggaaaatactaatcgaaggatgcattcggtactgcatgttcagcaactgtttattatgtcccaacaacaccaatctttcgaacaaactcctcccaagatcagcctctgaagcaatctgcacataacttattaagtaagcaaagagaagagagtgaatatgtgtataattagttaatataagagaaccaacattgctttttatcattgcaggcaattgcttctcatcaccgatcaaaatcgcatgttgaagtcctcgaagctgcaatggtatcgctgactcgcattcttttaactgagcagcttcatcaatcacaagaagctgtattggactactcatgtgtaacctagcagagcttgatgctgtgcaaaacaacagatatgcattatctaagcagagtttttgaagttcgaacttggatataaaatccggaagtttgatactcatagaaatcgatgtcaacatctccaaacaatcttgcgttcttgaatcattttcatcaccagtatctttaagcttatat

SEQ ID NO: 3578 - DNA, 612 bp, Arabidopsis thaliana columbia
  unsure (1)..(612): unsure at all n locations
nnnnnnnnnnnnnnnnnnnnnnctaaaggcgtcatttcgccgccgttgatgccgcaatcctgaccttctgtgttcatcagcacaaagcggctggcgttccacagcttgttacagaagttacggtaaccttccagacgcttcatatcccagttgatgtcacgaccggtagacgccagcgccgccagggtgaagcgcaggcgtcagtaccgtgcggctcaataccgttcgggaactgcttctcggtgcgcttacggattttgtccgccagctgcggctgcatcatattgccggtacgtttttccagcagttctggcagcgaaataccgtcaaccatatccagtgggtcgataacgttacccttggatttggacatcttctggccttcgtcatcacgaatcaggccggtcatgtaaacggtgtggaacggcacctgcggtttgccattttcatctttgatgaagtgcatggtcatcatgatcatgcgggcaatccagaagaaaatgatgtcgaaaccagatacatcacgctggttgggtggactgacgcaggcgtcggtattttcgggccaccaagggtagagaaggtcacagcgcagaagagaccaggtacgag

SEQ ID NO: 3579 - DNA, 555 bp, Arabidopsis thaliana
cccgccaccattctagactattaaagaagaccgagaaaatgcaagcgggataagaagaagagcattagggtatgtaacttgacggacaaacaacttaaaatgacttaccaaatcattgcagctgatgggattccgtattggaagaactgcttgatagaagacacaaaatctcgggatacaaatccgcgagtcttctcgcaagagctggagaatctcacataacatgagagtatcacagcgtaaaaccagaaagacacacttgtagccatggcaggtccattacatcccagaccaaacaagaaaaccaaagtccaacaaaccaaaacgtggaacaaaagggtggtcacggcagtgaagagcagaggaataacaacccttgtgttagcagaaaccgggacagtggtatgacaatcgcttggccaaataaagccggtataagccaaaaggcgtaggagccagcgattcttgaaatttcagggtcttgtccgagagaaatcaagatcttttcgatgtaaagccagagaattgatatgaggaacaaattggtatgttgga

SEQ ID NO: 3580 - DNA, 845 bp, Arabidopsis thaliana
caatattaatcattttcactcggaattaataacaattctctgttaattatggaatatgaatgattcaagagtttgattaatcacaccaattgatattaatatgtttgttattagaaagtatgtactagaagaagctgtctaatacaatactaataaatgaaaaaacgtcatgaagggttgacttctggtatatagatctaggtagagatcagattttgaagatatggattaaaagtagatacaacagaacagaaactagaaaagaagaaaaattatttacatgtcatatttttttcatcattgaattataaatttgttgattgattttattgttatggaatttggcagagaaaacgcagaagtgtcaggtaatgggtatagagtgaaccgtcaaaatgttattggttagctaaaaacattataataatgtaaagtggatcgatgtgtaaaatcttttgtggagtaaactaaaaagattaacaaccaccaaacttataacctctctctttttttttccgataaatatatatatccgcagccccaccatcgtcttcttcactgcctctcttctctcttctcttctgtctctctcttgttagttcactccacataataaacaccaaagatttcattctcttctccataatttcgaagtttcttgaattgggtttgtttcttgatttgtttcttgaattgggttttggtcttcttttcttactatatttggatatgatgatgggtcaagatgaggttgggagtgatcagacgcaaatcataaaagggaaacgtacgaagcgacaaagatcgtcttcgacgtttgtggtgacggcggcgacaacagtgac

SEQ ID NO: 3581 - DNA, 810 bp, Arabidopsis thaliana
acagtccggcaaaccgcaatatggaacaaaagggtggtcatggcagagtatagcagggaaataaccaacccttgtgctagcagaaaccgagtcagtggtaagaaaatagcatgggcaaacaaagccggtacgagccacaatgagtaggagccagcgactctagagatgtcaggctcttgcccgagagtgatcaagagcttttcgatgtaaatccatagaattgatatgatgaaacaaattggtatgttggaagccattgcagagtatgtataggttccgattttttcgtattgttctgctccataggcttggccacaaagagtttccaatgcaccaactaacccaaactacacaaaaaagaatgcagcaatatttcaatattggaaagttaattgagttcttgaaatgaagaggagagagtaatagcataattaccattatgctgaagccggaaacgtttgtgaaagacgtggcaagcgcgacaccggcgagctccaactcagccgatgtggccggcgaccatgactgagatgacaggcaataagtactgagctatggttacggtggccataggagcggccaagcggctcactttcttcagctcgacggtgacctgaccactttgccatgtggatttacaagagactaactgctcgtctctcggaagaaatggctcttccattgtcgtcttcttaatcttgattgatttgcctctgattttttagatcatatccaatcttgtactgatggacgaaaccaatgtaatttattgtcgatgaagacttttcgtcaatatctaaatatatatat

SEQ ID NO: 3582 - DNA, 701 bp, Arabidopsis thaliana
tttcgatgtaaagccagagaattgatatgaggaaacaaattggtatgttggaagcaatagcagagtatgcgtaagttccgattttttcatattgtttggctccataagcttggccacaaagagtttcaagtgcacccactaatccacactgcacaaaaataattgaagtgttttcaatacttgagagagtccatttgattcttgagttgaaaaggttagagtcatagcataattaccataatgctaaaaccggtgacgtttgtgaaggagtttgcaagagcgacaccggagagctggagctcgccgttgtggccagcgaccatgaccgagatgacaggcaataagtactgagcaatggtcacagtggccataggagcggccaagcggctcactctctttagctcgacggttaatggatttgtatgccatgtgacttgagaagggactagaagctcgtctctcagaagaaatggctcctccattgtttaacgttgaaggcctttccctttgattttaagatgatatttatcctatctttatagaccgactaagtcaataaacaacaaaggcaacttgaactacaaacgtggtgacgaagtagatatgatgagtaaagaagcaaattcgttttgacttgtttgaaaatatagatactagtggcacacgaatatactatattataaaaatagatatatagaata

SEQ ID NO: 3583 - DNA, 534 bp, Arabidopsis thaliana
gtccttggtgtagtacagctcgaaagttggtataccattcacatacttgagaattcttcttacagctgacaagtgcgacatcttggggttgacttgatactgagcacacacattcactgcatgacagatatctggtctactcacagtcaagtactgaagactctcgatcatcccctgatacatactaacatttacatctcctcctctctcatctgcagtaagtcttgtcgagatcttcatcggtgttgtgacaatctcttgtgcatccagtttgaacttctcaatcattgttcttgcgtatatattctgcgacatagatatgccctcatcagtttgcttaatctgtatgccctgcatgtacctcagaactccgtacatacttacttcaaactctctggtaataagttcaacaaaagctttgtacaagtgtttgatttgtcgagccatacaacacattttctccggaagctgctttaacagtagacaactggtttcaatctatgagccgagtatggatgtcctggaacaccgaat

SEQ ID NO: 3584 - DNA, 1923 bp, Arabidopsis thaliana
cctacataagcaaattttaagtattgataaaacagggatttatacaaaaaattataacacaccgactatgctgtaagaaatttttgcagctttattttgacagtatatagccgtaaaacaattgagcaatgagagttacaaatagtttgagatagctctcagaaacaccattctttaagccaatccattttcacttgagattagtctcttccttgccttcttggcctgcaaatcatagattccagttactttagagaattaaaaaaaaaaaagaatgtattgtaataagctctaacctgttccttccaattcatggaagccgtgacaatagccagtataatggcttgcacagcggatccaaccactacaccacaccatagtccttttccgttcaactcacaactgaaagctaaatatattccaaccggagctcctacgagataataagctactacgttgttcaaagctccaatgtgttgccaaccacatcccctggcaaccccattaagaactgcggtaaatccgtcaagaacaaaggagagacagagcaaaggagatagatcagccacatagtccacaacttctttactgttgctgaatgcgtacgctatgatgttcctgaaggcgaagagaagtatgctaaagaaagatgactctacaagccagagacaaagccctgccaatactgaaaccctagcaacttgaggaatcccagctcccaatttgtttgacacgcgtgtgctgcaagaaaccaaatgacttatattgtttaggaagaagatgttgaatatggttggttaaaaattagagttcatacctcacagcggccgcgactccaactggaatcacatagtgcaaagttgctgttgtaagacttgcatgaaagaaataggattcgttagcttttttagtatagatcgcactagtaaagataaaaagaagtccttctatatgaaacttaccaaattgaaagaacagaggtctcgagttttgggttttggagaagacctgaacagagtataagtagctcaaatagccaccattctaggctgtaaaaggcagaccgagaaaatgcaagtgagataagaagaagcattggcgtatgtaacttgaccaacaagaaacttttaatagacttaccaaaccattgccgctgatgggactccataacggaagaactgcttgacagaagacaagaaatcactggatacaaatacgcgagtcttgtcgcaagagctggagtacctcacataacatgagagaatcacaacatagaaccagaaagacacactaatagccatggcagctccattgcttcccagaccaaacgcgtaaacaaaagcccagcaaacagggatgtggaacaaaagagtggtcagggtacagtagagcagtggaagaaccaacccttgtgctagcagaaaccgagtcagtgggatgaaaaacgcatgggcgaacaaagccggtatgagccacaaggcataggagccagcgactctagagatgtcagggtcttgaccgagagagattaagagcttttcgatgtaaatccagagaactgatatgaggacacatatagggatgttagaggcagttgcagagtatgtgtaggttccgattttttcgtattgtttggctccataagcttggccacaaagagtttctagtgcacccgctaacccaaactgcacaaagaattaatatagtgttatcaagatttgagaggcaacttgatcttgaacttaagaggagagagtagttatagcatatcattaccaaaatactgaacccggaaacgtttgtgaaggaggttgcaagagcgacgccggagagctggagctcaccattgtggccagcgaccatgactgaaatgacaggcaataagtactgagcaatggtcacggcggccataggagcggccaa

SEQ ID NO: 3585 - DNA, 414 bp, Arabidopsis thaliana columbia
ttcgattcatcttcttccagcttcgaattccacgcaccaaaggcaaagacacaaagccacggcttttctctcttgtcgttttccacatacattcgtcttttcataggatcaatctaatatcacgatctatactttctctgtttacattctcgtttccgaggagaaaagtctcgatcttctggatctggggtttggtttggtttggggttgactcggttttgactcgggacaagtcgtctcgtgagatggatgtctctcgtttattagtatctctttgagagtctgtctttctgggttcaatagattcttatagtttcgcttagaaacacgcacaaaaagatgtcgttgaagcatcatcacagaggattagagctctctgcttcgaagagttttgtctcaaagaaatggacttta

SEQ ID NO: 3586 - DNA, 542 bp, Arabidopsis thaliana
tgacaaggcaagaaaagtcatttcgattcagaagcagttatgacctgaatatgttggctagtttaatactttcgctgacaccaacaattttttgttagaacctgaaacaaatctctttagtactacactctctcttactagttggtcacctgtaagagctttgttggtggcgaacttattcattttctaaagaaccactcttatgtatttattttaggcctgaccacattttgcaagacttgagagccaaattatttcctctaaaacgtaaaaaggagagagcgcctgaagttgtgtcctccatctcattacctgcaaagaggaaggagagtgctatctcgtctttggtggtaagcacacccagggtttcagcacaagctggtacaacaggaaaaagaacaaaagctgctacgagaaaagatgtaagaggtagtggttcattcactaagagaacagtgaagaaggaagaagaatttggagatgatcatgtagagagcgcacgtcgcctgaaacacttaaaaagtttactcagaataaaagac

SEQ ID NO: 3587 - DNA, 601 bp, Arabidopsis thaliana
tgagtccttccctctcaaaggaacagctctttagcatcaatgacttctctccaagctgggcttatgtgggttgtgaagtggtggtaagcactgttgatcaatttatcttctcggggagtcataagataggtttgtgcttatttgtttttgcaaatttttaggtttttgtcactggaaaattcttaaagactcgggaggagactgaaattggcgagtggtcttgcatgtttgggcaaacagaagttccagcagatgttatatctaatggtattctccaatgtgttgctcctatgcatgaggctggaagagttcccttttatgtaacatgttccaacagattggcatgcagtgaagtgcgtgaattcgagtataaggttgccgagtctcaagtttttgatagagaagcagatgatgagtctactattgacattcttgaggcaagatttgttaaactgttgtgctcgaaatctgaaaatacaagccctgtttctgggaatgacagtgatttgtcacaattgagcgagaagattagttactacttttcgagaacgatgaccagttggatcagatgctcatgaatgaaatctcccaagaaaatatg

SEQ ID NO: 3588 - DNA, 559 bp, Arabidopsis thaliana
cacgttttgattgacggagatgagctttaaactctttaagaggattctattgaatttaaacgatttgatcacaggttaatggcgtcgtccagtgtgtttcttcatcgcccgcgtatcgcatttgcttctagaacgaatcagactgtaggaaaatacggtaaaggccgtgttagtttcatgggcattgggacacgtcgtcttccggtggttttatccatgacggcgatggcggattccggtgaggaggccgtgaaatctgttttgcctggaaatggcatatccatcatggtaaacctgatcatctgatgatttctcttagactcaaagttgtgagatttgactttgcattaccatttaagtttgaaatgtagaaatgtcaaagcttgttccttttgaaatggggatttttatgttggatttagctatattcattatctcttattctacaggtgaatggatgtagtggcaaaatggggaaagctgtaattaaagcagcagactctgcaggagtaaatattgtcccatatcgtttggatctgctggtgaggatggcagagag

SEQ ID NO: 3589 - DNA, 792 bp, Arabidopsis thaliana
cccgcaatataattgtaatatcctaacacgtttattcttgacacataatttcacttactcctgttctttgttggttaaggcctccactagctgcaataagcaaatatccattagatgactgctcctggacagcagctgcataccccaaaacaagattgaaacaaatgtgagaaggaaaattcatctacacaacaaagtttcaatgataaaagaacaagaaatattggaagcctaattcacttgtacatcaacaaattcccaatttatattgccagaaagcaaaatgtgcttttattaaccaaactaaaaaagaggctaagtcaaatatgctgttagatcaataaagccacagacttttctttctagtatccaagatcaatttggaaaaaggacaaaactttcactttcttataaccccttattcaatgaggcaagaacaacacatgtaagaagatctgacttacgaaggaagttccttcctctctcactgcatccatagaaaaacttcgaatattttgacttccatacatcaattggttctcgacggctcatatcctgaagaataacatccaatttcactacttggttacaaaattgagcagaagaagtaacaaacgaaacactaagtaagctaaaaggtaccagtaagctccgtttgcttaattgctgagaataccactcaaggtgcgagacaacgtgaccagtgaaaagtgagatgactcctaaagagaaaagccatgaaaccacaaacccatggtccacattacggttcttttgggctgagcagagaaa

SEQ ID NO: 3590 - DNA, 384 bp, Arabidopsis thaliana
ggagctatctcagcaagataactgtctacaagctttgcaactttaaacatggcggtttgtgaaggcgaatgtggactatcgcattcaaacacagactcttcatcctcactatcatctcctccttgctgtgagaaattcactaagattctgtgaaccgtgtcaatgtcgaacaaagtgtctcctgcatgacgaaaagacgggatcaagagatcgtcaagagtcgccatatcgagctgagaacctaacctcctctcaagatcaagcctgcaggaaactgaagtatcaagaatcactgctcttctcagtaacccgaataggaaactgatcggaaccacgaggttttcgactggcaaaagcgtaacaattgtctcaacaatggtttgt

SEQ ID NO: 3591 - DNA, 1175 bp, Arabidopsis thaliana
gatctctccatgccaaacatcttaagaagcctgaccaatgccgagcggtttacgcatgctctcacctcttttgggtcgatgatccagatggtattaaagatggagaaaggtaagttcttttccgctttcattactatcacatttttctcttattttctgtttcgttgtcattagccgagagaaaacttaaccatgggtaagtcattgatcttcttatctccagaactaatcgattctcaatgttattctgcagagttcttctctgtttaagacgtgcactgaggatagcgaacgcagctcaacaaatggctagtgcaaccagaggtagcagcggaccagtcacgctgtttgttgaaatcttgaacaagtcagtatacttaacaacaaacaaacaaaaacatctgacacacagattcatacacaaagcagcatctcaatactaaaaatgtttttttcatatacaacaggtacatttacttctttgagaaagggaatccacatatcactccatctgatatacagagcctcatagaattgatcaacaatgagatgcaaagcgacaacggtaacacgacaatccactcagatcccttctttacaagtacattgcgttacattaagttcataaaacagcaaggtggtttgatgggtgagaaatatgaccctatcaagctgtgacttaaatccgagacacaagcctcatcaaatcccgagaggaattctctgtattttccaaagaaatgttggaaactctgaaaaggaagtgtacactacacatgtttgttttcttttcggtcttattacaaaatggagaaaacctttgtaattgttattttctttgttccttatactcacctcacctgtgtgtatagaatcctcgtttctgtaaaccattctttgaaactatgcctcaattcaacgatgtctctaatcttattgtatatagagatctatctcaagatgttcttcgttgtctgaatctaattacataccaatacaagaccataagatcaacggaagcttaaaaaaagtcactaaaaaattaattaagatttctgttaaagaaaatacaaaatggaccccaacagcaaaaacaaagacaacatagtattaagagattagtctacatagcaaaagtacaacaacaacaacaacacacgatattatttcaaggg

SEQ ID NO: 3592 - DNA, 365 bp, Arabidopsis thaliana
ccgacgacaaccgatggggatgagctcgaattaaaaagggaatggagggtacctggctgcgcggtgaggtgagttgtcgcgcccgtgtccatgtaccaacttgcatctgtaggatctggcatagttgtagtcccaaaagctgcagcaaggtttgcaggaatttgcgtcaattgattagtcgaaccaaccatagctgcttgtggagaagaaccaaggagccctgctgctgggttcgtggctgtcaagtatgccatcggtggtctttgcatccagttttgttgtggccagtgtggatatggggttggtgttgagagccatggttgttgtgtctgccaattgcgaggattccattgccagttttggcg

SEQ ID NO: 3593 - DNA, 859 bp, Arabidopsis thaliana columbia
catctctcaaaacgtgggcattaaacgcaccacacagtcttccccaacctagtcaacacacttactatccaaaggaaccaagccgagaaaactgtacaaatctatgtgttggtgccaatcaaattgcgaatcaagatcccactaagaagaatgagatcgttacatgtgcaaaagaaaacacaagccccgtaccggtacttgaactatatgttgaaccgcatgctggactaaagaaaggtgagtcctatgattctttaaaataaaatgaaccaacatgttatagatgtcataagaagggaaattttgctgcaacttgctctaaaagacaagtagtagattccatatcactagaggtgaaattgaatgcatctagctccaatgattgtctcgtaaattcaagtttagaaattttcaattctagattaatgcacttgtcttttccaaaggttaataatgcgggtatataccataacatggatgacacatctaaagaagtaggccacaaagcaataatttcgaaagaagttgagaattgaataagtcttgaggagcaactttcggaaacaacatcatcacaaggttgccgaaacaagatgtatctattagctaagttttagatataggtttttgaatctttttgttatttctagagtctttttaaagtcttttcaagtattctatggattgggacaagaatggagataagaagacattttgcagcaaaagctgaagaaaacaagccaaaggacgaattcactttcagatcaagtcgagagtgtcgatcggcagccttttggtatcgaccgacaccagttgtggcccagaaaagtctatgacggtttagagttcgaagatatgg

SEQ ID NO: 3594 - DNA, 1204 bp, Arabidopsis thaliana
gttcggttgatgctctaacaagtattgccccacattcgccggtttgccttgagcctgtttgaaatcgtccttgcgtttattcttcccattcttaggatagtagaccgcctctatttctccagacttgtactttccgaggaggatgttcagaagatgtttgcactcttccgtggaatgtcctccgaactgatgaaaacgaaagtatgaattcttcgagttctttggtttccctggctgttgaggttgatcgtccgagtctattgcgccaaaaaccattcctcgtttattcgcttgtgggtcatagtgttgacgcggctccttgtagacctcccgtgctttttccttggctttgggtggttgggacttccctgccagcttggcgtcttcctcttcaaggaaggcgtatcgtgatgctgtatgtagagcgtcatcaagatctagcggttctctaatcgccaaatatttcctcagttgggacccttggaacagtcacttcctgaaagcggtcatcgcagcttcatccgtgatggtgactttggagagtatttccttgaatcaacctagataggcgttcaatggttcgccgttttcttgattcatactccaaaggtcagagctagaagctcctggtggaatgaacactcggtattgctttaagcaagcagttgacaattgggtgaagttgtcaatcgagttcgcctcaaatctggagaagcaggttaaagcgtttccaacgaggcctttggcgaagagctggcaacaaccgacatctctcttctcgtccgagaagtgagctttggcgactgtgatcatgaaggaggtcatgtattgcttgggatcgctttcgccctcgtaaattggaattcagagcttcacttgaggaatccgtgtgtgtgtaaccgattagtgaaaggagtcttttgggtttcttcgatcattcgctcgatttccggggccgaactgacacccttatggacttgggatccgatctctctgagctttaggtagatatcgtctatctgtccatcatgatctaaagttgggggcctggagatatgaccagatgccattgggtgagacataggcggtctgccgtcttggttggcgggatgaagcgaccctgggaacctggagttgaccctgttggattgtgcatccgtgaggtcgaagctaagaccgcgtggttgaatcattcttggcggtg

SEQ ID NO: 3595 - DNA, 647 bp, Arabidopsis thaliana columbia
cttcttctgcaacaggttgtttccttcgccttttgcagtagctttttggaaggaaaagttactatttttgctgtaagagtactaaatcgtgttttaagggaaggttttgcttacctgagtttgatggaactcttccagcaaatggagattgagaaagtgcgacaatccctcctgaaccgtccttatctagcatagggagctggactggtgagtatccgaacataatcgggagatttccagcattagcattaggctgcaatagacttgtagctgctgcgtgttgtccagactcttttgtcggtaaagagtaaggcatactagtgacgacattttgcggatgaactgtgaaaggtacggtgtaactcatgttgcgcattgtaaactcttcagtgccagatccaccatggttgctcctcctttgaccagttaagttgtccacaatgtttgtatcagtaggaggacgaaccacctcctttgcgtggttggaagaagaaccaccacctacttcagactctgctacatcttcgttttcagctgttgatccttcatctgtcgcagttgaaacatgggatgcttatgtcttcttctcatgcatatcaacatgagacgagtcattctctttcatcttatcgatcattcatccccgg

SEQ ID NO: 3596 - DNA, 1259 bp, Arabidopsis thaliana
caagattctgccaagtataaaatacctaagatcatgtactaggtggcgttccggacatacatgcattaaaattaaactcaactagaaagaatagtgtaaacgatcaaaaaagccatagaaactgccaacctagacttttgatctaaaaatccccatgaattcctctttgaaaccccctcaaacccaactagagttctactcgctcatggcaaaggagcaaatcaaatgttgggttgagtaaaccataacaaaaagatgaataaaacttaaaaagggtttagagattagttctttgaatgtagaacacaagaggcaaagctccaccttatagagtcttatacaaaaagaaagagaaagagaaagagatggtgatcttcaatcttcaataggtgtggcgacgagttggcagctctcggcaacggctagggttcgcttgtgatgaaggcacacctagggttagggcttagaataagtatttatacttgagggccaagaattaggtttaggggtaagaacgtcattccgctagataagtaagtgatcgggccgagtcatgggcttcagggaaggagcctaatgacagtggcacaaagagggaaggacttgggcgtgacctaatggttggtggtgagctactcggagctgctaggattcaagtctccttggccgcatgctttttggacttattatttccaaacggccggttcttgacatatcttcactcttcaggttatatctttcaaacggcttcatggattgcttctattcgacttcgatgttaattttgactcttctagctttccattcataccaaaatatcttctagctttccattataaattactggaatgatcgccttttgatacttttagcttcaaaactctgaaaaccttcttggcacctagaatacgtgtttctcctctaattggctctagaatggcaccaaatgctctctgaaacataagaaaacaatagataaaacgggctaaaaagccgtgttatcaggaatcatatgcctctgtggcgtctaaagatgagacctcttcgtggcacaggtggctcagtcatatgagtcgaaaatgaatggaaattttggttaaaaaaggttgtctacagagagaagctataagggaattgatgttctgtgaagactgtgtatatggtaagaaccatagagttagttttgcaccagctcaacatgttaccaaggagaagttaacgtacgttcacttagactggtggggttcagcctctttagg

SEQ ID NO: 3597 - DNA, 1367 bp, Arabidopsis thaliana
caactgtgaaccagtagcctgggactgtactgcaaagggcgataagagtctgagccctagcaatcctgaaaacctcatgggtggcgttcatggtggctgcctttgggatccatccgatggccgagaaaatatccttctggaacaagttttggctgtagaaggcaatgtcaagcaaaaaccaagtggaggtagttccaaggagatgaagtccatggcgtctaaggaattccttggagaacaagccatagttttttttggggtccttgacgtcatcctccaccctttcctcaagctcgagatctgtttgtaagaccttggacatgtctgctgtggcttgtttgatgttcttggcaactaaagcggtgtaacgggctgtttcaggcatcttcatacgccaatagtaagtcaaagctgcgggtaaagcaccaaacatgacgatgattcgccaaatgtaatcaacttgaggaggcgttgagagggccctgtttactgcatatgttggagctgggaactttttgtcgaatatagaagatactgcgagtgccacgaaacctccagccaagataccgacaccttgcatggcgaagacagctgcgatgaaagccccacgggtcttcttgtttgcgtattcagacatgatggtggcagaaagtgggtagtcacctccaataccaaatcccaaccaaaacctacgtaatggtttatatataaaaaaactttctcaaagaaaaatacctaaatcagttcgaagcgtgactaacttttaaaacttgcattcgttattagattattggttaatcattgtgtgtatataatattgtaattggatgaaaactgtacctgaagaagcaaagggtggtcatgacacccttggcttcgttgccaaaagagaggccagaagcgacagagcataagatcatcatgatcaaagtaagaccgtacacttttttccgtccgagtttgtcaccgagccaaccgaagaagagttgaccagaaagggttccacaaagggccacaccattgacagcggccgcaacatgagggggaagtgagccaggcttcgctgactccggattgaagtagtagatgcggccaaggagctttgttaccaaggacacgcaaaaaagatcgtacgcatcggtaaagaaacccataccggcgatgacaatcgcgtgcaaatgataaagttgcgtcttcgcaatatcgagtgccattagcagtcctagttgttgttcagccatctaagcctctcttgtctttcctgcttcatgaagtaaaaataaatatcttaactataattttataataatattggaaagatgctactaaattattttagtttagtaccaatagaccaacagaataca

SEQ ID NO: 3598 - DNA, 462 bp, Arabidopsis thaliana
aagaagaatatttggagcatgtgagacatgtgttaaaggttttagaagggaataaattgtacatcaatccgaaaagtgtacattcactaataagttattatttttgggctttgttgttggaaaagataaagtaaaagcaattagggattggcctgcccaaaaatcagtctgtgaggtacacagctttcatggttttgctaccttctataggagatttataagagattttagtactattacttctcctattactgagtgtttgaagaaaggaacgtctcattggggtttcaagtaagagaaaagttttgatttatttaaaagaagctttgtacttcaccagttctagcattacacgattttgataaagtgttccaagttgaatgtgatgctagtggagtgggagtacgggttgtcctgcctaagaaaaatgactagtggcttttttcagtgagaaattgagtg

SEQ ID NO: 3599 - DNA, 899 bp, Arabidopsis thaliana columbia
acgtgcctctagcaaagtagccgtttcatgcttcatgtcaaagtgtttatatacctgcagaaaatgcatgtctcatgaaaaaagccatgaacagaaaaacctttaaaaaaactacccaaaatgttccttcacgttcacaagtaatagatgcagtcaaagttaatctaagatgaacttgtggtaagcagacaaaacatgatgaaataaactcttttacttggctgattccagctactaaagacatacataccattgcgaatgcatcatggtcatttgggttatacagattcaacgaggtcagaacagccatccggaaacttctgacagcctgagcggtgccagtgtttgcatcagcagcagcagaaaatttttgtagtaaaagatcaagctgcccgttttcgattagaatattgagaatgaaattaagagcatgaaagtttccaactccagttattagacgagccaggcatgagaaatctccctcagcaacataagcctcaacccttgtggcagcaagtgccacaagaacatctactccatcaaggcacgtggatgacttgtagaagtgatgagacagaataagaagctcaacctaaaaacagcattccattatattaccaaattagggttgaatacttattctctcatccatcttgaaactcatgcagcataaactattgttaataagcttttacaaaatcacatacctcacacgcgtgtggtatttcctgcccggttattacaagacgcattaatgcatgaccaatttcttgttcagatggacaaagctccgcccacttcaaaaagtctgaaaatctccacaaaagtggagcaggcccttcatccttttgagaatctatatatcgtcacgatgagcagccaataacccgtggagaaag

SEQ ID NO: 3600 - DNA, 494 bp, Arabidopsis thaliana columbia
  unsure (1)..(494): unsure at all n locations
nnnnnnnnnnnnnnnnnnnnnnntaaagatgaaatgtaagcgtgtgtaattgcgcttgcggatggcttcgcgaaactgatcaaatgcctgccatagcgtcaggaagtttaatccggtgccgaagccgctctctgctaccacaaacagaggatgtggatgctcaggaaagcgtacctctaattggttgcctcccagaaaaacataacgcgtctcttccagcccgttatcgttggaaaaatagacatcgtcaaaatctcgggaaacaggtgtaccctcagcattaaattcgaggttggcaggttgtatggagtagtgtttcacgtaagttactcgtcttacaggcggtggctcgatcttagcgatgtgtgtaaggctgcgcaaatttctctattaaatggctgatcggacttgttcggcgtacaagtgtacgctattgtgcattcgaaacttactctatgtgcgacttacagaggtattgaatgaaacgtgcagtg

SEQ ID NO: 3601 - DNA, 1552 bp, Arabidopsis thaliana columbia
taaataagattttaaactaaactcttaaacgtacacgataatattgagatacacgtacacgtgtacgaccgctccaaacagttacatcataaaaatgtataaatcacataaatctaatactatgtacgtacacaaaaatatttattggaacgtacatggtacaacattaaaataagtttaaaattttaattttagttttttgacatccagattaatttattatgtaagttatatgtatgctctatatttcaatatagattatgcatatataatatttcaacaaatcgtactctcattcaggtaaaaccgatcttccaatactaaattgcacaccattacaatttatttcacatctttcaaaatatttcaaaatatgtattcgtgtacgtaaaacattcatctttacataattcaccagatacataattagtagtgtacgtacatattctttgataaatgtacgagtgtacgttaacttcgattttataattgtaatttgggtaattgaaatataaaagtctaaatataatttatgttaagtatataactatattttgaatacccattcggttctcaatttgctttggataattttgggtttacaaatacaaaaagaatctccaacaaaacaatttatgaacccagaaatttgtaaaaacgtatcattactttcatatcacgttctcaagtgtaattaataggattaacacgaatttcttacccagaacacagattgtctctccttcaatccttcaaactttgtaaaacagcaactgaaaacttcagattcttcaccgtaacacaatttcgaatttcttttttccccagaattctaatctcaattatgtaaatatcttacaatataatctctattataataggtaatcatgagttttaatcttgtcaaaactttttagcattaaaaacttctaagcccaactaattttttaaaaatttaattccaatctcaagtgtcaaattcgccgaaacccagaaatcatttaatgcatttctcaacgatgaacaatgtacgtacgaacccgattcacttggattctaacgacgcggtccgtacgtataaaccgggttcaatttcgtcaggggcattttggtcagtttttggctgaatgtctaagaaatgaaaggcgcagtccacaatgtcaaaatctgaaattaaaagtgggtcaacggctactgtgcgcaatttacccttaaaaaaacaagacaaagcaaaaactctttcttcgtgtgtgtttacaagaaaatcaatcagttaccttttcgatttcgaaaaaaatcaaacagtttcgagatggaggatatgaagagtttgataaagacttctaaagaactgaggaaaaggatagagacaaggagggaaaacaaagagatggcaaaaatgagagagacgagtgacgaaaaactgattgagaaggacgaagatgtgacaaaagcaggagagtttaaggaaatgctcgctatagaaaaaacatggcaaatctgggaggagctccttaagagcatgacgagtttgaggaggtatgtatgtata

SEQ ID NO: 3602 - DNA, 556 bp, Arabidopsis thaliana columbia
gatgccggcaaggatacgttgaacattacatggacgctaagctcgattgggtctaaaagagaggctgaatttaagatcatcaaagttaagctatgctacgctccacctagccaagttgaccgaccatggcgcaaaacccatgacgagctcttcaaagacaagacctgcccacacaagatcatagccaagccttatgacaaaacacttcaatcaactacttggactcttgagcgtgacatccccaccggaacctacttcgttcgtgcctacgcggttgatgccattggccatgaagttgcctatggacagagcaccgacgatgccaagaaaaccaatctcttcagcgttcaggctatcagtggccgccacgcgtcctctagatattgcctccatctgtttcagtgtcttctccgtcgtggctcttgtcgtcttctttgtcaatgagaagaggaaggccaagatagagcaaagcaaatgagtcgtttactttgcgtatttgtgacgttgacccaaaaaaagttgactttgaactttcttgtttccaattccttttgtc

SEQ ID NO: 3603 - DNA, 277 bp, Arabidopsis thaliana columbia
aatttttctcctaattatttccgactaaagacacactatcccataatttatatataggtgacctgaccaccactccttccgatcatcatgactcgacgtggctcgagacaatacttgtcatataaatggacgaactttttgtctcaatctcgtcaacctttagcaaaacctcttgcattactgatcttcttcttccacttggtaagtctttctctgccccctcttcatgcaatggttgactttgttgtttgtggtcgttcaagttagcaacttaaat

SEQ ID NO: 3604 - DNA, 1213 bp, Arabidopsis thaliana
atgcttgaactcttagctaatcacccatactattaatttcttgactgatatagtagtttctttcaaatactaattcaccctaatgatcaagagaaaactactttcacatgtgcttatggaatttttgcctataagagaatgccatttggtttatgcaatgctcctgcaacgtttcagaggtgtatgacctctatattttcggatttaatcgaggagatggtggaggtcttcatggataatgttttggtctatggcctctccttctcctcatgtttgttgaatcttagcagggtattgaccaggtgcgaagagactaatcttgttctcaattgggaaaagtgtcatttcatggtgaaggaaggcatagtgttgggtcacaagatatcagagaagggtatagaggttaagaagggaaaaatcaaagtgatgatgcagttgcagccaccagaaactgtcaaagacatcagaagtttctttggtcatgctgagttctacaggatatttattaaagatttctccaagatagacaggccgttaactagactattgtgcaaggggaccaagttagaattctatgagaatttcctcaaatcctttcacaccgtcaagcaagctttggtatctgctcctgttgttcgagctcataattgggactatttgttcgagattatgtgtgatacatcggattacgtcgtaggagctgtactaggccagagaatagacaaggagcttcacgttatatattacgccaacttgacgttggatgaagctcaaggaagatatgcaacaactgagaaggagcttctagctgttgtattcacatttgagaagttcagaagctatttgattggatccaaggtcattgtctatacagaccatgcagctttaaagcatctgtatgccaagaaggatactaaaccaagactgttgaggtggatacttctgctacaagagtttgaaatggaaatagtagataagaaagggattgaaaatggtgcagctgaccatctgtcaattgaagaacctattccgatagacgacttaatgccaaaagagcaactcatggttataaaattctttggtggtagttactgcgggaaagagttccaccaactgaatgctgttgagggaagatctccgtggtatgctgatcacgtcaattatttggcatgcggagtagagcctccaacttgaccagttatgaaaagaaaaa

SEQ ID NO: 3605 - DNA, 500 bp, Arabidopsis thaliana columbia
  unsure (1)..(500): unsure at all n locations
nnnnnnnnnnnnnnnnnnnnnnnctataggtcggataacgaacattggctgttggcgacgcgctatagctgggggcgcaaactggcggtggggatgactagcgcgaaggagctggcggcacgttatccgttgatcccgaaagcgtcgcgatatgtggcgaagcggatttgatccctgggaggccgtttctgttcgtcagccgccgctaccgccgccaggtggagactttgccatcgcgctggggctggcgcttgggaaggcgtactgatgaacccgccaattaattttttgccctggcgacacaacgccggaccgcttttctgcgtttctggttgctgatgttcgttgcgcctctgctgctggccagcgggcgtactctaatactgcgtctgacaggcagcgcgaagccgcagtagacgcagttttgcttcaggcggaacaacaactcgcccgcagcttacagataacgaagccacgtttgctggagcaacagcagttac

SEQ ID NO: 3606 - DNA, 495 bp, Arabidopsis thaliana columbia
  unsure (1)..(495): unsure at all n locations
ttttttttctttttttcttttatgatcaaaacccaaaaaagtcattaccctgcttcgtaagtattcaacataaagttgttaatccatgtgttgtactctgcaagtctgcattacattattcatcgtacacagagtcatcaacttcagtttcattgtttttttgcttatgaattacgattgcagcaagcttcaacggcgaaatacattgtacagcagtacatagcagcgacgggaggaccacaggcgttaaaccgtnngaacagcatgtgcgtcacgggacaagtgaagatgacggcgtcggagtttcatcaaggagatgattcgggcgttaatctaaagagcaacgacgaaatgggtggtttcgttttatggcaaaaggatccagatctttggtgtttggagctcgtcgtctccggttgcaaagtgatatgtggaagcaacggtcggctttcatggcgacattcctctaaccagcaaactccggcgtctaccgga

SEQ ID NO: 3607 - DNA, 1481 bp, Arabidopsis thaliana
ttttatcacatcttgacaaaacaaaagcattctcactaaaatcaaacacgaccaacacacatacatatacaaagagtgaaagagtaatcttaacttggcgtataacaaattatgtatataaatacctccaagggacatttaatttagttcaacaaacaatcaaatcacatatctctaagtttgctgagattaactggagatataactttaacatcaccatataacaattgcttcgcgatgatgacatttgctgcttcactcggatgataaggatcccaaaacacatatttatccctctcttcacacaaactcgaagtcggtccgcacggaattatacccgcgtattgtcctccattaccgcaacaagcctttgtcgcacttttgaaccctaccaagtttacaaatccacaaatctttatttttcatatattcataatctacatttcatggcctaaaacgtgtatatatggtagtgtgcgtgtgtgagttgtagaagacaaaaatatatgtattaccgtatttatcgtagttagtaatgagctccatgacgagatcgtagacgtttgcatggacaaacattgctccgggaagtttcttgtttagttcctctaataaactctttaaccgaacattgtattgatttgctagtttattagccaaatccacacactcgttttcgtctaattgattgattgttttctggtacggtatgcatccaatcggtccaacgttcccgatcacaaacttcctcgcatccaattgatacagcctctgtatttcaaccataacatgcatatgataacaaatgaactaaacaaaaattctctaactttattttgatggatagagatcaatattttgttgcttacggttagttggtcgcgtagatgttcaagcatgtcgccaataaaatcatcgggagtttgagtgaaccgtgttcctaccgagagtagtgggaatagataattgttgaggaaatcatttgctcctatagtgattgagaatatcgatttcttggctatgtaatcttttgctttctcttttccaagtagatcatcaaactgtttccgtgtagtgttgaagaaatcaacttgtacatccatacctaatctattcacctaccaaatatttacaattccttaaaacttcataactctagaataaattttagaaatttttaaatgcacatatgattaaaattagtttggtacatacaaagattctcccggtggcattcatgattcctcctcctccagatgcatagttcactccggctaataaagcttttcccttcgcgtctggtgccaagaacgggatcgcgtagttcgctgatccgagttcttcccctgaaaaaaacgtaaatcaaatatttaacgttttagaatcattcactaaaaaaaattaatcattttaacaaagaaaaagagtaataaacgtcaacatacatgtgtaggtgtgttagttgaacataatctctagac

SEQ ID NO: 3608 - DNA, 687 bp, Arabidopsis thaliana
ttcgccgatactgacaataagatattgtgggatgagtagataaaatcctagaggaagcgttttgactgttggaccatgagcgtgtgcagttctaagacgtttgagctcgaccaaagcagccacagccatagccattgatccgaagaaaagccccaaaccgatccgttgaagcggtcttagaccatgggggtagttgaatagctttttgcatagacgaatggcgacgcggtcatagacggcggtggttaggaggaggccaccgacgtagaagactgccatcgatgctggagggatctcgaagctcccgatggaacggtccaatgtctcggattgtgcgactgataatgtcgttaattgagcgtggacggtccagaagaggatgcatgttgcccaaattggtaacattcgcacgatttgtttcacttcctcaacatctgttagtgttgagagtgtccacttgttgaatacattcgaggtaaccccgcttcctgatcccttattgctgccttatctaatgaactgtggcatcaaaaatgatataaggaataattagaatataatagtaaattatgtaaaatggagataaaatattttacatatattggattaaagataagtatctgatttttcaaccaaagatcttttgtgtgttcttagaaaattatgaagtgtcctatttattgaaat

SEQ ID NO: 3609 - DNA, 529 bp, Arabidopsis thaliana columbia
catcatataggcttcaattgttttactttgttcaaacttaaatttcgttctttctattttgggttctttacaaaaaaaaaaaaaaaaaaaaaaaaattgactgcacaagtgatgatgatgaagatgcgtattcattcggtggatgctatcggaaaggaacacgaattttattattaaaaaaggaaaatgttattccttttttgcttctcttgacttgggggaaaccaacttcgccatcttcgttttggtttcgatcccaatcgagttttctctcaatttgagaaatgggttcactgaaaaaggacggcgagatcggagatgagtttacggaggcgttactgtacgttaacggcgttcgtagagtcttgcctgatggattggctcatatgacacttctcgaatatctcagaggtgcgtatcaacttctttgattaatatccaattgctggggatgatttcaagtactcaaacaagtttaattttcaattcaattttgaactgatactctctatgaagattctgttttttg

SEQ ID NO: 3610 - DNA, 581 bp, Arabidopsis thaliana columbia
tataattaaaacatgtgaattatgtttcaaaaaaaaaaattcacaagaaaacgtgaaaaaatgattttgaactaatcgaatttatttagatataggcatgtaatcatattcagaatataaggtactcacctgaattttacccaatttatgtgtatatcttttaggaatgcctaccgcatcaagcgatgcataccacgcactaatatcttccatcatcttatcttctgtgggaagtgtaacccgccttgacaagactgctgccacccatttgctttggatttcaaacataacaaattgtatgccctgataaaaaaaagataaagataaaaaccaagtgagacttgaactcggaaccccaagatattgtttgagactaaccatcgatggtaaaccaacgaatgaaagaccaggagaaagcgcaggtggaaatacatgcttgtatagatgttctacgcggttttcatcaatgttcatatagccattggtttcaaggaatgtgaagcgatatttatatctcacacatagactgaaatatatggtaaatcagtagtacatttcacattattaattttggtactatg

SEQ ID NO: 3611 - DNA, 526 bp, Arabidopsis thaliana
caatgttcgatgtaggaggtgtggttggtggaatcatggctggttacatttcagaccgaattggtgcaagagctattacggctgcgagtttcatgtactgctcaattccagctttgttcttctaccgtagctacggacatgtatcgttattagccaacgcgtctctcatgttcttgaccgggatgttggttaacggtccttacgctttgattacaacggcagtttcagctgatcttggaacacacagctcgttgaaaggaaactcgagagctttggctacggtaacggctattatcgatggaacgggatccgttggagcggcggtcggacccttactaacgggttacatatcgtcgaggggtagctggaccgcggttttcacaatgttgatgggagctgcgtttgtggctggactattgttgacgaggctggtaatggccgaagtagcggagaagatagctgagtctaggccatcggaagaatgtagatcccggtggactatgccaagatcatgtgatggaagtgt

SEQ ID NO: 3612 - DNA, 495 bp, Arabidopsis thaliana
taaatgcattgaagtcaaaaatcttgatcttctttgatatcccagctgctgctatgtgttcttcatcagggtcaaaactcaacgagcagaccacacttgcagagtttaaaaggtccccacttcttattgtcccacaggtttcgaacttgctataccgagcaaatttgcacaacccctcgaaaaacacttcgagttgatctgaagattttcctttggtactcatatcctgattttcattttggttttcagagcatctgtccctgtcctttagtgttttgtcagaacgggcagtagcagcagaactcgataagttgatttgtgatcgcatgaaaaaatatgcatcttcaagttgacggatattactcatcagcctgtctgtattagcagttggtacaaacaaggcactggaagttgtacagtgctcgtctaggggagatgattgcacccttttttcaatagctccatgagatctcaccagagatacatttgaagaat

SEQ ID NO: 3613 - DNA, 1441 bp, Arabidopsis thaliana
tagcataatccaatcaaagatgatgctctctaatggagaaaatatcagccaacactttctgagagataaagcaagtccctatagctaacatcatctgccttgtgcttctttctctttgttttgtttgcctcctaacttgtcaagtgtgttctcgtggacgagctgcccagagagaactaagagcacgcagcctgtggaagtattctcctagagcgagcaaccctcgagcagcctgtcttgtcgtcaatatcttactcatttgctgcagggtctgttgtctcagatgatccgcctgttccaatattgtcagagattttgtttgtgaaatccatgctcacaaagtttctaatcaaaaatgaaaataaactttggattcatggagactgcaaaagcacaaagcaaatacacttagcgttacctggttcacaaaactctccaatgcttgaagattctccatggctgaagccattggagccccgtgattcacagactcaacaacttttatctgaattgctatgctttcgaccaaaccctgctgaagtttatctaagccttgagagagagcctcctctgcttgctgagacgactgttgcaggttacgcacctccaacagttgctgatcggttaagggctcaacgtatggcatcacaacctagacaacaaaaaaggttgagcattttttctcaagagtagaaagagaaacgtgtaaaagtaaaaaagaagtttacatttaaaagctcggatgggcggaaacctccaatccattggaagaagcgttcagttgaagttcgccacattcccgacatcaagaagaacacatcagcctttgcagcatcagctttcatgcggaagagatttgcgtagtggttcaagcaactatctaccaacattttgagctcaatgtcacctatatgagcttggagcgctgttcgaatctcactaactctcctgttttgctcttctagccagtgtgtgtattccatctcaaatgcagcaatacctgaaaatggttattattgggaaaattacttctttatctactgaggattaagagataaagcaatgctaacatatgcttatttagtgatataaacaccaacctgagttcatattcccagctggtcctagataactagtatctgaagaattgcgtacgcataatccctaatacaaaccagaagaatcactgagtcagaatgaatcagataaagtttgatgaacacacaacaaataaacaagcttgagctaacctgctgcctagctcttacaagttcctgctcgagctgtgacaacttcaaccggctttcttctaactgttgaacatgggcctacaagcacagacacaactttgcataagctttcctttttatcattaacacaagaaaaaatcccaccaaggttaccttctttctcaaacgacttttgcgagcagcttctcggg

SEQ ID NO: 3614 - DNA, 353 bp, Arabidopsis thaliana
taagagacattaaactccggatagaaataagttcttacatgaaggagcatcaagaaaatcgaacttgagaatgtcaatatcaggaagatccaatgatttcaagtatagaacactcccggcaagagaagttcgttggatttcaggaatagttgcatcaaggaagtcagctcggtcagactgccaatgggtataaacgataacatttccccggtcttgtacggccagcacgtccagcacgttggttagcttgcactctggaagtacaaagtgaaacagaaacatgttcaaagtacagttagcaaataggagcttgatgataacctgagtaagaataccactgggattcctgatta

SEQ ID NO: 3615 - DNA, 788 bp, Arabidopsis thaliana
taaaatccacgaacgcggaaccattttcatcacagtcgtgcctccctcttctcttcttcttctacttctttgaaacattctcttagctctctctatctttgttgtctcatactctctttctcttctcttctcggtgccctttcgtgcttcgtgaagactccagctaatgagttcgtcaaattcctcctccgccgtcagatcgtcggcgaaacacgcggcggagcgaattcagcagcacttgcctcccaacagcaatcacgcggtatctctctcttcttcttccttgaatttgcctgctagaacctctatcgtcgctcccggaatagcacactcttctcgccttaaagatcgaccctccgcttcctcctcctcctcttcgtcctctgtctccgcctcttctccctccacacgccgctccggcactcccgttcgccgatctcaatcgaaagacttcgacgacgacaatggtctgtcctttttctccttctctcttcatattcacccgtatgattccacaattgaaagatgagctttttttttcaatttcttaaagtatttgactttttctacattcgattcagagattgttgattcgaattggtgcattgttagactttcataaaatgcactaattggcataatctgtttttaaagtttcatacttttctatgaagatcctgggagggtaagagtctctgtaagagttcgacctcgaaacggagaggagcttatctcggatgctgattttgctgatcttgttgagttacaacagaagtgagttattagat

SEQ ID NO: 3616 - DNA, 1543 bp, Arabidopsis thaliana
tagctaccgttttaacgaccacatatatttgtaacaacattttgctacttatcagttacaaattagtaacaaaaaacgatttaataaacaatgtagctaatttgttactacccgtagccacttagctacattttgcgtgacaaatgtttttgtaacaaatttgttactacttgtgttaaaattttgttgcaaagttccacaatccaaaatttgtcgccgattttgtaacaacagttgaatagaatattaattaacttcttacgactattacaactagtaaagttgtatctattatcgatgggttatgacattccgttttagtattaaatttgatacgaatttagtatcaaaaactttgttgtaaattttcacaaaacaggttttttaacaaaaatttatgataaaataagattattaatattgtttaatttttgcaacaattcattttgtaccaactagaagcaaagtggagactcacattatgtttcgtaccaattatgagaacttataactgccctgcctcataccaaaggccactcattgtgcggtatcaaattggtctctaaagccacaactattgcgacactataattgcagcaagttgattccaaagcaacttgttatgtgacagtcttattgtagtaaatttatgatggtgtcttatcaatatcccaccaagttgttgtttaattatcagtttcgttttctctcttgttcaaatctttatatatatgcctcattcttatttgttgtatattcattgataagtgtgtattttgccagttttagcatccatttgtcattattttagcatcatatcatcattgttttataccatttctcatcatttgtcatcactttgcatggttaggatagttttgcatgcatgctgcatatttgtgttgatttcaggtgatttggagttgttgacgagctaactggaagaagcggacctgattatgtcaaaccactcgaccccgaggtcgagtagaagcttcatgacctcaatagatcactcgaccccctggtcgagtagaggacatcactacttgatcacatcactcgaccccgaggtcgagtgtcttcatcccatcacctgacaataactcgatcacatcactccaccccgaggccgagtgtcttcaccttcattgccagaacactactcgacctcttcactctacctggaagtcgagtatcaccatcaccaccactcgactgcatactcgatgacaagcttcagagccttcttcattccggactcaaccagacactcgagcacaaggaagaaaagaagactccagttattcactcgaccacccactcaaccacatgggtcgagtacagttcttaatccgtcctaatactgcgtcgttttaagtattagggtttcagaatatttggctataagtagcatgtacttcacattttcgcagacaagtttttatctagttttatttccgcagaccttatgttctagaccttttgtaatccagatttctctttatctattcagtattcagtattcagcttttgttcttga

SEQ ID NO: 3617 - DNA, 489 bp, Arabidopsis thaliana
gttccactgcagccttgtcgagcatatgtgaaagaaagttcatgcatataacaaacatatatggagataaggaacaaccttgccttaaaccccttgcgctgcgaaacaagccggataattcaccatttatttggatcgagaatgaggccgtagatatgcagagctcaatccatttgataaattttgatggaagattcaaagtagagagagtggcgaggaggaatggccactgcaccaaatcaaatgccttggatatgtcgatctttatcgcacttcgagtcgagattgaatctttatgataacctttaacgatttcagatgccaacaaaacattttccttcaggagacaatctttaacaaatgcttactgattgggagtgttgaaatgtgggagatgttggcgtggaggaatcattcgatatgccttccattaaaaccgagactgtaatcatcttactgctagtgaaaacaggagtaagtcgccctttg

SEQ ID NO: 3618 - DNA, 859 bp, Arabidopsis thaliana
tgaccctttccatatagtcaagcgtcgggtcttcaacttcatcgatccagtagtcgttgatatttgggtatggtggatcatcaatgggcaacaacggagaaatactcaactacattgaagccgaaacaatttatcaactaaacaaatcatcaaaggcaaactagtgagagactaataagaatctaataaaattaggtccacagattaccctaggaattagctctgtctccattatgttggagttgtggtaagtcttcaacggaggcaaactggtgagagacgtctcactgatagtctgcgtatcatcggggtttggaaggtatctttccaattcagggataacgttaaagacaaaaagttggaagacaagagggaatccatgtgttgaattgttagactgattgaacttcgtgattagtcctgggagattgctgaccttggatctaactttgtgagaaggaaggactctcgtccccagggatacgcctcaaaagcctccaagtccttcaccatttcaacgacttatttagaaacttttacaggttgggaactacagatcaagatcccctcaacaataactataacagcgagacaaagccttctccaaggttccatcctctcttctttaggcttcagcttatctgtcttcaaccatttgaatatatccttgatgaggacgactttgtgttccttacctattaggacattccagtaaggatgtctcagatttatgggttgctgcgacttcaatatgtctctccgagaggggtaaggaccacaattaaaaaccactaagaatggcaaactcccttaacaaaaaccggaagggctgaccggcaaaaacaaaccaaatctcgtg

SEQ ID NO: 3619 - DNA, 1373 bp, Arabidopsis thaliana
gcgtgttaatcttccatcgtgaagaattgcatttaggacaactgtcgagcttctcaaactgatttctgaataaacagcagtcatttacacaagcatgtatcttttcataacccatatcaaaagtttgaagaaacttcttcacctcgtacaaggatgtgtgcaagacattacccttgggtagcatatttgacaaggactcgagtagcagatcaaaacttctatcagaccaaccaccttgagtctttagcctaaagattgaaacaatcgtagagagcttattgtgatttgtgcaacctggatagagaggtgtttctgcatagctagctttgttgaaaactcaacttcttccttatcaccagcctcatcaacatcaccttgactaaccagctcttcatctataaactcagcagctttgaacaacccaaaaatctcttggttccactgacttgcgttctttctataatcagatactgatttcacttctccatgatgataccagtcgtcccccaacttataactccaatccattccccttgttacaagatgatcaacaacatcagcagctaagtgacgatcaacgttgcgacagtcaatacacgggcaaataatcatcgcattttctcctaaacctgcagccacatacctcacaaaatcccaagcaccactctcataaccaggatcggttctgcatagaagtaagatgaaagcaaaaaaccatttacaaaatttaacatatcaattaaaccactatatacatgactataacatgttttcacatacctgttaagatgaacccatgacttgtcgaccattatttgtgcttacccataaaaaaaaaaacagacccataagaacaccaaacaaaaatatatattcatattttcacattcacagcaacagttcattaaaaccaaatagcaaacaaccaattcatcagtcaaatcttaaacaaatcaatcaaatacaaatttcattgtgagaactagcctctgtgttctgatgccaacaggcagaagatgcaggcagaagatccggctgtgatatgtgatcaatgtttaaaacggtcaaaaatcaaatactagtaaatagtcaagaactcaaatacattaactggatgttttatacctttcaggtgtatgagatcagctgggttcgaagctacagagacagagagagagacggaggcggagggagacggaggtggagagagacagaggcggagggagacggaggcggcgagagacggagacggagagagacagaggcggagagagacggaggcggagagatacggacgcggagagagacggaggcggagagagacagagagagacggaggcggagagagacggaggcggagagcgacggagcga

SEQ ID NO: 3620 - DNA, 560 bp, Arabidopsis thaliana
gcttgttatcgttcattgcagcttccttctttctcatcggtgctacttcgaaagggatttcagactccagagaagcagaactggttaggggaataactggtggtttagacataggtatttttttctctatacttttccatcccgattcaaaatatttactgataccctgagccatagtatggaactgatttcctggtggattgtaagctatagaatttgaaaatgtaagacgcacatctgctgcaaagtccaaaggactagagtattcacctttacacagcctgcttcgtatcgttccaagatccattggatgtttaatcacattaaaatagtctggaatattcaacatcactggatcaactggagtacgaaatggccaccccgacttatgtgaccataaacgattgagtaacgtctcacactccttcatcactgaagcaacagtataacttgttgggacatttaatcgagatggacctttcttattccgctgcttatcactgcgcacaggagggcgctttttgccttgtgacccacaaatgtagcaaagttttctggtg

SEQ ID NO: 3621 - DNA, 1308 bp, Arabidopsis thaliana
gatataagcaaaaccaccatgacctgctaaatccattcctcgcatttcatgctgctccgagatcctaagcaaattgagctttttgaggatgaagaagagtgttcccattgtggcactaacccatccaacaatcacaattatttgaaccagttgtgctcccaatagcttccctcctccgcccataaatagcccgtagtgccttcctgggctcgcgccgtaaacctcatttatatacttctcttttgcaaacagtcctacaaatatcaaaccccaagcaccacaccctccgtgtagttgtgcggcctcaagtggatcgtcatattttaagagctctgcgagcgttgttgcatccgataaggacgagggaagccacgaagccgcacacaatcgctgcccatggctctacgacggagcaacctgcggttatggccgcaaacccaccgagtaacccgttgcaaacgtccgttacgttccagtggcctgataggagacgtttaccaaagagtgtggttagagctgctgtgcatcctgagagtgtggtgttaaccgctgtacggccgattccgctccattggccgtagttggaaccagaattatacggaacgagtatcttagtgaaggaaccggggttgaaaccataccatccaaaccataggaggaaggttcctaagactactagcgaggcagagtggccgcgcagagcaatagcgcgaccacctttctcgaaccgaccacgacgaggaccttcaataagagcaccccataaacctgctatgccaccaaccatgtgaacaacaccggagccagcaaagtcaatggctccggtgctaaacaaacgatcatccgctgaacgaaagggactggcccatccatccggggaccaaaaccagtgagagacaaccgggtaaacaaatccggttaagaaagaagagtatatcaagtaagccacgaactgagtcctctctgcgatcgaacacttgtgattcagcggcggattgcgaacgccattggtagaggaagaaagagtaatcagctgtgggagtcggaaagtctctaagagcaaagttgtgtcttccaatgaacccttcggaggatcttccaaaggcaaaggcgtaaccaaagagatagtagaagagtcctccggctgcagcgtcaaggacattggtaagcatgatgttcatcgtattcttggctctaacagaaccagcacaaagcatagcgaacgcgagctgcatggcgaagaccaggtaggcagagaagaggaggtaggtgttgtctatggcgaaggctgcatcggtgaacttgttg

SEQ ID NO: 3622 - DNA, 1533 bp, Arabidopsis thaliana
atccccatggtcggcagccttcaaatatgtatttgtttctctctcggcttctataaaaggttggaaatatatgaggaaagtcgttgttgtagacagaacgcatctagtcggtcgttacaaaggatgcctccttatagcatgtgcacaagacaggaacttacaaatctttccattagcttttggggttgttgacggcgagaccgatgcttcatggatttggttcgttgagaaattatcagagattgttccagatactgacgatttgatgattgtctcggacaggcattcttccatatataaaggcgttagtgtggtgtaccgaaagcccccatggagcatgtatagtacacctggagcgaaacatatcagtgtcttactctaggtacggtgtgtctgatttattctttagcgccgctaaagcatatcgggttagagattttgaaaaatactttgaagagataagaggtcggagtcccggatgcgcaaagtatttagaggatgttggatttgagcataggacaagggcatactacataggggagcggtacaatatcatgactagcaacaactccgaggcaatgaacaatgtcttaaggaaggcaaaagcgtatccaattgtctatatgctagagttcatccgataggtcattatgcgatggtttgcagcaaggcggaaaaaagtgtcgaagtgtaactctttggtgaccccggatgtagatgaacgtttcctccaagacttgcctgcgtcaggaaagttcgcagtcatgatgtctgggccatggagttatcaagttactttaaagagtggtgagcattttcacgttgtactagatgagtgtacgtgtacttgtcttaggtacacgatgttaagagtcccatgcgagcatgctctagctgctgcaatacattttggcatcaacccgaaggctgtgattggattgtggtatagccttcaagtgttttctgattctttccaagaacccgttttacctatagtggacccaaatgacgttgtaattcctcaagatttatcggacctgattctcatacctccacgcagtagacaaccacctgggagaccacctaccaaaaggataccatctactagggaaaaccgggtaagtttttcacccatcctaactgctatgaaatttttacttcgttttaaacgacatactattttataactttcagaaaaagaggcagaaaagactcattcctaatcagtgtacaagatgtcggaaaaccggtcataacaagaagacatgcaaaaaccctatttagtcgatgactgttttactcgcgatggttagagtctctatgcttttggacgatgttctacgtacgttttggaaatctttttatcagtctatgttgtaatattacatattattttttctgtacgttatcttctgtacgtacatttgtggacctcgtattatcggtgtatttgcttatccttcaactttttgtcagtaccgttgttgtctgtacgtacctttgataaaaaaattcatttgtacgtacacttcg

SEQ ID NO: 3623 - DNA, 1335 bp, Arabidopsis thaliana
attgtcactaagccataatagcggtacatacaatcagaaaaagtaacaactagtttgacatccgcgtttagctaatagatgtaatgtcttattaccactcctcttcgtgaagctaaacttaatgttttgaaaattttctgtccagtaggcgatatcttgatgaattccggcgatagatatatcataggtttttccattggtcatattgatcggatatcgcaatctccttcaagaattatagatcaaaatctttttatccatacttgttgcaatgccgataaaagggtttcagcttcagcttccaagggtgatattcttgtaacaagatatgatgctccctaacttagtgactgtaacgcccgcgggcatgatcatggccggtctaaccacggccatcccgggggtggggtggggggtggggggggtcatagatggagagaacctgtcgcaattcggctaaggtcccagggttccggatcttcggccgattcgtatccggtcatctccccactagattcaccgcgtaggcttgccaacccttgcggtgaacccggtgttgtgcggttcggacaaagccttatatcattacgtaacattcccgatttgtaaaactggttggacttatctatgtactagatatcatatgcataatacatcaccaaatccatacatgtatatttatattcggatccaagttttccataatactttagtacaacaacggttttacaaaagcaacatcaaacaataccctagttcggcggtcttaacgttcgtcttccctctactggttgattgcgacgggttacctgtaagacaagtagaatcatgagtaatctagtattactcagtgagccgggaccatgtaacaaagaacctattgcaactctaagccgatctaatgcaattctaaaaacctagaggggttaacaaacgaatgaaaagtaaacatgcgacaaacaaatcagagaaacacgcagtaagcaagcaaacatgcaaagataaacaaacaagcaaagagactcgacaatactctagacgcgaacctatgggtcttgagctccattcctcctccctaaatattggaagttgagttctcctatatggatctatcaacccgataacaactcattgaatccacacatgaaaccaacaagatcacgacttattgaacccacccagtataccaataagcccaatgcatcgtcatgcactcttggcttaggttccaagactaaccggcgagtgattccttgggaccaaaactcactggcttccacacacacaggcaggaatcggcagtgcactaaactagactcacctatgacacccgga

SEQ ID NO: 3624 - DNA, 1229 bp, Arabidopsis thaliana
taaaattaatgatataaattgaaattaactcaatgagatttcggcgtatgatccatcccagctaccattaaaatcacacatagaggatacatagtcggtcaagctagttgagggactatagtaatttgtaaagattttgttcttcatgcggatttagtcgtctttttgcgtcactgtgactagatgcacactttttccagacatagcaacgaatctagaacctgaattatttatttatcaacggtgatagataagttataaggaaaagcttgaatgtggctcttaacgattgataccaatcgtaaaatgtgggttttgcaagctgtaaatctcattgcatggatctgatacctttcttcttcatttttacctttttcctttcatgtttctcgtgtttcacttttcttcaacacacacacttgtttataatctatctatatataagctttggttacatgatatctaaatcgttccattgtgttttgccacacttataaataacatataattacaattcacataaatatacactaatgtctaacattcgtccatggttccgtctctctagcatcgctaggcctacagcgcaaggttcaagcgacccacctccacctcaacctcgaccaacctctcgcagttcgctcgtagtcagaccaccggcaaaacaaccgtcacctccacgtcagcgacaacctcgttcacctccacgtcagcaagatcctccttcacctccacgtcagcagcaacagcctcttacccctccacgtcagaaggctcctccaacttcaccccctcaagagcggtccccatatcattcacctccaagccgccacatgtcaccaccgaccccaccaaaggctgcgacaccacctccgccaccgcctcggtcgtcatacacgtccccaccatctcccaaggaagttcaagaagccttaccaccgcgaaaaccgaactcaccaccgagtccagctcattcaagtcggtctacaacatctgagtcagtgaaaactcggtctccatcagagtcagagaatcatcggaaagcaccatcaccgagagtactatcaccttactctctcccagcttctctgttacattccgaacgtgaaaccactcagaaaaacattctcactgccgagaaaacaagccaaacccacgaaacaaatcatcataaccagaatcataaccatgactataaccagaaccataactataaccaaaaccatagc

SEQ ID NO: 3625 - DNA, 1251 bp, Arabidopsis thaliana columbia
cataaatagtttgtgtattgttgccattttatgtttttatgttaagatatttgtttgttcatttttttttcatgttatgttttgatcaatggcatcaaaaactataggttttagtttttggaattagtttgataacattttgctgaccgatgataccaacaacggttgtgtttggtatttaaaacttattttgaaagcatgtttaataaaaactttgaatatctgatatggttatatagtatacaaattttttttaatatttaaatgtatcaaagcggatatccgcaaatatcacaaaaaattccggatattcgaaattccggatatccggaaattttcgaagcaaagcaaatcacaaaatcaagtattcgttaaaacgaatcgaataacaaatatcacaatttttccggatatctgcttcgtgcctagacctaaatatggctatttgattttaggaagaaatttaatttagtaagtagagatattatttatactgaatattcattacattgcaataattatgaatatcagataataaaaacgctagctcttaacggcaacgtttgcttcataagttcccggagcaatccatgcgttgaaacgataccgttttggtctccaagtcatagccaacaaggaaatccatttgaaccatgtttccgtatatagcaacttcagttgtcggaatcatactcaagcacactgtatcttcatttagtttcacgaacgcgtttatcggactcagcttcacgtcggcgttcgtgaaatgcattgttatcgccggcaaaccgatctctttgtctccggatttgaaacaatgtgttaaaagcccttgtggatcactcacacgctttgctccggttactgattcttccacggccgtaccaaagtcatcgtaaaatcctgagtcgagaagggtaagggttgtaccggaatcgattatgatgtttccggttctctttgatgatttcccgtttaatccgtatcctcctccggtgtatggaagcttggttttgccgacggtgactgcttcgagtgtcaagaaatagtaagtctcggggtctttttggattaagggtgtagtgagcgtagcggagtctttgcttggattggaaggtatcgagttggttcctaggtttatgacgcttgtgccgtttgttgtagctgccgtgtgtgacaagcaatacgagaatttcttccctatggaagaaccaagctgggaaactaacgataatggaccacctccgagtc

SEQ ID NO: 3626 - DNA, 240 bp, Arabidopsis thaliana columbia
caccatatatgcctcttaacaatctctccacagaacaaaagcaaaaagcctaaaccgggataatggaagctctaaactctatcttaaccggctacgccgtggcagccctatcagtctacgctctttggttctacttcctgtcccgaagactaaccggtcccaaagtcttaccgttcgtaggaagcttaccgtatctaatcgctaaccggagccgaattcacgattggatcgctgataatc

SEQ ID NO: 3627 - DNA, 550 bp, Arabidopsis thaliana columbia
  unsure (1)..(550): unsure at all n locations
nnnnnnnnnnnnnnnnnnnnnnnctaaagctccgcaggatagtgcgctttcagccataacgtttgatatgacaccaaagcataggccgcagagtgcgatttgttaaatccgtaaccagcgaatttctccaccaggtcgaagattttcatcgccagttcagcgttgattccgttcttttctgcaccttcagcaaatacagaacgttgcttagccatctcttccggctttttcttacccatcgcacgacgcagcatatccgcgccaccgagggtataaccagaaagcacctgcgcaatctgcatgacctgttcctgatacaggataatgccgtaggttggctccagtaccggtttcaggctttcatgctgccactgtacgtccggataggagatctcttcacgaccatgtttacggtcgataaagttatccaccatccctgattgcaacggaccggggcggaacagtgccactagggcgatcatatcttcgaagcagtcaggttgtagacgcttgatcaggtccttcatgccgcgcgattcaagctggaata

SEQ ID NO: 3628 - DNA, 689 bp, Arabidopsis thaliana
tacattttcaatccttttatttatgaataacttcagatttgatctgtatctttagtttcttctttgagtaaaccccaaaatctaagattttttagtatattaagttctgatttgtgtgaattgttgaggttttgacttttgaatgtaagattagctctcaaattgtttcagatgattgtagattagacttgtgagagcttcgttaatttacattttgacccctttagttacttaggacattattcagatttgacctgttgctaatttggtttcaatacttgtgattgcttaggtcttagatgttaaattagcaataaaaatgttccagatgaaatactttgaccagaacttattgattcatataatcattatcatgataagctcgtgtattgactgttggaatctggttttgatcttggtgaatcattcaggtggaggagctgctcaagaactatgaaaatgtatgcacgctaagagtgcgaatgccgatttcatcggatctaacaaacccgagaaacttcatcacgaagattgctcggtatgagaaagttgtggacatccaaactcgatgacaatcctcgatgagcttctccgatatcaatcgaaatggcgaagaggaacttaaccgggatctacaatttcactaacccgggtgttgtgagcacaacgagatcttggagatgtcagag

SEQ ID NO: 3629 - DNA, 945 bp, Arabidopsis thaliana
ttctcgacttacattaacactttgaataatcagtttgtacagagagttttaaccagccttcatttgctagttgcatatcatatagcataccactttaaagagaagattttattttcactacttgtatatgatcatcatctttcagtattaaatattagcatactaggttggcgcaagaacacaatatattataggtttagttatattacaaagtacagcggtaattaaagcccaactacttattcctttggtccttatttatgcattaattaattaagatgctactatagtatttttctttttccttcttttagtcttatcatcttacgcatgtgtgattgtgttaaggtagtaataataacaagaaaacttcttttagcggtgttggctcctctctctacgaccaggagatccttcaccatttccacttcctgagccaccgccttcaccagcgtgtccggtcccacttccatggccagaaccaccgtctgtggctcctcctcctcccgagccagacccaaatccagttcctgaacctgaccccgaaccaaacccgaatccagccccttttcctcctccatctggtgacgaacccgaaccagaaccatagccataaccacctcccggggctgaaccccatccccaactatatccccaattaggtccatgagctgaaccacttgaaccactggatccttcggttgggctagtcggggtagcggctgcattagaaggtgtccagactctcctcctccatggactaacgagaaggctaagaggagagacattattgccatcaatgtgaaaaactcacccttcattttccttatgaaatatctgtgtaagttcttactctaaggcctcatctcgttaagactttatagacgcaataacacgagaacacgcattagacacgtattaatttactaatcattattatgtgat

SEQ ID NO: 3630 - DNA, 641 bp, Arabidopsis thaliana columbia
tctgaatattatataagtgactaatcaaaaaatttagaaaagattgtttcgaaatatcttatttgggaagctcggtgtatccaaaactctgtcctaaatctctctacatttttttgatttttttttcgttttagtaatatcatcgatggtgctatccaaagagaatatgttgaaatactcggcacaccttcgtgcttacaattccgcatgtggagaccatccagaactcaaatcctttgattctgagcttcagcagaaaacctcaaatctgataaactcgttcacctctgatgccaaaactgggttggtgccactgccccaacacgcagcatacaaggagttcaccaagcacctagctgaagtaaaccaacaggtgtcagactacatcattggatatggagaagtagtgtgggagaactcaactctgagatctttggtcgaaacctattttgaaagtgccaagaagactttggacattgccgagaatgtaacagaatacgtcgatgaagcaaaaaggggcgaacgttacattgtagcggccgtggcacagtttgaaaaagacaaagaaaatgatgttggcaaaaaaacgaagaggtatgaaaataccttgagggagctgaagaagtttgaagccatgggaa

SEQ ID NO: 3631 - DNA, 626 bp, Arabidopsis thaliana columbia
  unsure (1)..(626): unsure at all n locations
nnnnnnnnnnnnnnnnnnnnnnctaaaggctgtcctgtgggtgtctctgacggcaacgttggtatcgttcgggtcgtaaacggacacaacataatttaattgtccatacactgactgctttattcgtagccttactgacaaagtatgattgtctatatataaaatcgcggacatatgactgacattgtttgccatcattcgacaaaagaaaatatctaaagcgaagcaataatccttactcgcgataacgcgactccctgcaggaggatggcgaagtaatgctctgaactccgcgtcccggactaaggggacatgctgctgtatggattcaacggaggagtaatgtttaatcaggttgactttgccttttccatttctcaatgaatcaagggcgtattgcaatgacagatggcgacaaaaaatagcgtcagaaggagattgcaaaaaacatgcactaccattgagatttactgttgggtgtatagttttcttctctatggatttttttagacagtttcatacaatggttacgatcttcagcagttaactgttcctgtcaatataatccagtatgcttcgcatatggttagctttaataggcgtggtatccagtaataaggaaatga

SEQ ID NO: 3632 - DNA, 512 bp, Arabidopsis thaliana columbia
cttaactctaatcttgattcatacgtttgggggacgctcttaattcttttcctgtattctgatgatcgttcttattgccacgcttttcacagctatcgcaagtaccataccctggtggtatgaaacccaatatgcccgaggcaccagctccgccaaataatattctctttgtccaaaaccttcctcacgagacaactccaatggtgcttcagatgttgttctgccagtaccaaggatttaaggaagttagaatgattgaagccaaaccgggaatcgcctttgtggagtttgctgatgagatgcagtcgacggtcgcaatgcagggacttcaaggtttcaagattcagcaaaaccagatgctcatcacgtatgccaagaaatagacaatttcgttttatttgtgtttcgatgagatatgtgtgtatctgtcaatgttacttcttccatggtttgcgcaagaaggaaacttgtctttcttgtgtgtttgtgtagaatgcttagaatattacaca

SEQ ID NO: 3633 - DNA, 383 bp, Arabidopsis thaliana
ggtagcaatgtcctcatatgtgccagtatctcgttgacgaaaccattttcaaagtagcgttgtgtgttgcatgtactgtcgcaggaaaacatgtccgaggaagaactcagagcagctattcacaccaactcgaggcacagtgaaaagctccgagcagcggactcggtgatgaaaggcgggacgactgtattcaaacgtactcagttgctcggatccgagaaaggtttcgagatgctaaaacgtgttagtagcttcgactgtagtaatgtctatgagcttatcattaaggcataacaattaacatataaatttgagattcagataccaagactattagttgggaagtctcgcatttccaagaactgctcgagatgacttaatgt

SEQ ID NO: 3634 - DNA, 900 bp, Arabidopsis thaliana
ctaaagaaatacaaacgtcgtatcccttaacggattgttttctgttaagttcaggttgtgagcataattcgccggagggatattaaaatgaatggaaaattgcaaagttcagatgtaaaaaacgaaactccgtacaatattcccttattgattaacgaaaatgtgatctccagcggaatttctctgatctcgctctggcatacctacgccgacgagcattaccgggtgatctggccgcgggacaagaagaaaccgcttatcgccaactcatgggttgcggtgtatacgtacaaggatgtgggaaaattcttttaaagaatggcgaacaaataacactgcatggcaactgtattatattcttaaagccaatggatattcactcttatcactgtgaaggtttagtctgggaacagtactggatggaatttacccccaccagtatgatggatattcccgttggtcagcaaagcgttatttataatggcgaaatttataatcaggaactcaccgaagtcgctgagttaataacttcaccagaagcaataaaaaataatctggcagtcgcttgtctgacgaaaattatttatcagtggatttgtcttatgtacgcagatggtaaaaaagatccacaacggcggcaaattgaaaaattaattgccactttacatgccagtctgcaacaacgctggagcgtagctgatatggctgccacgatcccctgtagcgaagcctggttgcgtcgtctgtttttacgctataccggcaagacgccgaaagaatattacctcgatgcgcgtctggatctgagcgtatcgctattaaagcaacaaggaaactcggttggcgaagtcgctgatacgctcaacttcttcgactcctttcatttcagcaaagctttag

SEQ ID NO: 3635 - DNA, 297 bp, Arabidopsis thaliana
gtgaaaacaactgtgagtgatttctcgaatcatacactaatgtgacctttcgagaatgactgagttgcttggaatggataaggctcaaagtattattgactcaattggcgtcgagtgaacgctagatgtatgacgctcaactaccagacgaagcagcaagcatctgagcgtagaacgtctatcgtggatacggttgtggcgcgaattacccctgggcatctacggcaatcggcacgcgcgcaacggcgctacgttatgttatggaagaattgaacttcttgctgggctggttattca

SEQ ID NO: 3636 - DNA, 457 bp, Arabidopsis thaliana
gttgcgcttgagacagtgagaacctgaaatccgaccccgatcctgaatcagttcttgatgatctgatgcttgaccacgaagaaagatcgaaacttccttcagagctactccaagaagcagtcgtagtcgtagaagtggatccatcaatgatgaaactcccgccaagttttgtgctgatcgacgaggaagcagagactgcaacagcgataccgtctttataaagctcgaaacggtaacctagaacatcggagacgcctggttcacgccatgcctgaaggcgaacccatggcttccaggtgtagccatcaggtctgaggattagccaagctccaggactagaccgagagacgcggttggaaccaggagatggtacgaaaggtgtgaccattgaagccatagctacttggtgaaccagagaggatcatggttggttaccgacgaaccttttctccccttt

SEQ ID NO: 3637 - DNA, 480 bp, Arabidopsis thaliana
gattggttttgacctttgtgtttggtagacttgtttgtcttttgatattgatctgttgaatgaattgcagggaaggagttgaaggatccacgggttctaactgatgttggggatgttccggtacaagagattagagattgtggggttgatgatgatagactgatgaatgtcataagtgaatctgtgaagttggtgatggaagaggtaaagctatttgacagctctagtgttacgccacttcatgtatttagtcttttgtgatacttactagatcatttttatgtacctaggggctaaaagttttctgttttgacttttgacatactggtttaaggtcaatgaatctaaaagttcaagtaactgaacatttgtttgttgtgtcaggaaccattgcgtccgttggtcttaggtggagaccattccatatctgatcctgttgtgagagcggtttctgagaagcttggagggcctgtggacatt

SEQ ID NO: 3638 - DNA, 534 bp, Arabidopsis thaliana
  unsure (1)..(534): unsure at all n locations
tatgacaaagcacgtagtaagaagggacaaaagcttcaaatccatgtcttaccggcctcattgggtcacgtcgctgttccggttcctggaccggtccgatcacaaagctcttcttcgtctccttcaccgtccccattggttgatccacccgttaataatgctccacagtatcagatgggaccaacaccagcttcacatagcgcacttcagcagactttatctttactttctcttttgatcttactttgatagatttatgcacattttttattttattttttatcttagtttgatagttcgtagttttttttttttcgttgtgtagtttttgattacttcaacgtaagaaaaactttatgaaacgatctttatgtatatcatattttcaatagctaaaaactactacaaaaataaatgttagggaaatcttccagattttattttggtattctatcaaactttttagtgccttaaaatctgtanaatatacaaagtatgaaggtaatcaagttctagcagcaacatagatgaaga

SEQ ID NO: 3639 - DNA, 434 bp, Arabidopsis thaliana
gattctggttgaatcatatttgattttgacaggtagtgaatgtgattctaagagtggcatggatgcagctagtgctagagttcaacttgaagtcgcttcacaaaatcgcagtaacaagcattatttcatgtttagagattattcgtcggggaatatggagcttcttcaggttggagaatgagcacttgaacaatgtaggcaaatacagagccttcaagtcagttccacatcctttccattactacgatgacgacgatgttgacaaagatgactgagccatccttataagttaataacacactctctgattatgtttgatgatgattcactaaaactacagatatatattagccttaataggaaaagttcaacatggaaagacatatacatacatgaatccataggaaaacatagagagattacgaactttgctt

SEQ ID NO: 3640 - DNA, 515 bp, Arabidopsis thaliana
gttatgagaggaatcggagatccggttagcccgggttggcccggagttgtcggaggagaaaaactgagcttggatgacgaattggtcactcggagatttcccaaaatcccatctttgcctttgtctcttcgtaatgctgagatcattttggcttctctgggcggtgctagagctccgttggagtggcggaattcgggtcgtgtcggaccgggtcaacgggttggccctggacggatggttattaacatgacgtttcaggttagttaactagaattttgcatttccgttatgttttctttggtttgacttttgtaattttccgttatatttcttaattatgtgattaattttcgttacttcttgtgtgtgttacttctttaaattgtagggggagatgaaaatgaagaaaattaacaatgttgtggttcaataagagggagtgaagaagcggataggtatgtgatacttgggaaccatagagatgcatggacatatggagctgttgatcaaacagt

SEQ ID NO: 3641 - DNA, 1874 bp, Arabidopsis thaliana
tagctgatcttcatctcaaaagtgttagtagaggaatttgagtactgtatcttttgttttcacttcgatcttggaaacaattttttatctccaatgtttcaagtttcaactcaaccttggtcagttactaatctgatagtaaagcccatttttaattgggcctggcctatatagtcaccaaacgcaaaaacgatgatactctctctttacagataacgtaagataaggagaggtcgtcgatgcgatgacatgtactgccacgtcatcaatggaaagaacacaaaatcgaatctctctgtctccctcttcttcttccagtaaacttggatgacactgtgaatttcataatttgcccttctccggaatggctaatcactctcggcctcacatctgccagtgtttgactcggctagcctccgtcaaacggaacgccgtcgtcacagtctacggaaaccggaagcgcaccggcagggagttcgttgacggcgtactgagccttgccgccggactgattcgtctcggcctccgaaacggtgatgtcgtctctattgctgcttttaacaggtacatttttctacgaaagttctgaatttttcaaatttgaatgaatggagtgagtgaggacttaaaatttgggttttttgaatctgaaccgttgaaagtttggtttgttgttatttgtggtttcagtgatttgttcttggagtggttattagctgttgcattggttggaggagtagttgctcctttgaattacagatgggtcagtctctctttttcaagtccagtgtctgcttattacatcctttttagtatattgtgttatgtgtaaaataaagttcctgacacattatttggtgttcttaatgatttatttgtgtgaaagggcagagcttgaaagaagcaaaaatggcaatgctgctagtagaacctgtgcttttggttactgatgagacatgtgtctcgtggtgcattgatgttcaaaatggagatataccttccttgaaatggcgtgtgttgatggagtctacttcaacagattttgcaaatgaacttaaccagtgtatgatttgttttataaaccttaaaactcaagattaaggagatggaattgtgactcaattttttttttgttactggccagttttgacaaccgagatgcttaaacagcgtacactggtgccttccttagcaacgtatgcttgggcttctgatgatgctgttgttatatgtttcacttctggtacaagatgtttgattctgcttcctccataatgatcttcaggctacttgatctctttttgtttcgattttatcgccttcttgggataggtacaacgggaagacccaagggtgtgacgataagccacttggctttcataacacagtctctagctaagattgctattgctggctacggtgaggatgatgtacgctttttacctccacttatctgtttgtcctcaatgaaatctatagagctgaatacttccgtaagtaaatagtctcttaaatttctctgcaggtgtatttgcacacgtctccattagttcatatcggcggtctgtcatcagctatggccatgctaatggttggagcttgccatgttctgctgcccaagtttgatgccaaaacagctcttcaagttatggaacaaaaccatataacttgcttcatcaccgtcccagctatgatggctgatcttattcgtgtcaacaggtaaaagtccttgcttgaagtaaatttcggtctgtaaaccgttggttggctgaaatacttttactcaaaggacaacgaaaaatggagctgaaaaccgcggtgtgagaaagatactaaacggaggtggatctttatcaagcgaactccttaaagaa

SEQ ID NO: 3642 - DNA, 479 bp, Arabidopsis thaliana
gtattaaatatgcttctatatatgttatttacctaaatacgaacattcacgaaggtgttcatatgtgtcttaggatgatgcggtaatagaagtgtgttggggaaaatcacggaacatggtagttggaggcacatggccagtttcatcactcaagttctcttcttcttctcctaatgcttcatcttcttcgtcctcatccacatcccacagaaaccttgcgtatgaagcttgcacataactgcaccattccatcatcacaatattgttatcatcatgaagtctttttccttaattttcaaaattggttcaattatagaaaggtactttgcaaaattaccaatcttccggggacatgttgacggcttgattatagtaagagtgggctctttgacgatcttgatggttgtgcaaaatgagatcagcatagagagatagaacgtttccatagttggtgtccccaaaattgctctttcacaata

SEQ ID NO: 3643 - DNA, 498 bp, Arabidopsis thaliana
gaatactgagaggtggtcttggcttttgcagaaacccaaattcaaaaggtgatgcccaagctgtgtagagcaccaaaaacaccaaaaacgtctcccacgctctgaaaaataatgttttacctcagctaaaccctaatttagcgattagattaaaacagagtcaaaatttgaaaaaacggacctgtaacgaggatcaaaaggagagacgatgaagcgagggagaatgacgtcacgagaggaacgattgttggctccaagagaaggaagaaggcctttgctaaggctatactgactcatcgtcccgtcgcgagataaatggtcagcaacatcatcctccgcatctttggttcttcctcctcctctgcctccgcctccttcgccgtcgtctttcaaccccaaaaccataccttcttcttctccatgcttcagatccctctctctttctttttccaaaatcaaaatcccttgcggataaacacgcaaggttttttttttttt

SEQ ID NO: 3644 - DNA, 530 bp, Arabidopsis thaliana
taacccacagaccatatttgctggtactgcaacatcaatcatcttcggatacgacagattcagatctgtcaagagcaaaaacggcggtcatttatgagatgatgaatactttagcatcatactaagtagaagaaacttacttgacataatggttttgaatgtttctttatctttagttagacgcgggttgtgttgcatctcttctccaactgtacttacctgaattttaacagaaacgatgtaaaaaccattgcgtggatgagtcatattttccattaaacaagccaatgtaaatgaatttgcgttttgcattacctcgaaacctttgtagtcgtgagcaggatagatcaatgtgtcctttggcaatgtaaatatctggtaaaagaaaaaacaaaagcgtttaaacagagtccttgaaaatatgaaccacttgcctatggaatgtaaaacacttgcctgtgaatgtacagactcgtagagttgatctgagcttccttcctgaaacaccgaggaaaacatcgtagtacagt

SEQ ID NO: 3645 - DNA, 636 bp, Arabidopsis thaliana columbia
agttatagctaaggtatgtactcctttcttgcagatgggattgggttttatgttcacatgaatgcaacaacataagactacttggtgttttgacattattattctttcgtcattggtctatttgttaggaccttcctctatccagcgatacgtctcagattctgttcagtgcgagaaacctttagagctgttgacagactctctgatatcacagttttataatgttgatttggaaagagagctgaaaccttgggtacctgatgaagatgttccagactgttcagatctggagaatgtgtttgatgatccttggaagaggtaatgatgctattcattaaagtaggatatttacctttttgttaggatttctgttttctgatatagaaactgttttctctatttcattttcctctgtgtttacttttgtgaactaagttagaaagtgctttggaggttgtatcgggttaggctgagggagacaacatcgttttctcgatttctattcttggtactatgattctttttttaataaaaagagttttgtattttattcatgttcttgattcttaactctaacaagtagccatagatttatttatcccagtcaattcctcccattggttggttaggttgtgt

SEQ ID NO: 3646 - DNA, 572 bp, Arabidopsis thaliana
tatggagtacgcgtccgaagtaatctccataagtttatatctggtttggaaggaaaatccgtaccagagtctttggtccaacgcacggctcgtatgatcctagaaggacttgaggctcttcactcccatggttacgttcactgcaatctcaggccatccaacgttctcctcttcccgtccaagactcctggagagccgtgggatctcaagcttgctgatttcggctcatccaaggaacctgattccgattatggttggatgtactttggtacggcgcctaagtacatgccaatagagtcttttgggcctaagggagtgatcatcgatccgagccttgatatatatgctctagggtgtgtggtttatgagatgcttggagctatacctatccaggactactttgacgaatattacgaatggaatctgcgtcgtcatatctctccggaggctagagatttcttaagccggtgcagtaacatgcatccacacaggcccaccgcggcatatctcttgaaccatcctttcattactcaaatacttccatcgccaacaacagaagacaacaaggagat

SEQ ID NO: 3647 - DNA, 1352 bp, Arabidopsis thaliana
gtttggtttctagtccacgtgtacctagggggtgaacagcccatcggtaatagaggtagggccggtagccttgggaaggcaggcgttgtgcttgtttcgtttactgttgccagtttttttacgagagcgttcataggtgcctgtaaaaaggcgacctgccggttgataggaggtgagacgtctatcgaggcgaaatccagacgagttctcgaagtaggatcgctcggggagatggtacctgtcagatctatggggacctgggcaggaatcccagtttcgcggggggggggggggaatctccttacccgcgatatcgcgctctacctcatgtgccatgcgagtagaatcgcgtctctgctgacccacaattgcggcaaggttgcgatacgcaatttcttggtttttggttaagttgatcaagttcatgatcattgcgtggagctcggccaattcgctggcaggtcgcggggggacctgattagataggatggccgagttatctccgtttggaggctgtatcgtgacgtttcgttctccgccccttgtttgcggagggggagtgatttggtcagatccagaagaattcaagttttaggagatgttctccatgtcagtattatggacaacatcaacctgggctccgggagggagatccgttgggagtgcaccgtccgtaacgtcatcgtttgggatctgaactggtaagccagatcttgacgaattggatgaattgggatccatgatcgttggtcacaattgatgtgttagtttaggtgttgaaatgatctagatcttcaagattatgagaaaggaggaaatgatccatgatcgtgggttctgaaatccacataagagatttgtacttaagattatgagaaaggagggctagatcttcactgaaaccgtgagagttatattgctaagaacaaatggacttttgtattaattttgacaaagcttttacaatgagaaaagagattacaagtgtaaaagtgtgtgtgtgccaatgtgaactagattgaatgtcccttccaagtcgtccttgctcccttatataggtctacgcacgtggttgctccgtccgggatctacggagatcctcctggatattcgggaggtcagttccgagatatcaggtacgctccgcgaatatctcctcgtcagttcctaggtcattatttgcttatctccctgcatcaggtgactgggcttatcttgcccaaattcccattcgcatatgtgggctcgtcagctgcgtgggtcctgtacttagtgggcttggtgggcttttgtgggctggcttgatattttcgcaggtggattcctggaggggaatctagctccaacaccgt

SEQ ID NO: 3648 - DNA, 1450 bp, Arabidopsis thaliana
ttttataaggggagaggaacacattctttctatcacattggtctcaatatcaagtatgaacaaggagtcaagatctatcaatactaaccgtttgaagaggtaaaaggaagagcagttagattagctccggccttagtggttgtgttggaaactaggatatcctcaagtctgttggtatgccatctagattttccaatagtcgaattgagtcgaacctgcagcactcatcaatcaggcaatagttcataactaaactaaacaaaacgttttttttttttaagagtaagaaaatgagtcaataaactcaaaaacaaaaatgataagaataaaaaataaaagcaatattggtaagaacctcccccacacttaaacgacactgtccccagtggcattcaaatccgaagaaggcggaaaaaataaatcaaaaataaaagaaaagaaaagaaaagaaaagaataatcaaaccagtgggttacctcccactaagtgcttgttttgagtcaatagcttgacttggcagagttcaggatgtgggtagattggtggaggattgttgttgcctccgccccctccatggcggtgtgtaaactgaaccggtctaggcagctgcatgtgtcgatcgacactcaatggtgtgtcgatcgacactcttctcgtcacctgcaagaacaacaagagaaacaagcattcgagaaactctaggcttgttaacatgtgaagcagacttcatagaatctaaggaattaattgaaggtaaagcaggagaagagatagaagagaacttatcacagagggcctcaagtggtgtgggctgaagaggatgtgcagaatcctctgtctgtgaatctcgagggtgtcgatcgacaggagggatggtgtcgatcgacactgatgctctgcaactctcattggcgagctgagctgatgggagtgttatgtgtggctctgttttgggattctgagcagtcagaggaggtgtgtctgtgctctaaacgtagttagtaagtgcctcccccaaacttaaacgacattgtccccagtgcattcaaatctgaagtaagcaaggaaatataagaaaaatgtaaataaaaagaaaagaaaacaaaactcatactagtgggttgtctcccactaagcgcttctttatagtcaatagcttgactttgtcgaagtgcagatgtcaagtggattagatagtggcagtgattccagcttgaaacgtagctattgtagataattctgcttaaacaagtgatgggggtcgatctacactagtggtggtgtcgatcgacaccacactagcagtctgaaatctgttcctagacaataacagtcttccttatgtctccctgattttgtggagcttgcagtgctctcctaaatctggtgcatatactgttgaggcattggacaaggaatttatgcgtgtagacttggtcacaacaggtgg

SEQ ID NO: 3649 - DNA, 691 bp, Arabidopsis thaliana
tcaggcgagttttagcgttcgtcgttaaattcgccatggaaatcgaacaagaaggtctgagagtgagagaaataaatgttcttgataagaggaaagtcatggaaaagaaatggtgatgctcaaactgaaattgaggctcataattattctctatttttaaccaatttcggttcggtttaatttgaacaacttggtttgttttggtttagtggtttttcacttgagcatgtttgtgtatgtgcttaagaatggaaacaaagacaccaacaatctcaacaataatggttctgctgccttttctcttcttactctcttcctcttcggtaacggtttcttcttcggttcgcttgttggccgttcgggaatggtggtaccaagcccgtctaactcgtcccacccaccaaacttagaagccattccagctgaactacggttaactccacggccattgacattgtttctaacggttgatgagtcgtatacgatcctgccactactgctctccacggcttcttcttcttcctctatcccgaattgatttgctattgatgtacctctgcgtttatcccaaccaatcaacttctggaacgcataaaataacaatgatggcccgattgctacggctagtgacacgaggagagctttgggtccggtgctgccgagaagcgataagatgacgaatgggaggaga

SEQ ID NO: 3650 - DNA, 1083 bp, Arabidopsis thaliana
ttcattgagtatcttggaatttaagaattcaaaaaaatatgaccctctcatataaaatggtgtgtgtgggtctgttgtgtaatgaaaacatctacgtttcatcttccttttgttaaactttgttttgtattcaaatgatttgcagacggtttaagctctgttttaagctattatctcggcctacttgcatttcttcactttctcagtgaaagaatgattaatttttttcattagagtgcacaattgttaattaatattttcttgttatagaagcaaattacaaaaaagctatctgacagattccaatgtgatcagttcagtccaagctgtgctagtgaagtcatattcttgattcaagtaagagttgtggctcgaaaaccaaccatttgcagataagctttctccgagtgagtgagttgaatgatccagttacccgcccccaagttatcaatcttccatgaatctctgtttgcatctccttctagtcatctgagcccatctcgcaaagatctctgctgcagcaaacttacctgagaacttagctctctgtgccaattcctcaaatatctccggttgtccccctctgtggaaatcagctgcaaacttgttataatcaatcaaaggggttttcattcctttgtcaagcatctcctccaagtatctgcatgcctctctcgacttcccttcacttataagccctctgatcaaaaccgtgtaggagttatcgtcaggacaaatccctttcttgatcatctcgtcccaaactgctctccccatctcatagtttctcgccacgaagtaagatttcattatcatgttgaacgtgtgtatcgatggctcaatttcgttctggatcatcttgttgtagatccttgtgccatgttccggcattttctggttcgccatcagtttgatcaacgcattatacgttttgccatccggagggtgtcccttttcttgcatctccttgagcagttcgtaaacagtatccagcttcttctgagtcccaaaccccgtgatcagacacgtgtaaaccgcagcatcaggttgcaacccggaatcaaccatgtcatcaaagtactc

SEQ ID NO: 3651 - DNA, 1548 bp, Arabidopsis thaliana
taaacttgctcattgagctctctgtgcaccatcaagtcactcattatacaatggacattacagtatacacaaagcagagagtggaatcctaaaagtaaggaaacgaagtcaaaatggaagatatgttatcaaaataagataggaaaacgtcattgacttgttcacagaatattactagttgaaagaccttgtttattttatcattcttcttctttgactgtgccttcttctcctcctcgagtgcaagatctgctgctactgcatctgccttggctttgcgttccatattcattatttcattctagatgagaagagatatgaaaccatataaaaaaacaatataaaggccaagtcagacagaaaatgaaagctgtctatatataaccaaccagcaagaaaggtttcatcagttgaagaatataagtgcggttgtcaaatgcagaaagcctggcgaggttgtttagcaagctaatccttgaattttcaatcagcaaaatctttgagtcgattagaagaacctgcaagtcatgtcgataatttattaagttgggatgaatatgttactctgttgttaataatgaatattacagtcatgaatgaaccttgtgggtgaccactaatgtcagaaggcctatggactccagcactttatcgtccctacaacttttctgctcacgtataagattcaagcagtcatctaaatcagggacatcaaatggtggaagcaatgctccttccaaaacatctcgtactgcacccaagaatatttttctatcaacggaaatttcagggagtatctcttcacactcatcgcacagaatagatgcgtatctgatccactgatcttcctgaagattccttctcctttcatcttcactcatacatattctctcgattatcataagacttgtgacataacctaagagcaactttcgatttgtatatttggtttccagattcctacatgtgaactgaacagctctgagaacagctagccatatatcaagattgtattccctgataggtttgggaaagatcttatctactgaaatgttgtcatataaccaaggtatgatatcatccccctgagcatgtgccttggcgtagtgggcaatgggatcaaaaacattgattgtcccttcatcatcacatggagcgttattgcttttcagcagtcttctatccagaagcagatatgaaaactgagggtcaaagtcgatcttttctttaacccgagtacgatccaagaaactgtccactgctctgcgaaccagctctgcaccatcattccttttacactttattttctttagaaagtctagaatctgattgagttcaggacattccaaaaaacagatactctgaggtgtttccactagtcgagaatagacaagactctgtgcagagacttcaagtttttcaagatgcttaaccggaaaatgcatcacccagtctcgaacactgcatgataacgttttatggtcacaaagcgacacaaggagcaatttgatttccttgagtaacttaccgcgctcttcagggatcctc

SEQ ID NO: 3652 - DNA, 888 bp, Arabidopsis thaliana
ggtcgagtagagcaatctaggcatggtgcagttttacttcaatttcattaactacgcatcaaacaattaacaacgagggcactgagcttatttggtgaaccaaaatgcttacaaggctatttcatcattatcccctatgcaactacatgaacactctgtttttgtgaagtcattttctgaaatttttcaatttttttgtttgtttttctatgccttaaatgaatgcagactcaagattctagacaatgcaacacacacttcctgagccctcccccaaacttaaatcacatagtccactgtgtgaccaaatttggaagagagtactcaggacaaaacacatcacagaaacaaaataaaaacaagagatggtatattacaatggtgaagtgaggtgtttacctcagtggaaaaaggagcggagttggtcgtcaatagctgcctgtgattgctcctaggccatcgaagaatctccctgttgtgtctcagcttcccccctgggggtactcgacctctgctccttcgtcgcggtcagcaccgctctgatgatactcgacctctctatttctgctgcagtcagcaccgcggtcgcgtaagctatgggactggagaagtcgtgtattcctgctgccagaccgagccagtgtagccttgttcattctcccgagctcccgaggctcgaatgatgaatgcctcgtaaggacctgtgagactactcggttactaggctcaggcctgtggtgacttggctcaggcctgtggcgacttgggtctggcgcgtcatatcccctcgagggcatgtcctgaggaggctctccctgcggaatagctgtggtagaagaggagcaacttagcttgtctgtcagaaacttgatggccttgaagcacttg

SEQ ID NO: 3653 - DNA, 931 bp, Arabidopsis thaliana
ctgtaacattcttgtcttgttaacaagttttggatcttttagcaaatttggaattcttatattgtgctatttttgaattttgatcatgcaataaaatcagattaaaccaaagtgaaaccaaaaagtgttaggactggaatggttgcggctgttagggcggacaaatccgtatgcgctttagaccaacttttgtttaccattcataaactatactcagcaataatgcatattgagaaaaatagaacaaattcgctctggaatcattgcagaccgcatttatgtagagaataagttgccccctgcggtgagagctcacctcttatgccactattggaaaagaaataatcactcgtgccattcttatgtttagaataatattattgatttttactaaaatcgaaaaatgaggaaatgacgaaaaacctttgcgaaaccacgaaaacttaatttgttgggctcgggcccaaagaaaaatgtaaatactcggcccagttgtattatttaccctacaaactacagaaaaaacctaagtaaaaacctaattcttcccccttttcacttctcgacttcttcctcttctctccgtcgtcgtcttctcttctctcgtctccgacgacaccaccaatttcagttcgtctttgtctctttcatatggctagagtaaaagactcatctggagaatatgaatcaacagaagaggaagccggagaaattcagcctacaaccggcgattgtgacgccgccgatttgggtaattcaaacgccgtcgcatgggaatcaaatgacgatctttcagacccaaatgccgattcttgtgcagaagaagaagaggcaacgaatgcagttgttcaacatgatgatggagcaaataaggtatgatagaagaccgttatttttttgattaggctcgttttaggatattatgcatgca

SEQ ID NO: 3654 - DNA, 1875 bp, Arabidopsis thaliana
cggtttttcttatttggtggacttgaaaaagaatacttgttcttgctgagaatttgatattgacaagtacccgtgcgtccatgctatagctgcagccataaagcgatctaagatggattggaatagccattcaatcttgaatgtaagtatctatggtctatgctcgaagtattacttgatcgagacgtgggcattggcatattacagaacgatttatgtggtgccgcatcaggctcattggttctttcctcctgattatgtggagaaggtcgcaaaaccgccagattacactccaaaaaaaggaaggaatcaagaaacccggtttccatccaaaggtgagaagcgccgaaagaagactaataacaaagctacgcgtggcatcaacttggagaggtggttgcagcctgaaaccaatgatgattgacgttaactcgtcaactagtacaaggagttcaactacgataaagtctttgtgtgtaaatttgtgtttctcggaattgtcaaatattgttcgacaggttcaattaagaacaatcctttgtgtttaaatttgtgttttcggaatttttaagcatagttaagttttttaattcaacagaattgccaaacatagttcaacaggttcaactacgaaccagtcgttgtttggcaaacctagtacaacaggttcatctgcgtctactataaacacgggtggcatcctagtcaacgcgtcagttgaaatattagcagtgacaggtggcactgcgagtaccaatcgtcgcgtcggttggaatattatttaagacaggattacaatcgattttacaccattcatatttcatcctatccaacaaaaagagcccaccccactaataaaggaagccgttgtttgtcaacatggatggatatcattctgtttccgaactttgtctgactatcagtggatgggactatttgcgtttttgttgtgaatgtgttcaagaagtttgtggcaccggatgagttcgaactgggcgtcatattggcagatcaaacggtaatatattgcgaatatgtttaattttgtttctttcacataacttgcatgtatatagttaaaattatttggtgtagggtccccgttcccgaatcaaggctaccattcctcgtcgccttgcgtcattttactttgatcgaatacgagaatatgagtatgagtgaataattatcactaatttctcggtccgaaatgacgctgagtctgtgagagcaacatcccatgactaccagatatggtttatggaatagactattgttactaaagctttgaaaacggatgcactctcgttttggaattttactcctttcgacaacatcatagagaagacggttaacaagaatgtgttggtcggtgagttattttgacaattttatagtattttctttgagaaattgtacgaatacttacttctattattatacacaagatgtggtaggtgccattatttggcagagccgagtgaccgaaggcatcgacggtgtgaagttttctttcaagatattgaattagcagtaagttcaaatggttacttttttgggattagttcaaatggttcaaatgatatagtttaaacggttcacctagtttttagttcacatggtgcacctattctagttcaaatggttcaaatgttatagttcacatggtgcacctactctagttcaaatggttcaaatgctatagttcacatggtgcacctactctagttcaaatgtttcaaatgctatagttcacatggtgcacctactctagttcaaatggttcaaatggttatagttcaaatggttcacttggtctattctgatggttcaagtgctatagttcaaatggttcagcatacctggttcagatgg

SEQ ID NO: 3655 - DNA, 590 bp, Arabidopsis thaliana columbia
tatatacaacaattgaggttaaatcattcttgactcttggtttgatgatggttgtgatgtcataataatgtttttgattggtttctgttgaatggtattggagaataggacactgaagattgaggttgaggagctgaaagagttagatgaagagagggagaagtattacaaggtgaaatgttcagagatgaatgagtttatgcaaaatgttgagaggtttagatcagagaaccggttacaaatcgagaacctgcgaaaccgaatcaaggaggtaaaatcacagtcaagtgtgtggttttggattaagtagtgatttgtagcattgtatgctttagttatgtattatcaatctttgtgtttctcagcttaactcaacgttcgaggaaagtcatcagaagaacatttatctacagaacataaattaaggtatgattctgaattcctaatcatcatttgaagagagatgtaaaagtatattgagcacggttgtggcctgtgggaattacatagggaaggcttttatgagattactacatgatatgatctttataagaaaagagattataatggatacagtattcaagacattt

SEQ ID NO: 3656 - DNA, 984 bp, Arabidopsis thaliana
ctttcttattatataatctattgttctagtttaattgaaatcattgataagtgtgtattttgcatgttttgagcatccatttgtcatcattttagcatcatatcttcactgttttataccatttcacaacatttatcatcactttgcgtgtttaggatagttttgcatgcatgttgcatatttgcgttgatttcaggtgatttggagttgttgacgagctatctggaagaagcggacatgatcatgacaaaccactcgaccaccaggtcgagtagaagacatcaccacttcacctcaccactcgaccccgaggtcgagtgccatcatctccatcaccagaccgtcactcgatcacttcactcgaccatgaggtcgagtgtcttcacctccatcatcagacaaccactcgacctactcactttaccaagaggtcgagtatctccaccacaccactcgactgcatactcgatgacaagcttcagagccttcttcattctgcactcaaccagacactcgagcacaaggaagaaaagaagactccagctattcactcgacctatcactcgaccacgtgggtcgagtacagttcttaacccgtccaaatacttcgtcgttttgggtattagggtttcgggatatttggctataagtagcatgtatttctcattttcgaaaggaagaagtttttaatctagttttatttccgcagcccttttgttctagactttttgtaatccggatttctctttatctattcagtattcagtattcagtttctgttcttgattttcgtttactgttgttcattctgttatcatactgctgttacactgctgttatcatgtcttcaacctgtttaacgtttatgctttctgttatgatgtctgagtagtgaataggtttctgaggatgggttagagtagtgtagaattctcagtatgctaggtgattgagtattgattgatatatcccttcaggattagt

SEQ ID NO: 3657 - DNA, 512 bp, Arabidopsis thaliana columbia
cagaatctaagaaagatcctagtgtttcatcatcatcaacttcttctgagtccatgaatggtatcgatggagttccggttactaacgaacgaattgcgtataagcttaaaggatacttcgatttagcgaaagaggaaatcgctaaaggggttagagcagaagagtggggtttacatgatgatgctcttcttcattatagaaatgctcaaaggatcatgaatgaagctacttctactccttctccttcgtatattagttccaggttttgataagtttgttttgacttatatatgttatgttgaaaaataaagttgtagtgatgatgatttgttgaatgatatggtagtgaaaaggagaaggtgagatcgtaccgagagaagatttcaaattggcaaaatcaagtatctgagagattgcaagctttgggtaagcgtacaggtgataaagttttaaatttttgaccttttttgcatattaatatgaagaagcacaagtgaattcacactaatggt

SEQ ID NO: 3658 - DNA, 482 bp, Arabidopsis thaliana columbia
atcgtttaattgtttcatcttccatctcacatcgtttgcaaataatatagcaacgtttcccatcaccgcgtcctctgttttaaaaatctccatggtagtcccggtttccataatttgttttcgtattagtgtaccttagtttgtttttggttgtcttgagtttcttctttatcgcatacacgttcttcataaactttaagacgtccgacgatgtcttcaaaacttgtggttttaagatctaaaatttgctcgagagatgccacgatgtggatatatcttttacgcgggaggcttttcagaaacgtcttgataagttttgatatttcccccaatgcagctgacttcgacgttatctcagagagtttttctgagaaggcatcaatagtctcggagtttttcatcttgaggcgatcgaattcttaatgattaagctttgtagtctcgcttcttttactttgtttggcctacatgctttgctttta

SEQ ID NO: 3659 - DNA, 472 bp, Arabidopsis thaliana columbia
tgatcctgtcaaaaagctcgccgcctgcacaacactccattacaaggtgcactgccacaacatcctcataagctcctttgatggagatgacattagggtgaccagccaagtgatgcattatctgaatttctcttctcacatcctcaacgtcctcatcagtccatagcttcctcttagcaatcgacttgcaggcaaactccttccccgtagtcttctcgacacataaaaaagtcgtcccaaattgcccttgtccgagtttccttcccaaggaatagaattccttgaagttttcagtcttcctctgcaacactgactcagtcctaagccctgcacttgacactctcttcatgtgtttaggcttcttaggtttagctggaggatcaggttttgactccggcttggtctctgacttggtctcctgcttagtctctggtttggactcaaggcttatctcctctagcgtttcaggctt

SEQ ID NO: 3660 - DNA, 526 bp, Arabidopsis thaliana columbia
caaacaccgtcatcttcctcttcttcgccgctcgattcttttgccaccgatccaatcctctccccattcctctcatcttccttctcctccgcatcattctcctccgccgctctcgcttctggatctccggcctccaccgccgaacgtctccaccaagcaatccgcctcctcgattcacagctccgtaatgacgtcatctctcgtcaccctgaattgctcgctcagctctcttctctctcacacgccgatgtatctctctcttctctccgatcctccgtctcttcactccaatcttcaattcgccgtgtcagatccgacctctctgaaccgatcaaatcgatccgatctaaatctgttcagctatctaatctccatacagctactgagttactatctcactccgttcgtacgcttcgtctctctaagaagcttcgagatctagcggattttcctgatccagataagatcgatctcactaaagctgcacagttccatttcgagatcttaacaatgtgtaaagagtatg

SEQ ID NO: 3661 - DNA, 528 bp, Arabidopsis thaliana
catactctgtgtcaaacaatttcaggaacatcctttcttgaacaaatacgactactcggggatcaatctcgcgtcctacttcacagatgcaggatcgccacttgcaacacttgggaacctgtctggtacgttctccgtgtaaactacaagggagacataatatcaccatctggttcctgttatcatctgaagatttcttgttttaccttccagtgataaaatgatctttataatacatatagatatattaaattgctgtattttaagattatagatatataaggtacatgagagtgtttatttaaaaaaattcacttggaattcatgttttgtgatacgttagattggaatccatttgggaaaagaagaatcatctgttcttatgtctcaaattttgacttcattcacttttcttcttgtcttttaagaaagcttccacaatctaactgttcgatgtgaaaactgagattcgagtaagaaaatgtgaactgtgttatactgttttttaattagataatttagattgca

SEQ ID NO: 3662 - DNA, 681 bp, Arabidopsis thaliana
cctctctctctctctatctctgatttacataaatgtatgcaggtgtatattgtgtatatgggaacacttcctgagattaagtactcacctccctctcaccatctcagtatactccaaaaacttgttggcactatgtaagattcaacctgtttcctccttatccttattccaaacactttacatatgtaattttggatgaggatcaacatgtttctctgtctctggttcttttttccagtgctgcatcgcatttgttagttagaagttataaaaggagcttcaatggattcgctgccaatctatctcaagccgagagtcagaaactgcaaagtgagtatttcataaatcatcatttcttacaaaacaaatgtcagaaactttggaaaatcttccacaaaacacacaacgttttctgcaatttataaatgtgtagatatgaaagaggtagtgtcagtgtttccaagcaagagtcatgaactgacgacaacaagatcatgggactttgtcggatttggcgagaaagcgagacgagagagtgtgaaagacagtgatgttattgtcggagtgattgacagtggaatctggccggaatctgagagctttgacgacgaaggttttggtccgcctccatcaacatggaaaggttcctgtagaggtggcctaaaattcgcttgcaacaag

SEQ ID NO: 3663 - DNA, 500 bp, Arabidopsis thaliana columbia
aatagaatatctttggtgacactttcttcctcgattcagaatgccattaaactgatctatttagatatgaggggttgcacaaagctagagagttttccaactcatctcaacttggaatctcttgagtacctcggtctcctttattacgataatttgagaaaaatttccctgtgtttaaaatggaaacttcaactacttcgccacatggaattgagatccgcgtagaaaattgtatatggaacaagaatctccctggtcttgattatctcgcctgccttgtgagatgtatgccatgtgaatttcgcccaaatgatctggttcgtctcatagtgagaggcaaccaaatgcttgagaagctatgggaaggcgtccaggtacattgttaatattatagcatttgctgatttttgtttaactctgttgtaaataattacgtataaccaaattaaagttgtcaaaatggcttgtgattccacggtttataattacatacagaatta

SEQ ID NO: 3664 - DNA, 359 bp, Arabidopsis thaliana columbia
tctaaccattgattattcgctcattcaaataagccaatcaaagttcccttggtccggtgcatagccattacattttcgaataagacccaaaaaatcacgaggtagaatgatctgccaataatagtaaaaatgtaagtaaggtaatatatagagtgaataaatgaggtcgttataggatgtatagtactaaccttggagtggcaatggcactcaagagggtgatgacagaaggaacatatatagttgaccagttcggtatatttacttcgggaaggaagacacttgtaggaagaatgactcagtatgagagattagtgaagaagtggactacgatcttccgtaggaaaagaagctgtaga

SEQ ID NO: 3665 - DNA, 459 bp, Arabidopsis thaliana
gagaaacacacacacacaaatcctttccttttctctcacgccttctctctctctctcactcactctcgagcatttacaccacctcatcttacgtggtctctatataatttccaacttggtttcttggtttttcccgagaaacaatcaaaagaagaccctaaaacaggacacttcttaggtgcatgtgtgtgtgatcgtcagagaaagataaagacactttcctcttccttccttcttcttctttcttactctctctctctctctttcgcttttattagtcgacatgggcacttgtagagaatcagaacctactcaaatcttcgttcctggtccgatcatcgtcggagccggtgcttccggtctagccgtagcggcttgtttgtcaaaccgaggcgtaccatcggttatcctcgagagaacagattgtttagcttctttatggcgaaaaagaacctacga

SEQ ID NO: 3666 - DNA, 520 bp, Arabidopsis thaliana
aaaaaagtaaagaaaatccatgtagaagccccccaaggttctgcaaaatacttcttttcaattagtaattgaatgaatataaaaaggaaacctaaacaagatagctcctgtgacaaagaataagcaaacaagaaaattacgtacttggttgatagagcgccccaaatgatgctcatgctgaagaaaacgtgtaatcagtaagacctgcaataattatactctaagatttacaaacaaatattggaacatgtttcagtggattagattaaaaagtgtggatagatatttctgtccaagaacgtcgcagtgttaaataagacaagtaccaattaccaggatatgcattaaacatacagagacaggccgcctaaaatccaaaagaaaagaacatattacttaagtaaaagaatacacctcaccaggcagtaagagcttaatccgccagagtatgattgatccagggtacgatcagccaaaaactgctttaacaccagagcaagtggtgtggcagctggaaatt

SEQ ID NO: 3667 - DNA, 552 bp, Arabidopsis thaliana
gctagatacatcttccaggaaaccatacacaccatatggcatgagagaaatggtagaagacatggggaacgttcgaattcagcgactcatctaatccggtggctcgacaaacaaatgaggaatcaaatttccacaatcgcagcaagcggagactatcgatatgataaggctctccaactatagtttcaatcaagatcatgagcttttttacaaaaaattttctactctttcaatcatatgttgcacttgatgtataaacgtttatttactttttaaatataatttaacattaaattcaaaaaaaaaaaaaatattatgatttttgattggtaactggtaaccccatttaacttataaaatcacaaaaaaaatatttatgcatgacaacctttgccgagtcgcataatggttaaagttaagttaaaacatctattaaaatgattaagtgatagcattattcgtaagttacgagtatacgacaaatcatatttgatatgataacgttctttattattaattagcatcggtgccactttctgtgtcaatatattt

SEQ ID NO: 3668 - DNA, 522 bp, Arabidopsis thaliana
ctagaggatacttacaattatatgtctgtaagtatcttatttgtctcttgagcattgactagtttgaaacccctttcgagtgttataaaaattgagaatcttaatttttcctttttacagccagagagaatcgttggaaacaagtacggaaataaaagtgatatatggagcttgggtttagtagtactcgaatgtgcaacaggaaagttcccttatgcacctccgaatcaagaggaaacatggaccagtgttttcgagttgatggaagccattgttgaccaaccgccacccgctcttccttcaggaaatttctcccctgagttatcttcattcatctccacatggtaatctctcaaaaaattcctgctccctcttttactgagattactttactaagttaacatattccactctacactctcatccagtttgcagaaggatcaaacagtcgaagctctgcaaaggaactgatggtttgttttatataatcccttttgcatgtttttcaccattgaaatgttg

SEQ ID NO: 3669 - DNA, 511 bp, Arabidopsis thaliana
ggtcgactgatccccttttttatttgatggatccaaggaagctactatcttgttcatcctcttacgtgtcagtgagaatgaaagaagagaaggggacaattaggtgttgcagtgagtgtaagaccaccaagacaccaatgtggagaggtggaccaactggtcctaaggtctcttcttctacctttaattactatattcataactttgtttgatcttaagataattcatcaagtgttcttaagttgtttattttgatttgtggtgggatttgcagtcactttgcaatgcatgtggaattagacacagaaaacagagacgatcagagttattgggtattcatattattcgcagccacaaaagcttagcctccaagaagataaacctattatcatcatcacacggtggcgtggcggtgaagaaacgaaggagtctaaaggaggaagaacaagctgctttgtgtctattgttattgtcttgtagctctgttttggcctaagtcaaaaaacagaat

SEQ ID NO: 3670 - DNA, 383 bp, Arabidopsis thaliana
cgccatttggcagaaaatacgatttattaataacatccgatatttagaataggagtaataaaaaacataaacacacgtatacagagtcttttaacaagttggggcgttggctagaccacgctgtttggggagagcagaagcgagttcaggcacaacaccgaaagaaccgagccatggagagttcttgtcaccacaaagacatggaaaatcagcgtgttgcagagcggtgcagcaaggctgtgatgggctcgtcgtattctccatgctaaccgctggtttggactcattcaactcatcctggctcatgccgcagagatctatcgctagtgatgtatcgagcaacatagccattatcaagatcatcggcatcataaccatagctg

SEQ ID NO: 3671 - DNA, 547 bp, Arabidopsis thaliana
caataacttccaaagattgaatatttccataaatgtatatattcacatggtaagatctgagcaaagatctaatacagtaacatattcaaatcatatctttatttcattcaagaagatgtcctgtcatataataagtacacttaaaatggcttatggactatattacagatcttgagtttgtacataaaatcattcgtatacgtaacatacaaggctgagacaatctattgtgacaacccggagaagaaggacacaccggtggatggcaaccacgaagaaccagaaatgaactgagccaccgtaaacttactagcctctaccgttgaggtaataacatgataaccaggccatttgactcgttgaccaattcctgaacccaacccctttgttcatatactcaccatagtacaacgagtccaatgcaaacggaccattccactccaaccatcctcgcgggtcaatatggtcaccatatccgacatcatgtacacaactctagaatacaacttcacggacggccgagatacgtcggataactacccttaga

SEQ ID NO: 3672 - DNA, 464 bp, Arabidopsis thaliana
gaatataactaagagaaagcaaattaatgtctcacggaaacacgaaacaaataaaaattggtcccaaacatatgaaagctacagacgagtaggaaagttcacataaccaaactaacaccattaaacataaaagtagtttacttcagttgcttgttatccaaggcaccttcacatccatcagcatcattcatcagtgagttattctctcttatggctttgagacaactagaagcagctcgagtggtgtgatgagggtgaatttgcaagtgtccccaaaaacaacaggatactccttgcacaaacgtttccatccaccagagaaaatttgacccctctcttttaccacaaaaacaaccttccatgtcttctccccatctggatgatggatcttgacccttgttttctccttcggcatataatttccaaaaggtttcgggatcgcctgaaaaaccaaaccaattttg

SEQ ID NO: 3673 - DNA, 1586 bp, Arabidopsis thaliana
cccaaagttaagtagtttagtttttcacctaccatgtttgtttcaatgatcctaaatgtttttacgtaatcttctgatggatcaaaacttctacaaaattcaagttatttttttttgaatttaatgttaaattagattcaaaaagtaaacaaacatttgtacatcaagtgcaacttatacttagagagtagaaagaaaagttataaagagatttgaaagcttaagatcttgattgaaaccataattggagagccttctcatatcgatagtctccacttgcggtgatggttgatatttgatttcttatttgcttgtcaagccatcggattaattgagctgctgtatttggacgtccccatgtcttctaccatttctctcatgccatatggtgtgaatggctgcttggaagatataacgtgctagaaaactcttttactgtcccgccaagaagtactgagagaggttactaaagaggaccaacttgttgagaacttcgcctgatagatattgtttgctagattgctccaaatttctgcagagtagcagcaggagaaaagaagatggttccgtgtttccatagtgttgttacagagaacacaagttgaatgacagtcccatgttccatttgagcatcctatcgccggtagtgagtctgttttgcaccgctagccatgtgcagaaagaatacttcggtgtggcatgagcgaaccaaattcccgtgtgccacgtaaccgtagctgaagttgtgcgaacgtggttccatgtgtctctcgtggaaaattttggcctgaactcatcgtttcgtcctctccaaaattcaagttattaactgtctatatcctcgagctttattacaaccgataaattgcgagaattggaaggcaaggaatatatagatccaaatcaagaacaactcacatcatcactcgggaaatcacataagttttaaggactcgctcctcacattaaaagatcctcgatcagcacaagtactggacttacgctcatctcacaacatgttcacttacattcagttttcacatgagtaattttattacaccaattgaaatcatattttgtacgttttccttcattgaaaactatatatcaagttctcacttattttggtaaactagtcataaagatcaaactatcttctgtaaagttttaactttggcagtgaaaaaattaaataaccaacattttttttggaagacaaaatgtacatggattatatgctcgacatctgttttcttagcaaaatttatgtatgatttttaggaataacgaacccaacgaatggtaagacatcataaattttatttttcataagaatgttagcacatcactgtttttataaaaaaaaattagtaatgatctcaatgcgcataataaaacgttattgctttgaaatttttcgttcgatcgcttctataacgtgaaacaaagagctgtgtatagaagcaaatattaaaggatttatagtgaaagactgaaggtattaaatcaactaacataaagaaaccctagggcaaaaaatcattaatatataaaggtacaaaatcatgtttcatatgatccattca

SEQ ID NO: 3674 - DNA, 495 bp, Arabidopsis thaliana
tctctctctctctctcagaccattttgttcaagatttgtctgatcaaagctcctttttcaggtttctctcattgaataagtattttggattcttccttatatataaattccccaactactctcctttccgcatggtgatagctacttctcactctgttcttcttaattctcacaaacgccattaaaggaaaacaaaacaaaaccccaaagacttgtcattttcttttttttcgaaatgagttctttagtttgttctgttttgtaaccaccgtgagagatttcagggtagaacaaatccaaagtttcgatttttattaagtttttctcaatgggtcattcgatattggagaaaatgggatgttcaaactcgaaagcatcgatgaataagaagaacgagccgcttcatctatgcaaagaaaggaagagatttgtcaaacaagctatggattccagatgtgctttagccgctgcacacgtgtcttacatccgttcact

SEQ ID NO: 3675 - DNA, 578 bp, Arabidopsis thaliana
aatcagtcgactatcgagcggactgtttcaagaggtgatcataaccaacacgattccattgtcagagaagaactattttcctcagcttacagttctctcagtagcaaaccttcttggggagaccatatggcgtgttcatgatgattgctcggtgagtaaaacataaacactacttgcaattttcgcttgaagagaacttctgtgtctaataaagttttttgatattctcagggagccattgagccattttcgacgttggggattgattgagtgatggaaaaagggtaaagaatgtacttatagcctctcagtagtatgaatttctgataatgtacaaactcttttccgctgtaaaaatgttagacttgagtgtgattgtcaagaagggaacacttttgtagagaagaagatttaatggaaccacgttttcaaactttttaagaatacaatattttttttttcgtcaatttggatccaatcatgtagatagtttaccgttgaagattatttatttgtgaaatatctggattttattttattttatttaaagccaagttacatttagaccttaaacctat

SEQ ID NO: 3676 - DNA, 492 bp, Arabidopsis thaliana
taaattaacatttcttaatattttttgtttcaggtttattaccaaacggcaacttcgagttgggtcctaaaccctcccaaatgaaaggatccgtggttaaggaacgaaccgccgtaccaaactggaacataatcggctttgtggagttcattaaatccggtcagaaacaagatgacatggtcttggtcgtaccgcagggttcctccgccgttagactaggcaacgaagcctcaatctcccagaaaatatccgtcctacctggccgtctgtactcattaacgttcagcgccgctcgaacctgcgctcaagacgagaggctcaatatatccgtgacgcatgagtcaggtgtgatccctatccagacgatgtacggcagcgatggttgggactcatactcatgggcttttaaagctggtggtcccgaaatcgagatccggttccataaccctggtgttgaagagcacccggcttgcggacctttgatcgacgcgg

SEQ ID NO: 3677 - DNA, 560 bp, Arabidopsis thaliana columbia
gatgagcagaaacaatttaaacattgaaaccaaactaatataactactttacacaagttaaatcttttatgctaatataatgcatggatcacaaaaagaaactcctaattaaattagacaaaaaaagagagaatttgcattaccatcttaacaagaaatacaaggttataagaacaaaagatgatcaaatgaagagtgaagtagaaacagaagatttagaagaaggccattcatcaagaaacctataaaacctcttgcttccttgctcttcttcattatcatgatctctttgtttcagcttctcctctaacatcaatggcctctcacgtgtcctcaagtcagtaccaaggatgaagcaatgtcgatccggctgcttctcctcgttgttgatgcctctacatgagccatcatcattatcttccattgctgagccagagcagcttttgattgacccggaaggttctatggagaagaaatcatccatgtatccacttcttcttcttctactttcaaacatgttttgaagataaaaaatagtcaatcattgtgttgtcattaga

SEQ ID NO: 3678 - DNA, 563 bp, Arabidopsis thaliana
cttgcccataaccataatacccattccactgattcggatctgcttgtgtaacccaaccatcctataacaaataccaaaggtcatcaaccacattcagtgaacacagcaagtataataatgtcatacatcacatcagtaagcttttacctgtcctggatttttactccaagagatgcgaactgcttgttgaccaatcacttgtccctgcattctttgaacagcttcttctgcagaaggcctggggtcaacaagggcagatatcaaaatgctagtcaacggagctagaaatgagcagacatcacaaactgatacatggaagcaatcgcaagtgactgagttttactgggtggcctacctggttttgaattgaacataaccatatccctttgttgcaggtattttgacataaataacctctcctaattgggagaatgctttcttcagctcttcctctgtaacattttggtccaaattggcaactgaaatctgtacaccaaaaccaatgcatgaaaacaatcaggagacttgacgagaaaaaaaaactcaagcttttcagataaaac

SEQ ID NO: 3679 - DNA, 529 bp, Arabidopsis thaliana columbia
ggtcaggtcactcacgcgtcctcccttccgtctccattcacctgcatggctcgagagagcgtgcgttccacgcacctagttcctttggttcgtcaggctcgaccaccgaccagacatcctcttccatgagctccagctcaaaggtagtttctccgtccacatgatggtcatcggactgctgatggctcccaagaaacctctcgcttcgactaatcggtaagctccgacctttgcccatatctctcttggttacctaagaaaattgtatacccgctgtgatttaaatcgtaaattacgtttattcacctagttatcaaaattaatactttttcgttgggttttcaaaatatatttggaagtgaaggtgggggatgaggatgagcatgtgtgtgtgtgaatatatatacactaaaggtgaataggtattgctttttgtgtgtggtttactcagttatgttcggtaagatcagaagaagatgtcatagtccacgtaaaagaaccatttagataacgacgcactactattttg

SEQ ID NO: 3680 - DNA, 622 bp, Arabidopsis thaliana columbia
cgctatcgactaaaagaggtaacgcctcgcgatcagaagagcttgaatcagaaaacatcggcgtaccagcttcgcctttccttccctttgaatcagatattccacaagataaactcctaccagctatatcaagaaaagttttgcctctatgatgaattcttgaccaattaaacggtattccacaactcatgttctgttctctatctcttcctcctcctccttcttctccctcatacttctcaccacgaggcactgagttagaagcaatagacatctcactctcattaccagcagcattgtctctaacattaacggcccgtcccgctctcctcgtccctctaaacttccgtcttctacacccatcaccgcgcggtctaacattacaagaaactaaatcatcactatcaccaccaacctcatttaactgatcagaaagagtcttgacaatagcctcattaaccttcttattaatcctatctttcgataccgacttcacggaaggaacactataaacctcattaacttcttctactctataactcttcctactcgacctatcaaacttttcatcagaaggagtaactttagatgtccaaaactcacaattggagaagaccagaca

SEQ ID NO: 3681 - DNA, 488 bp, Arabidopsis thaliana columbia
aacaaatggtccaagctgcaagctgctgctgtttggtcttcgaacgatcaagcgggttgagcagactctgcaagatctcggggtttgtctttgcttcttgttctgtttaactctttctatttgtctatctcatttgcttatctttccccattgattgatgatgagacttaactaatgttataaaaggcacccgtactgaagctagctttgaatgtgttctatgtaattagttgggattttggttcgggtagaggctagtaggttcttgtcagtttatttgattgtagccactcttaagatttactaaatggattctttgagtatacagagttatctgtttacaggttaatttaaagccaaaggttcctaccaaaactgtatgcgatgagcatcttgagctaagataaggtatattaacactactgaatcttcagaagcaggtaaaccataccatacaagtcttatctcacatagatcacaaatataca

SEQ ID NO: 3682 - DNA, 403 bp, Arabidopsis thaliana columbia
gacatgtttgcctcttgtatgacattttttgatttgcactaaaaatttgtctttcaagacaacaacataaaacaacattttgattaataaagagccatcaagacaataacatgaacagcattttgattaataaagtaccatgtagacaacaacatcaaagatagaaaaaaaaacatttggataccaacaccactagtaacctagaacaagtttctgatttttggttttaccgaacattatgaaaccaaagacaatgacaatcaaaccaagactcaccaaacacactttgatcatcaatttgcatttcttgatttcccttgagctccacattccttcttccttcagtactacgatcatagcctataactcatcaatttcggctgcaacttcagatttggcaatg

SEQ ID NO: 3683 - DNA, 531 bp, Arabidopsis thaliana columbia
gtttaccttggatgtggagatcctttaattggtttttgtccgtatttcctccatgaataatcgtccggtggtacatcggacatttttgcacttatcgccggaaccctaattattctcctctgttttatctttctgaaaaaacagagcaaacaaaagaaacaatttttagataccaaatctatgaacttttatagttgggtcgaatctaaataccaaatctaataaaaatttaccttttcttcgagcaatgacaacgaccggaggaagaagcggaacgcattttccggtgagaagattctcagagttacattttctctttgttgattttgagaaagacgagaccgtcgtggagaggctttgagtttgagacgcaaacggcgccgtttcagagggacgttgatgatgatgaatcttcttctggttgtctgattccgttgttacagaggagagagatgagaaatcaatcgttttcatcgatgaagaaaacgaaccttttcggatcatttgcggcggaggaggaagaggagactg

SEQ ID NO: 3684 - DNA, 1091 bp, Arabidopsis thaliana
agtttctcagatcttaacctcggtccaattccaaaaaggtggagaggcgtttgcgaatccggagccagattcagtcctcggaactgtaaccgtaaaattatcggagcaagattcttcgctaagggacaacaagccgctgtaatcggaggaatcaacaaaaccgttgagtttctatctcctcgtgacgccgatggacacggtactcacacttcctcaaccgccgctggccgtcacgcttttaaagcgagtatgtccggttacgcctccggtgtagccaaaggtgttgctccaaaagctcgtatcgccgcctacaaagtctgttggaaagattccggttgtctcgattccgatattctcgccgcctttgatgccgctgttagagacggtgtcgacgttatatcgatctcaatcggtggtggagacgggattacttcgccgtattacctcgatccaatcgctataggctcgtacggcgccgcgtcgaaaggaatcttcgtctcttcctctgccggaaacgaaggacctaacggtatgtcagttacgaacctcgcgccgtgggtaaccaccgttggtgctagtacaatcgatcggaatttcccagcggatgctattctcggcgacggacatcgtctcagaggagtgtctctttacgctggagtacctttaaacggtcgtatgtttccggtggtttatcccggtaaatcgggaatgtcatcagcgtctctatgtatggagaacacgcttgatccgaagcaagtgaggggtaaaatagtaatctgcgatagaggaagcagtccacgcgtagcaaaggattggttgtgaagaaagcaggtggtgtcggaatgattctcgctaatggagcatctaacggtgaaggattagtcggagatgctcatcttattccagcctgtgccgttggatcaaacgaaggagatagaatcaaagcatatgcttcttcacatccgaatccaattgcttcaattgatttcagaggaactatagttgggattaaccggctccggttattgcttctttctccggtagaggaccaaacgggtttaagcgcggagattcttagaccgggatttgat

SEQ ID NO: 3685 - DNA, 500 bp, Arabidopsis thaliana columbia
tgcggacccatgagacgatccttccttggtttttggtaattgtgactctatgcacaaaacctggtggtagtccctcttgccacactcggtttaacgcccaaaggaaaggtctccctgacgcttccaacgccaatgccaacgtttgaatatttgattctcctataggagaaacccaacttccaaatgagatataaatgactgagttcgggttttgttcttgaagccaacctagacaagacatgtcttcttcccaaaaactagtcttggttatagttatattatttgttgcttcttggttatgcaatggacctaaatgaaggatttgagggttttgaccattgttttctttgtttaaatcgttagattttttgtaggatgctttgtggttgtcgacatcttcatattcatctttaaaggagcttgtcaagatccaacggagactttttgttcgttctagagttctttgccagaacttgaatcgttttttctgagctttggga

SEQ ID NO: 3686 - DNA, 574 bp, Arabidopsis thaliana columbia
agctcaggtgatgaatcagagttggtgttggaagagaagagaggatcagaagcggcaggccacgtgtcgtgatgagtggtccagatggtagggaaagagtcggagtcacctatgccgaaaccgacatcgatatctccaccgggaaagtccatgagatcatccatgttgtcaaagaagttgccacaatcaagatcctcggggaagcttgttccaatcatgttttacaattattgcaagtctctctagctggaataaataatgagagatggggttaatgatattatagaggaaaatgacaagagtttgaacagaggaagtttctgaataagttttgaaaattttgaaccaaattttggaaccaccttaaaaatcaaaattttgaaaaataaacattctttggcccaccttttttgatttttttttttttttttgataagtaaataaagaggaccattctatgtacaaattcaaatcacagtagactataaggttataaaagtcaaaagtcaccgttaattaagcattcttgattttatctatcaaatctctagaattcttgtgtgaaaccaagaag

SEQ ID NO: 3687 - DNA, 618 bp, Arabidopsis thaliana
caaaatcaaatcagtctctttagccttttgaaatggaaaacagagctactatcttctatgtgaaggtatatatacctgaagcctgtcactaggcggtgaaggaaaacagagagtgcaaccctagccagctcgtaaccgggacatagccttggccctccaccaaacggtgtgaacacattagaagggcctgtcgttaccgagttgctctgttccacagaattgcaatcgttcaataactcaaaatcaagaatgcaaagaaagaacacccaaaccaagttcagggcttaaaatacaaacctgccatctccaagggttgaaagtgcgagcatctttgaagtggtttgggtctaaatgaaccgctctaaacgatgagaatactttccacccttttggaattttataacctggttttgttccagttttctaaatgttaagtttttgatacagaatggactctttttactcattttaaaagttagattattttacctttgatctcaacatccgtcattgcacgtctgaaaacaccgccgatgatgttaccactcgtagcgtctcattaccacctgaatcaaaataggtttataagatactgatgagaaatgactagaaagaaga

SEQ ID NO: 3688 - DNA, 467 bp, Arabidopsis thaliana columbia
agaaaagtaactaacttccgatttggcgtttgacgatgactcttgtgttctgaggaaacggcaaaccattgagttcccaatcaaaggaattgacaaagcagcatttcaatgtaggccgtgattcttcgtcttggatgaccaatactccggagttcggaccttctgtcggaagcaatgttagctccgatgggtttctcttgtattcagacaaacgctttgtcacatacatctctccttgattctttgttgctcaacatgtcatcgtttatataagagaaaagatcataagaacgtgcaagctattgtttataagtataattgtttctttgaaccaatctgaagtttgacagaatcttctgtggatgagttcttagaagacatagaaaactcaatattttatagaaaagcttaagataataaccaaatactacaattgtacgtagattaatcacactgaccaatggaag

SEQ ID NO: 3689 - DNA, 385 bp, Arabidopsis thaliana
acaaaaaatatccttctttcagacataaaatttttcacgagatactgaactatgaaatcgacagagaatgtcattcgcaccccacaacgtaattgttgtaaaatgttttcgttctcaaagattccaggcttcagaaggttatttggttttatacagcgaatatattgcggctccgttgtatttagaatctcgagcaacgataccaattgttgctgaaaagaaggatcaaatataattaagtgaccaatattattgatataacatgtttagtagaaattgcaaactaaaatcagactttacttgaaacgggtacctatagatgagaattttgattgtttggaatcgtcagacattggtgggaactaacttgccacaaatgaacagc

SEQ ID NO: 3690 - DNA, 542 bp, Arabidopsis thaliana
ggtaactgagagtatattgggagaatgagtaggttcgttatttctctactggaagatgatacgagctgttccattctctcctttagtgaaaagcacgctgcctcaatctcatcttgcccggtcataaaaatgagaatgtccccaggtgggcttgttatgtgaatcgtcattgcctgtttaacagcagcttcaacatagtcttcacaaggagttttagagtagagaatattgacagggaaagtccttccaggaatgttgaagataggaacactgcattaccaaagcaaaaacactgtcatataaaatccttcttcagattctaaattggtcttatgtgaaggatgatgataacctacctcccaaagaaattggaaaacttttgagcattaagggttgctgacgtgactatcagcttgaaatcacgacgccgagccacaacttttttcagtattccaaaaaggacgtctgtgttgagtgacctttcatgcgcttcatccatcaccacacactatacagagtccaaaaaggagttacaacgatat

SEQ ID NO: 3691 - DNA, 532 bp, Arabidopsis thaliana
tttcgtttgttgacagaagaatagctatggagatggcagaaacagccagagacagatggagaaggagagagattacaaattttgaatacttgatgattctcaacacccttgcaggcagatcttacaatgatttgactcagtatcctgttttcccttgggtggtggctgactactcatcagagactcttgattttagcaaagcatctacctttcgtgatctttctaaaccggttggagctttagatacaagaaggtttgaggttagtataaagcgatggctatatttccattctgagattagttcattaatgtaatgttatatgatatatgttttttacagatttttgaggacagatatcacagcttctctgatcctgatatacctaggtacatttgcaggcaaattttctgtactgaagaaatacttttccctttgcaccttagtaatttttgtgtaaacttgatgcagtttctattccgggtccacgtatcaagtatggggagtgtgtggtataccttttgaggttagagc

SEQ ID NO: 3692 - DNA, 543 bp, Arabidopsis thaliana
ccacgatgatgattacagatcatgtgtgagtgacaatcatgatgatgtatatagcaatccccatcaatcaaaccatacggaaccaagaaaaacagagtctagagcaaggaaatgcgccttttctgcttcgtcttcttttttgctgagtattgagttaagcatagtacatgtacaagctatttgcagcggcgcaagaacttgagttctcgtttggatgccaagcaagatgcagcagctttgttgtgtaatcaagagcattagtattcccatcgactcccggactctctgatcctgttttacaaatttcagtatttattctattcatgccaattttttaataatgcttaaacgagcgagatgatagagagagagataccgacctctacttacgacacgcgttatactgcttagtgctctggatggcctcgacggaattgggacatgtctcctatgataaaccacaacacaaattccatttcaccaagagagaaaaaacagaagagcacactactgttaatggcttaccaagtttactcattgggt

SEQ ID NO: 3693 - DNA, 476 bp, Arabidopsis thaliana columbia
aaatatcactcactaaacattttcaacagcattcctagagaacccataacccaacgatccatgccggaaactgaatactatcaacaacgataacaccaagagaagatgcttgaactgatcttataacctaaaactagagctaattagctatatcaaactaacctcatcaacatggcgttttccaggcaaccacgcagcttcatgctgcgaggcagtgtcaccatccacattagcttccctaatctcatcctcgcttccatcatcagctttataagtagaagtagctccgccgctacttcctctctctccatcgtaaccgctactagtcggactcggtggttcttcacctgcttccatttccaccggattttccgcccttaacaaaacctctcctccgctagttcccgccacaccttcacgcaataaacctccattgctaactccgccttcgttcccgttagccgatgcaacctcat

SEQ ID NO: 3694 - DNA, 517 bp, Arabidopsis thaliana
tttgttacttcagtctatagataagtccgtatatcacatcaacaccaatgtttgttttccttctcatatattttcctcataaaagcacatcaacaatacattgtttttgcatggtttgcttatacaaatacgacattgcgtgtaatatatgtcataacataattccccgatgttcctgtacatcaatcagaccagtgaagttacactggttttgaattgagaccgaaaccaaacgggaacaatgggtcataagaattggcatgagcatctagtggcaaatgctcaacgtgtttgaaccagctcactggcaacttccccttgaagtcataatctccaaaaacaacgtcagccaccccttgcccttctgttccaggcagccaagcagcaaccagagcctctgtcttttcaagaaccgtcggctccaaaaccacaggtcgtcctgagatcaatatcaccagagtcgggattatctctgcaactgcggtgacaatgtcagtaccattaaacaggtatctga

SEQ ID NO: 3695 - DNA, 564 bp, Arabidopsis thaliana
acacaatgttaaggtaacctctggattctccttcgtaggggaagtcgtgggcacaaacattctgtaagccttttgtttttccagggcgtacttcgttctatcggaaacgactcagcaacaaagagaagcgtcatagtgatagcacacaggtatctttttcttgcactgatccaatcttttacatgttttgatcattgatttataacattctgttccttcacagactttctacaattcaagctgcggatagaatagtggctatggacagtggacgagtcgtcgaggtaagccactatcttacggttttgataaatacatagaaaccattgatggctttgattttgactgttatatttgtacacaaaacagatgggcagtcacaaagaacttttgagcaaagatggcttatacgcgagattgacgaagagacaaaacgatgccgtcttatgattgatctacacatgctaaactgttcatgaaatagtcatgattatgtttttgaatggtcatgacgatatgtaatggcaaaattatgtaaagtgtaccatagagaattctattatt

SEQ ID NO: 3696 - DNA, 1282 bp, Arabidopsis thaliana
tatgtttgacgccttaatatcacggtgaatgattttcggattgcctgcaaatatttatatatatacctcagtgacaaacaaagacagtatttatcaaacatctgtacataatttttaaggttttagacttacaatcttcatgaagatatgaaagtcctttagcagatccaagagcaatcttcaatctagtactccattccatcgtaggccgtcccttacctataacaaattcaattcccaaacaaatcatcactaactgaaaacaacaaagcaatgtaacaaaatcaaaagaaagagtttagttttgttctaaccatggaggtgaaactcaagattgttgtttggaacaaactcatagacaagtaatctttgaacaccggccatacaataaccaataagagaaaccaaatgcctgtgatgaactctgctaatgatctcaacctcagcctgaaactctctctctccctgaccactaccagctttcaactgtttcacagcaacttctttcccactaggcaatatacctttatgcacataaccaaaccctccttgtcctaacaaattagcctcagagaagccattagtagctctcgacaactcctcataagtgaaagtgcttttagaaaagcctaacacaagccctggagatggtggaggaagaaccggaagatccgaatagtcagaaccaccactgctactcatgaatgctggtggtggaggtggcggaggaggttttcgtggtggagatggaggcttaggtggtggcaatgacgtcactacatgattatctgacggccgtgacgcgttttgttgttgccaatactgttgttgaccaccgtaaggtcctccagctgataaacaacatcaaatctctgtaaagtttgaaacttttccacaaaggtaatctctttaacagataacaatgcataatcaagtatcagatttgagcaattcgtaggagaattgaacaactatggttaaatattcgattcataagtcatgaagttgagatctatgaatttacctttgagaccagatggaggctgaggaggaacatagtaagcagctacatcgtcgtgacgtctacttcgtagctgcttacagagaagacagatcagagtcagtatatcaagaacagcgactcctccaagggcgattcctaccaccactccgatagacgatctatcggaagactgagccggcggcgacggatttagtgtttgatggagttctaggcgtagatcctcagaaagtgtttggtggtcgttggttaggagatgga

SEQ ID NO: 3697 - DNA, 515 bp, Arabidopsis thaliana
aatgatgtaattgtgataatagagttgacgattacgtgtgtgtaatccctcttaggattttctctaggtctatataaacctagaacacgaagagtgcttgaaacaaaaggcagatcattgtaattctatctagctttgtactcaaacaaacattgatcatttattaaccgaacaatgagttcgtctaacggaggtgtaccgcctggttttcggtttcatccaacggacgaagaacttcttcattactacttgaagaagaagatttcttatgaaaagtttgagatggaagtcatcaaagaggttgatttgaacaagattgagccgtgggatttacaaggtacgttcttttattaataatacatatacgatccaatcctctagttatattagatactatacaaaagcattttgtttttgtttttgtagatagatgcaaaataggatcaacgccacaaaatgagtggtatttcttcagcacaaggataggagatatccgacagggtcaaggacaaacc

SEQ ID NO: 3698 - DNA, 1192 bp, Arabidopsis thaliana
atctcttctgtgtcatactcattattcagtttttatcaaccacaacctcaaagtttcctaattcagatacttggttaagcaaaggtcgtgcctgttccaaattattcacacataggtttttcttcattcaaaaatcacatcgtaaacattatgtgaaggttagattatttgcatgtaattatattacttacccaatcaaccaagctgttatctgcatggacattgtttacatcaatagggcgacgtccagttattagctccagaagtacaacgccaaatgagaaaacgtcagacttttccgtgagttttccgcttgaagcatattccggagccaaatacctaaaatccaaaagtttcataatatgtaaagattcacataaacttttaacaaaactgcataaatgtagatatttggtagcttcaagattatctttacccaaaagttcccatcacacgtgtagatacatgagtatttgtatcagaagcaatcttggcaagaccaaaatcagcaacctaagaaatagaagagagacacatgatacaaagatacttcatgacaatatcgtaccaaataacaaataaaaggaagaataaatcatacctttgcttcaaatttgaaatctatcaatatgtttgacgccttgatatcacggtgaataattttaggattgcctgcatatatataaatgcctagcgagtaaacaaacatgacctagctatatatttatttattttgagaaacaaatatggaattataccatgacctatatttattacacatgatcttatagacttacaattttcatgaagataagacaatcctttggcagaaccaacagcaatcttcaatcttgaactccattccatcgtaggccgtccctttcctgtcacaaattcgattcccaagaatttactaattgaaaacattgaaggatgcaagaaacaataagagagtttattttttattttttctaaccatggaggtgaaactcgagagtgttgttgggaacaaactcatagacaagcaatctttgagcatcggcgatgcaataaccgacaagagcaaccaaatgtctatgatgtactcggctaatgatcccaacctctgcttgaaactctctttctccttgagaactcccttctttcaattgtttcacagcaacttctttcccattacgtaacatacctttga

SEQ ID NO: 3699 - DNA, 1162 bp, Arabidopsis thaliana
aaatcgtacctttgcttcaaatttgaaatcaatcaatatgtttgccgccttgatatcaccggtggatgattttaggattgcctgcgaatatatatacatgcgtgacaaattgacaaacatggccaatatttatgaaaaatgatcttagacttacaattttcatgaagataagacaatcctttggaagaactgacagcaatctttaatcttaaactccattccatcgtaggccgtcctttccctaccacaaattcaattcccaaatgaaaaccatcagtactcattttaaagcattcaagcatgcaagaaaccataagagagttttgttttgttttcctaaccatggaggtgaaactcgagagtgttgttgggaacaaactcatagacaagcaatctttgagcaccagcgatgcaataaccgacaagggaaaccaaattcctatggtgaatttggctaataatattaacctcagcctgaaactctttctcaccctgagcactccctactttcaactgtttaactgcaacttcatttccattattcaatatacctttgtatacgaatccaaatccaccctctcctaacaaattggcctcagagaatttattggtggctctagctagctccccgtaagtgaaagtgctttgatggatgcctaatacaagccctaaagagagtttgattcataggaaatgagcaacaatatatagttcaggaatccatttattcttctaatggagatctttgttgtacctatgggagccggaagtgctttatcgtctcttggtcgtttcttcttacaaaggaaaaaaatcaaagtcaacacaaaaactcctcctcctatggagatcccgaccacagctcccgttgataatcttgagggagacggcggtgatagagaaaagcctggggtcatagttggagttgtaggttcctggccagagggactcgctggaggtggagggtttcgatttcccaacctaggtggagtggatgtggagggagaccgcggaggaggcggtggagatagggaaacgttaacgggtgctttgggaggaggcgggggttcggaaaaaagtggctctgggacgaaaacctgcggcggcggtggagaagaagccgatgacattgtgatctgctgccagccgagacttgaggaat

SEQ ID NO: 3700 - DNA, 891 bp, Arabidopsis thaliana
cgtttgctttttaactaaccatttaatttcattttcttttgcatgattttatatatttactatgtggaatattatgtcgtcgtcagtggaattgacttgacttttaccattttgcttatgtgcgacaaaatgcagaatacaagaaaaacaaattaattagtgtatacatatctataagatataaaatgcaaaaatggaatcaacctcaattattttgtgaatttactattaggcaaaaatagatatttcagttgagtgtgatcaatattggagcgttactttattcgattactctcctctaactaaattatctaatttgctaatacaatatagatcaagatcgtgttgtcaaatccaaaattgatttgatttaattaatcttagtacttggaaattagtaaccttttgttagtggaccaaacaatcatagaacttactacttatctataaactatggaccttaaatacgtaatcataccgaaagagaaagcaaaacaaaacttggcaattaaagaccagtctacatcgaattatttcttaagaattttttttgagactatgtcatctaccgactaccgtacattaattaattccaatattttcaacaaacaaacatcttcttcaatctttcattatatttctagtaataatacccaaatatcaaacaatagcctgagaatttaatagtttccctaactaaataaactaacctctaacaaactaaagaaactctgaacttgaatattttatgtaataaacgtacccagtaagcagcgacgaaaccggcaacaccggaggagagatgaataacataaccgccggaataatcaataactccccactgatacagaaacccacctccccatatactataagctccaactgtgtagc

SEQ ID NO: 3701 - DNA, 687 bp, Arabidopsis thaliana
gtctgtagaatgattggagttttcacaggtagaggaggaaattcttcttctgaaaatagactatcatcttgttttggtggagctttgttaacattgttgattccttttgtccaagctagcattagtggagtgagacttcctgtcttaggtcttgagtgagactgagcaaaaggaaagactgtttcatcaaatataacatggcgactgatgtagcctcttcgagttgatggtaagtaacatctgtagcctttgtacttctcgttataccctagaaacacacacttgagtgatctaggatcaaacttgttcgaagcataatctctcaatgttggataacaggcacaaccaaaggttctgagagctgagtagtctggtggcttgccatgcaatttctcatagggactgcacttcatatccaaagcagttgtgggaagaagattgattaagaagtttgcagtgtagaaagcttcaacccaaaacttctgaggacaggtactctgaaacatcactgagagaccaagcttaatgatatgtctgtgtttcctctcagctaacccattatgttgcgatgtgtagggacaggagatgagctgtttgatccacattattgtaggtgatctgtcagctttctgtttgtgaactctcctcctcatcacactgaaatgtacgaatctttgttggtattga

SEQ ID NO: 3702 - DNA, 516 bp, Arabidopsis thaliana columbia
catcatttgatgctagttcttagcttatgaaacggtgcgtttgggagatgttgacagtgtgcaacattgcaaatattgttttactatttaccataactttaccaaaccagacaccgaatgttacctcccttttacactaggttagaactctcattctttatgtctctctctcattgttacactctctgtttttgttattgtttagagagaaacacaagaaacgattttttcttttttttcttttagttgtctacattgtactaatggatcacaaggataactctacaagacacaatacacatacttatagtggtatttcaccacaagatacacattcacacacttaacattctagctttaaaactactcccacttagacatgattattcctaaggactagactaaaaccacaagtaacgttaaactactaaaccttacaccacaactcctcttaacaactactctttagctactctagcttagcttaattataagcacaccatatgcacaaaatct

SEQ ID NO: 3703 - DNA, 582 bp, Arabidopsis thaliana columbia
aatccaataacttttaaacgaacgattctgatttctccaacccaatccaatattagaactcgtcataatcttacaagcttacaacccaaaataacaaaacatggatttttagattttatagaacaaacatgtacatacatataccatcaacgaattaacccaccaataaaattgttttctggttattaaactagtccacataatcatcgggaatttacaatactgtaaatattattattgttagggttagtatcttcaaatatatcggcgggaggaataaaggagtccaaagagagaccaggcacatcgaaaacgacgtcgtctatcctccaaatctcctccatcctcgttctgctatactgcaacgacgtctccccaaatcggaacaccgtcgcgacggcacgaccacaatgcgcgacggctactccgtcaacgtcacggtaatctccgatgcttgttccgatcgtcgtctcccagtaaaccgcctcgtcctcaggcgagatcgtcataaccctagtgaggtgcgaatcctctaaatagactaatagaccgcttttctgacagaagtatccgtcagtgcgt

SEQ ID NO: 3704 - DNA, 1331 bp, Arabidopsis thaliana
  unsure (1)..(1331): unsure at all n locations
gttcattgataactactcaagattttgctaggttctacccattaaagctcaaatcagactttactcatacctttactgtgttccaagatatggttgaaaatcaatatcaaaccaagattggatctttccagtgtgatggagggggagagttcacaagcagaaagctaactgatcacctacaacaatgcgggatcaaacagcttatctcttgtccctacacttcacaacagaatgggttagctgaaagaaaacatagacacattattgaacttggtctctcaatgatgtttcagagtacccgtcctcagaagttttgggtagaagccttctacactgcgagtttcttaatcaatctccttcctacaacagctctagatgagaagtacagtccttatgagaagctgcatggtaagcctccagaatactcagcactcagagtctttggttgtgcctgctatcccaccttgagagattatgcgtctaacaagtttgatcctagatcactcaagtgtgtgtttctgggttataatgataaatacaaggggtacaggtgcttcttaccttcaactggaagggtttacatcagtcgccatgtcatctttgatgaaactgtcttcccttttgctcagtctcattcaagaccaaattcaggaagtcttactcctttgatgctagcctggacaaagggaatcaacacagtaagtaaacctcaacctaaatcagatgacagtttattcacaagtgaagattttcctccactacctacaagagaaacacctatactaccaataccaataccaagaccgactgtagtacctgctgtggaagaggaaagaagttatgggtgtacggcgggcttagatcatgttcctataggcaacaacttctcttcttcttctcacagtcctggtattgcagaagaaacgtcagatcagtctacagaaagaatattagatcagttatcaacaacaacaactcaaaatgaaagtcaagaagaaatgttacctagttaagaacctgtgcaagagcctgttgtaactcagtctactcaccctatgaccacaagacaaaagagtgggatcagaaagccaaacccaagatatgctttactgactcacaaagtgtcttaccctgaacctaagacagttgctgcagctctaaaagacccaggatggacaggtgccatgggagaagaaatgggaaattgcaaagaagctgaaacttggtctctggttccttatacaccagacatgcttgttttaggcagcaaatggattttcaggaccnactaaatgcagatggatcctgcaaaagctgaaacaaggttagta

SEQ ID NO: 3705 - DNA, 564 bp, Arabidopsis thaliana columbia
cggacttcggcgccgacccggcctgctgcaggccgtcaccgaggcgatggccgccggcacaaccagtacccgccgatgaccggcgtgccgcgctgcgcctcatgtcttccaaaactgaagtttcgcaacttattcacaacatttgtgccacgtcttaacgtcaattcggtcaacaagtcaaagcattccgcagcgacaatggaactgaattcatgtgtctcacctcctattttcagacacacggcattctccatcaaacttcgtgtattgacactccgcaacagaatggtcgtgttgaaagaaaacatcgtcatgtattaaatgttgctcgcgcttgtctctttcaggctaatctaccggtcaagttctggggtgaaagtattttaacagctacacatcttatcaaccgaacaccatctactgtgttaaatggtaaaactccatatgaagtcttgtttggaaaacgtcctcatatgacatgcttcgtacgtttggttgtctctgttatgcgcatatccgccccgcaacaaagataagtttacttctcggagtcgtaaatgtgtg

SEQ ID NO: 3706 - DNA, 1687 bp, Arabidopsis thaliana
caagaactttatggtcataccggagatgtcttggacttagcatggtcagactcaaatgtgagtttattactttgtttttcttttcttgtttttgagatttgttgattcattacttataaaatctgttgtctttggtgatttggctttgcagttgcttctttcagcttctaaagacaagacagttcggttatggagaactggttgtgatcaatgtcttcatgtcttccatcataacaactacggtaagtattttttgcatctcaagttgtttgttctgaaatctttgcaaaaacgtttgttaactcactcatgttgcttttgtctttcaaatacagtgacttgcgttgaattcaatcctgtaaataagaacaacttcgcaagtgggtctatagatggaaaagctcgaatctggggtttgtcagaagaaagagttgtcgcttggaccgatgttcgtgattccatttctgcaatctcttaccaaccaaacggaaatgtaatttgacattctctgtctattctctactcaaaagatcatcctttctaaaaaaactcaactttgctctgtttttgcttcaggggtttgttgttggttgcatcactgggaactgtaggttctatcaaatcttagataacgatgtgataatggatgaacagattcttatccggggaaggaatagaatcaccgccgtggagttttgtcctggaagctccgagaaaattttagtatcttctgaagattcgaaagttcgaatatttgacaaaacacaaatgattcacaaattcaaaggtataaaaaaaaatctttgaatcttgattttacacttcttgaaatctgtgttttgattattttttttataaaaaaattcagctccatcgaattttgggagacaatcgtcggcgtcgtttgtttcttccaccggaaaacatattttatcagttagacgaggtgtcggagtttatctctggaacaacgatgcgtttccttcgaggaaaggcgcaaaatcgtcgcgttctttcgagtattttcattcgccgggggtttccgcggtggcggcttggactcaaccggaaacaaaagtgtcgaaagtagccggtgatgatgaagaatcacggcgcgttatgagaaaaatacagagctctgggagattgtctcgctcctgtcgtgttaccgccacgtggccggaggagaagctccttatgaatgtaggaagttacgatagtaaccttcccgtcggcgagtttgatcttgccgaggcgtggagactggtgatcgtgaccgtgagcttggatgggatgattaggacattccataactatggactgccacgtacattttagagatcgataatctatttttgttttaaataggagaaacacaaattgattttttgtttggtttttgttttggtgtctaaatatatgtagattttctagtttctagtccttcgcttccaagttcctcgatggctcaatgccaatttagtcagataagattatgctgcaactgctagagcgactctctcctacttcattttagtccatactagttcattttatctccaagaaaatgactccgttttgcttcaaagctcaaagatgattctttttttaatgggccctcttgaaaaatgggtaaaatcttggtctttttacagatagcaaacatatacaaattatggagaaaaca

SEQ ID NO: 3707 - DNA, 837 bp, Arabidopsis thaliana
tgttcaaccagtagtgatttagaaattctgcctcctctctctcagcaacaagttccacttgaaagcttgtaccagtcaagtattgatcttaacggaaagaaacataatccactagcaaagattggtggccttcaagtgcagttcttacgccttgttcaaaggtttgggcagtcacagaataatattctagtctccaaggttttgtatcgggtacatcttgcgatgctgatacgagctgaggaatcagaacttaagaatgtaaaacttaggcaagatagggccaaagctttagcaagggagcaagaatcatctggcataccggagcttgatttctcacttagaatccttgtcctggggaaaacaggtgtcggcaagagtgcaaccataaactctatttttggtcagcccaaaagtgagactgatgctttccgaccgggcacagatcgcatagaagaggttatgggaactgtcagtggagttaaagttacctttattgatacccctggttttcacccactgtcatcttctagcacaagaaaaaaccgaaagattctcctatctattaagagatatgttaagaagcgtccacctgatgtagttctttacttggaccgccttgatatgatcgacatgcgatacagtgatttctccctcctgcagcttataactgaaatctttggtgcagctatatggttaaacacgatacttgtaatgacgcattccgcagctactacagaaggacgtaatggacaatctgtgaactatgagtcatatgtgggccagcgcatggatgtggttcaacattatatacatcaggctgtgtctgatacaaaacta

SEQ ID NO: 3708 - DNA, 568 bp, Arabidopsis thaliana
tgatggtgatgtccaccaattagaccgtatagttggatctacacattgcttgatgctgactgatcccttccacaaacaagctcttgccttgtacctacgaccctcggccacaaatggtgctagcgtccagttagtcttcactcgacctccttgtgttgcccagtcttctgcgttccatagactcgcaaacactttcataccttgcttgttcgggtatgcgattccttcactttcgtagtttctaaaaactctgatcggagttccatcgacgaaccacctatataagatatacaacatggtgtgcgacacgtttatttatagaaaggaaataaaaacatataatcgtttgagattcctaaagtttttttggtttgaaggttcgaaaacattaaggaactaaaagaaaaattcatcatgaagtgtttgtactttaatgttgttttacagtaacaaactaaactatctaagtaacatttaatcttacttaagtttttttgatgtggtattcattgatagaaagtaccatttcttagcatttgtttggagtttttataaagtacttaagaaa

SEQ ID NO: 3709 - DNA, 544 bp, Arabidopsis thaliana
  unsure (1)..(544): unsure at all n locations
caaatctttcctttcagtttcttgcgtattgagagttttgatttgtctgctcaaccccgagatctctcaccgttatcgccggcgccacggctccgtcgaaacttagaggcaaaaccaaaaaaggtaaaatcgtttctctgacgtccgtttccttataaaccttgttcgtgttactgagcgagtttgtgtgtattttcacagtggttggaattgtaaaaatgaatgtatgggccggaaaagcaactttggcgccgccggtaaatccggcgtttgcttcgaggggagacagtgaagacaaacaaatggctaagcgtttctgcaaggagtacaatgcccgaaccgcttgataaactcggtgatataattcctgtcgtaatcacaatctacgatgttgggtttttttttctaccctaatctttacactacttcaatctttatatccgatgtaaattcttaactagagaagagtaaatttgccatcagtggatgggtttttgtatagagccgcttttgaattttgttcngtactattcatatatatata

SEQ ID NO: 3710 - DNA, 519 bp, Arabidopsis thaliana
gaggtagaaagattatgttggctgcataagttgctaatattttgatattttctaatatatattccaggttggaagtcgtctaatagagttactcgtaagaacagcttatatacagtctccagctgatcagcaggataatgatctgcctgatgtccgacctgcatttgtgcataccttcaaggtagcgaaaggaagcatgtgagaaatttcggtctatgactttcaactaggcttatcttcttgccctgaatgtcataggctcatattccagtctttcttgtacaacaggaattctgggagaaaatatggtgtaatcgagtgtgaccctttggtccgcaaaggcttggaaaaaagtgtaggtgatctattcgcgttttgtttgttatcagaacaaatttaacccaaaatcgacaaaaatagtgttgactctttttcagagctcggagtcatttattatggtcattttgtcgaatgttatatctaaagagggtttgacttgggtagcccctgtaattagat

SEQ ID NO: 3711 - DNA, 495 bp, Arabidopsis thaliana columbia
caataatatttccatttcaaatgagaacaattgtgagaagtgtgaacaaatataaaagaaaagtgacgttaaataacaaaccctggagtacctgacactgattaacagaaagaagtaagaagcaaccaaaacaatacataactgtcgcagagacacatacttaaaattggttaaaagccacaaaactctgattgaagacaaagaagacactgtagattcacgccaatcatacccacaaaagtattaagacaaaagtgttacgtaatgaaattatcaaatttccccactataaaaccatgcatgcctatatatcactttgaactacaacagccacttggtttcttattcgcttccctttcttgaattgtgatctttttgaggtgacaaatggagatttcggagagagctagagctcgattagccgttctcaatgcgcacttgacagtatctgagccgaatcaggtgttgccagcgatcgaaccatggtgcacatcg

SEQ ID NO: 3712 - DNA, 501 bp, Arabidopsis thaliana
ctctgatacaatgcaatggccttctcaagttctgcagcatttatatagcttccaatggctgagttataggctgccgtattgagattaatgcctctcgactgtgcggcggaaagtacagtatcaacagtcaccttttttttagacctactacaagcagccaaaagagtgcatactgaaacaacatttggcttaatgccatcgtgtatcaactgccggcagatggtcacagctgcagctagaaacccagtagagccataagcatcaatcaatgcattgtaagtaacaacatttggctttctcctttccttcctcatcatgaggaatacctcctttgccttcccaggttgacgtgatcttccataagaattgagcaagcatgtataagagaccacatctgggataataccattctgcttgatatctcctaacagtgagagatcagttccactcattccatggacagcataggcaccattaaggcattataggaaacaatattag

SEQ ID NO: 3713 - DNA, 330 bp, Arabidopsis thaliana
gagaacacagtctctgcaggaactccagagtggatggactcctgaacttatccgcaatgagcccttctcagagaagtgtgatatcttcagtataggtgtaataatgtgggaactatgcactttatccagaccttgggcaggagtaccgcctgaacgggtaacttaactgaacaagaggaagactctttagtgacatatgtgtacacatagcaagtttcctcatatgtcaactcaggtagtttatgctactgcttacgagggagctcggcttgagattcctgaaggaccactgggaaagcttattgcaggtcttgtgacttgtcaaagtgt

SEQ ID NO: 3714 - DNA, 363 bp, Arabidopsis thaliana
gattcatattcagccctattcacgagtctcacgtacaagcttccatcatttgttccaagaaactccgaatgcatctccgtgtcagaagcggcggtcacgactacgaaggcttgtcttatgtctctcagatcgataaaccgtttatattgatggatctgtcaaagatgagacaggtcaacattaatattcaagacaacagtgcttgggttcaatctggtgccactgttggtgaactctagtacaggtataaataaaagcaacaatgaccgaacagtacacaacaaaaagtattcttatcaaaatttgtatagttgatcaagatgtttgttacttgtaggattgcggagaagagcacagtccatg

SEQ ID NO: 3715 - DNA, 737 bp, Arabidopsis thaliana columbia
cccgtgaaataacaaaaagagaagtaaacctacctgagcttcaaaggtaaaactctgaccagacttcgaatcatattgacaagtgtctgaaacatctgatgatttgtgcgcattgctaagcacattctccggattagatgaggcattttctaacattgagatgtcaacaccatcttccggagaaaataaacagctactatcgttactcaaataaatgcacttgctcagaagcgatccattctgccacatgcataaaaggaaaaacagaaaacaagcagctagcataaatcaagaatcttggaaaaaggggagtgtggagcaatgattacaacaagaaagttccttctcctcttctcactataagtgcttagcaaatgtgtagaaatttactctgagcaagctaagtgactatgcaaattacataagtatgtattaaatattaaattgtttaaaagagagaagagtctcaaccttaattttcacattgacgaagcgcacgttctttccatgcccaacgattatgatgggttctaatcttcctacgtttaaatccttctctccttgctcactcaacgagattacctttcctgcatccgtcataggtatactcatcaatgcccagtgaatctgctactaattgtctacagtggggacaagtgcacaacatcttctgtctgtttatagagtggctcagagagaactatgcctctacttctggtgataggatcatttgttgg

SEQ ID NO: 3716 - DNA, 596 bp, Arabidopsis thaliana columbia
tggacggcctacaaaacgctgttccagctgatcgcgttgctctcactgttgtttctctgaatctgtttccgtttcttgcgttctaccattgttaagtatacagaatttagaacctggaaacagattgagattgaaagctgattataataacgtaagggagcaaacttttttaaaaacagttaagattaagactaatcaagtatgagagagttaatgaaattgggtgaaattagagaaaatctaagtgacaaatgtgttcaattttgaatgtcatgagagtttggagatagaacataggaaacaagacatgcgaaagtatctaaaaaaggttagtaagacaatgggagagattcatacagagattctctgaggtttaaggaacaactttgaaacaatgatgagatcggtcggagaaagctcttcggaagatgatgacggaagagaagatgaactaataagggacctttgaactcctcggttcgtgaagaccacctggactttttaattttttgtgattggtttcattacttcaaaactgaccaataagaccctatttggtgcacagttgtacttatatgttggtattaatgattgtg

SEQ ID NO: 3717 - DNA, 904 bp, Arabidopsis thaliana
  unsure (1)..(904): unsure at all n locations
tgctgttaaagtgaatttaaccgaaattgacatggttcaccttgctaacgaagtagttatcctccaccgcgggaaagatgtgcgggtccagaatgtacaaacccatacaaatatagagattcagagtcaaatcttccattgtgcagcctccgatgctacaaggccaatcaaaggctaagtgatggatataatgtgatcatacaatttgtataatataatattttagcgttcatgtaaatactaataataaagcactatatcatactgtttgttgttaagcaagatttgaatgtttataaacatatatgaatatatcatactgtaacagttttatttctaactttcgtttcttgaatccagttaaccggacctaaccaagtaacccagttagctacagagaagtcaatatcctcagctgccgacttccttgtccacggttgtttgtagtcaatgccaaaaggtctttgcaccggagcccacttgtttgtttgtagtaataagtttacttttctcatttccttctccataaaaggctttatccaacaacgtctatctgatcctggatacaatgtcttcttcacgacttcacctcacacctggagatacaatgtcttcacgagcttccacgtgccagatgtccgtaaggcatttctagcccatttacgtaaacagtttacctacaatggaattacgatgtttgatgatcaagggatcgagaggagccaaataatcgcttcagctctcacaaaagccattagccattagagaattaaggatctcgatcgtattgctctcgaagaattatgcttcttccagttggtgtttagatgagctgttggagtttttggagtgcaaggacaactgttgtagccatgtgnagtctgtaaggtgaaaatatgtagta

SEQ ID NO: 3718 - DNA, 555 bp, Arabidopsis thaliana columbia
tacaaattatgaatccaaccgaagagggcgtatttgggttctatggagaaacgatgtcagattaactccgttttgaaaagcggccaagtaattacgtgttcagtaaaactagaggatcaagagaatgagtttttttgttcttttgtgtatgcctcaaattttgcagaagagagaaagaatttatggagtgagttgcgagatcacatcgactctccaattattagtaataaagcgtggattatatttggagattttaatgaaatcctaaatatggacaagcattcacaattggagaatcagcctgttgtaacttctagaatgagggatttccaagacgtaattcaatactgcactctttcggacatggattctcacggtccgctatttacttggagtaataagagggatcatgggttgattatgaagaaacttgatcgtgttttgatgaatgacgtatggctgcagaattatcctatgtcatatagtgtttttgaagcaggaggatttttcaacacttaagatgtaagataaatctgactacagtgaatgaagaag

SEQ ID NO: 3719 - DNA, 769 bp, Arabidopsis thaliana
tattctctagaattcacacatgcatatattaccgtgttttgtcatgacactttcccaatattacacaaacgacttataattcgtgataaaaaaatatattatgctttgaaataactcttttgaacaccatcatgcttattttcatgctaggagacaacaaaagtgacaaatatgtcatgttttcccacatactatccgaagccatagaataagaaatatacatagagttggtgtaataatttcttgttttttctctagtaagttcatttatcaatcttctctcttgagcatgctgcacttaagacttgacttagctttctatataaacacttgcaaacacatcctcctagtctcaaccacattccatagccatctctctctccctctcactctttctctctttctctggtctgtttcaaaacatagtacataataatagagacaacaagagaaagaaaaaacagagtgatctgttttaaaacagagcagaaaacagagtgagatgggagcaatgatggtgatgatgggtcttctcttgatcatcgtgtctctctgttccgctctccttcgatggaatcagatgcgatataccaagaatggtcttcctcctggaaccatgggctggccaatctttggcgaaaccaccgagtttctcaaacaaggccccaacttcatgagaaaccaaagactccggtaagaaaaatactcaaatcaagattttttttttctctacgctaaaaattaacttagaatcaacagatacgggagt

SEQ ID NO: 3720 - DNA, 507 bp, Arabidopsis thaliana columbia
cctttgcctcatgataagattgagggattggaattttggaaatgttattgatgtataacatatgagatggtgagatttgagagtaagaaagagaagatgaaataggatgtgagtcatctttattgacaaaataacagtgatagtcttggagatgagcagggaatttagtaatcctacgtttagaaatttgtgttgatggagaaatttgtggtgatggaagatgagaagtgatggaattacctgaggacaaaggatccattggtgtgaaaacatctgaagctgtagtagcagactgttgagaactcgctaatggaaacaactcctcatgaaactccacattcctcgatatatgaaccacgttgctctctaaatccaacaacttgtagcctttaaaaccaaacggatagcccaagaaaacacacgctcttgaccttggaaggaacttgtgtcgctgtttcgatgaagtagagctgtagcaaaggcaaccaaatgtcttgagctgagagt

SEQ ID NO: 3721 - DNA, 687 bp, Arabidopsis thaliana
ctcgacgttgatgtaacttacttgggtttgttgtgctttctcactagattcgactcggcaaaggagtccacattggggatcttcataccaaatttggcgtcaaaggaacaatgtgttacacaacgaccaaaggattcatccttctactctctttaagatgatttatcgagaaatccgcaacacaatcaccggaagacgctctaggaagctttggagacctctaaatgcttctttggatccgataatatctttttcatgagttccatgtattctgaccttgttttttattttattttttgccaaggttactctagtctaggtatgtaatacctccattttcattttatatgtggtgtaaggattatatccaagtatccaagtttactatcaataaagacatgaaagttcttaaacgtgttcttgtgtttttctctttatcaagaacaagaaacagagttgtgagagatggagtttgtgagtgaaagtggtgtgagttcaacagttttccgtggctcttcaatacgtgatattataaaacaacaaaataaagaactgaggagaggaacacacacttgaaacaaaagaaaccacaaagacaacaaactaagcgttgtaatgataaaaaacacagagtttccaatgctcttttacattagtataagtggaatcaagttcttaaatttatat

SEQ ID NO: 3722 - DNA, 404 bp, Arabidopsis thaliana columbia
gggccttccctgaagtcgatcttggtgagcaacgccggctttctcaatgatcggtaaacccaattcgtaattctctctgttgacatccatagccagaatctgatgataaaaaggatgaaactttcaattcccaagttcgacaaaacccaccaaaaaacagaggaggatgaagagattgatttactttgccgtcttcagggagagcaagagcggtggcgagaagagagtagccagtgtaaactccgatctccattgtgttcttggcgttaacgagcttgataagcatgtttaagaactgtccttcatcagctgatgtggtcattatgttccatggatgttttgctgtttgttgcggtgtggtggtgaagtgtgcaacgtttgggtgttggcgtgagaggacgggg

SEQ ID NO: 3723 - DNA, 561 bp, Arabidopsis thaliana columbia
ggtgtaaatgggactaaagaccatgtgtttgtttctgagcagtttccaatttcctctttcatagcctcagtccaatatggatcctttaaagctgcagtaacagtcttaggcataggatatgttactctatgtgtaagaagagcataccgttgatttggtttcgttattccagattttgatcttgtagccattggatgaataggttgaacaactgtcggtgaatgagtaggttgagcagcagaagcttctgattgttcagtcctaggagatgatgaagtagtactgttgccaataggatcaagatcaatgcttgccgtacactcagaacactcttcatcactcataggacttgaatcagtagacgctgttgcagtgatgtgaagtatgttctccccctctgcatttattatctgaggatgaggttctgttataaccgttactgattccacgggactgatactaggagcagtggttgaggtgtgagtaaaagtttcaggtgctgaagcaggaaaactcttgagccaagcagcaagtaatggtgtattggaggagttggtgtag

SEQ ID NO: 3724 - DNA, 511 bp, Arabidopsis thaliana columbia
tccacaaccataaaaggcagcttggtctccttcaatccttagagctactgcttgtgcatcagcttcaccaggatctggttctggtgcattgttcttactccattcaaaacacatacacacatgaaaactcatatcattatatgcgttacgtaattaggtttaattgttgtgacctcgatatccttaccttgaaactaatgttgtaagctgtgaagttagctgcaaacactacaaaggagaagctatcagcagtgtttccggcggattttgctgtgtcgttccattcgatggatgtgttttgatatcctcttccttgaataacaaggtttgtcttgttttcattaaccgtaaccttttccctgcttgcttaaattgaactcaaacattactaaatatatatatcatattacactataaaagaaaattattgagcaatggagataggggaaaaagaacaagagcttggagttgaagataggacctataagaacccgaattaacgatgatgaga

SEQ ID NO: 3725 - DNA, 538 bp, Arabidopsis thaliana columbia
tatatatgataaatccttaaatatatttgtctatataacttattaaaacttcttatttcgtgtgccacggtgatcacccggagaagtgtgtccgatgtatggaaagacatttgtacatgtacatgtacatgtcatcatcattcattgttcttgtgaacggaagttacgacagagtatatgcaatggagttatctgcgaaacatcgccacgagtagattcgtcttttgtccttgtctacaaatttaggcgtcagtacaaaatttaggtttttaaggtctcattaatataacgtttggtctataccgaataataataaatatcacttgttaaatggcctataccgaaatccaatccacaatgattttgctacacagaaactagcaactaaaaagaaaagtaagtggtcgaccatcgatcatggaccagcctcacgcgcttctagtggctagcctggcttgggtcacctcatccctatcctggagctcggcaaccgtctctcctccgtcctaaacatccacgtcaccattctcgcggtcac

SEQ ID NO: 3726 - DNA, 788 bp, Arabidopsis thaliana
tcactgtgttcttctcaaatggcaaatggacaaaatttctctatgagccctcacggtggtggaagcggaatcgggtctagttcgatctcaccgagctccaattcaaactgtatcaacatgttccaaaacccgcagttcagattctcaggttatccgtcaacacaccatgcctcagctctcatgtcagggacttgaggcacatgagaagaccttgctccgagagaactcaggctaaactccggagactggtgatgatacatgacgggaagtcatccttggctacttatgttatcggttacaaaatttcttccttttaaaaactttgctttcatatcctctacaatctctcactctatattgagtgacttgacgaactttcaaatcattgtcaaactattttgttaacttccgattctctgagagtacaaattgcattaccctattacatacaatgagagaagattcagggtcactaagagtaatatacacgcatagatcccctaatgctctgaagacaaactggacacttagggtttaactctcgttccacggttgaagcacatcgcctgcaacatactacatgtccacagggaataaacgcaggtactctccttcttgacacgcagatcacacacaattctccatctgggatttcatctgcatcttcgggttcatcatcgaccacagaatcgttcggtctctgtggcagttctctctgatggttccattgtttccatttattccaggtcctgaagataagacagttaaacagatttcaaatcgaaaca

SEQ ID NO: 3727 - DNA, 578 bp, Arabidopsis thaliana
gcttaatagagattgatgggaaaataaacaagttcacaatgggagatgatcagaagcatcctgaaatgggtaagatcagaaggaagtgggaagagatcttggggaagataagattgatagggtataaagggaacacaggtgatgcgtttttcgatgtagacgaggaggagaaggagagttcgattcatatgcatagtgagaaacttgcaattgcatatggtatgatgaagactaagcctggtacaaccattaggatagtgaagaacttgagggtatgtgaagattgtcatacagtaacaaagcttatctctgaggtttatggtagagagttaattgtaagagaccgcaacagatttcatcattttagaaatggagtatgttcctgcagagattattggtgacagtctctgttttagtattttttgtagaggatttgtgtttttattttagagcagtgacaagtttacatagtaaaatatggtaaacttctttttgtttttgagtaaatcgtttattttcttacatcaagaaaattacctatgactaatgttgatttttattgaatgcaaaggtgaata

SEQ ID NO: 3728 - DNA, 405 bp, Arabidopsis thaliana
cattgcgacaccaaggttagttactacttcctaattcatcttgatcgataaatatatcacctaattgtatattgtatatcgttatttacaatggattatctcatttcctagatcattctacctcgtgatattttggatcttgtttgaaaacgtaatgtctatgcaccggacaaaaggaactttcatcggcatactcgaaagacaaagagtgaacgaatgggttgtcactgagaaattaggagatgctcttaagactaagctacttcctaggattggaaaacctagtaacatgtttcttgaaaggtaactaaattaatcaactagttaaaaaataatatatctacactaatgtttgctaaagagtttggttggttgcagagtaaactccaaggagataatggtggg

SEQ ID NO: 3729 - DNA, 536 bp, Arabidopsis thaliana
ctaattcctaacgctatcttaaaaagaaaaaaatagaaaattcaaaccaaaaaaatgtgagtggaagacaactcatgaattggtaaaacgacaaagcgaaacaagtcaaacgacaccaagctggctttgctgtctcagctctttccttagcttgtgtgagaaaagcctgcaagcatccaaactcagatccaccgccgcagctaatgccacgtgcgctgctgcatcctccgtacatgtcacgtgcgtcacaccgacttctacttctggtttgcttcgtttcccaactccttcaaccgtagccgacataacgaaccctctgttttgcgcggccgcagacggatgttgcggtagtagatatccgaaatccgacccggatcctgatcctggtctcgacgcgggtcttgaaccggcgcttgaaccggatccgagatcccagcttccttgaggactcgttgtcggcgtagacgccgttgtgcttgtacgccggtaacatcaataacaaactcccgccatttttcaactgatcgcgacgatgc

SEQ ID NO: 3730 - DNA, 1603 bp, Arabidopsis thaliana
tcaaaacatgaagtcaagctcgataaattacaacatcatacgcaagagagagtccaagagaaatgattacattgggagtgtttgaagctgggagggcaagagtgttgcgagagagaggattggattttgcccaattgcaaatgagtgagagcgagtgcgctacgggcatcgcaaccatctgcgccattgttatgttctcttcctaggaatttcggattctgggaaactaattcagaggtgacgaagaagaagaagaagatgagctgaacggataaggcaaacgtcgaatccaaacgcttctcttgtttttgctccgtctctacttactctattcaattaattgcttacaaaactggcaaaataaatacttgttgggctttgttttttgttgagataggctcgctattgtataacacggcccaactagtggactataacaaaaatgcaaaaaccgagtggactataataaagtgatacaactataaaatgaaaaaaaaaatgatttacagatattttcttaacaactaagatgaatggtgtgatcaatgacacacatttgatcagaagacgaaaggcatgagccttggctccatgtgggcacgtagctattgaggatagagtcatgatagcaaaagattgtataaaaaaaatggtaagtgtatagatgaaaagtcaacggatgagaatgagtcttgttaactatttatcgagatggtcgttcacttcgttattgtcacatgttgttgtattttaaggtgtttggggattttttccatcttgcatatatatctgattcattggagttgtacacttgtactcatggttttgttggcaagtttactacaatatttcgagtgttttcatgatgtttattgtttcgtactttacacatgaaactagtttaaagcttgtcgttcttctaataaggatatcactcattgattttgacaccaacgtctgaatagtgaatacaccattatttgttgaggcgtacccattactgtcacgtaaggcctgcatttcattattttgtttaggctgacccaatttattttatatatttacttcggatatttatctattctataaccttaagatgaattagttgattttaaaaagaaagtccaccttttctcaaacgggccattataatgccttgattagaagatttggttcgaaaaagaggaaaatatgattaagataataaaaaaaacatcaagagataaatgttttattatgataggaacacaacatcacaatctttgaagaattaacaaaaaaagaaggaatacatgtgaaaattaaaataaaatctcatagagagtaaaacatattctgaagatgaatggcaacacatctcatcagaagacgaaagacatagcagcgaccaatgcggtggcgatgagctgagggtaggcggagaaagtggcggcacttggagacggagccttagccatgggtggcattggagccatagccggaccatggtggtgggttccgttgtgcgactcagcagtcatgaccatcacggccaagacaatgcagatgaaggcgacggattcaaagaacttcttggtgccatttgaatgttcttctccttttc

SEQ ID NO: 3731 - DNA, 566 bp, Arabidopsis thaliana columbia
gtcgaagttctcaaatcctccgatcaattcaacgaaatcctcaaatctcatcgtcattcgaatcaccaccttgcccgatttttcactcattgaccaccgcctcaccagatccatcgcgattatcatccttaaccttcctccgatctctctccatcgctcgtcgcggtccaacacgtcctaagaaaatcgatatcggagccaaagcgcgtcagatgcagaatcgccgtttatggacctacgcgctaaccttcagctgcatcgccggattcgtagttatcgtccttaaccaatttcaggatcagcttgtcttctacctaacgccatcagacgctatggagaaattcgcagagaatccaacaaagaacaaattcagactcggtggtttggttctagaaggtagcgttgccacgcggcggcgtcacaggagatggagtttgtgatcactgatctgatcactgatattttggttaggtataaaggatctttgccggatctgtttagggaaggtcattcagttgtggttgaaggattcattaagccgtatacagatgaagtaaggaaggaag

SEQ ID NO: 3732 - DNA, 553 bp, Arabidopsis thaliana columbia
tatgactacacatattatatatacatcgagatcaagttcgagtacaaggaagaagatgtgtttggtcagaagaccgatctattgctccaaagcaacccggttaacaagaaaattccggttctcatccacaacggtaaaccggtatgcgagtccaatatcatagtcgaatacatcgatgaggtctggaaagacgataagactctccgtctactaccttctgatccttatcagaagtcacagtgtagattttgggctgatttgattgacaaaaaggtactactagactttcttaaaacgttacatttttggacgatacttaagaataacaaatacaatctactaaatacttcataatattaaatgttatggtgtgtatataaaaagttcaacgaaaggagactaaaagttcaatttcattgtgattcatatacaaaaatataaacaggtttttgacgctggaagaagaacgtggacaaagaggggcaaagaacaagaagaagcgaaacaagagttcatagagatattgaaagtgttagacagagagcttggagat

SEQ ID NO: 3733 - DNA, 390 bp, Arabidopsis thaliana columbia
tcactcacgagcaacaacaacaactatgtttcccaacattcttaccatggaagagtcccacaagagcttcgggagctttctcaagcccatcagctacatcttccacgtacgttatcttcccttctctaatgtggggaagcacaaactccaagaactttgagtatttgtcgtagaaatcagacactacaaagccttgaatgcggattcttttgtagattatgttggataggttgtgtacaccttcctggttctcaagattgtactgtgagatcattccacagacagcgatacgcccgtgcatgttcatgttcacaagcactgcatctagcattttgcctcctacattctcaaagtatatgtcaatgccattagggaaaccactggaaaaaa

SEQ ID NO: 3734 - DNA, 517 bp, Arabidopsis thaliana columbia
  unsure (1)..(517): unsure at all n locations
ttcttcttttttaggttttcgaacattcaatttgttctttgttgttgtttttctctttcttgctgaagttttgtgttttgatttctgatttctccaggagaaagtttcaaaccctctattcgagaggaggcctaagcaattcggtattggtggagctttacctcctaagaacagatctctctcgctacatcaaatggcccaaatccatccgtcttcaaaggcaaaagaggatcctgaagcagaggttgaaggtccctccagctcttaaccaattcaccaagactcttgacaagaatcttggtatgtctatctcattctcaatctactcttcaaacatttactacttgctgctgttaatttattattgacatacttaccagttctggtaaatcttgtgttgctgtaaccttataagaagacttcggtgccttatttatattcgttattgataattgcagctancagcctcttcaaggtccttctgaagtacaggccagaagacaaagctgccaagaag

SEQ ID NO: 3735 - DNA, 558 bp, Arabidopsis thaliana columbia
gttttatttcaggacaccagaagagaggcagatacaagcagagatattcaaaggaatgaatggatacccttaaacttctcaaatcaaatccttatactataacgagactgtcattacatgtaatttctagaaaatagattcttaagagagtcattagactcgaaatacagacacaaacattctactgaaccaaaagaagttttttgatatacatatactagtgaaccagtataaatccatttatatctgcgtatcaaagtcggagatacatccttcaccatagtctctgatagcctaatcgttagcttcactggctgctagcatctgaagcaatagcctcaccacgataaactctccatggtcctcgatagaatactggcttcatcagaggcactgttttccctgggtgctcttcccaaaacttctcctgtttacagagagtggagtaacataaagttcacactcaaacaagaaacataactgatactaacacaaaacagtgtaagaagcacattgacaaagaatacaatatactacagaacaatgaattagattaga

SEQ ID NO: 3736 - DNA, 522 bp, Arabidopsis thaliana columbia
gtgcattagtcaaaccgaaaggcatcaccacaaactcaaaatgtctatatctagtcctgaaaacagtcttgcgaacatctgcctccgctatcgggatttggtgataacccgacgtcaaatagcacccctcaactgatccaccaacaactcatcgatccttggaaaatggtacttgttcttcatagtgacccggttcaaccctcggtagtcagtacataagctgaaactctcatccttcttcttcacaaataacacaggcgctccccaaggtgaatccccaatgtcccacatttcctaaaaaaattgggcaatagttcagagtcatactataaaaagactaaaatgattccgaatacaaatgaaccagaaacttgagttcttagacgtccaaaattaaagtgttcggtttaccccagttctataaaaagactaaaaggaaaattattaaaaggaccattaaagaattgaataaaaatgtttaagcatatgccaacaaatgaaaactccaataaagaaaaagaa

SEQ ID NO: 3737 - DNA, 602 bp, Arabidopsis thaliana
tactaagatgtctctctctttctacatcattcatcttctcattttctccttgatttccacttgtgttgtctccaaccgtacgtattggctatctatctctttcttagtgtatttacattatgtatttgtacaactcgttcttgaataaatatttacatatgtaatacgtgttttgagattacaagatggtttcaccggaaaaaaaggattacaagatgatcgttttgtaaatatatgtataataacatttattcaggtctttggtaattacttttaagctcataatattggaatttacaatgtcatccccatgcatgttcatttaaatcgtgtagatggaatttttctcattcatagatcattatttttgtgttttgaatgttgtagaggccgaggataatcttcttcaaggcctaaacagctaccgaactgctcaaagagttcctccatttgccaagaatgagaaggctgattgtgtggctgatgagatcgccgacaagctcgaagatcagccatgcacaaaccacaccacagcgagcacggttactcctggctcggtacctccacggctgacgaactaccaggacattctctctgaatgc

SEQ ID NO: 3738 - DNA, 603 bp, Arabidopsis thaliana
tgttgtttctctagacaccacctacgtaagaaacaagtacaagatgccacttgctatttttgttggagtgaaccagcactaccagtatatggtccttgggtgcgccttaatatccgatgagagtgcagcaacatattcttggttaatggagacctggctgagagcaatcggtggacaagctcctaaggttttgatcactgagctagacgttgtaatgaactccattgttcccgaaatcttccccaatacacggcattgccttttgtctttggcatgtattgatgaaggtttctgagaatcttggtcaagttgttaagcaacatgataattttatgcctaagtttgagaagtgcatctatgaatcagggaaagatgcagactttgcgagagaatggtataagaatcttgctagattcggcctcaaagatgctcaatggatgatttctttatatgtagaccgcaagaaatgggcacctacctacatgactgatgtactcatggctgggatgtctcacacaacgagctgatagtagtaatgcttcgtcgacaagtatatgcataagaagactagtgctcaagaatttgtcaaggtatatgatacag

SEQ ID NO: 3739 - DNA, 507 bp, Arabidopsis thaliana
catttctcataaattcctaaagtagtacatgttacaataaaaattaaataattagaacacgaaatttattgttagagtcgaatttaaaatctaaattataatcacatcattagcacaagatctacttactgacgaaatgtaactatggaccaataccatcgggaaacggggcgtttcagctccatggatcgaaagtttcggctgtaaatagcctcgcaaatagtaaacacttggaagttgtaacattctctccaccacggccaaaatagacacactcctccttaaaccggattcggttaagaaactcatcggttatatcaggccaaataaaccggccaggatgtggaccagctttggaccaatcaacccacgtcaaggtccggttagcagctcatctctccatgcaacatgtgaacgagagttgggatataatgctcgtccatgtaacaaggcggtttacaatgttgatcgagtattttgtagtaaaacgtgtctcagattatatga

SEQ ID NO: 3740 - DNA, 522 bp, Arabidopsis thaliana columbia
gcatgtgtacgtagcaagcagcatacaggctcactgagaatttcctgtctacttgaagttcttttgagcatcctaaaagatcttgttgctgatcatccttagataacagatttccatccaaaaccgagaatcccacccttgttgcgtggaggtaatcaagaaaaattgctccgggtatatgtatggattgacttacgtgggatgaatccatccgaaacaaagcgtgtttccctgctattcttatcaagactccaacacacatgagaatgactgccccagaatctggagaattggaaccctggttgccaacgactgcatttgagaagaaaataaatggactctgcatgtgagccattataccaaacactgcagacattaagccttgaatgtgccttttaaccacattcaaacgtttgcgacctacaaaacaatagtactattcagtcaaataggcaataatgataacttcagcaaaaacatcaaaatttgggttccaatgtgttcagaaaaaatagtactaga

SEQ ID NO: 3741 - DNA, 990 bp, Arabidopsis thaliana
taaagggagacaaggagataaagaagtggtaaaatatgtcctgaggaatgctactggcttgaagaaaaggattttcatttcaaaatcaaatgattttggagagaagttttgtatgctccaggagttagcatccgtaccaacgccttcgccatcatgtcagcttctgttcgaccgaatattttagtctggagatcagagatcttgttgattcttagatatttgctttcttgctctccaaaaccaagtattaaagaatgattataatggctcggtttacttgtggtttggttcaatttgtgtgtttttaacctataacattttagttcggcttactaattcaaacttgtttggcctgagttatctgagaatcgataatacaatcagatatctgatcagtagataatgttttcagatggagatcatcagtcaactgccggatgatttgctcttccgaacatcttgtctttctctactagaagtatagaagagaccttttttttttttttttgctaaaaatgttaattttcattatatgaataagaggcttttacaaaaacgaaaggcctatacaagagtagccgaggcaaaaaataaaacaaggctacaatagagattttgggaagatataaggttagcgaatccaaagcaccatgaggttgcgccatctctttctgtggtaacgagaggagatgatgttacgaatctcgcggtcgacaatcttgaagatgataagaggtgcgatcctaagattgttatggaggacattgttgcgctgacgccaaatgttgtagatgatagcatgggctgagacttttctgaggagggaaggcgccgaagtagaggaagaacgcatccaagagaggagctctgcccaagagcactacatcctctgtcgcggacataagccactaaacgccaatctccagacctgagccgccaattcacagggagataggcgctggtctctggactcagtctccatagtgcata

SEQ ID NO: 3742 - DNA, 463 bp, Arabidopsis thaliana columbia
atagccttcacatttttaatactcactaccaatatctgtaataaaaggtaaacaatcacgactatgagcactcaaacagaagcagtcagtaacattatatttcagggcatggccagaaatgatcacctcagatcgtagagtcccagggagctgacttggatctttatcaagtagtttaaagactatctttccagtgcggtcctgtttgaataccatcaaaattaaaactataagtggcttgttttatctacgtactgagagctgcgataagaggagtagtagagctgcaaacctgagcatcagagtttacgctcggaggagagtagtcagagccagaagaagcataagcagactgttgcccgaaacctttaaagttaggatctgcagctcctctattcgatgcaccaaagagctctaggggcaagcaaccagtcctgggacttgagtttttatgattcttgga

SEQ ID NO: 3743 - DNA, 1445 bp, Arabidopsis thaliana
ctctcactcgtagtaaaaaaatggcggcggtacggcaccaatggcttcgaagccccgtggatctaaagctgaatcgttcgtagacaacaagcggagagaagatatccgattcgcgaacatcaactctgctcgagcagtctctgacgccgtccgtactagtttggggacggaaaggaatggacaagatgatttccacggcgaacggagaggtaatcattactaacgatggagctacgatccttaacaagatggaggttttgcagccagcggcgaagatgttagtcgagctttccaaatctcaagattcagccgccggagatggtaccacaactgtcgtagtaatcgccggtgcgcttctcaaggagtgtcaatcgcttctcacaaacgggatccaccctactgtcatttcagattcgcttcacaaggcgtgtggtaaggcgatcgatattttgactgccatggctgttccagtggagctcactgatagagattcacttgtgaaatctgcgagcacatcgcttaacagtaaggttgttagtcagtactctacattgcttgctcctttagctgtagatgcggttctctctgttatagatccggaaaagcctgagattgtggatttgcgtgatattaagattgttaagaagcttggtgggactgtggatgatacacatactgtgaaaggtttggtttttgataagaaggttagccgtgctgctggtggaccgactcgtgtggagaatgctaagattgctgtgattcagttccagatctcacctcctaagactgatatcgagcagagtattgttgtctctgattatactcagatggataggatcttgaaagaagagaggaattacatattggggatgattaagaagatcaaagcaactggttgcaatgtgttgttgattcagaagagtattttgagggatgcagtgactgatctatctcttcactatttggccaaagctaagattatggttattaaggatgttgagagagatgagattgaatttgtcaccaagacattgaactgcttgcctatcgccaatattgagcatttcagagctgagaagcttggccatgctgatcttgttgaggaggcctcccttggagatggaaagattttgaagatcactggtatcaaggacatggggagaactacatctgttctagttcgtggctccaaccagcttgttctagatgaagctgaaaggagtttacatgatgccttgtgtgtggttaggtgtctagtgagcaaaaggtttttgattgcaggaggtggtgcaccagagattgagctctcaaggcagctcggtgcttgggctaaggtgctacatgggatggaaggttactgtgtgaagtcttttgctgaagctctcgaagttattccttacacactagccgagaatgcagggttaaacctatcgccattgtgactg

SEQ ID NO: 3744 - DNA, 1620 bp, Arabidopsis thaliana
acccctgcgaattgtcccgggaaaagggagttgaaatcgcatgcagcctttccggcagtagatttcaaaaatctatggcgcagaattggcttatcgaaggagaagaagtagtttgtcggacaagaaaggaactctcggcgacaatgcagagcggaggagctcgagagagtagtaattggaaacagagcgtctcaattactcggtcgatgcttcttccgccatactccatcgtgtggctcactttttctcaccttatttctcttttatctttttcttatccaaattaaaattttcaatcaaatagacgacgtggatttattatgagtacactttcaaactggttagccttttccaataccaaaaagaaagattattttcaaaaatttgtcactttcgcaaacgttttgtcagaagaagaaaaaaaacaggatttatgtgtttggttgctagcagataagcttgttatagccattattagcgaatgtattttacagtttttgcagaaaataaaacaacaatcgttacaatgagagaagctttgtacacaagcaccacaaaccaggtaagaaagaggttaataaactcaaatgttgggcactcactagtcactatgaacaaagaacatgttttcacataattgagagatgaaaaagaaagaaagagagagaacaatgtggcactgaatttttagggttaccgtgtgagcggtttgtagaggacaacagttatgtacttagactcgaacctgtgggttaaacccaaagctactatggattgaggagtccatccttgctctatgaacacatggttaagcaccacatgttgaggctttgtggctatggctgtctcttcagtagtgccaagaagtgttagatgaagctgaggtggcaccgccagtggctctttcgcgtaatcttctgcggctggtagggtttgaccgtagctatgatcaggtgatggtggcgcctcaaactccactatgctttctgggttttctggcacaaagttctgcatgcataatgattgcagatactgttaagctgattgatagatttaacatgagaaaaaaagaggtgggaaagtaacttacatgaacatcgagaatgttacagacattgccaacttcgtctgctacaaagggtaaatctgggatgtatttggattcaccgtccacaatcaccttgtagtggtatatgccagatggaaggacaaagagaatcgagtggtctttccctgatttctgcagcttcttcctggtgaatgtaaacatattgtttttaacatatatcacgaaatctcgagagagggtccacgagaaacaaagtcaattataccttgatctccaattgtcccatgatccttccaccgccacatcattacctccttggttccatgtaatgatggtagggattccttgctctgggggattatcaaaaactctctgtgattggttccattggatgttattaggaggaggggcgtttgctctctgcaatggagccacgggaacctgagaatatccacataaacactgagccgtgagatcttacaaaccaatgtgcaagaagaatttgcgaatgtcaaaacattatatctaccatccgacacgaaatgcagcca

SEQ ID NO: 3745 - DNA, 601 bp, Arabidopsis thaliana columbia
cctcaaatcgatttcacaaaggcatcgtataaattttcttcttcaacaaaattagggtttggagccagaaaagagcaaataggcggcacatcagttctcaacactcacgatgggtatgacgaagaacagatccttataatccttaatctaattcgtgttcgtttcttttgattcttcaattgcgtgattctgattggatttgtttttgttttggtttgattttgttgtatagcgagaattaaggttcatgagcttagagataaatcaaagaccgatcttcagaatcagttgaaggaattcaaggctgaactcgctctcctccgtgtcgctaaagtcaccggaggcgctcccaacaagctctccagaatgtatgtcttttatatatctacttatacgtatatatgaaatgtgtgtatatatatcctcatttgttaggatttagtgttactttccaatttggagacatttcacttagatttagagtaattgaagaatttggagtaagagaccatatggtgctctgttttggaatttgcatttgtacatcatttgggatatcacagtagaatggatgtggatttagcttatgactcgaatatgt

SEQ ID NO: 3746 - DNA, 481 bp, Arabidopsis thaliana columbia
taacaaacggatctcgataccggcgattatgcgaacaccgtggtttcgtaaaaacatcaactctccgatcgagttcaagatcgatgagctcgagatccaaaacgtagaagacgaaacaccaacaacaacagcaacaacagcaacaacaacaacaacaccggtctcgccgaagttctttaacgcgtttgaattcatctcttctatgtcatcaggatttgatctatcaagtttgttcgagagtaagaggaagctgagatctatgtttacgtcacggtggtcggcgtcggagataatggggaagcttgaagggatagggaaagagatgaatatgaaggtgaagactgctaaagactttaaggtgcagttgtttgggagaacggaagtgacggaaggacagatcgcggtgactgctgaggttttcgaggttgcgccggaagtcgccgtcgttgagttgtgtaagtcggcgggagatactttgggg

SEQ ID NO: 3747 - DNA, 579 bp, Arabidopsis thaliana columbia
ttcacagaaaaataaaaatgttattcttgtaacaaatcaaactaaaaaaaagggaaaataagaatgactaaatgtttatgaagacgaaagagagaaaacatttttgtatttttattgacattttttagcagtcaagatgttagggtgaggaaatgaaaagttaatagaaacatgtatagtaaaagagacattttttcttgattgtagatagtgaatgtacgagtatactatcaccattagatttaaaaaaaaaaaacattttgcagaattattcataaactaaaatttagaaaataatgtaggagttaggtgaaccgcttatatataataaagacccaattagtaagtagatcaaacacaaatcaaatcagccatacatggatctaatcatgctttttcttctctctgctctcttcatcttccctgttttaatcttaattaagtctcggcttcgtcccaagaacaagaagagtacagcacctatggtccccggagcatggccattgctcggtcatttacatttatttgacaccgtaaacccgactcacgttacgtttggggcaatggctgacgtgtatg

SEQ ID NO: 3748 - DNA, 1262 bp, Arabidopsis thaliana
  unsure (1)..(1262): unsure at all n locations
ttcattgtacttgctagatccgattagatcagccattatccataacagagattatacaatgcacaaatctttcttctttctctcccattcagtgcaaccggggcttcactcgtcttccactcgcgtcacaaccatcggcaaatatttcttttcgatgtccagatactataacagagtgttcacttagcctcgccacatactgcaatagctccgttagtaaagatgggcaactctctttcagataatcaaacccatctgtttgcatcacagctgatcataacaaaagggaaaaaacagacacaagtctcatcatgtgaacagagttgattcagatcgattaaaaagaaagatcttgtgtgtttacctttcaggttctctggcagtgccacgaatttgagacacactgcttttagctgcaaacaatgatgctgctctgctagggccaaagtagttgcaaccgtgtttatggcaaccccttcacagagttttgactcacagattgctttaagccgctcaagagcataacggtctgccgctgctagtagatgctgagccacaagagtagacgccaatgtagagtctgttcctattaactcttgcatatcaggcaattcgtcccagtagataaaatggagcaatacctgcaaaacagcaataaaacaacatagaagaagggtttgtgtcaggttaaacatccagatcaaaactaccaggagtgaggatctgagcccgaactcataataagcaacaatgggaaacggagaaattcatacttttacatcatacaacatgaagtttctacagtcaaatacgcccgcgtaattttaaactctataccctcaagtcaacctctctaatatgctgaagacacaatttgttcatctagttgactcacataaatacggctaagagaaaaaggaattaagacgcataaacacatagatatgtgatatgtccatgtattagctacatagaaaacaagaagagaagcagaaagaaagaaccttatcccgggtgagtaaactcgagaataggagtagcgccccaggagaagatcccggatggtacatccgtgaatagacaatcctgtatgacacaccatcactcacccgaaaagaaaataaaaaggcaaggaccaagaaatctatctcttcctataagaccatgtaaaaccanattgactgtagatctctacttagacattccattatctaacagatgaaatcacagcaagagagttaaagggaggaccttgaaaatgg

SEQ ID NO: 3749 - DNA, 544 bp, Arabidopsis thaliana columbia
aaaacattcggttcaagacctgctctttgaatctcattgtaaatcttcccagcttcttccaccatcccggcgatacccaagtttagaatcaaggagttgtaagtgtagagatcaggggtgattcctctgctggtcttcatctcgttgaaaagcacaagagcttcttcaagtctatgagatttcccaagtccattgattatgagattgtaacatactacatcgggattgaggcctgattccttcagctccttgaagtaatgcaagccttcatcaactcttccgaccatacaaaggcaatctactagaaccgagtaagtcttgagatccggtcttactccttcttttaccatccttttgaacaatgcacacgctgcatcagcctcacctgcttttccaaacccgttaatgagaatgttgtagatagcacagtttggcctgcaaccgtagtccaacattccttcaaagagttgttttgcttcatatagtcttcctgacttagagaggccatcgataaggggacatacgtgcaggcagttggggagaa

SEQ ID NO: 3750 - DNA, 1220 bp, Arabidopsis thaliana
catagtttgttcattaacaagtggaagataagtatagttgttattgaactcaggaaccactagttccagaccattatcctctggtcctaaggcaatatttgggtcgacaacatcgtcctcttgatgagtaccgttgatgttatattctagcagaggggcatcaacatgattcatatcaggtaagatgtttctttgttgagcttcaggttgttcttcctcttgtcgattgacagttccggatctaattcgaggtcttttccttctgcgatgtttctctgctttatcttgatctcttactgaatgtgagatggctgttggttgttctttttgaatctgatttcttctactgtctttagatgaaactgaacctgaagcttcctctgtcccatcaacatcatagtcactgtcactgttgaccacaggtttcctcctgtcagcgttattacccctacgatgtgtctcagtcacattggagtttccattgtcactgctaggctgctgaatcaaagattcctcttggtcaaaaccgccaaccaaatcgcactctctttagctgtcatcttgtcctgtaaacatttcgactgacgaacatgcctcttaatctttgcaatatcaggtaacatatgattgatcactgccgttaaaactccaaccttccacatcttcttgagatcatgaggttttcggtaaggaggactctggcttttaggcagaccgagtttcacccaccattcttcattccccgttggccaccaaggcggaggcgtccctttctccaacggatacttcctttgaggaggatcacaatgttgcatcaaagaagataacaaagaccctaaagtagcatcttgcaaatcctggagaacaaactgtgaattcctattcccatcagatttcccaaacgctaaacactcctcttcgtatttagcaatagcagcaggaccgttcttatcaaacttcactttctctttccaccaagctcttatattgtcagaggaaccactcacaggcttgcccttttccggtattataccatagacaaacccgcgaactttgcagacttccataagcttcaacatgtacttaaggataccatcttgagctctagacattttcttcctctgagcttgatcagagattttcttaggtgtctccttcgtttgagctccttgagagccagctttttgtcgctctttgattcttttaagcctgacacgatc

SEQ ID NO: 3751 - DNA, 701 bp, Arabidopsis thaliana
acttcttgttctctgttaggttttggcattgtgtgtgcccattgataccccatatagctaaaggcctcatgtagcaaagtgacctatattcatcgttcgtggtccatgcctctggtgtctgaaatgcgcagctgcacccaaaaaaaatgttaatcgaacatgatgaatcaacaaaaaagattctgcgaagagcttaccctagaccacggtcggaccaagcggcctcatagattccacttgctgtcctaaaacctttatccgcaagcccttcttgaatcatacaagccgcgaccgagtatgttgtcccagcccaaacctccctcgacaccatcgtgcttgtgtctactcgtccatcaggtaacatcccgttcacagcaccacgtgttccatctctcactctcatcacattgaagtcgtagaccgtctccaacgctttctttatccattcttctttcgctatcggcttcagtccacaagctctcgcatacctatatacaaaacactccaaactcaatattgaaatttcaattgctaaacgcagcattgctgatttttattaacacttaccattgtccagccatctgatcagccaagatcgacgagctcgagccgcttcgactgttatcgtaattgaaataagaaccgttccaaagcttctcgtaaacgcttctagctttctcatacttagcgttgaagtaact

SEQ ID NO: 3752 - DNA, 569 bp, Arabidopsis thaliana columbia
gatgttggtgatggaagggtcaatgagcctaatgatggtgagacgctaatagatatacctgaagaattgttgattcaagaagcagatatccaataaaagctattagtagaaaaatttatggaagggtcaatgaaatccaactaaactccacaaaatcattgatccaaaattctttcagaggagagatattctaactccaaaaaacgatgatgttaacacaataaatcagtatatgctagagcactggatagtaagtttagatttgctctatattatttaatcttttaatttatgttctccattcttctgactttttgtgaagagttgattgttattttatttgttacaagtcaagaaagaatctatctttcggctaatagtatagatccttcaaattcagattcattaaacaatcctgttagttcagatttcttaaacagtattaaggtatcaagtatgccataccagtctttgcgtttgaagattacaaactgtcattatttaaaattaaataaaatagtataccaaatttttaaggtgtaattacttaattttctccgtttagattg

SEQ ID NO: 3753 - DNA, 459 bp, Arabidopsis thaliana columbia
acccaacatctgcatacggttgaccaacggtgacggtgacgaacctctttgtaatccatacaacgaatcgatacttcccggtgtcctctgctgcttcagtgaatcatataaacttgaagtcatctgtgaatccattcccttcgcagttggtgacatgcaatatccactgctaatgtcttttccaaacgaatctgctttcatagaagaggctgacttttgatcagtgccaaacagctgatctagtttctttgccctggcttcagcaaccaattgcccatgaaaatcatataaatgtccccaaaattcatcaaggatcgcagataagtgtctccgggcagcacgtcccaaaccttgcaaccgtgaaaggcttccagtcccacttcccccgttcccacttaagctgcggaatgaaggaggacatcagatcgacagtaaagttgcttgtaggagcagctttgg

SEQ ID NO: 3754 - DNA, 547 bp, Arabidopsis thaliana
cctgtttctcttggaagtaaaagaggagctgctggatgtagtcttaaggtttctttcaccacaagcttcaagtactgaagcttatcgacatcatcttcctcgattttttcattttgtttgattccaatgcatgttcggatctcatcttgaactttcttcatcacccgcgggtttttaacaagctctgccattgcccaaatcatggtgatggcacttgtatctactccagcaagatatatatcctaggtcaagaacgtcacaaaatagtcaatgacatattttgactcaagatttgttaagaattccataacaacgagtatagaagatctcacgtttatctatagatcctatgaattttaacatactaatgtactatcaaagtttgcgttcaagaaaatgttagggaacatatcgataaaagttttgaactatgcttacttggataattcctttgagattatcaatggtgagcttgaaagaacccccttgttcttgttttcgtatcatatctaggagcgagtcgatgatatcaggacgatcatgagtt

SEQ ID NO: 3755 - DNA, 690 bp, Arabidopsis thaliana
tataaatgagttccatagtcctctgttttcgcaattggtttcagtacattagcatgaaatatcagaatatggaaggtccatttctcaagtaccaagtatgtttggataattcctaagtttgtgttgcactcaaaatctgcaattcttcttcttctgcttccatgttggctttagctttttcattactagacaaaactcacagttgaaagaaacattttgaagtacaatttttaagatttcacgctcatatgatataaactgattaggctgttttaacctctatttgcagatggggaaaaaggagcgcgtcaacaatggaacatcttcatgaacattcagaagtacatcgatcggtagaagcagagagagcacgaagcaagcgattgtaaagagtggaaccgaaactaaaaaaacttttgagtgtgaactttgtttgtctgataattccaagaatgtatacaaatttgcaggaaaatattgaaaaatgttagtgtttagtaataaaagtacaagaaaaaagtgagaagtgtgtctatgcagagcagcaaccaggttttttaacggctgagatatcatctcggcctccaacattaatcatctgtcctttaggcaaagcagtggttggatcatctccagcttcaagagccttcttgctaacaactctgtaaatctgagtgagaacttcagtga

SEQ ID NO: 3756 - DNA, 1059 bp, Arabidopsis thaliana columbia
gataagagcttatcagaatcaaacacaataacagtagaagaaagtccagaagttgacattcaagctatgaatgaagaggttgttgtaagagtaatctcgcctttggattcacatccagcttcaagaatcatacaagcaatgagaaactcaaatgttagtctaatggaggctaagttatcattagctgaagacacaatgtttcacacttttgtgataaagtctaacaacgggtcggatccattgacgaaagagaagcttatagcagcgttttaccccgagaccagctcgacgcaaccgccattgccttcttctagttcacaggtctctggtgatatataagtttcacatgatggtgaagcttttgtctattcttgtttcagtatagataactttcaggtcaactagaaatagataaaatccttttttcttttctctttcttatagtgaaaggaatccggtttaagtatattcattaactttatttagaccattgattcacatatttgtatcttgggaaaatatttcctatactttagaaaatcaaataaagtatgaaagatatttgacttctctttctttgttatggatgctttattcagttacaatttgggatccattctttttttttttcaaataaagcaatagttataacaagttaatattatccaatcaatgttattcaggtaaatatttgattaattatcttgtagaatgttcatgtacatttgaattttgaagtgaccaaatcttatatattggtcatgaatatgatatattgacatttcaagagactgagctaaaaattacttaaaaatgagaatcaattattttttttccattggtccattattttatgcaatgcagcacataataatctattttggttttggtttgggcttctggtagttctgaaaagcccagtataaagcccaactccattaatgcatcttcacctctacgacgagaattgtgcttccgattcatttcacatagggtttgtttctccgatcagatccaatttcaatccttctccgtcagattatctcctcggccacgatg

SEQ ID NO: 3757 - DNA, 451 bp, Arabidopsis thaliana columbia
taggataaggttggggttgacccatcggctcagatgtatactggtaaccaatatgtggttgtggtcactgtgtgggcgagtgacggttgtctaccttgtggcttgagtcctctgctcttaggaccagatgcatctgtctgttcagaaggtgacgtgttacacgcggctatgatacattccagatggatagcgattcgagataactctcacctgtatctcgaatattggctcgggccgtgtgaatctatactcgtgctagctctcgtggggcgaaactctatgtgatgggctgtgtgaaggacatgcctcacgtgttgaggcagttgcgtgttgagaggtatcacgttttactcagatatcgtgcatcttgagatcaacccttctgagtgactcgtcgtatatgtctgatgcgcggttgttttggcgtgtggactgttggttgtgaacgacg

SEQ ID NO: 3758 - DNA, 355 bp, Arabidopsis thaliana
ctagagtatacataatccccgtaatgcaagaaggaataatcaaaacgaaatgcagagtataatggcaaaaagatttcgatgacgacacatatgatcctaagcaaacgacttactcaggcagagatcgatatgggtggaatacaacaagatagaagttcaatgcttccaagaccttcatctccatttccagaatatctttaatctcatatcgaaacttttcatccgcatctacagagagtgaaagcatccaatctcatcagaaactcagacactgaaaactcaagaaaattttggacgcaggaaacataagagtatttacaaagttttttcatgtagaagaccagaagtttggcat

SEQ ID NO: 3759 - DNA, 570 bp, Arabidopsis thaliana
ttttatgcggcttttttgttgtctgattttaagtttataactatgtattactgctgctacttatctacttatcattttcgtttacgttttgtggtttcatcataaagacaacatcacatagaggttcttaccttcaccattgaagggttttccttcgttgaaagatttactggtagaaaatgaatatttggcatttttaggtgaatcgatgatacatcagcgaacctgatcatgttaataagaacctttatcatggcaagaatcacatcatcacacaaacagcgaaataaatatagactgatatgtgataccttttcagtacggcgcttcccatgaggtagagagtgcgttggacagaagggctatacacaccagtttctggtggaccaaagaaagtatccatcagaactttcttaacgtccatgaacttctcgctaaagtagagtccttttgttggaatgcttgcaactgactcatacgagtacctgtcatcatgaacgtgtatgtcggtttcaagaatcaatcacaaataagaaatgtaacatcactaattaacacatacgtccaaga

SEQ ID NO: 3760 - DNA, 583 bp, Arabidopsis thaliana
ctttttgtcattatatttccaacaccaaacacaactctctgtctctctctctgaatcaagaacggtaaagatggctccaaggacactaaaacggcacaccgttcagcatttcacgcatattcatccattgacagagtttaacagcattggtgatttcatctgcgacggctgcaaaacctacggctcaggcaagacatatcgatgcgaaccatgcaactatgatctccatgagtattgtgccacatgtccccttacccttccaactttcattcatccccagcatgagctcagcctcgtcgttcgaaaacaacagtccacacgccaaaacgaccgcgcgtgtgacatatgcgacgagtcggtagaagggttgttctacagatgcaagatatgtgagtttgacgtgcatcctctctgcacgcagctgcctcaacacgtgaggcatgtccttcaccctgcccatcacttagagtttcgccctcgggagctagcacgtgtatggtttgtcacggccgtgccaatcttggaggtataggtgtgagttatgtagattcgatatccatatggagtgtacctagccgtgtgt

SEQ ID NO: 3761 - DNA, 568 bp, Arabidopsis thaliana
cagtacttgaagcttgtgatcaaagaaaccttaagactacacccaccagcacctcttttacttcctagagagacaatggctgatatcaagattcaaggctacgacattcctcggaaaaccattcttttggttaatgcatggtcgataggacgaaaccctgaactctgggaaaaccctgaggaatttaacccggagagatttatcgattgtcctatggattacaaaggaaatagttttgagatgttaccatttggttctggtcggaagatatgtccagggatagcttttggaatagcgaccgttgaactgggactattgaacttgctttactactttgattggagattggctgaggaggataaagatattgacatggaagaggctggtgatgcacaattgttaagaaagttcctcttgaacttgtcccaattattcatcattgaatgatgtccaactctataaataaaaatgaagttatatatttgcttgtcgaaacagaaaaatgttatgtaacatatatttgtattacaagaccagcaggacaattgtaatgcgtggaatgcttgtg

SEQ ID NO: 3762 - DNA, 428 bp, Arabidopsis thaliana
gaatgatgtaatgtttttttcttgagctagaatatatatcacgctggaattgacacaagcgccatcaccttgatttgggcgatggcagagctcgttagaaacccgcgggtaatgaagaaagctcaagacgagatccgaacttgcattggaatcaaacaggaaggaagaatcatggaagaagatcttgataagcttcaatacttgaagcttgtggtgaaagaaaccttaagactacacccagcagctcctcttttacttcctcgagaaacaatggctgatatcaagattcaaggctacgacattcctcagaaaagagctcttcttgttaatgcatggtctataggacgagatccggaatcctggaaaaatcctgaagagtttaaccggagaggtttatagatcgtcctgtggattacaagggacatagc

SEQ ID NO: 3763 - DNA, 1200 bp, Arabidopsis thaliana
ttacacccacaaactatctctttctttctcatatgttgtaacaacaacaacaagacataccgtgcttgcaaaagttggccactctatgtatttcagctgacttggttgctcagccatgaaagacaagagagatctcgtgctccttctcacaagaaaaatgcaattcaatataatgcaacattcagactcttccagcagatatatatattaaaagctagactcagtgggagaatttcataccagaccatgtctctaagaagactcagccataagggctcttcttcgggaagcttcttatgagagctccaactttcacgagcggaacctacagatcccaccgtgccacttccacgcacatgtttatgactgactctcccattgatactctacacactcaaacagagcttaagtgaaaagcttcttaagctgttaagccgcaatagaaagaaaggtaaattaccaaatccccagaaaacttgaagcaaatgggtccgaacccatcgcgtcttagaatccggtgtgacggagccaatcggattacgcctatgaaccaaaatcgaagctagatgattactaaggacaatatcaaaaagcagtgggaaagtatatagaagaagcaaccggagcgaatagtgacctgaaacagttgagagcagccccggagaaaccaccatcctccctaaatcgagcgttggaggaagacgaagctgatctcgccgtcgcagatatcaaaggccttcgatgatctatgggccttttttgggctcaaagtttcctggattataaacccattttaccaatgacatcttttacattttaaattactttggaatttggattgttggaaattctagttcattgaagaaactgacaatctgacattacagaagctgattatgtatgtgatccatttggttaagaatgaaaatgtctattgaatagtattttgtatccacgatgatgacatctaactaaactataactaatcctgtctttggtactgttaccatatgctgttttattatgtgtttagataaatacatgtctatacaaatctcatccctcatccccatccccatccccatcatcatcctcatcatcatcatcatcatcatccccatgatcattatcatcatccttcgtaatctcaacatcaacttcaccattctcctcctcttccgaactatcatcatcatctga

SEQ ID NO: 3764 - DNA, 829 bp, Arabidopsis thaliana
agatctattttaacctaaaactccttcaagatttgacctaacactatacttttgcaatctcaagttttagaattttctgtttttttttctcaagttttagattgtttctagataacatcggttttgcattagagaccacagaagtcaaactcaattccagattttgacttggctacaatacttaattctaaagttgcaagaatcaaagtaagaaccataaaatgaaatccagcaagtgaatttaaattactacagagaaattagcggtggcaaaacaaaaaaaaaactgaccgtctccggaggagagccaagaacggtagcgtcggcgatggcgaaattagctccgtgagaaaaatccgccgtggttaggagaatcggagagattttaggaattcccatgaatttagctaaaggaaaaaaaaaaacaatcaaattaaacacaaatgaataaatagttatagatatttgaagtgatcaatacaattaccaagataatcaggaacgatagaaccatcggaccaccgtccggtggcttgtcctacagtgactccataaggaggaaagcttgcgtcaactcggttctgagagagaaactgtttgtttccggcgtcgtaaagaccatctccgaacacaaagagcgtctgagcaaaggagacagtgtgaaagtggagaagaagaagagggaagagtaagaagaagtgagatttgagaatcgccattgaaagatcggaaagagaaagcttcgacggtggtggttcgttagaatttgcggtgaaggaaggtatcaaaagcattgatgaggcctcgtgaccatcagcaaaccgtaacg

SEQ ID NO: 3765 - DNA, 519 bp, Arabidopsis thaliana columbia
taagtgattggtccaaaaacaggaaatcataattttgaaaaatgaatcatgaatctatatggtttaatagattcatttacctattgcatgtatatctgcaaaatgaatccgaatgcaaaacaaacaaaaaaaggaaggagagaaaaacgatcaaaaccgaaatttctttgaaaattaaagaaatatgtgactaaaactcgaatgcgaacctaaatcataccaaatcatctataacagatcatgctgtactttgcatattatggttcattaacggaaaatctgaaactaagaccgagctaaaatcgtgttgaacacccctaaatttgtagcatgtaaaaaaaaaatggaaggattgaaacataattgagttcttactttaagttcgacaatgtagccgaggtagccgagctcaaagatacttctatttgacaaaaccatggctaaaacaatggagtctcggtatggaatcgcacagcaaaagcagttattgctgtgacgacaaatttaaccacggtgacg

SEQ ID NO: 3766 - DNA, 629 bp, Arabidopsis thaliana
gcaaagccaagtctgcaggctataaaagagcaacataaaaaaaaaagtacttaccgtgttggagccaacaaaagaaacagcccttatatcttcatcatcacagatagcattcacagtatcctgtgcaacagatgcattttcagtgacaacaaagaaagtgaaggtaatagtgcggaatctttacaaactaggttactctaattgcaaactagaatattcaccataatatctctcgacgggatccttactttaacaattcaaatgctaacaaataagaaatttagaaagagcagaaagtttaaacataacctacattggttccgtgaacgatattgagaacccatcaggtaaaccagcttccattgccaactcggcaagtattacagaagcacctggagaaagcaagtaatatcaataatcaaccaatcaatagaagggacctctatagctatagtggaaaacagtcaatcaacaatacatttcgctcatcacattggcggtggtagtaaaatgcatgttcactacactggcatcaacgatatgttacaacatgatctgaaagtcaagacatcttgaacttcccatacatcaattaaacaccacagaagtggtctattagtactggaata

SEQ ID NO: 3767 - DNA, 656 bp, Arabidopsis thaliana
  unsure (1)..(656): unsure at all n locations
ccatcgtggaccgttaattgaactttcgggatgcatcacaatcctcgctagcacccactcgaccaaaaccgcaacagtgtccgttcccctaaatatcatttcctaaacggaccaaaaaagttaatatcgtaagagaaatttttcttaatcatttccatgatttgatataaaaccaaacaattgttaatctattgtatacttaatacacttacttaattagtaaattttatggattcttcttagatgttatctagttgactaatgttgatattcatgatatacggattgaatagtgattaaaagacaaaacttacccaaagaacagcaaccatgtcggattctgataatttttctgaaccttgaagagaaagtaacatgtcaagaaagttacccgtggcagcacgttgttcatgtatgatacggctcaataacagatttactttcggtacgagctgcgagcacctaaaccggatttgttggaaatctaaaccggctaaccaaggaagatggtcggtccaatttaacgtacctagaagatcgtacccttcttcaaccaaaccctttaagcattcagattccaagttgttatttgactccaattcatactctctcccgaaaaccanacccatcatggttacacacgacgctgttttgag

SEQ ID NO: 3768 - DNA, 478 bp, Arabidopsis thaliana
gtaacgtccgccagtgtgctctaaaggaattctggaagggttatccaaaatgcgaccataacagaatgcaccaggtaatcacggcgacgataatggcaatcagcaccgcagcggatcccatatcttttgcgcgtccggaaagctcatggtattcagagccaattcggtcaaccactgcttcgatggcgctattgaggatttccacaatcatcaccagcatcacggagctgataagcagcacgcgggtaatcgcgtccacatccagccagcaggcgatgaccaccgccaacaataccgctacgccttcctgacggaatgccgcttcgttgatccatgcagcgcgtaaacctttccaggaatagccagcagctttgataattcgggtgaatcagtggtattattggccattgaaagaacctttttacattatgagcggcaatatcagtgtaccgttaaatccgatgattcgggtttgcgt

SEQ ID NO: 3769 - DNA, 457 bp, Arabidopsis thaliana
tattggcttttaatcttgtcttaaaacagattaaacgtcacataaaaagctattcttaatttagatattaattggtttatatatgattgatatgaatgataggtttctgggataaaaatcagcgatgtaatgttcttcgatatacacgggacatcggcgacggaagttggagtgaaattagactgtagctctaagaagccgtgcacgggaattcgaattcaagatgtgaagttgacgtaccggaataaaccagcaacaacagattgtagtcacgctggaggtagtgaggcaggatttcaacggcccaacagttgtctatgaccagaatagaaaaatatttgtcttctttttgttagtagtgtaattgtaagtaacgtcgtattttcatatatattacggctttattcctggagggttggaatatgtgaaattatggtctagtatttcgcgaaatcaa

SEQ ID NO: 3770 - DNA, 1008 bp, Arabidopsis thaliana
acgtttgtttgaagaaaattaacaattgcattagttgtcaatttttgagaatatttttctataattttagagaggaaaaaattacaaagcactttgagaaaagggcatatatctcacacaccgcaaatcgacaacaacacccgaatctaatactcacatgatttatcttaaacccaactttctttttcctaactcaacgtgaaaccgtacgtatgtctttaagaagacccaagacctgttgcattgttggtcgcttcactggcgtctccgccgtgcaaaagtaaccaattcgaagactctctaccatctcattaaccgattctccagcagctaaccgcaatctcgagtcaagagcttcctctcctcttctctccttaaccaaccggcgaacggatttaacattctcatcactcccttgcttcccggttaataactcaaacaaaatcaccccgaaactatacacatcgaattctacattgtttttattagtatcatctccggttctcgcaatgttgttgataccgaaatcagagatacgcggctctagggtttcggttaggaggatgttggtagcgactaagtgtccatgagtagtaccaacgtggtgtagataggctaaaccacgtgcaactcctatggcgatacggtgacgtattagccaatttgttttctccggtgatgagtctccgacgtgactctcccatgtatcggcactccaatcttccacgttggtttctcccgccgggagctcgtgtagccatcggtgaagatctccgttagccataaattcatataatataagcttctcttttcctaaaaataataaaccgcaatattggttacgaacaaataaatataatactgattttttgtcacaagtatgaatattttaaattatatatgtaaattaatattgcatttcctaattcacccataccaaataaattcagtaaattgtaaatcttagttaaatactgaaattaatacagtgatgctagactattaact

SEQ ID NO: 3771 - DNA, 510 bp, Arabidopsis thaliana
  unsure (1)..(510): unsure at all n locations
nnnnnnnnnnnnnnnnnnnnnnttaaagacatcgccacgcgcgtggagatggtgttgcctttacgccattcgtgccagaaggcctgagagactttgtcgcgtggacccagttccatatatttgtatttcggctcgcccagcggagtttccgggcccatgccgtaatcttgcagataacggtagccatttttgttgaccagaataccgccttcaccgcggcaaccttcggtcatcaggataccggaacctggcagaccggttgggtgatactgaacgaattccatgtcacgcagcggaaccgcgtggcttagcgccatacccataccgtcaccggtaacgatgccgccgttggtgttgtaacgataaacgcgacccgcaccgccagtagccataacgaccgcgttacatcggatctgcaccagcgtgccttccatcatgttcattctttagagnnnnnnnnnnnnnnnnnnnnnnnnnnnnnnnnnnnnnnnnnnnnnnnnnnnnnnnnnn

SEQ ID NO: 3772 - DNA, 475 bp, Arabidopsis thaliana
cagtgtgctctaaagtacatgcctgcggggcacgccagccctgcacaggcggcgagaaagatttccgggtccggtttcgagtttttaagttgggaagcatccgcgcagaaggtgaaaaactcgcgcagtccagcgccgctaaaatcgtcggcgcattcagggagacagaagccagcccaaccgagatctgctgtgcacggagatctgccagcaaagagcgaatgccgggtagaacagcgttgaccgtcaactcgcgtagtgagtggacatagagcagatttttgcgatacgccagttgcgccctctcctgagagttaaagtcgccctctttgcccccagtgttgcagaatgcgccgcagagactcatcgcggctgatcccttttagggattcgttaaactgcgcatcaatgctgatgccaatttcagcggcaatctgctgccacgcatggaaatgcagatgcgcggtatcggtga

SEQ ID NO: 3773 - DNA, 532 bp, Arabidopsis thaliana
ggaaatttatcatctttctatttctgatggtttgttactttctaccaagatatttgtctaagcagaactgtgattacatatttcctctaagttccacattgtgtagtattgagtctcctctgcttgttaccgtgtactagtgacgggagctacacgaggatatggttttgtggagtaagagactgaaaaggagatgcttcgtgcttatgaggtgctgtgatactaaattgcattaacttcttacggcttgttctaggagttgacagcagtctgaatgactgtacgaaaggacagcaatgtgattgaatcattagcatctccgagtaagtacagtagactagtggaggttgggtatcagagtgagaatctgaatggtgatacaaaagcaggatggtcatcattgactaatagatgggcgagagatctactcggtgattacaagagacagcgattgatgcctggatggataccaagaagactaggtttgccatgcaggacctcaattagtgtctgaaatgaaatgtcataggcg

SEQ ID NO: 3774 - DNA, 555 bp, Arabidopsis thaliana
ccccttcttcttttctggtctttggtctaacaggcttcacaggaactaagtagctgagaagaagcacagcgataggtataactgttccaatgtaatatacactcttgaaggcgactagtgtttcgtgcaagcttaaaacctgaaaaattacacacaaaaatgagagttttttgaaatgaaaacaccgttgaaaaaaacggagggaagagtttttagttaccatgaaaccgacggatgagtaattgagaaccactactgtgtagaggaaattgatgagaaccaaaacatttctcagcattgccattttcggaggtattgcttgttgccaccggtaaatagctgtttaatacaaagggagaagtttttagattacttatttactgaaactgaatcaaaacagaacattaaatgaaagatgaaggctagtatcgtacctttcgaaccatcgatcatcaatgctgattgcacaaagaatataatgtatccaggatacagtccctgcaaataaaaacacaagtagaggttttaattactttctttagcacacaaagattg

SEQ ID NO: 3775 - DNA, 617 bp, Arabidopsis thaliana
cattattataccttaattggaatgatcagactactattgtttgggcctccagaagaaatgtgtttatcaagtgtccttcacctacagtagttgtcacgaactagacatctgcatgctttgatattgtaaagcagaccatagaaccttctaggtttcattattgatctctgcagctcgagaagttacgggatgatcctatacgtgaagaggggcctcttatttatcaccttgatgtcgcggcgatgtatccaaatattatcttaacaaacaggcttcaggtacatcaaatatcacttaaatgattgtgttccatgtacaaaagaatcacaatcattacttttaagattacaaagcccgcagatatattatgttaagtggtaggtttcttcttaattgtcagccaccatcaatagttacggatgaggtttgcacagcatgtgatttcaacggcccggaaaagacctgtcttagaaaacttgaatgggtttggcgtggggtgacgttcaagggaaataaaaggtttagcttatattatattccagctaagtatggatttaaaccttgttgatatagtcttaagatcttaaatttgttttcaaatggtttgccagtgaata

SEQ ID NO: 3776 - DNA, 660 bp, Arabidopsis thaliana
  unsure (1)..(660): unsure at all n locations
tatctcatgtagagtaatcccattagggcttgtggaagaacattagttagtccttagactactgtttgagcctccggaggaaatctgtctgtcaagtatcctctatcatagttgttatcaactatcatctgcatgcttggatattttaaagcagaatttataacctgatcgtcttgtgaattatctccctttatctttgattcgggttgaagtcttagttctgtcgtggtttggcggttttattgattttgtagcttgagaagttacgagatgaccctatacgggaagaggggcctcttatttatcaccttgatgtcgcagccatgtatccaaatatcatcttaacaaacaggcttcaggtacatctaatctctgtttgcatgtttctaactgatttagggattatatgttgtagcatgcgattgtaaatcaatatctaccaaacatcagctaattggtgatgtccatatacaaaataacacaaccgtgacttttacgattgtgaccccctagatatattatgttaagcgaaagtttctctaaattctcagccacatcaatagttacggatgagatttcacagcatgtgatttcacctgccgggaaagacctgcttagaaacttgaatgggttngcggtgtgtgcatcatgggaagaaag

SEQ ID NO: 3777 - DNA, 905 bp, Arabidopsis thaliana
ctaaagtttggcatcttcgaaactgaatttttccgaaagcaccagcgcgccgccggggttcagcccttgataaattttatccagtaacgcctggcgctcggaaggttccaggaattgcagggtaaaattcagcaccaccatcgatgcgttttcaatggcgatatcgcgaatatcaccttcaatgacgtctactggcgtaggggctttataggcgtcaatatgacgacggcagcgttcaatcatcgccggggagttgtcgatggcaataattttgcaattatcatgatgaatgttgcgacgcaccgagagcgtcgcgcgcccagagaacaacccagatcgtaaacctgcgtaccaggttgaacgaagcgctcggctaacataccaatcatggaaataatattggaatagccgggtacggaacgctggatcatatccgggaagacttcagctacccgttcatcaaaggtccagtcgcccagtctggcgataggggcagaaaatagcgtgtcgcggtgagacataacgtaaaaatccgggaaaaagaaagtggcgtattgtgcgctaacgcagggagaaaaccaactcccagggcatataccaaagattcgccagcaccatcagcaacagcgcacaccaggtggcgctcatgccggaacgtcgccagcggaacagacggtgatgaaaaccgtaataatgcatcagacgaccagcaagcaaaacgatgccgcaaatatgcaccatccaggtttctagcgcattcatttccataaacagcatcagcacaatcgcgatgggaatatattccacgcgttaccatgaatgcgaatagcgctttgcagttcgctaaaaccgccgtcgccatagcaacgcggtactgcattcgcaggcgaacgacatcaaaagag

SEQ ID NO: 3778 - DNA, 515 bp, Arabidopsis thaliana columbia
tcttcaccagatgtttcgtcagtatacacggtttcatctgtctcattcctctcgttaccatttcttttctcatcaaacttttctttgaaaagtttcttaagaaacccatctttttcctcatcatctactgcgttagaaactttatcatcctcattcttgctctcatgaaaaagtttcttgaagaacccttctgtgtttgcatttggctcctcgtcttcatttttactatcccgcaataacttcttgaagaaaccctccgagttggcacccaattcctcttcatctcctttattatctcgtaacaatctcttaaagaatccatctgaactcgatgtcaattcctcttcatctcctttactactccttagcctcttaaagaaccctcggaattgtttgatatctcctcctcttctgacttattgtctttcaaaagtcgcttaaagaaaccctctggagtttgacctttgttcatcatcctcacctctgctgtccctcaagagtctcttgaaaaatcc

SEQ ID NO: 3779 - DNA, 494 bp, Arabidopsis thaliana
  unsure (1)..(494): unsure at all n locations
agtgtgctctaaagttacgcgcaaatgaaaccgaacagttaccggcagagtgttacggcgaatgtattgtcgagcagggcattaacttctctggtgaagtgtcgctggttggcgcgcgcggctttgatggcagcaccgtgttttatccgctgacgcataacctgcatcaggacggtattttgcgcaccagcgtcgcttttccgcaggccaacgcacagcagcaggcgcaacgantagagatgctgtcggcgattatgcaggagctgggctatgtgggcgtgatggcgatggagtgttttgtcaccccgcaaggtctgttgatcaacgaactggcaccgcgtgtgcataacagcggtcactggacacaaaacggtgccagcatcagccagtttgagctgcatctgcgggcgattaccgatctgccgttaccgcaaccagtggtgaataaccgtcggtgatgatcaatctgattggtagtgatgtgaattatgact

SEQ ID NO: 3780 - DNA, 575 bp, Arabidopsis thaliana
gacttctgagtatatcaaacagcttctgtttcttttgtttgcatctacccagatggccaattggttgacagccttgttaggcttgttgggattacctatggataccaaaatgatttccttggctagagaccctcccaccttctccacctctcttgagatcgtcgcagagaacagcaagacctgtggttgtgacaaggcctgaaatatctgcatcacctgatctctgaagcctctctgaagcatgcagtcaacttcatccagcacaaacgtcatgatgttatctagttcaatggtgtgctttgatagaaggtccaccacccggcctggggtaccaatgatcaattcaacaccttgctgaatgcggtagagttgtccagacatgggatcaccacctacaacgagtgcagtcttaaatggcagtccctttccgagcatttttgcctgatcttcaacttggacacagagctctctcgttggagccaaaaccatagccaaggggttcctcctctggtctgagggatgctcagagtgatacgttgtgcaacgagaaataataggacaagaaaagaagctgt

SEQ ID NO: 3781 - DNA, 582 bp, Arabidopsis thaliana
  unsure (1)..(582): unsure at all n locations
nnnnnnnnnnnnnnnnnnnnnnnctaaagaaaatcttctttatgcagacgggcgcgcggtgcctggccggtaatgcacagaataggaatggaatcagcagaagcggaatagagcgcggtgatcatgtccgtgcccgcaggaccggaagtccccagacatacgccgatattccctggccgttgcgcgggtataaccttccgccatgtgcgaagaccttccacatgacgcgccagaatgtgacgaataccgccgtgcttacgcatcgctgagtagaacggattgattgcagctcccggaacaccgaaggcggtagtgataccttctttctccagcacatacattgccgcgtcaacggctctcatttttgccattttattcctacctctatttattggaaaatttttccaactttcaaattttgtcaaaaaaacccgctccgcagagcggagtgcgacagacattatggatgtgctttcagtcccaacgccgtgctgatatcgcgggcggtgtctctgaccagctcaccctgactgacaaaacgatcttctgtcagtcttgatgaaggccggagatggagatagc

SEQ ID NO: 3782 - DNA, 769 bp, Arabidopsis thaliana
agtttattttttcaactttacaggtttaacggtagagtatgaagtaggtcaacagtgacattagacgattaggtgactttagtgggtcacactcagaaaccaaaaatgttgaaacaatatgctttcatttttaacattgaatctacaaaattgtgatgcactaattccaaattttaattattgttcacttatatgagagtaaactaatcaaatggaatttagattagatatggatatgcatgaatatatctttttagttaatatttgacgtcccaacagattattcgattgaacaaatcggtgacggaaaatcttctatttttttctttatttaaatttgaaatataataaaataaagattacgaatatgcataataaaatcgaaccgggtggttcggtttaattagagtgaagagaattttgaacgtaccccgcaaccggtatcgatggctgtacggatagagccgtcgctgagatcaatcaaccgtccgatatcatcaatgtaagcatcagcgccacgtggaaacatcgtacctccaccagggaaccaaaaccgatcattctcgtaccggacccaattctgattctttttctcaaccgtaagctccgtgtgaggcacattagcgaaccacgccacgtcacgactcgccggccatcggaacggcgttttgtaaccgtacggcgccggaattctgcacttcaagatttcttctctctcgggacaatgcctttgcctatactccaatctctccctcgagaatttcaacga

SEQ ID NO: 3783 - DNA, 653 bp, Arabidopsis thaliana
tgtcaccctcacgcaaccagttcactcttgacctttggtagaagaaactagcttcagcttcagccaggatacgccactttctctgagtctctgcttcaatcgcagcattagaggggcatggggaagctaaaagaacactctgagcaagcaacaaggcgtcatgggcctccttagttcttttctctatatcagaataattatctctgctgaaatctctgataactttctttaaagccttcaacttaacagagacacgatacatggcagaacccgtgacgctagtggaaaaccacttgagacaaataagggaaaggaagttctcatccttcagaagaaagttgttgaacctgaaaggcttctttgacctaggagaggcagacatcaggcttaactcacaagaggagtgatcagaaaagtctggctcaccaaataatccaagagaagaggggaaggtggttgtccacttatcattgaccaaaatgcgatccagcttcttggcaacaggagccctacttcttttgttccaccaagtgaatgtgttacctctgaagcttagatcggtcagagaggcaaggagaattgtttccctgaagatcctggtaggcctatccacattgaacccatcagaagtagagtgctcacttggatgaaga

SEQ ID NO: 3784 - DNA, 644 bp, Arabidopsis thaliana
gagggtttaggattcttcactacgattctgcaaatggtaactacagtctacaagtaaagtgtgaatcaacgaatgagattttgaaattagaagtgactgaaactgtgtaagacctagaaaatgtgcatcttcaattagcgggaactctcaaaatttcgaaatcaatggcgtcctctggcgacgacctccgtcttctctctctcatcgacgtcggcgataatgtcttctcttccttctccgattaccttaaacctttctctactctatccacttcccggaaaaaacaagaccgagcaaccacgattcgagccctagctaagcaattccttcctttcctcaacaaatcgatctctctcctaccgaaacgtctctccgtcgcgaattctgataaggaagctcgtgaatcagcattagatctgttccgtgcttatgaactttgtttggactgtttagaattggtctctgctcaattagcttgtaagcctcacactgttcaatctcagaggctaaggatgattcattgtctcgatgtttggggtttgtatgagaatgtgtatactgaagcgtttaaggttctggagaagctaagaggctctgatagcaaatcccggaagtcccggttgttgccggaggttcattactag

SEQ ID NO: 3785 - DNA, 581 bp, Arabidopsis thaliana
gaatataatcacttacctgtgagatctcaccgacgacatgcatattgatggtttgagaagctcacagtatacccactctcaaactcaacaacctcatacaaagtggcagtactacataaagtagcacaatacctctcatcaaccctcgacttctccaacacttttaagtgttataagtgaaaactggacatccgatgccaaacactgttttaacctccgagagatcctctccattatttgccttcttagagtttttcaatagattgatgattggctttaaccttgcttctctgattgtcttgttaaaactttctgaaatatctttgtgaacatccatgcattgagaacccagattgaagtatgcacgtgaccatgtcttaggttgtgtattcacaagggctcataagctttaggatcatagtttagtaataacttcttctttataatcaaattccctcgtattgtaactataagcaacatatcagaacatgactttgtactctgaagatacataattctttttccaatttgcatatatatgtctcgagcaaattctattatcacacttagaactcggatgc

SEQ ID NO: 3786 - DNA, 4123 bp, Arabidopsis thaliana
tgggttttcttcgtagcgacagaaagggtaggcgttgatgaggattgtgagccagtcttgacgtgaagtccaagatgggagtgagggagccgaggagtacgcggcggaaggaagtggccgagggaggtaggatacatccaagatggctagtgagtgagccgtcgtcacaaagatctgcttgtttaggccacaatccaccagagcaccgtggatgctttgcatagccgggaagagggctgccgtgagggctgactggtttgaggtgaggacttcgtttcccactacgatggccacgatcttggtgtttgggaggtaagcttggacgttctccttcacccagccttgggctttaatagggtcgctcatctgagccaggtactcgttaccgagggccacggtgagctcgaagccggagccggcgaaggcacgtagggcttgtggatcggcgtcatagagcttgacttttgtagctcccacagacttgaggagagggatgacgtttttagggggaggaaggttgttagcgacctggccatagttgatgccgatggaggagacgatgagaggaagagagaacagagcaaggcaaaacagagagaagagagactgcagagaagaagaagccatagatgaagtgagagagagagagagagagcgtagtgagtggttgtgagcaagatgatagaggaggcagtgatgggaccagagcgttaggattcactaaatttcaaagtgaaatagtaataaagaaataattgacaagaagaaagagaaagagtaatgttggtttggatgagctggaagtcagtgtctctggagcaagcagtagaggagagagcatctttcttgttttgcttcctctcggattctcacttctcttatgacagatcattcttgtcctcttctctctcggtgctctcattacaacacttgctaggtatttgagacagctacatggagacagaacaccaactagaacatctaccactcatgtctttcaacagcctgtttgcttcaactagtcttttttccaatacaccagaatttgactaaatccaactaggttgatgaccttgaacggctctttaaagtttaaccagatacaacccaatgattcaaaacaccaattagagccatcgccacacattgctttgtctcatataaagtaaaagcacaccaacatatgaataaagtttagctcacaacaagaaagagttcaatttagcatatcccttgaaagcaaaagaatgttaataaattctcattacagagataatagaagacaacaaaagagaagatgagaatgataagattcaagacctaagtgacgcactcacgctttgaatggaaaaaacaaagcttttgcatcacccaagagaagaagaagaagaatggtatttgtaatcttatcatctgtgtgctgtgaccagcgtctctatgaaccttaacccatcaaacctcggctcgaaattgtccgacccattcgttttcctcgattcccaaacctgatcaattcatatccacatctcagtttcaaaccacagaacaattgaaatcgtcgaaatcgcagatcttaaaaaagaaagaaaaacctttggggagactggaggaagaatggaggaagaagagagagcagcggtggagacggcaatgacagaagcgaccacaccgcttgaaaccttcatcttcttcttcggatccgacgacgccggatctctccaccaccaccgactctctggagctgcgtgttgcgccttgtttcaggcttttcttaatatcaaattttcagttaaacccaatattgcccttcctttttattttctccaccattacaaaaataattaaaaaagagaagtacttattaataagaaaaacaaattggcgttggaatgtggtattatcgtaacggtgcatttgattcgagttgttcgataatctattttcaatggttgaattattttattgactcatctagtgggtcaatttgtggaactatcaaattatctcaaatataatggaaaaatatttcaaaccatacaaatttagttatttatctctttttttttgtccaataactcagtatattataatcaagactttcttggtccaataacgggcttatcactagtatagtattaaaccatgcaaccaaaaggccatttttgtgtgttattgaactagtaaattagaatagtattttaaaatccattgctattacttattaccatttaccaccattgcatgcacgttgtttcacccgtgtatgtatgtcaatagaatttaacagttttttgcaaccgtgtaatgctgtacaaatcatgagtctgtttgggtaataaatatgaattaatgttttgttagactataacaaaatgtacttgatgtatctatttatttgagttatgaaatactgattactccgggaggtttataatctttagtttccaaaactagacaaataaaaaagattacaaattttccaaatctcaaactaaaatgtaaccaattacagaaagccccaaaaaaaggaatcagctaaagtgcgatttaggagtcatccaaggaagatcctccccaaccaaaccatcgacaatcatctcttccgcttcgttagccggtcggattctcaacaaaggcctcctcgccggaagaactggcaacggcgcctccccgcgtataatcctcacagcatccttcacccttggccgcttctcactgtcaggatgcgcacaaaccatcccaaccatcaacaccctttccatttcctctgcatcgaactcttccctcagcatgatgtcagccccatccagcaccttccctgtctcccagtggctccacatcaggtctacaagcaccgccccgtcatcccccaccggcctacgccccgtacacacttccagaaccaccactccaaagctgtacacgtctgttttttcagagggcacacctgtgtacacgtattctggtgccaagtaacccatagtacctgctgggagtgtagcagctcgtccagctagcaacgcactgtgctcatatatctcagctaacccgaaatcaccaagcttggcgttaaactcggcatcaagcattatgttacaggtcttgacgtcacggtggatgatctgtctctcacattcttcgtgtagatatgtaagtgcggaagccacaccgagaatgatgtttaccctctgcttccaagagagtactatgatctcttctgatggatcagatgagggtttcttgtgtaggaattcacttaaacttccgttaggtaagtactcaaacactaaggccgtctctgttccttcgctgcaccacccctggaactgaaccagattcttgtgccgcaagtaaccagtcattgtggtgaactctgtggtgaaagggttacggttgcattgtggccagtgttctcgatcaaaccgcttcacggccacggatccaatggaaggaatagagcctctatagacagtagcagaagctccttgaccaacgattgcgttctcattgaaacccgacgtcgcggatttgatctcagccaaggataaccttccaggcatccgaacaagccccgaattcgaatcagcttcctcactaatccttttcttgccacaaatcaatgagaaaacaataaacgccacgaggataacaattgcagccaaaccaggtaaaagactccaaactggtatctttaatccaacaactgtaaccctaaagttgaaacctttacgatgaatcttcttcggattttcggaaacttcccctgagcaaaccaaacactcttcatctttctcctcctcctcttcttgaatcgcatcagaatgagacccaaaggtcctaaatttccaccgctcaacgatatgcaaagctgacccaataccagcattcgaagcagagaaaccaacatgcatatactctttaactttaccagagagatcaatctgtgttgataaaacaggactagtaggcttaacacgagaatacccaacccaaaccctaatcagtttaagaacatcactatactcaatccaagccatcatctttttcccacttttaagatcaaaccctttcgaaatcgcatcaacggaagaaacagagaagattgaactaacatcgattccaa

SEQ ID NO: 3787 - DNA, 916 bp, Arabidopsis thaliana
agaacatcagccatggacgtatacatgatactgtcggcaagattggagaaaggcattcctttaggaatcccacacattccaacaaccaaaagacctccacttactatttctgtagccctagcttctagaaacttctccatgtcccgaccaaactgatctctataagccttcacaacttcatccgcggcatttgagtagtgaaccttgcctttattccacgccttggagcttttgtccaacacctcttttggtacactcgatagccagtgtgtggcccccatcgtcactacaatatgaacggaggattgaggaaggacacggccgtagaacgaacccgggactccgaccgccaagtaactccggtcttgagggagagatgtgaagagagtgttgaagtcgttttgtgggaggtcgttgaagaagacaagaaactctggttttgacgagtttgattttcttaagctggtttcaatggatttgatgatgttgtcaacgagaaagaatgtatttggtccagttgcacaaccaagatcggctatccggaatgtgttggagtcagatgagattagggtttttgcattgagtttctctaataccagtttgtctattttctctttcaacaaacttgttgtttttctgtgttcacaccaaaagaagtcaaaagcttaatataattttatgctactccaattgaaaacgattaaaagacagaactaaatcacaaagtttttttttcttttgataagaaaaatcaaaaacttttttaaaattaattttatacttttatgactgaacaaaccatatgaaatttacgtataaagtaactttgatgcactatgtctatataggagatgagatgagatcaaaccatattaactacatattaaaacatagaaccatcatttaaaaaaatgta

SEQ ID NO: 3788 - DNA, 885 bp, Arabidopsis thaliana
ccaaagttgcggatcttcttttaattcacgttctagggttttcgatttttgattcgtctttgatcggagcttagccgccatggatacgaggtttccgttctctccggccgaggtctctaaagtccgggtggtccagtttggcatactcagccccgatgagatcgtaatgctcctttctctttctctttctctttcaggtccattgctccgccgtctgtttagctggcggggatattggcatgaatagtagattggtttagttagggagcatgttcttttctatctattgatcttaattggaagcttcaagtaagaaattgagtttcactggttgctaatggcttttttttcagaggcaaatgtctgttatacatgttgagcatagtgagacgaccgagaagggtaaacctaaggtgggatgattgagtgatacccgtcttggtacgattgatcggaaggtgaagtgtgagacatgtatggctaatatggctgagtgtccgggacattttggctatcttgagctcgctaagccaatgtatcatgtcggttttatgaagacagtgttaagtatcatgagatgtgtctgtttcaattgctccaagattttagctgatgaggtatgtaggagcttatttcgtgtcagcattgcttgttttgcttatgtctttgtttgacgtagctgttcttcaattgattatttttatgaaggaggagcataagtttaagcaggctatgaagatcaagaatcctaagaataggcttaagaagattctggatgcctgcaaaaacaagaccaaatgtgatggtggtgatgacattgacgatgtcagtagcacagcacggatgaacgagtaaaaaagagcggaggtggatgtggtgcacaca

SEQ ID NO: 3789 - DNA, 615 bp, Arabidopsis thaliana
  unsure (1)..(615): unsure at all n locations
tgtgatattatacaggactatgaatacgtgatgaagaaggatggattccccaaagcaccgatgccaaaacattggaaaggagagaagaatctttactgtgccggattttcaagaaaaggaatcgccggagtgctgaggatgctatgtctgtagccgacgacatcagatctatcttggctaccttaaaaaataattgaagctgtattcattaacctgcaagatattaagacttaataataaaatgaaagagagaaaaaaatagtaagaggtaagaatatctatatatctactctagtgcgccatgtctttaatatccgtaaaatagtaaaaaataattaaagctgtattccgtgaaaatattaagacttaataaaataaggaaagagaaaaaaaataataatagtaagaagtaagaaaaccaatatgtattcatctactctagtagaatagtactgtattttgccattttggggggtctcattcacgaatatgtaatatgccattttatgatatatatatatatatatagacagacntatctactcgtaaatatagtgcttatgaataatagcggttcttaccgtttaaaactaattatagaaattatttgtttgg

SEQ ID NO: 3790 - DNA, 528 bp, Arabidopsis thaliana
tattggtggcagtttgtatggtattcatctcaaaaaattctaaacctgggacctcctttgatttcagatcattcctccaggcatcctttaacgtataggctgaaaattgagttagaactcgcgtgttaggtcataatatcttcagatattttgaagcaaagagaacatatgatagttcaaagaacatagagtgcgtcgatttagtgtaggtttgacgtagtgggaaaaacttcgctttttatcaatttaagttttcagtaatttgtaataaatgtaacgacaaagagatactatgataatcagtgtgtacctttatgtgtcactctgtatctccagaaaccaaatgcagcagaagtcaatatcacaaacagagaaaggctcacagtactagcaacaatgattttgttgcgcttatttccacctgagatatttaagacataaatagattaaacaataaaccatattgctatcaaagagaacactagagttgaagacaaagttataattaacagacaagatcgtctatgt

SEQ ID NO: 3791 - DNA, 514 bp, Arabidopsis thaliana
gtgagaagattgaaactagagctgcaagaaaaaaacttacgaactccgaacattcattccttgagtagttattgggtttccacattcctgatatattagaaaggaggtcagaaggttgaagaaccagaaaaaagtttactgcataatgtactaaccgtaagagaattacggtaagctggataaggttcctggcgctttccagtgacaaacgggtgctgcaaatgttaagaagctgtcagcactatgagcaacaataataacttagtattgtgcattgagagtaaagaacattttcacaattgtgaaatggagaagatatgttattcacaacacctgaagcaattcggttgcagagagtctcaagcttggttctctgaaaagataatttctcttattaatagaacaacagatatagatgctctcttgaaatagaatggtggacattgatctttacaggagctatctagataaagacaaaaacgaactggggaaaaaacttatgacttacttgtgt

SEQ ID NO: 3792 - DNA, 772 bp, Arabidopsis thaliana
ctctcccagcaagtatgatgtcacacagatatcacgaagaaacttgtctgaaaaactctctcccttctcatctctcagacccataaacacagttaagagatccgatctttttgtagtttcgccctcaagagacagttctttcttcctcgtcctgataacttcatcagcgaaatcatccacaccctttattgattccttaagcttcttctctgttcctatatcaagatacctcatgaacttccacacgcaagtaggcatgacgaatctcacaaccgcagcttcagtcgcatcctcaaagagtttcgcaaaaggaatcactggttgatctggaccgagacatcctggatcgactccaaaagcaatcatacatacgttatcaaacgttagcctcaacaagacgtcttgtagatcgataggagatgagctcttaaccgatgtctcaagaacaggtaagagcctcttgtgcacgagctcaaacaaagattgagtggttaattgtctgaatttggctgaatgaaactcaatgctcgctgttttcctctgcctctgccaagtttcatcatccgcgttgaatattccatctcctaggaggtctcggagattgtctcgaaagtaagaacctttagggaagacagaaaaccggttcttaaggagatgctcaacgtttcttgggtcacaagtgatagtgctgttgaggctgctaaaccagggacctctgaattggaaagttccgttctggagacatagaacatcggatagccactcgtatatg

SEQ ID NO: 3793 - DNA, 818 bp, Arabidopsis thaliana
  unsure (1)..(818): unsure at all n locations
cttatcggcaatcagatcttttccggcggtctttcccaattcctccgacgacttcgtcacgtccaaaatatcgtccaccacctgaaacaacaatccaatgcatctcgcgaatcttctcagcttctcaacttcttcatcagaaccaccaccaacgatggctcctaacaccgtagccgcctctaacaacacggcggttttatgaacgtggataaactcaagaacctctaagccgacgtcgttttggtccattcctccactggttagatccactacttgacccgccacgagcccttttgatccaatggctttcgctaactctccgattgctcgaacaactctagccggagaaacagccgttgacgttgctaagtgctcaaacgcgaacgatataagcgcgtctccggctaaaaccgcgacgtcttcaccgaaaactttgtggttcgttggttttccgcggcggagatcgtcgttatccatacatggaagatcgtcgtggatcaacgacattgtgtggatcatttccacggcgcacgcgccgagtaacgccacggattcttcgccgcccactaactcacacgctgcgatacagagcacgggtctcactcgtttgcctctgcggagaagcgagtaacgtatcgcttcatggatcttgattggttctcggagcgagacggcggagtcgagagcttcattgacggcattagcttttccgatcatgtatgacgtgaaatcgacatggttgtggatgatccttctgctctggcggtgccgataaacggtagagagcttngacggagaaggaaaggttggatttgatg

SEQ ID NO: 3794 - DNA, 1382 bp, Arabidopsis thaliana columbia
catttttaagataaatggagcaatggcccacgaatgcatgctttcatgagttttgtaagttttagtattccaaggtgattggattttattttatctttttggctgttaatgagttttctaattaaatcgagtaatcaataatttaatttcatttgtcataactatatacaaaaattatttttcgagtggagaacaagaaaccaaccagtaaccatattaccatatactccgctagaaatactttaatgcgacaggtgcctcgggttgccactattatctacagagaatcgcgatttaattcgtagcacatttatagttgtaacctaactttcccacagctaatttgtacaacaactaatcaattcaatgtgacaaatgaacagagcttctagggatttcacctagctcgccagacgcagccgtattcacaaacaatgccacaacaacaccggtggcaccagcaggaaagtctccggcaactccagctacgtccacggataagggaggatcagcttcagcaaaggatggtcacgcagtcgttgctctagccgtcgctttgatggccgtctcctttgtcttgaccttgcctagacatgtcacattagggatgtaatcttttcttatgaagttggttggtgcttttgtttttgtcccttttgtttcaaaacttatctttcaagtgtgtttctttgttcggacatttgttgtaatgagtcaacttcccactcaaatctgatatctctccgcaaatgagtaaatttatgctatttcattttccattattcatttgacatgctaatcataacaacttatttggtcgaaaactaaactttcaaatagtcaagaaggtgtagataccgacttttagaaccttgaattttatcttacaacctatgctccttaagtacgttatcaaatgtacaaaatccaaaaaaccataattaaacctcagccaatcccaagtcctaaaagagaagaggtctatttgggtctgtgttgcaaggccaaagcctctgcaaagtgcttggacatttcccttacaaaatcgtcgtggagagaatatgttggagcagaggttgcagaaagtgcgagcgattcaagaacagcacgttgtctggcttttctgtcttggatagctatctgtcgctcttcgtagaagttaaagtcgtcgaggatcgaagaacgcatctcacagctgatgaatatatctaacatctctatacctttttccagtcccacctgcagatataaacacacaaatactatttcatatcttaacatctctatgttcatagtaagatcttgaatatgtttcttcgaaaataaacaaattttactagaagcattttttgtttcaaagaagacatgatcacattagagag

SEQ ID NO: 3795 - DNA, 572 bp, Arabidopsis thaliana
catttctcctgcgtttctgcttgagctgtccatggcagacattcttgctcccatctcactacatgcattctccagaaccgcattgaacatcacctagtagaatttacgtaaacaaccaaaatgttatgtttctttctatgctgaaataccataaatcaagttacactttcttggttacttacacaagagaattggaactcggccagattctgcaatatttctcccttgtgtttccccaccttcaatctcatatgagtcaagctcgccaagttttcctccaatttcagactccatctcaataatctttcaatgcaaaacacacacatatacaatcaagtttatacttaaagcagaatgtgaaatattaagcacaaattgagacgttcaacagttatgacttacctcaggtgacaaaacagtggacacagttggcagaaatgtgacaactgaatggaacttgttgtagacaatgcgcaaagcttcaaattcaacgttcttcaggatgtcatcagctagaactgacacctgaagcagcaagtaaacataagcgaccgtatagcaacaataaatag

SEQ ID NO: 3796 - DNA, 1371 bp, Arabidopsis thaliana
cggtaatctttatcttggagccatatctcactttctttcccactgcctcttcctgcctgagaaaatatatctggaactccatcaaactcatgtgtatattcttgattaccaccatcatagtgtcgatctcctgctcgattttttgtcttgatgtgtcgatcaaaataataaatacaaaaagtagaaatttcttcattgatgtattgctcaacgatcgaaccttctacttttgccttattttcaccttttttttagatgtcccatgtattgttcaaaacaatacatccatctaaactgcacaggtcctccaagactagcttcgtgtggcaagtgaattagcaagtgctccatgacatcaaaaaaagaaggaggaaatattttctcgaggttacaaagaagcatacaaatatttttttgcaacatttcaacaccatctttgtgtatagttcttgcgcataggtcccgaaaaaataagctaacacctacacatataaaaaataactgttatatgaagaaatggtaaatattctcaaaacaatatgaacaaaaaagttaatgataatttaaaaatattctcatatctatatgtttttttatctctatgagctatataattatgatttttttaaaaaaaattaaatgcagaaaattacaatcatgctcaccttccaatttaaaaattaatagattcacataaataaaaatatcgctatcaacggtcttaattaaaaactaaaaaaaataacataaaaatgcagagagattaaaataaattaatcgaatgttgaaacttactagatagcgcatcgtgtacagatttatccataagctcagcaaaagctattggaaagagtctttgcattaaaacatgacaatcatgacttttcatccctgttaattttcttcctggtagatcaacacagttagctaaacttgatgaatatccatctgaaaatttaacatctttttcgagccatcatagaaatatctctttggcatcaggttttagtctaaactttgggattggtgccttgccctcaggtgttaagtgcaaatctttgcgattacagtgctcctgcaaatcaagtcgtgatttgatgttatctttcgtttttccctgcacattcagtaacgtcttgatgaaattatccaaaacgtttttttctatgtgcatcatatcaagattgtgtcgaagttttagatctttccaataagatagctcccaaagaatgctttgcttatgccaattatgcgttttaccgtatccttctaatcgtccatggttcccccgcaatcaactgtttttggtaaacaacaaacttcattataaagctcctcgcctgttagtatctccggtggactatcttccac

SEQ ID NO: 3797 - DNA, 690 bp, Arabidopsis thaliana columbia
atttcttacagagaaggctagccttgacgccagagcaaataaatgaatggtgtcatgtagatatgcatgctaataaggctgtttttgatagtttaaggaagaatccgaaagcacattatgatggaagaaggttctcttataaggtaacctaaacgtttcattcaaggtggatttgttcctcattttctctttgaaaaaaggttcatgtggttacaattttgctttgccgtcacaggctacgcacgatgttaatgataagaaccagcttctttcattggtgagaaaataccttgatgggattgcggtggttgatctcaaagacgcttaccctaatgtaatggaggatttgaaggtatgcattgttataattggcaagacacaaagatgacagaaatgtatcccgtagattcttggtagcaattctgatatgaatggtggcatgagaaatgaaagttctctaagcattggtttttggttggacaatcaattagacagcttatttctaggtggagtatgactgaaaaccataccgggatcctgtcttatattgtgttttctgcggcgtcaaaagttgtaggaactgctgtattttgctaagcagatggggaaaatatatgttactctttgaaaccaaaccaggaaggtattgaaagtttcaagactgtcttgtattttgcaggctctgagtgc

SEQ ID NO: 3798 - DNA, 497 bp, Arabidopsis thaliana
acagtgtgtagatgatgtcatcagaacatatccaaaactacggctaacacatggccggaaggtaaaaacgtctgaaatctttcttacgtatttcaacaaaaagaagttcaaagttttgattttgttctcttggtttgtatgttttgcttaaaaggttttagagatccgtcctgtgattgactgggacaaagggaaagctgtgacatttctacttgaatcactcggtagttaacaaaatccttctcatctatctgcttctgttctgaatcttggtttggtttggccattgactttaatacatttctcaggcctaaacaactgtgaggatgttcttccaatctatgttggggatgatcgaacagacgaagatgcatttaaggtttgttcttataaacacattgagctaaaacatttcattaagaaatagttttgacttaaagtgcaagtaatgtcaggtactacgagatggaccaaaccacggttatggtatattagtc

SEQ ID NO: 3799 - DNA, 955 bp, Arabidopsis thaliana
ccgtttctttacatgcatgttataaaaattatgtacatttttaaatattcattaataaacatcttaaaatgtggttacacttaaaaataagggaacacactactttagcatgtatacataaacccaacacacacaaacaaaacaaatatataatcacttatttctattagcaataaaagtagtaagagctactaaaggagcaaccttttcagaactaaacccttgaagatgttgccgtgcatctttcgtcaatctcttaacaaattctttcgatttctccaaccctatcaactttggatacgttagctttccggcgagctgatctttcccggcggtttttcccaattcctccgacgacttcgtctcgtccaaaatatcatccaccacctgaaacaacaatccaatgcaccttgcaaactttctcacactttcaatctcttcatcagatccaccaccaattatggcgccaagaaccgcggcagtttccaacaaaaccgcggttttatgaacatggataaactccaaatgctctaatccgacctcgtttaagtccaaaccttcactgcttatatccatcgcttgtcccgcgactaaacctcttgtcccaatagacctagccaattctctcaccgcccaaaccattctctccgaggatatttcagcggtggtcatgtgctcaaaggcaagagacaagagagccccaccagagagaatggcaactccttcgccgtagactttgtgcgtcgtgggctttccacgacgcaaatcgtcgttgtccatacaaggcaaatcgtctttgattagagacatcgtgtggatcatctcaaccgcacaagcggcgggcattgccgcattttcttggccacctactagctcgcaagaagcaaggcagagtattggcctaacacgttttccagccgcaagaatcgcgtatcgcatggcttcatgaatcttg

SEQ ID NO: 3800 - DNA, 557 bp, Arabidopsis thaliana
tcaagtgtgaaatttcaactggtttgctcttgatgcagtcatataacgcaaagatatcagattttggattggcgaaattaggaccttccgctagtcaatctcacatcacaacacgggttatgggtacacacggttacgcagctccagagtatgttgctacaggtactacaatgttttgtattcttagttcttttggtttccaacaacaaactgtgaacatgtttgttggttccaacaggtcacttgtatgtaaagagcgatgtttacgggtttggcgttgttttggctgagatcttaactggtttacatgcgcttgatcctactcgtcctaccgggcaacacaatctaaccgaatggatcaaacctcatctatccgaaagaagaaagctaagaagcataatggaccctcgtctagaaggaaaataccctttcaaatctgctttccgagtagctcaactggctctgaaatgccttggacccgaacccaaaaaccgtccatcgatgaaagaagtggtggaacgctcgaactcatcgaagctgccaatgagaaaccgtta

SEQ ID NO: 3801 - DNA, 403 bp, Arabidopsis thaliana columbia
tctcatactagtagtactatctgctttccactctcacttttgtctgatatccctccatctagcagacgttgtaaatgcagctgattttgtcaacagtgaatattcacggggcactctggctttcacggcatatgcatctatacctaagagttataggttcatgcacccggctcagatgatgttagaagagttttgcatcgcttatgcttcagacattattgttaccagtgtatctgcttccacggaatatgatgatgatgatgatgataacttgtcacggtgtagtagatctactcagccattagtacccaacattgtactaaagaaagcaaaacttatctttctgcaagaagaggttagtgcagctatattcttacgcagtcatgttttaatctacagattc

SEQ ID NO: 3802 - DNA, 764 bp, Arabidopsis thaliana
ggtttagaatattctcataatatgagagatatgtttagtttccattatcattatcttttccaattctttagttctatctctctctatataagcatgttaaaccttgattcatgattcaataagaaatccatagcaaatcattactttagcaacctataattgttaatcattttacctcacaaagacacaaaccactgttactactattcggccatttgcactgacaaacttttaaaatataatttctatatatagcatgcataattgctgtctgcaaaatctgatctataatgcgtaaggagccaaaggaaaaaatgccatttggctatttgccactgataaactttaaaaatataatttccatatatagcatgcatagcatgttgtctgcaaaatctgatctataattcgtatggagccaaaggaagagatatagccataaatattagtcattttttgggtttgttaatcatttacctcacgatgtgtccatcgaccttgaagcccggaccatccggctgcaaaaggacggcgttatgaagcgtcggtccaaagggtgggttaagcttcgagatacggtactccgttccgttagctatgggcatagtaaccactgacctgtccttaaactccgataccttcatctcatcaagattaacgattatcgtcattccttcaataggtctaagatacatattaacggtgccgtcaagataaaacggcatcaatctaataactcgtccgcctcggccttagtctcaccg

SEQ ID NO: 3803 - DNA, 449 bp, Arabidopsis thaliana
cccatcgatggatgaaaatgttatgtctttgtctaagatcttggcggctacgagaactgggaagaatcgtcgtactaagtttaaggcccactattgtttgggcccaaggcgatttagaactagttagaccctttgtttttttttttttttttttaaaatagacaaatgtcattaaagatttttagattttaggagcctaaggtaatgtggtgttgaagtgggccacaaaaaatgtagatgggtcaaggctgtaaaatattaagttcctagacaacatgatttatggaaatgttattttagaacgtattcataccatttggaaatgttaattttaaatgggattaggttaaaaatcaaaaatgtatggctaattaacatttgtttttaaattaatttggcccaaaaactaggctaaaaattattttcaaaaaacctggcccccattttag

SEQ ID NO: 3804 - DNA, 628 bp, Arabidopsis thaliana columbia
tgcactcttgaggagtgactcattgagacgtcttatagcttcgtcctctgactcaaacgccccatctacggtccatttcctccccgaggggacgataataatcgatgtggcttgttccaaagcgaccttgcaaatttcatcgtgcattaagttctcgtgcgtgatggcagtgaacatggtcatggtcactgactccaactggctgaaggcaaggttggcggtatggatgtaggagttagttactacacgatttatttgcttgttgtgtgagattaggacgggaacggttttgccaacaagcttaacgagatggaggactgtgaccacaatggtggagggcaaaaattggagaaatgaaatggccgcagagatgttctcaggtctatgtatacaagtcaagatccggagatctgaatctggttttagattcatgatgttctttttttggtaccaacgtacttccgcttcgggtcatatagtccggccaaggctgtggggataatccagagtttattagagcacaagtgatcaagaatgtatatgttgcttgcgatatatactgcaaaaacaaacaaaccatataaatatgtgaagatcatgacgagatggattatggattggtagggag

SEQ ID NO: 3805 - DNA, 1222 bp, Arabidopsis thaliana
tacccataattctatatatacctataaaactgcaaagaatcagtttttctaaatgatggaaaatcctgaagaaattaaggatgattatcaagatgatactgcctcttagatcttaccgaagaacccttggatgatacacgctcatagatcttaccaaagaacatagaatatagaatttcatttgtatagtttttttttttggtagggtggggggacaatgtcccgcatattattaaaaattaaaaaagaataaaacttaaacacgaacattacgtggcgtgcatacccattcgcatcctcaaaaacaatggaggtgaccacatccggtctagcctcaaacaaatgaaaacctaaaggaagagaaaacacatagtttgctaacccgtctgctaggcggttagtgtaacatcccaccctgtggacccgctcaagggaccggttgttacagttagcctctctatacacatgaaaaacgcagactagccagccacgcgacataaaaccatagcacaaacgtactaggaaggagagagggtgtgaatctttaatcccgatctaagaaaacccactacaatctccgagtcaacttctaactccaatcttgtaatccgcatctcccaagctatgtatagtttgtaatatacaccccataactccgccaatggagccgaacatatacctatgtttaaagcaaaatcgccacgccaattcccatgctcgtctcgcagaacaccactcgctgttgcaagacccgggttcccaggggaagcaccatccttcccttggagacacccatttaatcaaacgatcctctctaactacctgcatgttttgtaaagacatactcgtctgcgcaatgatcacctctttagcataatccttaaggaaacgaactctatctctgcacttagcattcgtcccaaagatatttccgcattgccatttccatcccaaccaaagcaaagaacgtcgaccaggggctcccatcagcaaccgctccatcgcccaagttactgaagacccactcaagtaaggactgagaaaaaaaagcttgtcttttcctcatgtgaaccgtccgactccatattcctcgcatagcaggacaatccctcaagatatgaataattgtttcttccccttgcttgcagactgagtacaaatctgtatcactcaagtgtctcctcttcctctccacatttgtcatcaccacttggataactgg

SEQ ID NO: 3806 - DNA, 560 bp, Arabidopsis thaliana columbia
ctcgactctatggcggagaggtagtggatgaagatcctcgcactctctgagaatgcgagcaaagcttccttgtgaatactgacgtcataatccggcgaacactccgacagcttcttcttcaccacccggcgcacaatagctagcggcagctcgtccaccaccactttctccgactccattcttctctcctctctctcagtcgccgtctttcccgcctttatgttaataatacaacaaaacacatcggcccagtaagctgatcagcctattaaaatatttaaaagcccatattcaagtttataagcactaaagagttatgaccacgccgctcaatattacccgttggattgattgacaaaatcctagccgtcaaatcgtactagcaaatcggcccattattcaaattgataagcactaaagagttatgagcacgttgtcaatctcaccgttggataacctttattaaatcttcaccgtccaatcgtaatactaataaattcgatcaaaacacgaataagaatcggagtcgtcttcaacctctggaatttgagacatcttcg

SEQ ID NO: 3807 - DNA, 999 bp, Arabidopsis thaliana
tattttaatgttaaaaatatctaattaatcacaaaactaatctgtaataaaaatagatttaaagatttgtcaactacaaaattttctttttgaaagttaaaattttcaaagtcattcttttgtaacatcttttccattcgtaatatttgcctatacgtacgaattatttacaaattaactaaatccaattttgaatatacgtatattttaacgggtaatattgagcggcgtggtcataactctttagtgcttataaacttgaatatgagcttatagatagttccgattcgtgacccgaatagtttcaggattcggagcccaggtgttgtttctgtcttcggttcattgggaaggatgagtacattgttaccatttcctgacctcaacctcatgccggattctcaatcctccaccgccggaaccacagccggcgacactgtagtcaccggaaagttagaagtgaaatcggaaccaattgaggaatggcaaactccaccatcgtctacctccgatcaatcagccaataccgatctcatcgccgagtttattcgtatctcagagctcttccgctcggcattcaagccactgcaggtcaaaggattagacggagttccgtatacggattggattctggtgccatcgttgctgtaccggagaaagaaaaccgggaattgattgaaccgcctccaggatttaaggataatcgagtctccaccgtcgttgtctcgccgaaattcgagagaccgagagagctagcgagaattgcaattctaggtcatgaacaacggaaggaactccgacaagtcatgaaacgaactaggatgacttatgagtctcttcggattcatctaatggcggagagtatgaagaatcatgtacttggtcaagggcgtagacggaggagcgatatggcggctgcgtatataatgagggatcggggactgtggttgaactatgataacacatagttggccagtcacaggggtgaagtaggggata

SEQ ID NO: 3808 - DNA, 501 bp, Arabidopsis thaliana
tcggttatgactcagaggacacgatgtctactggaactccgggagtaagaactcctactaataagttcacaaacggaaacactcctgaactcagaatcagagagctcaacggaagtttgaatgcggttaatcatcttgcaagagagtttgaccaaaggagactcaatttcgatgaagatgcaagagctattgtggaggtgaagctcggacctcaggcaactccaaacgggcagcaacagcaacatccagaagatgaatttaggagactgaagctaagatttgagacatggaagaaagattacaaagctagattaagagatactaaagcaagactccatagagtagatggtgataaaggtcgtcaccggaaatggtggggaaaaagaggctaggggtcttattacttattagtgtgtgtggaatcttcatccacttagctttgtattagtatcacgatcccaaaatgttagattaagagcattgtagatttagctgtgagag

SEQ ID NO: 3809 - DNA, 725 bp, Arabidopsis thaliana
  unsure (1)..(725): unsure at all n locations
ctctctttcttctttgtcatcccattgaactatttaattgatgggtatatgcagacctttaaacataccaactatcacagcttatatgtatccactttgttcttgtttcccagaggcttttcaaacgtcatattggtgaagagattggagcggatttaaatcaaggttatgatacttttattgagaaaaaaggtcatgcattagtggcactagtgaactattagcatgtgtaaaatgaagaattgtgatatattcagctgattagtcgttcttttgaggcagatctgggctctgagggctttggtgaccttcttggcagtattagagcaaaaaacatttcgctggacaacattcattttgtggtatgaagtgcggatgtatatatgtccatttcactgtcaatttattactttgaaagaggttatcttaatggtgtcttttatttttgcttttttggacagacttttcgtaataatctaaacaaggtaagtgagatccccaacagttatttgatctctatgatatcaaatgaatcactctgtgcacattgtttcattctttcagatattgggcgctgcttacaatcggcatgaacagtgggaaatgggcgtcataagagaaatggaaccatatatctagatgtgcataaactgcctgaaaggcngcagagtgacttagattgccgcagtaatcttcgctttaattgtatttgcggattggagtga

SEQ ID NO: 3810 - DNA, 639 bp, Arabidopsis thaliana
tggataagctttcacaccgcatggtagattgtcagagaatatataagagtcagaaaaaaatgaatttcaaaactttctctatttacttctgatgatgtaagaacctaaaactttaacagtttatttcttatacaggctgccaaaatttacatatcttcaaatgtaaacaagagtagtagctgctgatgcagtaaaaaatgtatcattacttcaacaataagcttgatatgctaaaagacgtaagcttatacacaaaaggaaaacaaattgctcctaaaggccggaagaaaattgtgcgtattcaaaacatggttataaaactgattaacaggtaaaaacatgacataaagtgaagttttgaactgtaagaataaaacagagacaaaatggaatccttcagagaattaataaacaaggagccataccttgacagtatccttcacagatcctcgtcctctgataaacaccctgcagtgggttgctagctcaactctttttagggagtttccacgtggcccaagaatcctcccaacaaaattatactgcaacgctcaatggatttaaactctagaacaatccaattataataacctatttgggtaaagatttaagacatacgcttggatatttatccactgg

SEQ ID NO: 3811 - DNA, 488 bp, Arabidopsis thaliana columbia
taactatgagcaacgctgctatgtgctgtgtactcatacgcctcaaccaatgcctgtccattgcttttcactacctcagtctttactatttgaagataatgctcaatctgtccatggaaaacaacaccttaaatcatgctataaagcatatcaggtgatccagataaaaatttctgagttatacaaacttacggtaacgtttgggccgagatctcgttggtttatgaaggaccggccgtctaaacggtcgtggcttaggccgagataaggtgacaagcgcttaaactccgaaaatttctgaggcataatcctccgcccaaaggatagatggttaacaacatgtgacatattcatctgagaagaatcaaaggaatgagatcccgagcgagctgaaaccattaaattgcctggaacctgcaaagaccataaagtattaactattaaagtgtttaaggggtggctaaaaggaagcaaagcagtagtagttt

SEQ ID NO: 3812 - DNA, 481 bp, Arabidopsis thaliana
gaagcttcatctaatattctccccaagttacctttgtttgtctccatgcatacaaatagactgatacatacatacctatttatttatggtttattttaatccacgttaaaaattatttcagctgtattatattatttatatagtatacgtacgttaattctttgttataatacgtgtaatgttgttaaatggtattgtatttctaacccaactcatgacagtctcaaaattcgaatctaaagattgcgcaaggatcagatatctattacgatatcaatatcaagtagatgacatgctcacatagcatgatacaccttatttgattggtgggtattaatcttttaactatgagacgtaatagaagagccatgagtggatgtgagttagtttaacttacctccattgtgccaaaggaggacaggtcttttgcttggattctgagtggcttcaaagaaccaatagaacaatgctcttccatgtg

SEQ ID NO: 3813 - DNA, 781 bp, Arabidopsis thaliana
caaatcataccctactctctatgtaattagaggttatacgtacctgcaagtgatatgcatgcatccttccgatagttcgattacgtttttgcaattttcacattgacgccacattttctgatttgctagagctttcagctttatatcatctgctgtaggatttggacccaagctcttgtaatcgttgcacgacaagttgctatgccacggaagtttgcagttgatacaaaagggttcaccgcattttacacaacttctcatagttacatcttctcttgttgagtttgagagcttggttaccgacattaaactcgagcacctagggttggggcaatatactctctcctccacaggaatagattcctcttcgatccttagttcccacattgcttttagtttagatgtcaaaagattggcgcagtttgcaagagtaagtttagactcgcattgataatgaagacatctcggtacacctcccgcgagtagcctcacttctatatgtcgttttacgcactcaacacagaattcatgaccgcataaagcaacagaaaacatcagctcaggttcgaaattatcatcggaacatatactgcaagtcttgtcatgatcaggtatatgtatgctgatttcagaaactattgtttccattgcaagttcatacacaaatttagtttgattcctagtcaccagaacaggaaagctagtcgtccatcgatgtctgctgtgttggacgttaaccattagtaaggcgatgttccattccgaagaagcagaattcatc

SEQ ID NO: 3814 - DNA, 629 bp, Arabidopsis thaliana
cagagacctttttacactcaaacattactagagtggatttatggaaacgtgggaagtcaggtggttagagaggggataccgtgggggacagtgttcagtatggcaatgtgatgggcgtgaaagtggagatgcgggaacgtttttggtgagaataggaagtgccgtgatcgtacccagtttgtgaaagagatatcaaaagatgtgtatcaagcacattgtcttgcgaatggaggtcagattaagagggttagagtggagcgtcagattgcttggtcaagaccggatgaaggatggttcaaacttaacacggatggagcctcaagaggtaacccgggtttagccacggctggtggggtcattagagatgcggtggggaactgggtccaaggttttgcttttaatataggggtatgtacggctcctttagcagaactttgggggttctactatgggctttattatgcatgggagaacaagattactcggttaaagttggaagttgattcgaagatggttgcggggtttcttaagacggggatatgcgatactcagtcccttgtcgtcctagcacgcttgtcctatgggtttttacaaaggattggttggtcaattgctcatgtgtataggga

SEQ ID NO: 3815 - DNA, 689 bp, Arabidopsis thaliana
tatataccttatttgttttcatgataccgacatcgtaaaccggggtgaagtccggtttaaacaaaccgaagttttgctctgaaaccgaagatttgagattctcgttgaagagagaaaaaacataagtttcgaaaacccggtttggcatcaatggagtgcccttaccagaattcacatgctttataaggttcccattgtaagctgcggcataatctaaaccgacgccggtttggttcggttcaccagctgaaggccaaccggtctcagccacaacaatgtccacgtcaccgtacccaaatcgtttcattgcggagtaaacagcatcaagctgagcgtcgaacatgttggtgtagttcaacttcgtaaccgggtcaacatatacaacgtcgtttgtgttaaagagtgcgtagtttaacgtttcaggtccgaaaccgaaatatggatacgggttaaccataaaaggagacttggtgcggttgtggaagtctaggattggagagaagatggctttgtcgtaccctttacggaactttccggagctaggtggctcggaggagcctgagaggataccgagcgagtgaggcgtcgagactaagatcctactgacgttagcaaggtgtaatgctaacgtaagcgtctccatagcgggaaggagatgagtgatgagggttttgtcggatgtggcgacg

SEQ ID NO: 3816 - DNA, 515 bp, Arabidopsis thaliana columbia
gagttatatgtgcccgtgtgatatcaacagctgtatcaatctctctctttgaacacacacaaagttctctctctttttcttggttcaccatgtcgtcggagaaacgtgtaggcatggtcgagaaaagtaacaacaagagacaaagagtgaaccaagttcccgtgttcagcatcaacgaccaccacgacgttcttgttgaaatcctccggcgactagacggttcatctctctgttcagctgcatgtgtgtgccgtctttggtcagccgtggctcgaaacgactctatatgggaagagctctgtttccgacaagtgtcaccacgaccatctttgtctcttcgttccgttgtgtcggctcttggtggctaccgatgtctctacttcctctgtatccgtcccgtcctggcacgactccctaagcttctttggacacgagaccagcttcagctctctctgtcactttactgtgtccattactacgagcgcctctacgtcggcgcgtggcttggagacgcg

SEQ ID NO: 3817 - DNA, 595 bp, Arabidopsis thaliana
ggataaagcaaaagagaaaggagagatgaatattaaaacgctaattcatgatgtagaatgtagatgatggcaatgttctcaccaagattgtctgccttaaagtcggaaaaaggtagattcgacgtaaacccatattttgataaaggtttataagaccaatatgccatagatttaaaaatgattcgggatatataaaaatgcagagaatatgtgtaatctatttgctgagattttcaagataaattgctccggattgtagttcatttgatagaaaatgaggacaatggtttctagacaagaacgtacactattagaacttacacaaagcaataaaaagaagaagaagcaaacttagtttcaccaaaccataaatatagacaaaatacaacaaacatatttcataatgttttctccagctaagtaggagacacaatggaaaagcacactaagaccacggggtttcctacattattgcaaaccgaacaacgctcatcacacgacatagttcaatcaatgtttagaaggatcaagaacttgaccaatgaacaaaattactccactattgtcttctctcacagtgaacagaaatggatgg

SEQ ID NO: 3818 - DNA, 1009 bp, Arabidopsis thaliana
ctaataatgttttattttccattgtttgccacaggggtctcaagtcactgacagatagagaagtctgttgcttcatgatatcttgcaagaactctaccaacatcgatcaagtcattgattggcttgtaaagcactccaaatcatcgaattaaactttaccccaaaaggagagaagtcaactctctgcagttgtcgatctttcttgtgtttttggtcatttgatgatgatgatggtgattgtggaagaagacacagcttttttcttttatcctgtgaaaaacaagatttgtctatgttctctgtctgattctttatctgtctttcttctgcgtatgtggctgtgttctctgtatattagatttgattggtgttccctcttcttaaagccatgatgagatcacttccttcggggtcagctttttcaattttacgagttcattgcatgttttgaaagaacaacaaaatatgttgcgtttttcgtaattttgaaaaacttgaggccaaaaacggatattttcgaaaaaagcaacaagataaaataaaagatttttccttttactctcacttgcactatcctcctcttcgcaacaatggatgcttcggtggtgagattttcccaatcgccggcaagagtgccaccggaatttgaaccagatatggagaagattaaacggaggctgctcaagtacggtgttgatccaacccccaaaatcctgaacaatctccgaaagaaagaaattcaaaaacacaaccgtagaaccaagcgcgaaaccgagtccgaggcggaggtgtatacggaggcgcagaaacaatcaatggaggaagaagctcgttttcaaacccttagacgggaatacaagcaattcacgaggtcaatttctggaaaaaggggcggcgatgttggtttgatggttgggaatcatgggaaggaatcgagagagtgaagctgaaggagctcgttagtggcgttcggagagaagaggctagtgctggtgaattgaagaaagag

SEQ ID NO: 3819 - DNA, 657 bp, Arabidopsis thaliana
ctccagatatatatattttttttattgaattttgagactggaattggtattgattactaccttatctcttctgaaaagattggacaagttgcagatgttttgaaaacccaaggagctcaacttatactcccggtggcactccttcatgctgcagcctttgctattggctattggatttcaaagttttctttcggcgagtccacttcgcgtaccatttctatagaatgtggaatgcaagtaagttactttctcctataccgtagatatacattgccgtttgctttactaaggcttctttttgaaaatctgtgtactttgcaaaccgcagagttcagcgctcgggttcttgcttgcacaaaagcatttcacaaaccctctagttgctgttccttctgcagtcagtgttgtctgtatggcggtaagttttcatagccatttcactaaagttcacatgcaaattccttaagtttaattatgttcaatggcattctgcagcttggcgggacggcctggccgtgttctggagaaacctaccgattccggcagatgacaaggatgacttcaaagagtaaatgaagtaggaaaggcggtttgcatcttctccaaacgatgtgattgtattgttgtaatgttagtaacattacaaaatttgtgttg

SEQ ID NO: 3820 - DNA, 583 bp, Arabidopsis thaliana
gttctcaacatctttcttgtctagcttggaacgcactgtaattggtctatatgttggattcaaaatttggttatatgtaatgttcaaagttttcccaatgtgagtatttagaaaaatagtagagagatggctacttgcaaataaagcgataatcaatggtagtaagctcgagaacctggatatttgtcgcctttggctaacagattcgttgatgtcttttagcccatggagtctttttctcgatcaattttagtatttagtttctatatccttactccagacctttgcaacaggtgcttcgcctcacatgaccggaatttatgacctggtatcggtgttgacccacaaaggcagaagcgcagactctgggcattatgttgcatgggtcaagcaagagagtggtcagttccattaaaaacccaaccaaacgacttattgtagctctaaaaccccacacatttgtctcatttaaaccttgggaactcatgttttacaggtaagtgggttcaatacgacgatgccaacactagtcttcatcggggagaagatatcatatactctctggaggaggtgattggcatat

SEQ ID NO: 3821 - DNA, 859 bp, Arabidopsis thaliana columbia
aatatatttgagagcatcagtattcgtcccctgtctatcagggtgattggaacaatttgtggagtacggttgctaggattgggaaaccatagctggctgttcagatctatggagaaacagtgatagagatgttgcaaagaagagggccctgtttgaacttctcaagttattagaaagtagtggtttgcagaaacacaagtttgaaaatatagaggtaatatacttttgcttgtcgatactactgtgtatgtttcttctagtcatgctctgtttattaatcatatatattctctgatcatcttcttatgtagatgtcaaatcactttaaagggttgctttatcagccagcatacgatccaaagcatctgttactgctaacacataccaaaagtaacatacatccttccatgggtgtagaagatcaaaacaaggaaaattcactagttgagtggagagtggcaaatgagttttactttaagagcttggcttcagtgcaactcatgttaaatattgaccgaaaacactccgatgtaacagctgagcaggtagactttgaagcttgtaatttatatctgggcttcaccgagtctcaattttaaaccagttgtttctgcaaaccatcctatgttaacaggttaaacgggcaatctcatttctcaatcatcttgtggaaatacaacggcaacaaaggaaatctgcgtatgcctttgccgaacttttcaaccgctttcgccaatgtgttttatctctagcgagattactgggtgattcagttggtgcggatagaaaggatgattctgtgttcagtttccccaaaatcaacatgctgtcttcaattgcttgtggctacagaaggtat

SEQ ID NO: 3822 - DNA, 1822 bp, Arabidopsis thaliana
atgtcatcactagattctacttttcccgctgcattattcaattgataagctattcctcgtgaccagtgtttcatatggtttagacacatgggtttagtcattggtcacgtgcattaggacccaccacttcaatatatagaaagctaggatccaaatatgttgtagatgatgacaaatagttacagctcttatcctctgttattggtattcacattgcagcacatttattgatgtttcaactaactcccatttttgctctaaaaaaaggatagtgctttttgtgtaaagatttaaggatcaatgtatctgcattcacacattcattattcttttctctataaaaccctggacccttattctgctactctcatttgtagttgttaaactaaaataacccatttgtgttttaaatctaaaatggctagaaatttcgagctttctttgattctctttgttctgtatctgtccactgcagcaatagtcatggctagaaaccttgaagaggaatcaagtggtgatacagagttcattaaagcctcttgtgagacgacgtcgtacccagaccgatgcttccagtctctgtcttcatatgcaagcgagatcaagaagcagccacgtaagcttgctgagaccgcgcttgccgttagcatagcccgagcaaagtcagccaaaacctatgtatcagagatgactgattataaaggaatcacaaagaggcagcacgaggctgtagcggactgtctagaggagatgggagacactgttgacaggttgagcaattcgctgaaggaactgaagcatctggaggaaggtgacagcggagaagacttttggttctgtctgagcaatgtccggacgtggacaagcgcagcactgacagatgagaccgcgtgtatggatgggtttggagggaaggccatggctggggagctgaaaagtttaatcagaacacacattgtgagtgttgcggaagagacgagcaatgccttggctttgatcaatgactttgcttccaagcattgaaatcatttcaaaggggtttagtctttgggacaagagtttttctcgtattcaacactgcttgtgtttttttttctctctttaaagtttctactttatcttaacttatcatttttcatattatgcataaattaatctgtattaaaattaaaatacttcataattcatttcacaattttctcgagggaattaccgtaagctgaagtaaaatggtacatgaaatgaaaccctcaattgggatcttctaatttagattaaagttttaagctatgtcttaatacgaatctgttgtatcatcatccctaaagtttttcttcgtgtacagattattatttaattattttgaatcttgcataaggagccaacttccataaacttgcaatacaaacacactccccatcttctcctctgccatgacttgaacccatgtggtggagcttagccctctaaccaaatgagctacaagatcaggcatataaacatactttgcaaaaataatttgttttgaggcacctcagtttctcttgccctgttgttgtatcatctacggtctacatatatagttgatttgaagctattgatgctgatttttcccaataatttaaaatatattacttaccaaacaaaaatttttaatctcaaaaacggtaagagcacctcacaaatggaggttctattgtgcatatcaaaaagaatattgatataaaaaatgatggatccaaacgtacccatgcacatgcaaagagatcatcaaagtgaaattaatggatattatttcaataacttaaataatgagtaagaa

SEQ ID NO: 3823 - DNA, 575 bp, Arabidopsis thaliana
tctatataaacctgtcgtgctaatcatagtcataactagtaacaacgaaatcgactgtatcatccgatttgcagagattgagaggtaaagcagcgaattgagtagtggcaccaccttgtaagaacaaaacggaatattcctgaggaatctcgagaagctgacgaagatccgattcagctttttgtataatcgagagaaactctttgcctctgtgactcatctccatcacactcatgccagatccacgccagttgtatagatccgcctgagcttttaggagaacgttctcaggcaaagtggctggacccgccgcgaagttgaagacacgttcttgggatccgacggagccggatctaactccatcttgaacttgagtcgttgaagcgacgcatctaacagcgacgggcttggttttgctgacgaagttgacggtgtttggtttgctgaggtgaagaaaggattgagatgatgatttgggtttcaaagcaggaatctgagtgttgttgcttccgacaaggaaagagttcgtcgtagccgcatgattgttgtgagatctccgagtttatttttgtttg

SEQ ID NO: 3824 - DNA, 987 bp, Arabidopsis thaliana columbia
atatcaacaatgtgaacctgaaactagattctttagcttaggcaaacatcaacaatgtgaaacagaaacttgattcttcagctcaagtaaatgtgaactaaaactagatgctttagcttaggcaaacatcaacaatgtgaaactgaaacttgattcttcagctcaagtaaacatcaacaatgtgaaactaaaacatgattcttaagctccaagtaaacatcaagtcatcaacaatgtgagctgaaacttgatgcttcaggtcaagtaaacatcaaacacatttggctctaaaagtaaatcaattaaccaaaaatcaaagagacaataataccttggtttcgcaggcggtgacatcatagcgaaaaagacctctttggaaacgatcttcccactagaaaacataaggcatttgatacattactcaaacaattaacgaattggttaacgaagtgagaactttttaacatgtatccaaaaccactacctctccaataactaaggattcgaggaacgtcaccggagattctgtgttctcaccgacggatttatcaagattcttgcaggtatataaaggaagtcttgcccctgaaaacacaaacaaaatgtcagcaaaattcaaattcaaacaaaaagaagaactttgccagctctataaaatgtaccattgatgcaacacttgctcagacaattccgaccacatccaccttcttcaactgtctcatctttttgataattcgatacaactgttggaactcttttgatcttcaacaacattgctcacaaatattataatctcgaaataacagattaatacaggactctaagaactaaaaacctaattagaaaaagggttagggttagtggctatttgtggaccgcctccggcgaggaagaggagatcggagggacatgcgccttcagacggcagagctccacgtcctccgtgagcaaaggattagttatgattaacaaccctttcgttggaca

SEQ ID NO: 3825 - DNA, 931 bp, Arabidopsis thaliana
tttgatatttctaggtaactgatgttcaccttgtcctggacccatggactagagaatctcgcggatttggttttatctctatgaaaagtgttggtgatgctaaccgttgcatcagatctctagatcactctgttctgcagggccgcgtcatcactgttgagaaggtaaaaagactaatcactagtgattccttctatagaaccataaagaatatgatctggccgaagctgatattgatatatgcaattactaggcactttgatattgattttttcttctcttttaaaatatttaagttgtttgcttgtttccactttcaagtttctgtggcagcaggtctgctgtttgtagcagcagtgcttcaccaaatagcaaacgttgcaacagttcaaacacatcaagtttcagacatttagggttgtatgccctgcatttctctctttcttgaacaatttaatattccgtcctttagtagcttcaatataggaatgttgtttttgtcgtgtttcctgtttcattgatgaatgtctgacagatctgtgatatctctggttttctgttcaggcaagacgtcgtagaggacgtactccaactccaggaaagtacttggggctgagaactgctcgaggtatgacatcaattgtattggttttgtcacaattccgtagtcggtgtttcctgattttaccttaacatggttttgtttcttccctttgcaggacgacataagtctcctagctactctccccgcaggtctgttagctgctctcgtagtcgtagtcgaagctactcatctgatcggggcagatcttattctccaagctatgggagaagaggaaggtcatcctcgtactcacccttctatcgacgacgcagattctactctccttcgagatctccttcacctgatgatcgttacaacaggagacgc

SEQ ID NO: 3826 - DNA, 516 bp, Arabidopsis thaliana
ggtcgactcgatcccgattccgtgtgacggctccagatttaccagaccaaatcactttagggttacaatatttcttagcttccttaaaagctttatctccccaagatccagtaacaatgtaatcaacggaatcatcagatttacagagattgagaggtaaagcagcgaattgagtagtggcaccaccttgtaagaacaaaacggaatattccgatggaatctcgagaagctgacggagatcagattcagctttttgaatgattgagagaaactctttaccgcgatgactcatctccataacactcataccagatccacgccagttatagagatctgattgagctttgaggaggacgttttccggtaatgcggctggacctgcggcgaaattgatgactcgctgctcggatccgacggtggttgaagcggaacgcatcggattgaaacggatttggttcgggtggtgaggttgatggtgttgggtttagtgaagtggataaaggattgggatattga

SEQ ID NO: 3827 - DNA, 481 bp, Arabidopsis thaliana columbia
agttagggcaccaccatcggcaaaaactaaccatttgagtatactacagagaccggttatctctggttatttgttaacctgattttggttcaatgttctcattaatttcaattttaagttctatcagctttttggactctctcatgtccaccatccgttcacttggccgcgttcatataaaccaaaaaccgaacaacaacaaaaattcgaaaattctccggcgacaccaacaatgggaaggtctctaatattctctggaaacatgtcattgagaatctctcacttacccagatcatctcttccgctgcaaaacccaatttcaggccggacagtgaacagaactttccgatatcggtgtacgaggattttgtctaatagcttcaagtccacaacgagacttcaaaccaaagctgttctgtctgaggtttctgatcagacgcgatatcccagaatcggcgctaaaaccaccggaactatatct

SEQ ID NO: 3828 - DNA, 904 bp, Arabidopsis thaliana
caactttgtccgagaaaacaaacttgagaactttgtccacttcgtcaacaaaactctaaccgtagcaccatatatagcagccatagacgttcttgtccaaaactcccaagccagaggagaatgctttggagaataacaatcgaagccatggcctttaagctacctgtacttggtactgcagccggaggaacaatggagattgtagtgaatggaacgactggtctgttacatagtgcagggaaagaaggagtgatacctctcgccaagaacatagtgaagttggcgacgcaagttgagttacggctgagaatgggaaaaaatgggtatgagagagtaaaagagatgtttttggaacatcatatgtcacatcgaatagcttcggtactcaaagaagtcttgcaacacgcaaaggctcgtgctttacgatgagatcactagaatgttgtaaaatgtttcttgatctctcttacttattctgttcatagaaaattacaaatactacccaaaggaaaggtgttttttttttttttgtgtatgatgttttaaatttcgaaatacgagttgagatgagttttactgctaaaatctgaaagtaaagtgccgtattcttgtgtcatataatgtgtgaatctccaggaattaaactgataaaaccaaaacgtttggggtcgaaagtggatcaatcaaagctagtttctggaacccgagttactctttataatattggtgcatcggcatggtagagatgttagctactcagatcttggtgatttatctaaacaaatcagagacctaagacattacattgaacttcctctcacaaatcctgaaatttttcacgagcaacgagttggtgttaactcccaagttttggattgattgttgttttgatttgattcaattg

SEQ ID NO: 3829 - DNA, 500 bp, Arabidopsis thaliana
tgccacatttaaagaacaatccaaccgtatatattggtttatcctcattaagaagcatgcaaaagaattgtgatatctaaacaatgttggtctgtaacaaagcatcaaaggtacattagcaaagttctgccagctctttacctccacgtaaaccaccgtagataaatatcagatcaccgactgcagcagcagcatgcctacaccgcctagtcagctcaaccgaagcatcgccaccagctgcatcggcactatacctaccagttctaggactagtaacaactgattttgtatcacaccatacacctgctgcagtatccaatactgtacaaagacaatagatgaaataatcagagaattgtagatgaactcaatgcacattttagtacaaaaccaaaatatacaactatcgtctatacatgagacacatttcaacaatggcccacagaagactaaaagtggtgcagaaattatatggaaactcaagtatttcctcaatgata

SEQ ID NO: 3830 - DNA, 494 bp, Arabidopsis thaliana
gtatcatatctagaacaaaaaaaaagttgaaaaatgttcaaaagaagataactccagtgttttgttcagactaggaacaagaagcctattctgatgagaatcatgtcggttgcttctacatgaaaaggttaggttttgatgccttgtatgtagtcttaagcttcctgcttggtggtctgaccttcctgaaaacaagagggaacttgatcttcgagttatggaactgcttggtgatctctctcttgcaaagctttgcagggacagtcgcagtcttgatgatctgaatgcaagggaacctcactctatgacgagaagccatctcagtgtacatctgctccactccaccattgagtgttgtgtcacggtactccttgtacatgttgtggtaccagttcggctctgataacgcgaccagatcctgtagttcttgatggtcgttgggttcttctcgaaaatctataataaagtagatcaacaagatcagatacaagtag

SEQ ID NO: 3831 - DNA, 604 bp, Arabidopsis thaliana columbia
gtggattgggggatcaaattcagttactccacacctcgatatccgcaagggaactggccaagccgaggctcaaacaagacaattttaagcaatctcaagaagcgtttgaatcatctaaaaggtggatggtgcgatgagctccaacccgttttgtgggctgatcacatgactcttagaaggtctactagggagactccgttctctgtggtttacgggagagaagcagttgtcccggccgaactcaatgttccacgacttcgccaaacagaggctcctctgaacaaagccgaaaattcagcaatgcttgatgagtcgctggactcattaatgaaagacgagaccaagctttaatctaaattcaaaattatcagcaagcggcggcttgatacaacagtgccaaggttaaaagcagacctttctttgtaggagacgatgtcctaaaccgagttttcgacaatacacgagaagaaggagtaggcaagctcgggattaattaggaaggaccttatatcattactgaagtagtccgaaacggtgtttataggttaatagacctcgaagatagatcagtttagcgactatggaatgtggtgaatttgaaaag

SEQ ID NO: 3832 - DNA, 1327 bp, Arabidopsis thaliana
tcccataactaacacggcgtccctcattttcaaattgatcaatggataactgtctaaccattccacctaaggctccacctgtttctgcagcaaccaccaccttacaaagttccaaaaataaatgcaaaacaaaaatcagaaattagagatgtaaaccactggtaaatgagctggaattacggtaaatgacagatttttcttgatagagttagattgactcacagctctatgatgaagtcgaacccctgcaggaataacactatttggtactgcagaatcaggcttaatcaatgataatgaaggttttccactgggcgtagcctcagcaccacgatccctatctggaagttcaacttccccattgacctgtcgtgccttcgcagcagctaatgttgcactgatagcctcggcttccgcagcagatgcttcaacaagatactccacacccttgcttgttctcctacaatgttgtttgataaatattttacaactaaatgcataggtgtgctaacaatacgacaccccacatattaagacactaaccgaattcctggaaccattgcattttcagtgctaatatcagtatacatatcaccatttacagggggtgcaacagggcttcccagcaccacagcgtcaggagctgattctggtagctcccctgtcctttcatcagaaaatccatatcttccaggtgaacggccaggtggcgtgtttgttgctgctgctgcagagagcatgagaggcagcagatgttgtttccgctgcagcaagatcttcagcaaccaataggtcatcaagtaaaactcctataggatcaagagaatataattaagtttagcagctacaatttttaagaaaatgcacggtctgcaaagggaagagaaaagaagctacggcacatatatttggtgaagaatgatctctataatggttttactaactaatactgataatattaagtcccagactttaacaaaagatcaaactacctacttaaaaaacaaatcctacactatcatacactaacaactcaataaataatatgccaaattagtagatcactggattctcagtactatatgcctggttcatttcatggacaaacgtgtaatggtaaattgcctataacagctatcaagcttttttccttacctccacgcaacccaccatagatgaatatcaaatcacccactgcagcagcagcatgcctgcatcgcctagtcagctcaacagaagcatcaccaccagctgcgtcagcactatacctaccagttctaggactagtaacaaccgattttgtatcacagccaaacacctgctgcag

SEQ ID NO: 3833 - DNA, 1041 bp, Arabidopsis thaliana
gtgtctcatgtaatataaaatatatgatcagcgatttgtatcgttttttctatctttcatatgattttttgaaataagtcaatagctctttagtagaagaacaatttagtaacacattttatcaaagtgggagagttggtgaagacttgcgcaatgattgggttacactttaatatttaaaaaaaaaaaaaaaacttttatagtacaaacaattttttatggcgaattcacataaaaaatgggaggacgaaacttaaatgcttcgtttacaaaataagcttatgtacaataaaatgaaagattaaatcaaatccacaataatagtctatctgaactttctatgattaaatccacactcgtatctaatggaggcaactaggcaaggaccaaactctcaatcttgagcctaatacttcaactactagtctacttatataatacattcgaaataaaggggaaccacacagcttgccgttaagtacttgagggtactagaatgacatgcattgttccactattaggtggaagttgcaaacgaagaggaaacagcttgccgtttgaaggatggcgtgtacagaccacaacatcatccatactagtctcttcttgcaacgcctgcgtcaactgttccacgctatttcctttgaaagtcaacgcatatccaacggctgattcttcctccacgtgtccttcttcgtccgcgatgtggtagtaaataggcctcccttcagatttcggtggcggcacggtcaactagtcaaaccaaaaccaagaaaatgttaagacgataatcttgacaaaatctgatagatattttcgtaatacagtttactaaaatctttggatattctataaatatctaaagaaacaatattttaataccatcccttcactagttttttcagatatttagaattttggatattattttcagtttttatttccgcagataaatgttaaaaaaagaaagtgaaacagtgtaacggataattttcctagtcgaattaattaatacctcttcttcggatttttctgaagatg

SEQ ID NO: 3834 - DNA, 718 bp, Arabidopsis thaliana columbia
gagcgaatatgccaaacccgacgaagagttgctcaacgccagtgactcttgctcataattccgtctcaactgacttcagcataagaaatcagcttcataccggcgcactttgggctgcacaggcgcaagagtccggtaaaaaaggtgaagaaatagcttacagatactttgttgcaaaatatggcaagaaggcactggttaaatgggttaatgagcatagtgaaaccggattaccttacgaccttatcatcgaaaacagaggaggtaacaaagagtacgtagaggtgaaagcaactgtatccacagggaaagactatttcaatttgtcagtgaaggaatgggagtttgccaatgagaaaggagagagttacgttatagctcatgttttattaggcaacagtaatgccatcctcacacaacaaaggaatcttgtcaaattacgccaagacggtcatctccggttattgattctcatgcctagccagcgaaacgaggtcaacgttgcattctaaaccccaattgagttttttttgtttccatttattttgaaaatactaaagagtaatttattaagtttaagtctaaaatcttatattggccttaggtattactctttttttggttcccacatccggaatttggatatttgataatattataaagaaaaagactttttccaaattcaaaccggttacttgtacatgcatccaagagattt

SEQ ID NO: 3835 - DNA, 924 bp, Arabidopsis thaliana columbia
tacagggatcatgcacaaactgcttctgtccattatcattccatgatgaagcagccataatggttctaacacatgtttggaccagaaaagaatgagaaacagtaataaaaacatttgtatactctgtggaaacttatactataagagtctagcttcagtaggtaacatacttatccctatccatgagactagctgcagcctcacagtaatcaaagacgtctggagccattcccatatcacctgtcaccgagacaagataacctctcttaagcaatactccacaaggtaaagacagcccctcttaaacaatacaacagcaaggtacgatgagtgtgaaaggttaaaaagcgccaccttctagtataatcactcgactaaatttgtgtttgtaaaacaactggtccagtgcccacttgtagtgacctgtattaaaaagtgtttcagtaatggagctggagggacgcagagaaaagagaaaccagtccttacgtgcaatcttgtagtacgcagtcagttcgccaggcctttcagtgaccactggttcaaaatccaagtgctgaaaaggggaaaacgagccttcatcctcatttatctacttgaacagtgaggagaaaaatcacgctagattaaattacctgcatatatgttaattgattatagctcaatgacttgctcttgacagcttgatcagatccatcctgtcagaaaatatgtcgttggaaaagaccatggttagtaattcgttgaatataaaacagtctaagagaccaccaccctgcaaattaagtacctgagatataaatagaggatattttgaagcaacgggagtttgatatctgtataacacaagaaatagccattagatagttcaatcaaaatgtggtataagacattaatcagtatagtatctcacgttaaaactga

SEQ ID NO: 3836 - DNA, 534 bp, Arabidopsis thaliana
gatctagcaaacttttctgaacagggcagaaaatgtaagagatctataaaactgaaacgacttggtatacatttaaacttctaaccaagagtccgaaccaatctatgaggtaagttttcttccttgaagacacaacactgtgcagtcagcttcttatataaggaaccacgcaccataaactggacatcacaagtataaaactcgtcgtagagtgtaaaaagttgcgtaatttgttcaaacatcccaggagcttcgaggtttgtaggaccatcctcgtcagcatatatgtccatctccttcaaactaggaaaatagtccaagaaatgttttatcatttgcatctctttctttgtccctcgaaacccatggatctctaacatatttactggacaagatgtcagcgaacgacctttgtcctcccgaggaacgcagtcacaagcatccccgcatttatctgtgacatggtgcaagagtccctgaaagcataacgaaacaataagagattcaaagtatgactttatctctgtatatgtt

SEQ ID NO: 3837 - DNA, 860 bp, Arabidopsis thaliana
ctcaggatcatcccgactgataaagtagaggataatgtataccttatgataatgtagttagatttatataggcaattgagagtttcgagactcgcaaaatggctagggctattcaggctatttaaactcataaagaagcgaaggaacatcaaccgcagcaagaagtttttcaaacggaacggaggcttgctgttgaaacaacaattaactacaaaggacggaaatgtagaaatgtctaagattttcagttcaaaggagttaagaaaagccactgataacttcagcatagatagagtgcttgggcaaggcggtcaaggcactgtgtacaaaagaatgcttgtagatgggagtattgttgcggttaaaagatccaaagttgtggatgaagacaaaatggaagagtttatcaatgagattgttcttctgtcacaaatcaatcaccgcaacattgtgaaactcttgggatgttgcttggagacagaagttccaatcttggtgtacgaatatattcccaatggagatctgttcaagcggcttcatgatgaatatgatgattacatgatgacttgggaagtgcgacttcgcatagccgtagagatagcaggagctctttcgtacatgcactcagctgcatcttttccaatattccatagagatatcaaaactaccaatatactgttggatgagaaatacagagcaaaaatatctgatttcggaacttcaagatcggtagcgactgatcaaactcacttaacaacattagttgcaggaacttttgggtacatggatccagagtacttcctgtcgagccaatacactcacaaaagcgatgtatatagtttcggtgttgtgttgggggt

SEQ ID NO: 3838 - DNA, 1194 bp, Arabidopsis thaliana
cacattttgatcatgtacataatcgcccctgtcttagccttttgcaacgctacggttgcggactcactgactggtccttagcttccacttatggaaaactcgccattttcaccatcggagcctgggctggtgcatctaacggaggcgtcttagctggacttgcagcttgtggtgtcatgatgaacattgtctcaacagcttctgatcttatgcaagatttcaaaaccggttacatgacattagcctcaccaagatcaatgttcttgagccaagccattggaaccgccatgggatgtgtgatctctccttgcgtcttctggctattctacaaggcgttccctgactttggccaacccgggaccgcctatcccgctccatacgccttagtctacagaaacatgtctatactcggagtcgaaggattctctgctttgcccaaacattgcctcatgctctgctacatattcttcgcagcagcagtgatccgtaaacggtatatgggggatgcccgtggcctaaagtggtctcggtttatcccgctcccagtggctatggctatacccttctaccttggatgttacttcacaatagatatgtgtctggtaagtctcatactgttcatctggaggaagctgaataaaccaaaggccgatgcgtactcttctgctgttgcttctggtttgatctgtggtgaaggtatttggacgttaccaagctctatccttgccttggctggtgtcaaggctcctatttgcatgaagttcttgtccatggcttccaacaacaaggttgatgccttcttaaacccttcttaacattcttttttttttttttagagtttggtttttaattttctacgtttctttgtctagttttaattggctttttaggtcctcatgtgtctgtctttaagttggtggtttcttttctttctactcaaatatgtaaaaaaagggaatgaatgaattatttggttttctggtttctctgttcttctcttcttactcttaatactaaggagaaacaaacttgaacttaatctgagactaatgtagctaagttaacacattgtagtttaattcaaactaaattaacacaatgagagtttgatagattgctcaaatctacttgaaaaatcttaaacatttggaagaaaattaaggtttacaaattttatacatgtcatagattaag

SEQ ID NO: 3839 - DNA, 249 bp, Arabidopsis thaliana
cacgaaaagtaatccaagaaatgctctatcaggtacttctctttcattgttactccaaacccattaatctctaccactttcactggacaagatttgagcgaacggcctttgtcctttcggaaaatgcagtcacaagcatccccgcatttatctgtcacatggtgcacgataccctgaaagcagaaacaagacagcagggttaagtatgaactgcatgctttgtccaagtagtttcatggtttgtattcc

SEQ ID NO: 3840 - DNA, 661 bp, Arabidopsis thaliana
tcatcaaatgtcagaaaatcatgacactgatctttttttcagtccaggccagatcgatacgtaccactcttcggtgatttttactatgaaacgtcgaaatggagacctagtgtgccattcgctgagcaactaagagcctttcaggatctcatagttgaaggaaaggtagtgctactccttaaaaatcagatgttatattgagttatataacctcaaacacagagttttgaagtgttcctcgaattctgcaacaggttcgctatatcggtgtctcgaatgaaacttcatacggagtgacggagtttgttaacacagcaaaactcgaaggactaccaaagattgtgagcatccagaatggttacagcttgctagttagatgtcggtatgaaggtaaatctttctagaataccttgagagcaagtgtgtcggaggagcatgttctaaactcttttgttttgggttaaaaccacagttgatctggtagaagtatgccacccaaaaaattgcaatgttggcttgcttgcttattcccctcttggaggcggctcgttgtctgggaaatacttggctacagaccaagaagctacaaaaaatgcaaggctgaatctttcccaggatatatggaacgttacaagggatcactagccaaggtttcttcttg

SEQ ID NO: 3841 - DNA, 641 bp, Arabidopsis thaliana
ccataaggtaaaacattgagtctctcttaccagtctttagaaatttatttcagttattcgcttttaatgtctattgattggattttggtttaaagcttcgaactttaggtttattcaggtttttccataattgttctaaatcttcaggttttgttaccaataatagtaaagatggttgatttacttagactctctctctctctctgttgtgtatgttactgattttagaagttttctttgtacagatgaaagttgcgtttggaggtgtagaacctgttgtgagtcaacctccacgtcaacctgaccgcatcaatgagcagccaggaccttcaaatgctctttccctcgcaggtgtttttcatatcactatgtcttggtgaaagataaaaacttgtttcttgtttgctatttgcattcttatttgtattggaagggataaaatcatctgcttgatgaattctgcagctcctgaagggtctaagagtacgcaaaagggtgcgacagagagtgctattgttgttggccaactttactgcgtccaatactgcctaaaggcttgtaagtgttatcttttgttgttggtttcgttgatctgaatgctaattgatggtctactttatcgtgaggatgctcataaaaga

SEQ ID NO: 3842 - DNA, 798 bp, Arabidopsis thaliana
tgcttgaagcctctttcttgcagtgcgtattgttttttctgtccgccaaaacagcactgattttcttatttgcattttgtacgtatatattactcctaaatgttctgaactttaatgtatacagatttcattgccaaaaaatttgctgatacttagatccaacttaattagaacgaaccgaatcaaattgcaattgtaagactagacttattcaaaactaaacacggaaaattacgtgttgtgttgtgtataatcttgttttatatagatgcatgccagttcttgtatttcttgcaatttgtgcagtcaaattttctgacttggttgttctgaataaattagctaggaaaaaaatgatcccaaggcagcctgggatttaaaactattttggtcatttgccaaagaaaaaaaaagcaagagaagatctccccactcttgctaccaaacctaactcgaggatggcttggtaggcaaggtaggtatactttgttcatctctgaaaaagttttctggatccacggctgttttgactttgaccaaccgatcaaaattctctccgaaatactttctcccgtaaacctcagcttctctgtaactgtttgggccatggctgttgatcccgatatcaagatccctgtagttgagatacgtgtgtcttggattcttggtcacgaaaggagccatgtagctgtagaagcttctcgtcttttccatgaaactgctttcaacatcagtgcccgggtctttccagttcatcgaatgctggaccttgaaaagcctcttcctgtgtgggacgga

SEQ ID NO: 3843 - DNA, 931 bp, Arabidopsis thaliana
atgcggttggaggttatattatcattgtagagaatgaacaatgcaactgttgctttatatacatcatcgaatagaccatcttaccgtctttctctatcatagacaagaattgccttgtccctccaccgaccccgaaatagtacttctttgcagccatatacactgctccatcaggatacgccagacactgcaaagaaccaagtgttgaacctccaatgaatctttaagaatgatcgtaaaagtttctgctatctaggagaaaacgagagtgtacccttttaatcaattcatattgacttttctgagcggagatggaatatatcgtctcagccattagaatgatgtcataaccacccttcttattagtctcaccatcactattaactagtggaagaacctgatgaacttcactccactcaccagcaaagaagcgtacttctgtttcacttactgagacagaggaagacttctcagacagattagcattcagattcggaatggtgagacatcgaagaacctcagcattgaagtcctggaaatgaacagcatctgaaccctaaacaccaaaaggaaccataatatctaagaagatgtgacttagccacagagtataataaagcttagacagcatcaacttaccttgagacacgcatagattcctggaagtgcatgaccacatccaagctgagtatatagattcaatatcttatgttagtgatgtgaagaacacgttgtatccatcattgtttgacacctaaggcaaaagagcctacctcgagaacccgctttccggaaaatgataagtttccggtttgtgattctttctcaagagctttaacaagatcaatcgatccttcccaaagcttaagcccgcctacattcaatcgaattcaagagttacaaaactgcttaatgcaggggatacacatca

SEQ ID NO: 3844 - DNA, 735 bp, Arabidopsis thaliana
cggctagaaaatcgaaacaaacaaaagatttggataaggagaactatgaccttttaatacagtcatgcctcaactatttagtacgttgtttttttcatgttcgactggagatcaaagctcacagaacactgtaacaggttgtggaaaaaatgtgacagaacgctgttatgtctccacgacatggagagcagtagaaactcgatcaagcagaacattaactcgggtctcgggacatgtaccattctggtatcttatcgatatgtaaattgctaacacatatgattatgaattttgcctcttaacagtgcagtccaacaccagctgaacttcacaaggtatgcatatgataacacacattgacaagtcgaagaactaatagggctaatccatcttctgtctaatatcatagaaaccgaacaagaataataaataaaagggttttatacccaaaccaaacatccaacattatataggggcataaagaaaatacgaaaaagacttagataaggatttagttccacaagctaacaaaaagactcaaaatgcataataagaaataaaaagacaaaccgctcaagattcagctttgaacatcatcgcttcagttttgttcataagcacagacctctcgtaaagtagctcaaacagcttatccttaaacttcttccatttttcctccacttctctcttctcagctccatcctcaacattttcccaacccgtagttaatttaga

SEQ ID NO: 3845 - DNA, 829 bp, Arabidopsis thaliana
tacaaattatatcatttaagttttttttccttacaatagtatcgttttatactttcattgcagtttaaaaaaaagaaaaatttatttttatctttataattttattttattaattataagaattttttttaattaagtgtatttataaaagttatagtaaaaatttacatagtattttttcttttgaaatatgtgacaataatacttttcatgaaacaaagagagtatgtaacactgaatttactaaaactgaataaaaacactaaataacatattatattagttaaaatttaagaagtaataaaatattgaattactaaattgattatggtatcgtggtattacaaaaaaaaaaaaaattcccgggtttaatccatgtttagtgtgtaagactattttttaaacctacattctaacggcaagtttaatctactttatcacatagatgtctctctcgaaaggcgattctctgggcgattttcgccgttctagttttctccatcggagatcttttccgaccaggatagatcacggttttgatgtcaagatcttcactggcggttttaatctgtcaaaaatcaatgatagttactctcttccctcattttcgggaagtaaccaccaactaaaaccgccatggcctctcctatataaccaccgtgttcatccgattatgttctctctttctttgttctatcaattcgagtttaaactactatcaatcatgagtgatttccttcgaaaatctgttcaagaccttgatttgggtgttgacgatgtcccaattgttctatcgccggagtttgtttcccaagcggcgtcagtgaac

SEQ ID NO: 3846 - DNA, 765 bp, Arabidopsis thaliana
  unsure (1)..(765): unsure at all n locations
tgattagaggcattggtaatcatcaaactcatttccagagagtagatatagaccactcaccaagaaagattagtaaccattaattcattaataacatttgactaatgagctaatttcaatttcaaatcagcaactaacgaattcgtcactcattactcatttcaaatcatctcataccaatccaatttcataattcaaaattcacagtgataaaccagaaaatttgaaattttacctgaacagctctaatcacagcacctttagctaagtaaagagtcatatggctagtgagattgaagctctccgtcaaatacactcccggaggtatatacaaaagcgtgcctcctctcctcttcagatgctgaatccgataaatcgccgccctaaacgccttagtattcaccgttcgaccatctccaacgcctccaaagtcggttatcgagatcttatcgtaccggtaccgtaacggaactataccggaacacgtcgcctccgaatcgcccaacgaagacgaagaaacgaagagacatgagaagaggaaaattgacacagagagtctccacattttcgatgaagagaggtttatttaggatgagagtaaaatctgcagaattggagctaagattagtatgatatagtcgacactcgacaacgttcaatagaagaaggcacgtgctgatacacgtgaatcaacgggccatataagctagaaacgtttgggctttagtggccaataaggatgaacactttttgtnttttgttttt

SEQ ID NO: 3847 - DNA, 1950 bp, Arabidopsis thaliana
gccttcaatatcaaagtgtatgaagtcagtcgaaatactaaataagcaactctgatcagcaaaagtttcgcttaaaaatcatgaaacgattcgataatctaaagatcctaagaacaattaaattcagcttcgcaaactctgtctctctaagtttagattgatcgaacaaagtgaatgaaaacaagcaaggaagtcgagagaagtaagtaagtaacctgagaatccaaacctaaatcgggagaaaaagcttcagagagctgcgctctgatcacaaatctcaagcggcgtttaaacgggacatcgtttctccgaaaccggaatccgaagggaattaatcgtccatcggaactcaaaccaatggagaagcggaggcgggaagagattccggtggccggagaaaggcgactcatgataggtacgtggcaagggcaaaagcataggaacatgagagaaacaactcgagaaacggttcagggtaatggcggagaatgtggatatttgagatggtgttttggaagtttgcaggaatttggtggacctcgtggattcgtcctcttcttcattgccgaagaggttgaattaaaacttgtgcttcttccatttgattgtgactggattgacacttgagctgcgcgtgcactccacgcgcctttcactttccatctcttcttcttatgaccataaaaagataaggaaaatgattttttttctttctttcaatttctcgtatttcatttgttcatccatttcttcgtttttactatattactgtggaaaattatttatatacagtaaatcactaattttatcaaacaaatttgaacggcatcagattgaattcgtaaattccaacacatatatgctcttaagaaaattattgcatatgattctggcataattactatcaacaaaagtatgatattataacacttgattagattttgagaaatgctaatagtatatctacttacctttcagtttacaaaatagaaagtataaatcaaaaaatggatacggattattcccaaaattaccaatcaatctaatataacaacatctgaaatgtatccatacgattacaaagatacaatagaagttttcacagggacaaataataattcattattcaagttaacaaacaaagacacaaataaaaagaaacactacgcagagaccaacaaaggacactcttcgaaaaatccttaaaagaaaaaatggcaaaaaagactattatatattaacaataaaaaatgaagcaagcaggtgaaaccaaagaaatgaagatacatataactcttcgactggtaaattcaaactataaaagcagcaaagtatatgatatgtgatcatattcatatcgcacgtgggcttctggctagaaagcattccaattatcagaactccgaggtgtctctgctgtagttgtcgttgttttgaatggtcctgtagaaccgaacgggtcatggtcgtcgaacccaaacccatgactgtaatcagagtccctggtgcttccaattgagtcgaatcttgtcaatgaggctttaggcgtctccgatgcattgttgttgctagaggaatcatagctttgtgcattgaaggaatcatatctttgatagttgaaagaatcaaaccttgatgcgaatgggtcaggctcgcttgtgctgcgcatcgagtctgtgcgggatagagagaaagcatcgttgttgttgctgttgaatgaatcgaagcgggagaagctgttgttagagaagtcatcgtgtgcggcgggtgtacttgggacagagtcgaacataaaggggcttcttcctgggaacaggttgtctgaacgaggagtctctgatgcaaatggcttcccacacaaaatcagacgtgctataagcaggagtgctcgggacagagtcatcgaaataggatttcttctcggcaaacaagttgcatggataacagggg

SEQ ID NO: 3848 - DNA, 547 bp, Arabidopsis thaliana
  unsure (1)..(547): unsure at all n locations
gttgaatctctaaacaatgccttactaccggctaaagacagcccagttgttgctcttattgaatgtttttggaagatgcttagtaggttgtttgaagcccgcaagaagaaagtgtctaatacccttggattgattcctgcagaagttgagaaaatcttattgaagcagcttccagactcaataggtgtaagtgttcgaagtgcatcggcttgtgattatgaaataacagcaaaagatagaggaaaattctacgtatcattagagaaacgtacatgcacttgtcactcatttcagctactacaaattccttgcccacacgcaatggctgctgcccatagcaggggaatagaataccgatcacttgttggctgcatgcataagaacgacatatgggctccaacgtttgacggtgttatcctatcggttcaagacccatcagaggtgggagtacctgatagcatcaggttccgcttcattcntccacctaagactaaacgtccttccaggaggcccctaaagttagtatccatcaaccgaagagtttgag

SEQ ID NO: 3849 - DNA, 879 bp, Arabidopsis thaliana
taaattttttgaaaaaggaatgcctctctcgaaaggcgactctctgggccattttcgccgttctgtttttctccatcggagatcttttttgaccaggatagatcacggatttgatgtcgggatcttcattggcggttttaatctgtcaaaaatcaatgacagttactctcttccctcttttttgggaagtaaccaccaactaaaaccgccatagcctctcctatataaccactgtgttcatccgattctgttctctctttctttgttctatcaattcgagtttaaaccactatcgatcatgagtgatttcctctgaaaatctattcaagaccttgatttgggtgttgatgatgtcccaattgttctatcgccggagtttgtttcccaagcggcgtcagtgaaccggttctctttgattgttacaacggtgaatccgaggaagcaaaatctgcgtgctttaattggccaaatgccaagggtttggggtcttgttgattcatgtgttgaacggatcgttgggaacgcaaaggttcaattcaagtttcgtaatgaagagtcgatgaatatggttcttcaacgcggtccttggtccttcaatgactggatgctgtctgttcaccgctggtttccaaacatcacggagagtgaaatgaagataataccattttgggttcaaatacaaggtatcccaattctttacttgactaatgcaatggctagggtagttggaagcagactaggccatgttacggatgtggattttgatgaaaatgcaaatcaaatgggttttgtgacggtcaaattggcatggaactttgatgatcctctccgtttccagaggaactttcaattccaaccttggtaggtctagagctagat

SEQ ID NO: 3850 - DNA, 1279 bp, Arabidopsis thaliana
  unsure (1)..(1279): unsure at all n locations
gtcgagtttcagactgtataacaggtatcgttccgtgaccaacctttccttttggtgagagtgcagtactttcaagttcagattctctcgtgtcgccaaggaactttatgcagagaaggtgaaggaagtagaatcaaagtgtccccgagagttatcaactcgggcgatgaataagaaacatgcccgttttgaagacagctcgatacatcttgaactgccaagatgcactaaacggttcataagagtttctcttgaaatgcataatggagaattacaacgaatggtgatacggacgaggtttcctcatcactacactatagaatcatcagaaacacgccgcctactttgtcaagactatgcagtacaagctagccaagaaccgttccctgaacgctctctccgattcagaggagtttctcatggaattcataacgggagagtacgaaaaatgttaatacggaacagcactggagaatcaagaaaactaagaatgaggaggcagaggaaccttaaaatcaggtaaatatatccttgatagttgcttatattatgaaataaacatgctaaatcgatattgaaattttgtaggtgactcatatccaataaacttcaaggagcttctgaggataactttgatggaaagaagatgactgaaacttggactcactaacaaagctgcattctatgttctcttttgtttattaggctgattactgacagctcaaaaccgcaatgctctatatggagataatcttttgttgtaattgtgtgtatttatctggatgttttccttttggagattatgtagttgaaatgattgtgagtctcgcgacttgcattgtggagaaaaatcccataaatctcttgtgatatatccaactaagaccctacgccagaaggtttggtaggacgcattcttaacgtaatacagtattcggagtaacttgaaaatgttattgtaaccaattcttgtagtctgtagactattatatactaagcttaaccactattccgagttacattggaacaactcatagggttttgaatggaggttgggtacaaaacgaactaaaacatgagcggactaaagtatcatatttttggggcgggcactaacacacacaacctatatacagaacgcattagcttaatcaacagaatcaattttgtgatggccttttgttttggtttcgctagatgagaaactgaaccggccttttctcttaaatacaantacgttacttttgttattttgaaaattgaaatttgaaataaacct

SEQ ID NO: 3851 - DNA, 579 bp, Arabidopsis thaliana
tgtctcattagagaaacgtacctgcacttgtcgctcatttcagctgttataaatttcttgcccacacgcaatggctgctgccatagcagggagatggaataccgatcacttgttggctgcattcataagaatgacatatgggctccaacgtttgatggtgttatcctaccggttcaagacccatcagaggtgggagtacttgatagcgtcaggatccgctgcattcttccacctaagactaaacgtccttccgggaggccccctaaagttaggataccaacaaccggagagtttgaggttaacattcttgctcttcatttatattatgatgtaactaattcatactcacaacaaagtatgattatttatgcatggagaaacaaaatactggtacaagaaagaacaaatgcggaaggtgcaatagtttaggacacaacagggttcggtgctctgttccgctgaaatgaagtgcatttgtttggggaatggtgtcaaccagacagtcttcactggtagtctgtacactcgtttttatttttttcggctttaagaaggggatgtgatttttgatactttaag

SEQ ID NO: 3852 - DNA, 986 bp, Arabidopsis thaliana
atcttgtactcctgagtcatcaatgaattatcatgaacaagacattgaagaagcagactgtcaaactaagaacttcatctgatccatagatcctacaaatgcggatatgatgggaatgcagaaacaactatatggtcaagagcattccaaaactacttaacaattagactgttacattctagatcaagagaccaagcaactacagtctacaaagaaaaaacactgaagagatttcacaaggtcagacttacatcctcgatgcttgtgctgtgatctgttgttagctgcagggcaaccagtttcgtttgcggcaaaggagcttcgttgttcactgtactatcgctactatccacgaccaaaggctctttgtttccatcgtctctgtctaaatcattgcgtctttcttctactctttctgctgtctccacactctcacccgtttcttctacctgatattgtgcaacaagagccctactatcccctatgttcattatatacacatcatcatctctcatcagtgcaaccagtaagcacgaacccatcaatgcaagctcaggattggtttcgagaaccttatcagtcatctctaggaatgcttgctctgtggcttcaagaccatttgacattgcctttagaaccaactcatgatcaacggtacccgcctttcgtctcttccttctcttatcaaccccttcttccacaccaacattatctacctcctccgtttcattttcctccacaccagacttccatgggaacaacttcctcccagaaattccttgtttagataaaccctgcttcaattttgacaaaagcaaccatctcttacttcccacagacacagcattgcctgcaccgatagcatcatccaccgaaaatgcaaacctatcagaacctgaaagatctaacgcatcttctgcttgagcctctgccagaagctcccatagccgtttcctctccttgacttaaccacctctaatgaagac

SEQ ID NO: 3853 - DNA, 556 bp, Arabidopsis thaliana
ggccctcgtgggatttcactcacaactgtggtctcttcttcgtcttcaacgcattgaacaagttgtgtacctccgagtccaagattgatcgttcgagctgaagcaagtaaccaccaaggatcccatggttggatcattttgcttaattctccagaagctaaggctctttggaatccttttctctcttctaagctcaaatcatcaagactcacttcatctccgttcattatcttctgaataatctcctccggtaagctcaaaccttcatcatccgtgatgctatcaattcccccatcatcttcctcttcttcttcgtgaaaccttttcaaaatttcgagcatcttccttttcgtttgatcatcagatcgaacttgcttcaattcatcgtttacattatctctcatgaatgattcagtacattggacactgtgagatttgtaacaaggaagggaacagtaccggaagttgcagcgaggacaagtgtactgcgagaactgcttattacatacatggcagataatccgcgtagaagaagggtttaacggagacgaatttg

SEQ ID NO: 3854 - DNA, 625 bp, Arabidopsis thaliana
ctaaagagttgggtgatctttcttatacagctgggagatctctgcctcgcggaaggtcagctcattgagttgattatcaacgttcacaatctgctcaagaacggctttggcttccaggttaaggtcaaccgaatcgcgctgctggcgataaacgttgagtttttcttccgcttggtccagctcgctgcgcacttcaggtaactggcgctgtaagaattcaaggctttgtgaatcctgcgccgcctggcgagcgatattctgttgcaaatagttgttagcgatgctgttcagaatacgagtaatcaactggggatcatcaccagtcatggtaagttccagcatcccgctttctttactgcgttcgctaacggtaaaggtttcctgcaatgcgttaatcgcttccagttcggtacgctggctcaggacaaactgtgttcctggtttggccttaatgtccgcgatagtcagcgcaacgccatctttttccagacgctggccgaccataccattgacggtgaactcttcaccttccagtgtatagtggccgttttcccgcaaccgtgagtgtcagttgctgatcctgaccattcagttgtggaatatctttagagcacacgttactaga

SEQ ID NO: 3855 - DNA, 1314 bp, Arabidopsis thaliana
accaattaatctttcgagagtggcccgaagatatcccatgtttgttttgcggtgatcttattcttgttgcgaggcatcggtagtgcaaataagagtgattagaagggtgttggagaggttctgcctatcttcgggatagaaagtgagtttagagaagtctaaaatctttttctcgagtaatgttagccgtgatatggagaggttaattactgtggagagcggaattgggtcgactagagatttgggcaaatacttaggtatgccaatcttgcaaaaaagaattaacaaggagacttatggagaagtgttggagaaagtaaattcaagactcgcaggatggaagtctcggaccttgagtttggcgggacgaattacattaatgaaagcggtgttatcttcaattccggttcactctatgagttcaattatcttgcctgaatctactttggaaagcttggacaaggtgtcaaggactctcttgtggggagggacgacagataagcgaaagctacacttattagcttggaaaaaaatttgcaaaccaaaggaggaagggggtttgggagtaagaggatcacgggacatgaataaagctctcgttgctaaggttggttggaggttacttggtgatgacaagagtttatgggcacgagtattacggagtaaatacaaagtgggtgaggtgctgaatcattcgtggttggttcctaaaagccattggtcatcgacttggaggagtatcagtaccgggttgagagaggtggttacttgcgggttgggatgggttcctggtgatggtagttctattaatttctggttagacaaatggttgctgaacacgtcattgttgtcgcatgctacacgcacaattccagtggtagaaattaataagaaagtggaggagtattggtgtgatggtgcaggttggaacacacgagttctctctttgtacctgccgatgagtattatacataggttatatgcggtggtgattaaaggttgccctggagtgcgagacacgatttcttggacagggacttccaagggtgagttcacagtgagctcggcctatgcgatgttgacagctgatggggatccgcgaccatgcatggcgaagttctttcaacaggtttgggctgtggtggcacaggagagagtgcgtgttttcctttggcttgttgaaaacaaggttattatgacgaatgttgagagagtccggagcatatgggggagagtgaattatgtccagtttgtcaaggagcgatggaaacaacgattcatgtacttagggactgcccggcgatgtctggagtt

SEQ ID NO: 3856 - DNA, 776 bp, Arabidopsis thaliana
tcctttcgatacaaggatcttaaggcattatcaagtacctcgatagttaaatctgtgtcaaaccttgggctgggcaagagagagtttatgtaaaatggagatttccaggctgagggagattcaagacctctcctgaatggagttccacagaatctgtaaatggaaagaagaaacaaaatcattgtagcaagaaatgaaagcaaaaagaggacaaggaatattttagtaagggtggtatagatgtacatgctaaaattctcattgcttgtcccattgtcaacaagatgaccctccttgtttctcgctcgagaaggcgaattaatcactaaacaaacacttgaaggggaatgatgttctttgttagacgtagccatgagagttctttgcaactgatttcttggggttgaaacttgcgccttctctgctttagtaactgactgaccaggagtagacaggactggcttaccggtattgtgctcagaaagaataccagagaaaaattcaacctgcataagatttgatccatcataaaggttatgtatgtcagttacatctacaatctattgctacaatgacgattaaaactcaccaaaacaatgaagattttaacacaggtgacaaaatgacatgattggcgacaaaatctaaaggaactgagtttgtgtaaacagtagcacaacttatattcaaatggttaaaggaaagaaagagacttacattctcaacatcttgttcagaatcatccttttccctgacatttgcctccatgcaatttg

SEQ ID NO: 3857 - DNA, 1044 bp, Arabidopsis thaliana
ccttctcatcatcctcttctgttctttcatatgcgtcctctctctccacgctgctatccgttgttgcctccgtccagtcctccaacatgtccctaagcccgacccggaccttgaggccacccatccagacgctcccccgacacttgtctactccccgggcctaaacctagcaggcaatgaagcagagtgcatcatttgtttgtctgaattccaagacggtgacaccttacgcgtgttggagagatgcaaacatggattccacgtttattgcatccagaagtggctctcctcatcccattcttcttgtcccacttgccggacaaacatcttctcctccccacctcaacttcactcacaaagcttaccactaacgagtacaccttagtcagatggtagctagttcctggtcttgcccactttttttttatctttattttctttacaacttcacaccactatcatgttttacaagttagtttattttttacctttctccttttatattccatgaaatttgcacagtctaaaattgatatgaagtcacttttgtgaatcatcatttacaacgtataacaaacaaagaccaatgtgtaacgaagcaataacaatacctcataatatagagggaccaaaggctttatttaatgtcggagttcaagatatatgaggtcttgactggtgttaggtacgttcccacttgttggataagataaagaaaagagttgttactagataagataatggataaatatagaggatgagaaaaaaaaatagaagtggaatgacgacgactcacattacgagcattaactccattgcccattggcatggaatgattctagctagcagtaggagaaaattccaagtgcgtgcaaagttcttcaatgaattcctagaccccctaaccagagtcatggatgcaatactggaaaggcaagactatgctcgctgcatattttcaggttgctgacatgttcaagctcaaaaacacaatcaagcgatgaagttagaggagaagatgggggatcctcttcatctagagtc

SEQ ID NO: 3858 - DNA, 583 bp, Arabidopsis thaliana
taatgtatcataaccacaacatcacagagggaagcttcaattcaagctttacaatatcattcttacaaacttaaaattgctttaacattcaattatcacaggcacataaggcttaagataaaaaaacataaattcataaatctcgcatagttctatgaccacaagaccaaataaccaaaaccgttccctaatggcagagctaaaagaagaagaagaagaagagcttaccttcctcaaagcagtagcgagctctccgcgagtgaaattggcagcagcggcggtagtcaacgggattccatttctgaatttgtacaaggacacattcttctgaacgtactccgtaaactgaaccctaatcaatcccaaaatccgaagacagtcaaaattactacctccaccgctaaattacagagctacagagagagagaagagtatcggaggaggaaattaccggtcaccaggctcgccactagcagcaacaagcttgtgtgagtcaagtaccatgatcttgtcttcgttgtttttgtgaagaaggatactatgaaccgccgatgtatcagcagcaacgatggcgaatccattc

SEQ ID NO: 3859 - DNA, 557 bp, Arabidopsis thaliana
gtagtgcctgattcaataaaaattgaccgatttggcaaattcttaatccgatttgagacatcgttttttgagtttgttcattggtccactattctcctactttgttgatttgactcttccatttctggattagtaagatgtgattgccattagattgcgcaagaaaggttcctcatttgctctgtttgcctttgactaaacaaattgtctgtttgattagttttggatgataggtgatgagatagtcatggttgtttatttcctccaattgcaggttagaatttgctatcggatcatctgctaagcttggtttactcttcctagaacatcgattgtatcgaggtttactattggatcaaagatgtctgcagaggagaagaaccttatagagatcttggaggaaggtcacaaagtcgatgttgttaagtacattgattatgtcagtgcccctcaagctggtgctattgcgacattctcaggcactacaagagacatgttcgagggcaagacagtgttggagttaaggtatgaagcatatgtgccaatggcacacgatg

SEQ ID NO: 3860 - DNA, 590 bp, Arabidopsis thaliana
cttccgatcccctggtgaggcgattaaggcagggtaacgttgggattggttttgtcggtatggacctgggatcgtcatggcgatcgacagcctcagtccccctatcaaagtgatgattgagcgtttcggcctagccctgcatgtctttgacgttggcgcaggccctccgtccggcgttggttatgcgacagccattggcgccatgattatcccagttatttttcttctcaatgtcgccatgctggtcacccgtctgaccaaaacgatgaacgtcgatatttacaattactggcactacgccattacgggtacggtggtccagcttatgaccggtagcctgatttatggtgtgctgggggcaatctgccatgcggcgctatcgttaaaaatggccgactggacggcaaaacgggtacagaacatcgtcgggctggaaggtatttcgataccgcaaggctacggttccagttcagtaccgcttttcgttctacttgatgctatctatgaaaaaatccctttcatgaagggacgcaatatcgatgctcaggagatccagaaacgctacggcatggtcggcgatccggtgatta

SEQ ID NO: 3861 - DNA, 1103 bp, Arabidopsis thaliana
ctctcctccgccgttgccttcaccaccgcctctctccgctcccaccgcttccccaccgcctcttccggttgaatccccaccgtctcctcctatagaatcaccaccgcctcctctactggaatcacctcctcctcctccgttggaatctccatctccaccgtctcctcacgtctcagctccttccggttcaccgccattacccttccttcccgccaaaccttctccgccgccttcttcacctccctccgagacagttccgccgggaaatacgatttctccaccacctcgttcacttccctccgaatcaaccccgccggtgaacacagcttctcctccaccgccatctcctcctcgccgccgtagtggccctaagccttcgtttcctcctcccatcaattcttctccaccaaatccttctccgaacactccgtcactcccagaaacttctcctccacctaaaccaccgctctcaacgacgccatttccctcctcatccactcccccgcctaagaagtcccctgcagcagtaactcttcctttctttgggccagcgggccaattaccggatgggaccgtagcacctcctattgggcctgttatagagcccaagacgagtccagccgaatcaatatctccgggacgccacagccactggttccgaagagtctacctgtaacgacgtcgtatcaccgatcatccgccggattcttatttggcggtgtaatcgttggagctcttctactaattctgttaggtcttctctttgtcttctacagagctaccagaaatagaaataacaacagcagctctgctcatcatcaatccaaaactccctcaaaaggtataaactttgagatcaatttgtttcagactgtcacttaaaatgtaatgtaattgtaagttatgatcttttttgcttggatcagttcaacatcatcggggcggtaatgctggtacgaaccaggcacatgttatcacaatgccaccaccaatccatgctaaatatatatctagtggaggttgtgatacgaaggagaacaattctgttgcgaaaaacatttcaatgccatctggaatgttctcctacgaagaactttcaaaag

SEQ ID NO: 3862 - DNA, 1029 bp, Arabidopsis thaliana
tgcatcagcctccagagttcgtcaacaaggaatttcccaaccaccaaccatgtctgtaaactagaaaaagccatttatggactcaagcaggccccacggcgatggaattcatggttcaccaaatttttaatgtagcttggtttcatcatgagcaaggcagacaactctctgttcatcttcaaacagggcattcaaatggcatatgttttgttgtacgttgacgatataatgttgaaagcctcctcaccaagtctcattcaaaaaatcattacacaactcaaaggcgagttcccaatgacagacatgggctggctgcatcacttccttgacatcaaggcaaattttaacaagcaacgtatgttcttaaatcaacatgtttatgctcaagatataataaactgagcaagaatgtccgaatgtaagccatgtgcaacaccagttgatctaaaatcaaagctctcggccggtgaaggcaacccaatacctgacccgacatcttacagaagtgtcgatggtgctctacagtattaaacattcacgcgaccggatatatcatacacagtccatcagatttgcctatacatgcatgaatgcgctagaaaggataatctgttacttgcaaggcactaagtcttatggtcttcacttggtcaaagataacatttcaacccttacgacttattctggtgcagactgggatggctgcccggatacacagcgatcaacttcagggtattgtgtcttccttggtccaaacttggtgccatggtctgcaaaacgacagcccactgtatcacgatcaagctaagaggcagaatataaaggggtcgcaaatgctgtagcagaacttacatggctaaggaatctaatgctggaacttcatctccccatcaccaaagcttctctactgtgacaatatcagttcagtatacttggccacaaatctggtgcaacatcaaagagcaaaacatattgagcttcacatactactttgtccaagaaaagtagctagtgggtgaagtaaaaggt

SEQ ID NO: 3863 - DNA, 1568 bp, Arabidopsis thaliana
ggccggtgatttggatattcgtgcctcttccatcgattgtcttgtagcttccgatgatgagctcgtgtttgagtttgattcccatgtcgctggagaagatgatccatagtggttctggctgaatcacggcgtgtcgaagagttccgggaattggattcgctgcgtcgttgtcggaggaatcggtgacgaggtaaaactgaccgccttttcctccgagtgttccttgtccgaaaccaattgagcaatcggcgagtctttggcggtttgccgaccagtttgggtcgcagcgccaacaatcgtcgattgggtttccggtgatgcaagaaggtattggtgacgacgccgtggtgccgtcgtcttgttggtaagtgagaagttgtcttcttgagagagaatcgttgagttttctacattaagaaacagagcatgttaaaatgttagttgggaaagaaacagagaagattgctctgtttctgatattgtcattatcattataagaataacagaggttttaaagattcaaacttttttgaaattttagttggattacttgagaatgagaaagacccacaagataaagcatgaaaatgaatcaaacccttaaatgaaatcaaataaaatgtaagagaaaagttatacctttgaacattaagaacaacatgttcagggaatgggtgttggtgtgggagagaaagattgaagatagatgctgaggttgatgatgctcttccatggtgagagagagaaaccaagaggcaaaaccagataatgcaaatgcacgttggtttttgaagattatggatcctcctctcatgagccaccattatatctcctattatatcttatgaaaagaccagcagaattagaaactcaagttccttaaatatgggtttatggggaattgtgcaaattgggttatataataaactagggccaaaagaattttatttgtgtgtttgccttcctacatagtatctctctctaatctctctagtttgtttcaagtggaaggaaaggaaaattagagagatagagagagtgtgtgaaaggggtcagagaatccttaaagtgcttaatcaaaactatttctcccacctttctccaatctgattcttacttttgtaagagtgactcagtttacttgaattacccaatcatccacgtatgacgtatccctctctctaaaacaacttttctatggatttagcagcctttttatatgtcactgatcacgggataaatcaataatgtagtttgcgttataaacatgcatataaaacttagaccaaaaaaacatgcatataaaacaatacttaccttgacgaaaatactcgatgcagcgcaagaattctcttagtttttgaaagatttattgatgtagcgtcatctttatcacttcttgtgcaagacataagctttatttcttcttttgtttcttgtttaagtttgccttttccaatttgatttccttttctttgttgaactttacttttcaattagggttttgttaaggctaaagtcggctgtgacttagttatataaagatatgtaatgtctctttagagact

SEQ ID NO: 3864 - DNA, 964 bp, Arabidopsis thaliana
ggactgccgttggaccactcacattaacgtatgagaaagaactgtacgcagttaatctacttttattactaaaaaagcaataaaacaaaaattgtatgcagttagccgcctgatttttatttttttgcttattaaaaattaaaaacagtttatctgtcacacattttggactaccaaaaatctgacttaccattcaaaacttttaatatcgatccataaaatgcacaaataaattaatctttacgttctacctcagatctctaaattaatagaaatatgtgattttaatttatacatattttcatgtataagtataacttccacacgcaagcacagtcacactatcaaatctatggattcaggttacttatgacacgacgattatatattaatatttatcaatcactatacaaatatgacacaacatcacaattcagtaccgactacaagtcgcagttgcgattaatgattggataaaatttagtaaacatatacgcgataattgtcctcacgattagtgtgtttcgcgtatgattgattatcttgtaaaggatgatggaccaactatacacattaataacgtggtcgcggattcgtttaccaaatcaagaaaatacatttctatgatccactaatgctcttatattttattttaatgattaaaagaaacggtagaaaccatatttgaaagcgtcacgttctgatctatataaaccaacaagtgttatttcagcaaccaaaacaaaaacacgagtggaaacttctaaacaagagagggagagagcgcaatggcgacgtcgggaacatacgtgacggaggtaccgttaagaggaacagcagagaaacacttccagaggtggaggaacgagaaccatctcttccctgacgctgttggccacacatccaaggtgtttctgtcacgacggcgaatgggacactcacggtagcatcaagatttggaact

SEQ ID NO: 3865 - DNA, 441 bp, Arabidopsis thaliana
gtttacttatgattatctaatacatggattatgtgctcaaggtaggaccattaatgctagagaattgcttagtgagatgaaaggaaaaggctttgttcctaatgggaaatcttataactctctggttaatgcttttgcgcttagggtgagattgacgatgcagtgaaatgtttgtgggagatgattgagaatggtcgtgtggttgattttattagctatagaacactagttgatgagagttgtaggaaagggaagtataataaagcgacgagattgttggagatgttgcgagagaaacagcttgtggatagagattcttatgataagcttgtgaatgttcttcacaaggatttatagaagatgtacaaaatgatgtttctaatttacatgtattgtcgaaattaagatgaaatctgtatatagtattaggtttatggtaat

SEQ ID NO: 3866 - DNA, 905 bp, Arabidopsis thaliana
agattcatggaatattgaatggagtgagctgggaatcctgatgacagtagaccgttctcattgctcgttgtaatgtagtatgcacatcatcagaatatgcttggagccacattctcgtatcctgccactattcagctaacagcatcggtgttgcaagatggtacactcggtctctaactcggtggagactcaccagggattcagtacagcacccaccgtgccatcgggatcgctctcttctctctagcgacagttcaggtacattacacacttcacatcaaaagggaaaccagtaaaatatataggtttcaacaccagttaatcgtttgttttgaaaacattaggtgtttgcgatgtttctgaggccaaaaccagagcacaagcataggctctactggaacatttaccaccacacgatcggctacacgataatcatcctaggggtggtgaacgttttcaaagggctaggcatattgagtccccaagaagcagtggaaaaatgcctacatcggtatcattgttgttctcgccattgtggccaccctactcgaagccttcacctggtatgtagtcattaaaagaaggaaactggaggctaaaacggctcagcatggagcatctaacggcactcggtctcagtatgcttaagattagcaacagacttgcttccttttctctttgtgcatagagacacagttatttatctgcttatctatctgttcccatatgcaatgatgattttttacattcatgatttaggatttataatgccatttttatttgatcaacactaaaggagtgtacatgtgaattcatatgatctaaaaaaatccagagtagtcaacagcgtagatgctgagagagagaaaagaaacagtacctaataaataacaacaatctttgat

SEQ ID NO: 3867 - DNA, 884 bp, Arabidopsis thaliana
gaggcgttgttgtgtccttgaaacctcgaaaagctccttgcgcagcgaatgcaacaacaattcggtggtgcaccatacgctcgaagtctgaggaactgctctgctggtatccgcattggtgaatcctaaaaaaattacaaaccgagaaagaagagcgatcagctatacaaaacttcaaagataacagcttatataaaagaagttcaacgtgagcttagagacattacaaaaggtatagccatgacatccatcaagaaatcagacccgagagatagcgcaatggcctctgcaataccaactccagcagcaagaactaatgaagttgaaaccgaaggcagcactttcttgcctttaacaccaacaaataaacaacagattcaaagtaaagaaacaatctttgaagaaaacaataaaaacatttttcattataagctttaaggaaagtaaaatacttgtttctatagaatcattatcatccttagcagcaattgcttgctcctccgcaacaaacgatgttgtgacatttagtaaaggaacattgaagagcttcgacaccaaattgaatacagaaactgacactcctactgcagctaattccgcagaacctgtcacattacacatatgaatgttaaaaatgtgaactttcgaaaaatgtgaaattgttgaaaccaagcaaaaagtaagtatttaccaatatggccaacgaaggcagtgtcgacaagagatgttataggatcagcagctaaagctaatgcagcaggtaatgcaattgacattatctccattccaattttaccaatcctaaacccaaaaaaatcaaatacattagaaaccattcaaagttgaatacagaagaagcattattaggctaaggtacgaaccca

SEQ ID NO: 3868 - DNA, 1149 bp, Arabidopsis thaliana
acagcatcagcgtgatcagtacaaatagatacccggaataatcagcccatagccgtaccagatattattgagcaacatatagctcaccagcattggtagaacatttgcccaaatgacaccatcgctttaaccagtatgaccgccgaaccagaggctttcggaaagcattccatgagcgcgggtagccacccgtatccagcgctgagttagcgatacctacgcacactgccagaccgtaggcgagagttaaattcgggcaagcgggaataccaaagaagaatagcagatacattattactgccattaatatcaccgcccgacgaccaaacttatcggagatcacaccgaagaataaaatactgatcaatcgccccaaaccgataccggaaattaagtaggcaatgcccgcgttgtcagtggaaaacttttccgccagagatgacatattttgggcaagcgtaataacactaatgccgtgcaggaagtagctgaagtaaatacaaagaacagccaggataaatggcgtgctgaaagccttattttgagacattttcacagctccttgctgaaagataatttcgttaccgtacgtattgttctccgacggtttacataattactatactgaagatgattttccctgggtacatggcataaagtttatgtttccaggaatattgcatgtcatagtttgtttttgatcgcgattttccttagttagcgcagaaagagttatttatccgtaagatcttgcatgacctgaaaagaatattgcattacccacccggagcgacattttcctttagcgagtgatgccgcgtttttttgcggctgcgtaacgcgataaacagtgccagtaaaaaaccgatggcagcgatggcggtatcgaaccacataatatcggcaatacttctttgggacagatgagccgtaatcaacggaatagtaaaggtcgcaatactgcccgcactgtaatagatccctgtagctttacctttagcgtaagggaaacgttcagccattaacgtcaggccaatttgcacaacacctccagcagaggtaaaaccaatgacaaaagcaaatattatcaccacataaaatgtgggatgcaggcagacggtaacagagcaataaatgagataaaggtgt

SEQ ID NO: 3869 - DNA, 1046 bp, Arabidopsis thaliana
gtattactttgaccacgtgtgtagagttggaggcgaagaagaatctaacccttcctagagagaacaccaagaatatattgactaattcattgaggaaactataccagatttcatttactgatccgaatgtagcggcgagtcatatctcggatttcggtaaattcaactcttcagcaaattctttagtcatcttcaagaaaccttccatgtgaagttgcttccattcctgtggaaagtacaatggaaagcatatatatacatacacaattcaaacaagtaatgatccagagagcctaatctatgaacaaattaagatagctaacctcgaaatcccatgtcccgtataggtcaggatcatctttcttggcccaaacgtaggtttttgtttgcagtttctcgtctgaactatcctgtaaacatatatatcaatatctctgcattcaaatcaaatatagagaacaaatgaattgttcttgttcttgcatctttgaatctttgcaaaaacaacaacacatttttttctctctatagaaatggatggagaatgaatctgagaatgactcactgttaacaaaacttgaacattctctctttcatactcaacatcctcaaactcatctaaaacattaagttcatcatctgtgattccaaataacacctgcacaacaacaatatcaaaatttcccaatccttaaggcatgagtaagaatctgattcggatcctgacctttccagagactttatcagacttagctggtataatcgccggataaacacgacctttgatgctgaatctatggctgcaaaaatctcaaaatcgccaatcaatttttttcaatttcaacaaagaaaatcgattttgcagagatggaatcgtacaaatcagggagggttgcggaacgggtttgagggatacggttgaggaggagacgaacgacgtcgtccgccatgagactgccgtagacgaagacactgtgcattgtcactgtaccactcatcttcttcctcttgacttctgcgagctttcgattatgtgagacttgtga

SEQ ID NO: 3870 - DNA, 453 bp, Arabidopsis thaliana
tctaagaatctagtataggttatggttttgagttcaggatttaaagaatctagttgagttttagggtttaacagaaacaaagaatgaaacagctaggtcagaatttaccttgagaattgcaggagagatggaattaggtcctctcgatgagaaagtcgcgaccctttgtagccacgggaagtccaaccaacgttcttgtaggttgaatcttggcgacaggtgatctacaaaaccaaccatttgatatacagaagcaataactaggtaatggttacaagtagatgaaaatatgtatgactgtaatatacctagtggaacgtatgtagaagagtatatcagttccaagttcgtaatcgacagcaaggcaggggaaaccgaagcatggactaagctgatggcccggatttcttgcaacgatcacgccgtagccatcaagtttaactacatctgatg

SEQ ID NO: 3871 - DNA, 705 bp, Arabidopsis thaliana
gtaggacaatatcagccattgatgcggatggtaagctacggatatacacaccagccggctctaaaacgtggatgcttgacccatcagaagttgaaaccatagaagaagaagagctcaagattggggactgggttagggtaaaggcgagcatcacaacacccacttaccagtggggagaggtcaatccttcaagcacaggggtggttcacagaatggaggatggagatttatgtgtatctttctgtttcctagacaggctatggctatgtaaagccggggaactggaacgcataagaccatttagaattggagaccgggttaagataaaggatggactggttacacctcggtggggttggggaatggagacccatgcaagtaaaggacatgttgtgggagtggatgcaaatgggaaattgagaataaaattcctgtggagggaagggcggccctggattggtgatcctgcggatatagttctagatgaaacttctggctgaatctcccaatgtatgattatgttttgaatctggaagattggtcattaggctatgcatgaggctgctctgtccattgtaagacataaagctcacagagcccttgtgccaacagctcaggtaatctatatctatctctcatgatgatttattaatatttttgttaataaagttacaactatagagtggtaggagatatttaggatgt

SEQ ID NO: 3872 - DNA, 1267 bp, Arabidopsis thaliana
cgataaacccaatgaatacgaaaaagcaagcagtggtgacccataggtctaagctccaaggtctgaggaacacccatgtgttcttgttgtccttgaggggtaccatcatagacactccagactctgtgtacggtagcgtgaaatcgacatacaatgacctgtttgctactatggttacatctcccacaactgcgtcataggcctgacccgaatgttaatgatatgttagaaatcacatataaagaaaaaagacatgatccacggtgaaagttaaagtaaaagtaaaagaaccatagtagaaatagacgaactaaccccggtgtatacttggtataccatttcatcatagttctcatctggagacaagaaagcaatatatttaggaatgacggagtaaggcaacttcttaagaacagcttcgaatatctcaacacagcaacccgttggggtcattgcgttactgatcggatctatctttgcatccacaaattctaagaagcctttcttcactggaatgcccactctaagcatctttccgtttgttggaatctgccaacctttcggaacatctttcgacttaccgggccatatcaccggccccaacctctcccctaaaaccgacgtagtgttttttgactttgcattaacaattccattgcttggtctccataatccaataattctctcttcacttccaataatattgatgacgtcaaacactgatgattctagctgcccgttaatgagctcaaactctccggctaaaccattgaatcttacattcgaaagagccttaagaagacttggaccgtagcgagagacccctaatgtccccaaatttgtcttattatttcctgaagcgatcggatgatcataccgcaagctctttatattggttttctccacggccattgctaaggcagtgatcgaatcatatgcccttaacgcaaaaatgttcatctcttcatcattccccttcttaggaaacattttttcccatctcaatctgaaatttttgagcttcttcgatttggggatatggctccttacacccaaaaccccttgcatattctccaagctgctaccgcgttcattagatttcaacaaattcatcactccatctgtcaataaccatacatatccttcctccatcataccaatctctctagctttctgaaaaaaaggaaaaccgagagttggtggcatgtggacaacgaataccctcgtctgcatcgtcattagcttataaagctccttgagaatttga

SEQ ID NO: 3873 - DNA, 817 bp, Arabidopsis thaliana
tgccttaccacaatctgtttgggatttgcataacaagcttaggagtgtctttcctcatgaccaccgtgtcgaaagggttcatagagactaagtaaccaccgtctcgtgtctgaacaacgcaaccaatgcctttaccgagatccgagaggtaattctccgattcatcgtctacggattcgccagaccgcagttcagagatgtccattttgtgctgataaaatttcagcttctcggtttcttcatcctcaagtaactgaagaaactcctttgtcacagtttgttcctcttcatctagcctttgtgactctgtttcaccatcacctccatcactctcgtctttcatcatcgattcaagcgctttgatctgctttgcaattgaatcaagctcggtgagtctcattatgtgccgtggatcatcaacattaacatgttgttccttcatctcaacagatctttcacctatggttccatcagatttctcagtttccaagtcatcatcaaactcaactcctttatccacaacttcaaaatctggttcctcttgatcatcttcagctctctgttccggtttgtcgtttttctgaaccggtttctcctcgggtttctcctcaggttcatccagattcaaatgctccatcccgtgaaaatccgaaactgactccacaccactcgctggcgtccacgcctcgctccggctcgtcattttagggctcggaacactaaacgacgtcttcgattgctttcgaccgaagatattagcgaaattcttaggtttactactcggtttcatcccgaattcgccttgtttactgtaaat

SEQ ID NO: 3874 - DNA, 644 bp, Arabidopsis thaliana
ggagtaaacatactcgcagcgacttctccaaatgatacattctatgacaaaggatttgctatgaaatcaggaacgtcgatgtcagctcctgttgttgcaggaattgtagcactcctcaagtctgtgcaccctcattggtcgcctgctgccattagatccgccattgttactacagcatggagaacagatccgtccggtgaacccatttttgcagacggatcaaaccgtaaattagctgatccatttgactacggaggaggcgttgtgaattcagagaaagcagcaaaccccggtcttgtttacgatatgggagttaaagattacatcctctacttgtgttcagttggttacacagattcatctattactggactcgtcagcaagaagacagtatgtgcaaaccctaaaccttcagttcttgatctcaatttgccttcaatcacaatcccaaaccttgcaaaagaagttactatcactagaacggttaccaacgttggaccagtagggtcagtttataagcctgtgattgaggctccaatgggtgttaacgtgaccgtgacaccaagcacattagtgttcaatgcttataccaggaagctctcgtttaaggttcgtgtcttaacgaaccatatagtgaacactgg

SEQ ID NO: 3875 - DNA, 640 bp, Arabidopsis thaliana columbia
taaagcattatcagaaaacactaattgataaaattaggtcaaaattggagtgagtacatacattacgagaaatatcttccgcagctttttggagatcggaaagcacagagaagccagagaaaccccaaccccaaccaccggtactcttcggtggcgcgtccacatctgccactgtcaatttctcaatctcgggctcttctccacgaaccggttcttctttaaccagagatgatttctcctcgtgcatttgcttgtcttcttccatcgttgttagcgatctcgagatcaaattagagtttcccaaaatcggatttaccagaaatgagattagggtttgtgtgaagatgtcgaaggaatgaaatggagattaagattttcgaatcgaaaactgtaaatcagttagctgatactcaaaagacttgaccggaaaatcatgcttatgcttcgtcgtgcagcaaaagcgtcctcaaccatacggtgtcgttttgatgacagcctaacttatttaaatcctttttcgttggcccaatgaaccaagacccaatgggccagtatctttgctaaactacgtcacccaaaaacagagctaggataaatattttacaaaattccacagttttaaacattaacattttagacg

SEQ ID NO: 3876 - DNA, 769 bp, Arabidopsis thaliana
catacctgtacaagttggttgtagacagcatcatggcaaaataaagtctgaacttcagacaaaaaaccctcaatctctgtatcttccagttcatcctctatattcatggctagtatacgagtttcactgataaaactaactacaaggaatgtatcaaaggcttcatcaattgacgatttcaacgaccacattcctttgatgccttgaagttccacggacgcctgcaatatacagcagagttttattagattacatcagatgagaatattgcttacatgacactgagacaaattgacaatcctaatatacaccaaacctgttcatttattcctatcccattgcgaactatgcgaagagaaccatccttgtatgctccagagcaagttacaacctgaccttgcccctgtctctcaaggtcaactacacaaaaatcgacaataggccccaagttgacatacttttctaaaatttctacatatgacccttttgcatccggttgcaggtttagcttaataagctgcaataagaaagtaaaaaatgaaaacgtttggatgcttcaaagcttgtatttattagaactcgaagaaaaataacaattgaaacacatataactaggatagtggtaaccatagaactatataagtttacattcttcaagaaaaatatctttcaaacacgtaatgagaaacttattcaatcctagcgtacctgtgaatctccatagcttgaaccgacaaagacgacagcattgtccagatacgagatggaa

SEQ ID NO: 3877 - DNA, 1307 bp, Arabidopsis thaliana
cttttttctcttatggattctcatcttctcatttccccctttttatcaattgccctatatttggttttcttcttcctcaagaaacttaatcataagctttttagtagattgggatgaatattcagtagcaatgttatctttattattaatccatcattaacaaatccagtagattgggatgaacagagtcagaccaagtcaagcgaccaaagtagtagccagtgttcactctatggcgaacacacggactttgaacgagagcttcctcgtcttagcgttgaatactaatgtgcttggtgtcacggtaacgttaacacccattggagcctcaatgacagccttataaactgaccctactggtccaacgttggtaacggttctagtgataataacttcttttgcaaggtttgggattgtgattgaaggcaatttgaggtcaagaactgaaggtttagggtttgcacaaaccgtcttcttgcggacaagtctagtaatggatgaatctgtgtaaccaacggagcacaaatatagaacataatcgttaactcccatatcgtaaacaagaccgggtttcgcggctttctctgaattgacaacgcctcctccatagtcaaatggatcagctaatttacggtttgatccgtctgcgaaaatgggttcaccggatggatctgttctccaagctgtagtaacaatagcagatctaatggcgagcggagaccaatgagggtgcaaagacttaaggagtgctacaattcctgcaacaaaaggagtcgacattgatgttcctgatttcataggaaatcctccgtcataaaatgtatcatttggagaagtagctgcgagtatgttcactccaggtgctgcaatatcaggctgtatcagagaacaaaacaagtctcagtttaatcaacaaactagatgaaacttcagtcagaagtaactacatgaagactacatttaggtatacatttataaaacctaaaatttaacttacaaagcaaacatctttgttcaaagaatctggtaaagtttgagacttatcaaaatcagagaatttagtagctaagcttggaatataccttgagaattgcgggagagatggaactaggtcctcgcgatgagaaagtcgcgacctttgtagccacgggaagtccaaccaacgttcttgtaggttgaatccttgcgagtggcgatctacaaaaccaacaattggatatacagaatcaataactattctttgtcaaccgtattatttttaacatttaaccaatataaaccttaaaattttgggacaatgatccttc

SEQ ID NO: 3878 - DNA, 901 bp, Arabidopsis thaliana
cttctctctggcttctaagaaaagttaaatcgaccatctgagtgtttccatgtttggttttctaattgcagctagtaaagctgaatctacaccctgatgcaaaaggctcatatgtagaagtcttggaaaggtatatcaacttggggcctattgtcgacttttgtgtagttgacctcgagagacaggggcaaggtcaggttgtaacttgttctggagcatttaaggatggttccctccgcgtagttcgcaatggaataggaatcaatgaacaggtttgatttatgcgcgaaatctcattgtcttgtatgcacaattttctcatatggtttctatatcttaaaactccgctctattacaggcgtctgtggaacttcaaggtatcaaaggaatgtggtcgttgaaatcttcaattgatgaagccttcgatacatttcttgttgttagctttatcagtgaaactcgcatattagccatgaatcttgaggatgaactggaagaaacagagattgagggcttcttgtctcaagtgcagacgttattttgccatgatgctgtgtacaatcaacttgtacaggtaagaatttctaatgctttggggttttcaaaagacaattaaatttgatagctgttatagcttagttgtctggtctatcctctctatttgtgaacatgaattaactgctgccttttctggatcaggttacctcaaattctgttagactagtcagttctacaactagagaattgcgggacgagtggcatgccccagctggattcactgttaatgttgcaactgcaaatgccagccaggtttgtatttcattctcgatttgatttagtagttttgtacctagctgctatctttatatttttcatggaagaggaatctaactttgggtct

SEQ ID NO: 3879 - DNA, 507 bp, Arabidopsis thaliana
tgcagatctagaggatcaacgtccgccagtgtgctttaaagagtttctatgcctttgcttgtagtttaatttcaccagacagggaaattttttgtcgaactccattttatagataataaagtatattccagataacaaagtatttatagtcgaactccatttgcttgtagtttgattccataatgtatttcatcggtgttgtttttcttcagacatagtttcctgtctactatattgttctatcctatcttttcccctagaatgcactaactactatctttccttaatcaggttacctcaaattctgttagattagttagttctacaactagagagttgcggaataaatgggatgccccagctggattctctgttaatgttgcaactgcaaatgcgagccaggtttgtctttctcttttttatcgagctactatatttaacatttggcccagaaagaagagttctaggaagtatttatgatagtattttgattctgtctcaaacttg

SEQ ID NO: 3880 - DNA, 583 bp, Arabidopsis thaliana
actgcttaggaaatgtgaaaacaagctctttccaaacaccattatctctatccaaacttaccgtgaccgtatatacgttggtgacattcaggaggtgagtggtagatcctttttcctatatattttacttactactgtgtgctttgttttatagaaatatctcatgtagccttttcattatcgttttgcagtctttccattactgcaagtacaggcgcgacgagaatcagctgtacatatttgcggatgactgcgtgccgaggtggctgacagcatcgcaccatgtggatttcgataccatggcaggtgcagataagtttgggaatgtgtattttgtgcggttgcctcaggatctgtcggaggagatagaagaagacccgactggcgggaagatcaagtgggagcaaggaaagctgaatggagcaccgaacaaagtggatgagatagtacagttccatgttggggacgttgtgacgtgcttgcagaaagccttcgatgatcccaggtggatcggaatcgataatgtatcggacagtgatgggtagcataggcgcagtacatgcttcacatcccgtgatgatgt

SEQ ID NO: 3881 - DNA, 637 bp, Arabidopsis thaliana
caatgcattttcacctgtttgtcagggccaaaagcccagatggaacgtgcagcaagtaaatcccagtcatatttcgtcctgaagaagtcaccaagttgtactctgttccagtcaatgcttacaacgccattctcaatatcctctgcaagtcctctatccaatggctctgcaaatctttagcatgaaacataatcagtcacaatgagcacaataagaaacatcgcagtctaatatctaagggataatagtggaaaaaggaatatctcttaccatagttagtttgttctttttgtttggtgtctcagcaaagcacttcattgacgaagattcaaccactgtctcacagaaggagaccacaggatctgcaacctacaaatttaagaaagcgagaggaaacaaacaaatcttagtaatcagttgcacaacgaaatcatagtcatagagccaaattagagatacctttacttggacctctgaatagagttccctgaggtccttgatgatggaatccaagtacaactcacctgtgcctagaatagtatgttccccagactcctcaactttggttatcgcaaggggatagcttttcctaattttcctaagcccttccaccattttaggcagctcactaggattc

SEQ ID NO: 3882 - DNA, 1037 bp, Arabidopsis thaliana
aaaacaaacaaacaaaaaatcagaattcccctaataatgtcttcggatcgtcacacaccgacgaaagatccaccggatcatccgtcttcttcctccaaccaccacaagcaaccacttcctcctcaaccgcagcaaccactcagccgctatgaatcgcagaaacgccgcgactggaacacgttcgtccaatacctaaaatcacaaaatccaccgttgatgatgtctcaattcgactacacgcacgtgctaagtttcctaaggtacttagatcagtttggtaagaccaaagtacatcatcaagcttgtgtcttcttcggacaaccggatccaccaggtccgtgcacgtgtcctctcaaacaagcttggggaagcctagatgctttgatcggacggctaagagctgcttacgaggaacacggtggcgggtcacctgatactaacccgtttgcaaacgggtcgatccgggttcacttgagggaagtgagagaatctcaagccaaggctcgtgggattccgtacaggaagaagaaaaggaggaagactaaaaacgaggtcgttgttgtcaagaaggatgttgcaaactcttcgactcctaatcagtcgttcacttgataaatttatcatataaaaaatttccaatataggtaatcaattttcaattctcttttttttctctctaatttaaagtttcgtatgatcttttaaaaaaattgaaattattctctttggatatctagactacaaaacttataatatcggattaataatagtgattgattccatcaaattttcccgattttctattgtcacttacttaccctaatgcgtgtgtgtatatatatttctaaactaattttgtactcaaaattggatatgattaagagagaataatatatctttcaaatgtagctttttttgttattaattagctataataattagagtgtgtcccaactgtgaatgtatttaaatgacaacatttctgtacgttgcatgcatcatgatgtataaacatacactggaatacatgttgaaat

SEQ ID NO: 3883 - DNA, 802 bp, Arabidopsis thaliana
ttattgtacataaagttctgaaactcgtttctgctttgtttcagaaactctgcaagtggctggacaactcttaatggctcttgaatacttgcacgccagtcacattctccatcgcgatgtcaaggttagttatgatatctgattctgaaggcataacacagttattgataatatatcttactaatacaaaatcttttgatccagtgttcaaacatattcttgacaaaggatcaagatatacgcctaggtaagatgctaagcaaatatgttatttttctatcctttttttagtccgtgtgacaaaattaagttcgataacttctgcaggtgatttcggacttgcgaagatcttgacatctgatgaccttgcttcttcagtaagtatagactttggacttctcaaatgattttgtttctgttctcaggctcttactatgacttgttttaaatcaggtggttggaacgccgagctacatgtgccctgagcttcttgctgatattccctacgggtcaaagtcggacatttggtcgctgggtaagtttctcttccatggcttagacagtaacatttgctctagataacaaagtattcatctgagtcttttcttctctttttgcacttgcgttcaggttgttgtatgtatgagatgacggcgctgaaaccggcattcaaagcctttgtaagttcttcttcattcacatctttaagttcatgttcctttgccttatgttcatgacattgtgatttttgtacactttctgcattttaggacatgcaaggtctgatcgacaggataaaccg

SEQ ID NO: 3884 - DNA, 774 bp, Arabidopsis thaliana
cgttgttacttgttatgcgttcagaatttcataattttagtatttctttcagtcggccttgttctaaagatatttctcatctttttgtcgacctatagatttttctcatatataaatactaaaaaaaacttgccactacgtaaaatatttgaagacaacaaccacaactgtcggtaggaaaacaaaattgtgaaacaccaaacaaacacgtatgaaaacatctcaagaacagcatgtatgcggttcgacagtagtacaaactatcaatgctccgttacctctagtatggtcgatcctacgtcgatttgataacccaaaaacatttaaacatttcgtaaaaacttgtaaactacgctccggcgatggaggagaaggctccgtccgtgaagtgacggtggtttccggtcttccagcgagttttagccgagaaagattagatgaacttgacgatgagtctcatgtgatgatgattagcattataggtggtgatcatcgtttggttaattaccggtcgaaaacgatggcgtttgtggcggcggatacggaggagaagacggtggtggtggagagttatgtggtggatgtgccggaaggaaatagtgaggaggaaacgacgtcttttgctgatacaatcgttgggtttaatcttaagtcattggctaagctctcggagagggtggctcatctaaagttgtaatttttagattatagttttagtttttaagaattataatcaggttcaactagcaatagtcatggtcgatgggaaataag

SEQ ID NO: 3885 - DNA, 666 bp, Arabidopsis thaliana
ttgggacatatacagtttaaaaaaagctgggcattttgatcataattttggagttttatatcaataactaattatacaaactgctatgaagcattttcctctttttagcagacacagttctctagaactaccctcttattactgcatattacaaaaaaattatattacaacacccacacgatttgttcatcgccgatgtcctagagccaccaccggaatcctgaccttatgccctcggctaccttttaactttacctccccgaagctgtatactccagaaaccgatctcacggtcatagtgactgagaaggttctagtagcgcctggtctgagtgtcatcgctggtgggttcacttcgatggcaatagacggctgcatccttgctgttattgtgtatgtttcttctacctctgctacattagtaactttccttgttactgtctgggtccccactagatgagaaactgctatagatggtgcattaaagtttgaaggatgtttcatgtcgtagttacaggccgtgtttgtgtaatttcttatctcgtgggcgctgatccctggggttgtgcataagaatcctagatagtcctcataacctacaagagaagattgataggtcttatcaaccagatatcaaaaatctttggtacatcattgatgagaaat

SEQ ID NO: 3886 - DNA, 550 bp, Arabidopsis thaliana
ttccacttttggatttacctccttcacctccggacatacctccttcacttccagacataccttcatccccagacgacataccttcttcaccttcggacttaccgcctttacctccaaatttactttttccacccccggacttgccttttttaccaccgaatttactttttaacatcttcttacaccaagccttaagcccacctttagactttgcctttgactttttgatcagactttgagctcctcctgctcctgctcccgaattcggtggaagtcctgccggaggtggattatccttcggctttactcccatcctacgtctgcatcacacaaaaaagtatgtatatatacttagagaccaattaagaaaacgaacgaagttcaatatttataaagtacgttaacaaatgaagttcaatatacttttaaactataggtttatgaatattatataattaagcataaatctcgagtgatctcaatataagctgttataataatcttacttaacaagccacatgatgagaccaagtgctgtcgctccaaaaga

SEQ ID NO: 3887 - DNA, 1184 bp, Arabidopsis thaliana
ctagctagaacagaacacattgaagaattgcttatatgattgaatactattctaagagtcagaacagagtaaaataatcaaacaaaaaaagatcatgaaaagaagtaacaccaatcaacgcatgtgcattataaatgaatactaatatttaatgaaatgatttcaacagagagaatgaagagtgacaagaacatacagataatgaagaaaagatgtcctaaagaagagacaaaagaactcacaatggggtcgggagcatcgtcttgtttgcacatgacccaagggacaccagtgcctagccccaccgccatcttagctgcccagttggtgtatgaccggcccggtgcaccaagctcatactccattggtccatattcattttcaatctgtcacataacattccatttgatacagacaaggtgtctagtgagtctcactgtcactcttttgtgggattgttaaaacacacaattcacttgattggtttttacctgagagagaattataggaccgccttgagattcaaaaagcctctcagctttcatcatgttaacaatcttcgtggtgaatctttgcatttgagccttcaaatggaagaaacaaaaaacaatcaatgtttttaatcccaggagtcaaacaatggtcaatgaacaagtgtgaagtttcataacttcaaaatgaagatagattagtctttaagaacatgtctaaccttgaaaggaccgttatctgttctgaagctaatccctggaatgtacttaagccaaacaggaaatcctctgagaaatttaaacagaaacaaaacaatcatattagaatttctaggaaaattcttcaccttttaaactttctatttataggtttaaggtacaataaattagctataattacccgaagttccattcagcacagacataaggaccaatccttagatgaagatagagtccagattgttggaccaacttgacaaacttaaccaaatcatagttgccctcgaaataatactgcagatgaagccaaaacacacataaaaatggaatccaatgaatcagtactttattcacaaacataaaaagatcaaaaataagatttttcttacttttccaggagatggctcatgcccattccagaacacataagtctgaatcacatctaagcctccttcctttgctttccgaattaga

SEQ ID NO: 3888 - DNA, 497 bp, Arabidopsis thaliana
tagactctagaggctcttctcactatgcactatctgtataccttgagttggtatgaccatgatgatgaaatgttaattcttgttttacagcatctcgcatttattttaatgatcgtatattgtatgtctgatgcaggataagcttaaagggtactcaaatatacagtattcgccttcacgagaccgtcaatggcatatgtatagtgttacagacaggccagtgccaatcaaaagaatgttccttagatctcttgttcgacaaactacaatgaatgatgggtttctgttgcagcaagggcaggactaccaacttagccaaacagtgctctccatggcgtttacatcgaaatgcattctgaggtctttgatgaatgcaatggaggaactggaactgaatgcacataatgctgccatgaaaccagaccacgcacatatgttcctatgcatactacgtgagcagcagatagatgatcttgtgccttaccccaggtttttat

SEQ ID NO: 3889 - DNA, 1014 bp, Arabidopsis thaliana
gatgcatatatatatatatacgcgacgactataaatataaagtacgtactttgggactagctagagcaattcaaaacggtatttatttacaaacacgtatatatagattataaaaagaactacataacttaagtacgtagaggctcatgttggtattagtattatgtatatctctatgaaacaagaactagtacaaagaagtagtataagtttgttcttaaaaaagagtttctgttgagatgggtataataattatattatataacccggagagggtgtcttgtaaaaagaagaaaagtgacttatcatctataaccctagaggagagaaccaagaccaaccctctcttttttattcctttttgtttttcttcctctttgtattaattttcatccttgttatcatttcaccttagactaatctatcttatacctctttcttcaacaattgctaattggtttgatataggtacggtggagatagagatagcatccatggagatgtctagaggaagcaacagttttgacaataagaagcctagttgccaaagaggtcactggagacctgttgaagatgacaatctccggcaactcgttgaacaatacggtcccaagaactggaattttattgctcaacatctctatggaagatcaggtaatcaatatatatatattgatatttctttatatatatgtatctaatcatattacttaaatctatgtgttttataaataattgagcgtcaatatggaatcatagggaaaagctgtagattaagatggtacaaccaacttgatccaaacatcaccaagaaacccttcaccgaggaggaagaagagagactgcttaaagctcatcggatccaagggaatcgttgggcctccatagcccgactgttccccgggaggaccgacaacgctgtcaaaaaccattttcatgtcatcatggtagacgcaaacgggaaaacttctcttccacggctacttctacgttcaaccaaacttggcatacttt

SEQ ID NO: 3890 - DNA, 444 bp, Arabidopsis thaliana columbia
gcaacaaacctacttggtctgaactgaaagatctctgattggtattgagggaggtaagttgcaatcttttctctattccaagacttggaaataggacatattaagtccttaacagtcatgagttgtgtctcttgagtaggaggacccattggggttacggatgatgagagagagatccatggtgcattccaaaccagggtatcagctccagaaccaatcgatcttcctagttgggactagcatcaagagcatagatttataaaactagacatgaatccgaaacggaagtgtttaaacaaaacatattgatcacttcgtggcttttcaaacaaattaaaattgttacagaatcttagattgattaataaaaaaagtgagaggattaccaatactgaagtagagtcataattgtaaagaaatcgatgaagctgtatgtgtgaaaaa

SEQ ID NO: 3891 - DNA, 526 bp, Arabidopsis thaliana
gggtaccgagctccctgcaattgcctcatgaacattttttggtaatagctctttgaagcaaatggtaataggcgctgcataaagacatggcagtcatggcttttcatacccgaaaacttttggccttgctcaacattctttgaaagttttgacacataaccatctgtgaattttacatcagatttaacccactcaaaaagcgccgtatttgcttccggggataatctaaaggtaggaactggaaccttctcatctctagtaagatgcaaatcaggtcgcgaacatatatcaggcaaatccaatcttgtttttaagttgtctttacaacgtcgctgcacattcaaaagtgtatgcatcatgttatcaaaaaagttcttttcgatatccattacatcaaggttgtgcctcaacagaagatccttccagtaaggaagctgccaaaaaatgtttttcttgtgctacttgtgattacccagatatcatctcgcatattaacggggatgtgcaattaccccacatggacagt

SEQ ID NO: 3892 - DNA, 533 bp, Arabidopsis thaliana
aggttgaggtggagcatctctgtgaagcctctgcaaagcctcagctgcgtagtagcccgtcctggtgctatattccccagatttcgtggggatccagataaatttacctctagcaccgaaacgactcggtctgagctgaaagatctcggattggtagtggggaaggtaagttgtaatcttttctctattccaagtcttggaaataggacagattagatccttaacagtcatgaattgtgtctcgtgagtaggaggtcccattggggtgacggatgcagagagggagatccaaggtgcattccaaatcagagtatcagctccagaaccaatcgatcttcctagttgggacttgatgaggtctctgcctaagcagatgcccttccagccatgggaagctgagtttcgcgtcgggcaatcaaggaaggaggaggttctgcagtatttacccaggagagtcttagccaacaggcaagatggattcttgaggatccgcagctcaccttagcaagtaaggcatcattgaagtttgaaat

SEQ ID NO: 3893 - DNA, 596 bp, Arabidopsis thaliana
  unsure (1)..(596): unsure at all n locations
tttgaatgtgcaggggcgtagtaaagacaacttaaaaacaagactggatttgcctgatatatgttcgcgacctgatttgcatcttacgagagatgggaaggttctcgttccaacttttagattatcctctgaagcaaagacagcgctttttgagtgggttaaatctgatgtcaaattcccagatgattatgtgtctaaactttcaaagaatgttgagcaaggcaaaaagttttcgggtatgaaaaagccatgactgccatgtttttacgcaacgcctattaccatttgctttcaaagagctattaccaaaaaatgttcatgaggcagttgtaggtatgtgtgataatttaattaatttagttagcaatatatgtaattatactcataatctgctattattggaactttcttttgtgatctttgcacacggactcttacggaagacggaatagatcatctagataatagcattgcgatcttattgtgcaacatcgagaaaattttttctcttttatttttcgatgttatggaacatctacccanccgatttaccacatgaagcatcccttggaggtccagttcaattttggtggatg

SEQ ID NO: 3894 - DNA, 937 bp, Arabidopsis thaliana
tccactcacatgcaaacacatataaatattaatgaagacacactaacattttaattgcaagacaagtagacaacctaacaaagttttgttgtggacttggtctctcatcttctccgagagagaaagagagagagagacagagatcaacaaaatttcggctcatccaaggctgtgtattatcaacataagccgcacacaaacgaaatgggattaatggatacaagatgggaaaccatagttccatttattgttatggcgttgatggaggcatgtaccattgcactcaccatcttggctaagaccgcactgaccggtggcatgagccctttcgtgttcatcgtctacaccaacgctcttggctctctccttctcctcccttactctttctacttccatagagatgaaaggtacttaaaaagcatgatctatgtgtttatacatggctttctcaatttgagatattatgatgatatagatgttctaatttgtttacagtgacgatgaacccttcctcacgaaaccttcccttgttcgtatcttcctactcggttttacagggttagttccctttaaaactttatatatatcattgtctatctatttacataagattcaatgatatattttgcattcctatttatctcccaatttcattcaataactaaatatattgggactgtaatagctgtaataattaaaaaaaatagtaattaaataaaaaaaattggaacacctgatttcataattaaatagttatattagagtttagattcttaaattaatatttttcttgaacagggtgtttttgttccagaacatggcatttttggggctaagttatagctctccaattgtggtatgtgccatgggcttgcagtcacctgctttctccttcttgctatctcttgctcttgggtaaactaaattacttctatta

SEQ ID NO: 3895 - DNA, 541 bp, Arabidopsis thaliana columbia
actgaaaccactccagagatatctagtacagctaccaccaaacagctgattaagttctgaaataaacgtataaggaaatcaccaaactatatactttgtcaaatcaaggaaaccagctaatggggttaaaatgtcttacttgataaagcatcaaagagacccctgcgttgaaattgtagctggagagaacaattttgttcaatataatcatgctgcaggaagagatacagtaagctgcaccagacacaagaggtcctgactgtttcacagacccgtggtcacgcctgttatctccatcaaccggaagatatctccgtctccatctaagaaaccttgaggaagaatcaagaaattcaaatgcattattccctctataaccacaacaaatctttagagctcataacactgaatccgctcaagaaaacaaagtctaagcatcttacattacctttcactaaaccatctatgttcggaactcttctgatcgagaagttgaaagacaacgtcgtttttagttttactacgattatcactcaagtga

SEQ ID NO: 3896 - DNA, 490 bp, Arabidopsis thaliana columbia
ccctgattaattgttgagatgaagagtaacggtgtaatggcaatacaatcacagctcgtaaatctgcaaatggtatcaaatcatcagcgagtggaagaagaagaagctgatcatgaatacgatgaactccatcagtttcttgatatcattgacgataggcaatcatttggggattctaaagaagcgtaggcctcaaggtaggggttttttcctttgtaaaactatgaaatatgtattttcttcttcttctgtagatatggtgattgaattggagtatattggtggttgtagctctggtggatcgttgaaggaacagattgatgaaattggagagaatgaattgagaagtgcagctacttgtttcagtctaaccagtgtgaataattgcattgatttctcaattcgtgatccctaattatgctctcgaaattttgttatacttttgttgacattttattattatcttttagtcagagacttaaaggttatg

SEQ ID NO: 3897 - DNA, 642 bp, Arabidopsis thaliana
cattacaggagagaacaatctgctcaaatctcccatcaactgggacagctgttctcacaacaggtggatatcttcctaatctgtataccaagggcatggttttcactttgaaacccgtgtcttcgagttgacgaaaacgattttgaagcacatgagtaaacataaagtataaatacctcaagggcttgcgcacgacgatatggtataacctaccaggagcatatagacgccttgcatctttgagcttcctctcctcgaatgtgaatgtatctttcaaacatgtgagacacaacaagcatggcaagctgaaggtttaagatttatacaagagcatgagatgtttttcatcgtctaaacttaggcttataacataataactgcttttgaatttcatactgtttcattaccagataattgacttgaagacattctccagagctgtggtagtccgaggtaagaaatcatcctggtttatccagagcagcacgtaaaatggatcagaagagtcacctaaacgagtcaatagaggctgatatatacaatcatcatacctgtagaacaacagagttgatgacatctgcatatgtcactgctagatggagagacatacatcttggaggagcaatagcaaagcatctaatc

SEQ ID NO: 3898 - DNA, 856 bp, Arabidopsis thaliana
tgtgtttagctgtcatacaattcaatttatcatttttcttcttcatcacgtacgacgtatacacaaacacgtgatataggcatattattggttcgtaattcgtaactttcattgataatataatcgataatggtgtgtgtttaataccaaaatttacaagttgtaataaaaacagcaaatcgctaatgatgtgtgtttgattaataccaaagtttactagtggtaatgaaaacagcaaaacagactgataactaatctatgcacaaaacgttacaacacacattttttgtttacaagtagccttaagttgacacattaatcatatacaaatttaaacagaaaaacaagaagtggcaaagtgaaaaaaaaacaaaaaaaaaatccaaaattggtgaatctgcatgaatctaacggttggaattgatcgacggtgaagctaagtttctatggtgataaagtcgtcgttagaatcttcaatagtcagttcatcaacgacttcagtcatattcggtctctgatctggatcttctctggtacatctcacaccgatccttaaaacgttctcaatttcctcctccataattttatcttcagcggcggcggttaccaccatcggatgaagcagatccatccaaccaccttgttccaatgcggacgctaaccactcaaccaaatttgccccaccggctctgttcaaaccagcgtattgagacgggaattttccggtcaagatctcaagtaccacgactccgaaactaaatacatcagatttcgcagagacggttccatcacgatccgcttctggagatttaaacgcgacgagagattgagattgagcgtcgggattgattagttt

SEQ ID NO: 3899 - DNA, 659 bp, Arabidopsis thaliana
tgtgcatagaggctaacaagaccaaaaagagtgagaagcagctagaggcgagatccgttcattgctaccttgttggaagggacgctatagcctgaagaatcttcttccttggaccctgcattgcatcaatagagtgataccaacttcaagaaatctactaaaagaacagatcaatcccaatttgttttcgatccgataagaaacaaaaggaaagtaccattggtatgatgagatcttttagatcactttctttcatctgctttattgtggtcatatccacctgttgtcatattagtcaagtttgttattgaagaacaatgacgaaacagagctcagacaaaaaactaacatggaaaagcaataacgaacctacaatagccaaaatcacaaagctctaagataagaaaataatggtacacttacttcctctctcttaaaggcaagggagtattttccaagtccaattgaatttagaaagccatcaactgatagaggctcgtccaccctgttgttccaccaagtagatatacatgccatattataacatatgtataagaagaaggcataaagttttgactatctgatcacaaaggttttatgggtctaagaatgacacgaggtaaatatgaagtctcaaccaatgtatagaaagagtaaga

SEQ ID NO: 3900 - DNA, 589 bp, Arabidopsis thaliana
tatcgattctgttgtgagagaaaacgtgctatgtaagatcgtatttttcgaaaattatgatgaccctaggaagctaatcagttaaaaaaattggatcttgtaatgtagaaattgagctttttgtctagctggcgatgttcttggtttttaatctggttttgaggagagtttgttggttattatgattatgatcatgatgggtgatgatgcttttgttaaagttttgagcttttttatgtgggtttcgttgtcagggagcaagatgattacgaggtagtgaggaaggtggggagagggaaatacagtgaggtttttgaggggattaacatgaataacaatgagaagtgtattatcaagattctcaagcctgttaagaagaagaaggtgagtgtctatattacttcaattggtgacttatgattgatagcaatgaatggtgttgcttttacaaaaggttttgtctttacttagttttgattttgggttgcctttctgaatttgtatgatccttttacagattagaagggagattaaaatacttcagaatctttgtggagggccaaatattgtaaagctgcttgatgttgtc

SEQ ID NO: 3901 - DNA, 1033 bp, Arabidopsis thaliana
gaaaatcgaaaggatcccatgaaaaaccttcaacaatacagtaacataacaaccatactacctttcaatactctaatcattgattcccacaaaaataagagacactcaggaaccttaacagactacaagaataaatatacatagaagaaagaagagtgaactcatgcttaccagttccagtaaagctgccatggtctgagataggataccctcttttctgaccggaaagaggctgctggaccggcggtgtagtcggtcttacagaataatcagactccattgctttaccgataaatctcctcctgtctggactctctgaaggaggatacttcgcgggatagttataccgagctccaacaattgaccgtgtcccttctcctcccacaccaccgttaggacccattgacgaaaaccatcatcgtaggcaaaccccataggccgaaaacttccaccatggtgaggacccataggcttaaaatctactctatctgggggaccattcatctgccggaaacctccatctccgggaccatcaaaatccttaggagtgtcatcttcccagcgtcgaccaccattacctcctcctccgcccccaattccaattcgataattgctagggctgcttccacgacgacgacggtggcggcgaaaatcatcatcatcctcttcgaagcgtgaatctgagggacgagatggacctctgggatgggctcggtggttatggtaggaatcctcgtagccgccactctcatggcgatcccttcggtgtctgtccagcttgacgtagtggggaattgcgattccagtcgaagaaatcaaaggactaggagccctagaaatttgggatctgtatgaaaccaaagagagaagaaacgagtatcgaagatgatgaatttgattgaagatgagatcaatttagttgctcgaaattttgatttttttgtccgaatgtaaaaaagaaaaagcggtctagttacggtaatagtggttggacggtgatcagttgaaatttggaccggtagactttattgag

SEQ ID NO: 3902 - DNA, 798 bp, Arabidopsis thaliana
atccccttcattcaacagcagaggaaaaagtatgcatattattcatacttacttgctgtcctaacgtaaatatcatctgtactatcttgaaaatggaattgaagaatctctttccaatcttctggtttgtcctcgtaggctttgctgtggtgtctgcacaagaatgcggcaaaacagggttttttgtaccacaaagtaggtatgaaacaaaccggggccttctcctctcttctcttccttccaatgtttcagctcgaggaggattctacaattcttcgattggccaaggccctgatcgagtgtatgctctggggatgtgcattgaaggtgctgaaccagatgtttgctccgactgtattgaatatgcttctaatctgttattagacacgtgtctcaaccagacagaaggcctggcctggccggagaaacggattttgtgtatggtacgatactccaatagttctttttttggatcactcaaggcagaaccgcatttctatatccacaacgtggatgatattacatccaatttaacagagtttgatcaagtgtgggaagagttagcacgtcgtatgatagctagtactacttctccatcatctaaacgcaagtactacgcagcagacgtagcagccttgacagctttccagataatatatgcactaatgcaatgcactccggacttatctttggaggattgccatatctgtttaagacaaagtgttggtgactatgaaacatgctgcaatggaaagcaaggtggcattgtgtaccgagccagctgtgaggtgcatagtg

SEQ ID NO: 3903 - DNA, 1006 bp, Arabidopsis thaliana
ctcttctcccatggtcgtgatttgcaaatgggacaactgcacagctcacacccaacaagaatgacaggtccaattcgcaatgtgtgtatatctttggttccttcagaagctgtttgattccccatgctgtattacagtcttcttcttcctcaatcccgatcagctcgagaatcccatggtcaagaagatggtcaaaaggatactgtgaaggtttttcttgcttcaacttttggagattttccacaaccaagagaggtcggagtagtctaccagcatcagtgaaaattcttacctcattgtcatctttatctcgcttgatttccatctgcagagaacgtttcatatatataaacaatattcgacatagacacatctgaagcagaaaaatccaaagcaaataccaagtaacacaagaatatcaaaatatagcaagagatttgctgaaacagaagatacctcacgaggtaattcactttggcgccgcctgctttttaactccgcgacaaaggattcagaatctgcacataatccaacccagtctccattgagaagaactttatgtttgccaaacaatggtgtgcatgtatcatccatcagctcttccattccacaagcgaagagcttttccaccacagactccaaactttgggtgctcacaagtcccagaagagacatgttcttcacaagaccacaattttcaccgtctggagttgacaaaaagcatactctgccccagtgagaggggtgcctgtggcaacattacaaacaatgcagctatagttcagtttcccaacacgatttaattgtctaaccgctcacattgaaaaggaaccaaaatggataatctcaagagttcaacagatagattgaccaagggagaaagaaacaagaaagacagtatcagagttttttaatagcagtaacatctatacaaaataagtattatcacagacaagagactgcagaaacagtgatcggcatcatatactacattgaattaaagtta

SEQ ID NO: 3904 - DNA, 1329 bp, Arabidopsis thaliana
ggaaaatatgttgcattgatagtagttgagaataggagcgtaacttgactctacaagatgaggtagaaactgagggtggtgacaggtgattttaccaaagcggtgtgtgtaatggttaacactgttcttaagaagtgcatactctatagatgaaagaactacagatagcccgtgaaagcaaagctgatccagaggaactttaaagcctgaaggagcctgcctttctccttgaaccgttgatcttagcagaggtacgaggatcagagaactcgtaatacatgtctgtgaagaaattgtcaacaatgtcaagatacacaggacttctgatgcttgaatagcatcgaagcgcttcccttacatccaatgcgtgatccacgtctctcagatccaccatattgagatctttcatcttttgcgccaacgcgtcacctcttttctttgcatcctcgaatggctcagcgactttcttcggtttctttttatgttggttgttgagactcttctggtgtgttgtatctgccacagccgtgtcacaacagataacggtgtagctttctttggtttgggtttgggaatcttctggacagcggcggctgcaggagtaagggctcaagagaggagtgtcgttaggtaagtttttgtaatcactagagcagatagtggacttgatgctcccaagagtcttctttaagaaacgaccaactctctgaattgattttgatgtaggtttcatcatctttcttgctgctcatttttttgagaagataaccatatttatgtcactagggatctcaaaaggaaacctaacattgatttagtggcatgtagtagttgaagaagcaagctgatagtgtcagactttaagaaggtgtcatcttgttgattgtgttgtccacttttataggtaagcaatcgtcatcacattgataagcagtgttcaaaattggtcccctacttatcattgccaccaccactcactactcatattatatatactgtatgccagttgactcgaggtaatatcagaaccaggcccatgaagcccattaagaagcccatatttttggcggtaaccaatgaagatccattttgggtaggaaaaaccctaaaggacgctacacagtcgtcttctcggagccgcaaagatttctgtagagcaaactttgatcatcccctgcatctgcggcaatggtaatctattggcattttttttccatgtaagctcatgtgtgacttatgtgtaaccggtgctttggaaatgacagggtaaaggaacagggagctttggtaagaggaggaacaagtcacacacgctctgtgtgagatgtg

SEQ ID NO: 3905 - DNA, 596 bp, Arabidopsis thaliana
ctaaattattgtcaaatagaaggaaagaatttcgattctataaggaatttctgagtctagggaaatgttttaaaaatggtagcaaaaaatctgccaaatatttacaagagaaaaaatataccatgtgaccttactcggggacagtagttgaacatgggaggtatgaatttacagccataattttcttgatctttttccaaaactgattagttattttgaggtttcaagttccttatgcaaaatacctcacatgcatcagattcaacagtatgcagttacaatggtttacctggaaataaatatagctggaacaatagccgactgatgactgctcataatatcagcagctgtagatgagaagcttttgaacagactcgcacatgcgatctgggagcttctatcaccagagtgcagagctgcagtttcttcgattaagctttgagcttgagaggggctagaatacttcaatacaatgccgcaagcactcgaaaaggcacgttttgcagcagaacttttctcctctttggcaacaggaaacataagtctcagcagcattccagtgaacggctgtatctcggaacaactttttgaactag

SEQ ID NO: 3906 - DNA, 679 bp, Arabidopsis thaliana
atattgtttttttcgagtcagaaattgtaatttggagggttccattaaagtctatcaccatttttagtttatcaaaatcaaaaaaaaaattctgaatattttcatcaaaataaaagttatcacaaaagaaaagcgaatgttacttaaccaggctgtttaaaaaataaaggatttaagaagtttaattagtatgcactatgacaaaatgctataagactaaaataactttactaggataaattttaatctttcttattatagaaatagattaaagttcaaactcatcaacttaatcgtattggtccttttccgtctgggtgatcatgtccacagtttctaaaagaggcaaaatttgagcaagtgattccgccggtaaaaattgacggtggggaagccataacttatgaaaaagcgacaaatgcattacggcgaggagttgctttcttatcagctttgcaagcctccgacggccactggcggagagagttccttggaccgctctgcatgcttccgccattggtatgtttcttctttgctactatcagtttcgaaaattttatgtgtctgggatactttcaaatagggatattaaaggggttaacctcactcggtaccgaaaccatataaaatataaacccagagatctactttctttataaaaataaatcagagatttata

SEQ ID NO: 3907 - DNA, 896 bp, Arabidopsis thaliana
acaagcgaatttctgtgttcgtttgtccggatcagcgcattattagcctgcgttcgaagagagtgtattatgatccaatttgtttttaaggaagaaacactaggaagaggaatattctcaatttagaggatggatctataacctgtaaaccggtaaactcatgagcgatcgagtcaggattttggatctttccccggaaaacgccgagagcttggtggcagtggttgagctgatcggaggagagagagagttttgaaggaggcgaatcagcggatgataaatcaaaacgcgtcgagccagtgaaaagattcgcggcggaagaggttttacggtcgccatgaccgattgacggcgggatctaacgcgacggcaggaactgaagttgcccgtcgtgtgaggcggcggagaatctgaccttttctggttaattgaagtttttgattgccccgagaagaaagggtaaaggtttgtgattagtggattattatgcgactgtttccttttattttgcaacaaagtattaaagttgatgactataatataaatttactattttaattgggttttttttttttttgtcatcattttaattggtcattattaattatgatttcattggtcattataatatagttttagcaaaggaccctggtcttttaagcaaaggaatcctggtctttcttctattgttttgtagaataacattttagatgggctcatcattataaaaaaacagatgggcaacgtcacagaaaaaactacagtgggcctaaaacgcacaacttaaaagcccataaccaataataaaaactcttcacttccgagtctcgagtgacacacacagctccacatcaatgtcttcgaaacaccattgatgagccaaaaccctcttaaac

SEQ ID NO: 3908 - DNA, 712 bp, Arabidopsis thaliana
tgcatgcccgaagcataggtaatacattaatgcaagatattttactttctattgagatatagtaataatagattttgttagattacacaatcagagggggttgattgactatatttaatccaggacatatctcatatatatatatatatatatctgagtgcctccaaaatttataaagaaacaaaatcagagtgaatttaatttaatttattcgacatggcgaaaggaaccacattcattttcctcttctcaagcctcctcgtcttgtctctgagttcagtctccgcggacaaggatgatcatggagatcaacaggttttacaataaaaataattgtttgaaacaattattgtaatttgttatcatggtcatcttgtttctcacatatgagcccatccatatgtatcatacatgataataatgatggtgatgaaaatccatgaaggtatatatcgtgtacttgggatcacttccttctcgagaagagtacacaccaatgtccgatcacatgagtattcttcaagaaatcaccggagagaggttttattaaaaatgattttttcctcttattatatcttatatatggtttaaaatcataactctaaaaagttttaataatattctagtttgatcgaaaatcgcttggtgagaagctacaaaaagagtttcaacgggtttgcagcacgactcacagagaccgaacgaaaaagat

SEQ ID NO: 3909 - DNA, 599 bp, Arabidopsis thaliana columbia
gatatcggttgtgcacaaatacacgtagtagaatatatacttttgatgttagaccaagaggaacaaagaagtcacatgaggagaatattaccagataaagtagagctggctgaggtgagtgggtcaagacacctgcagctagagccgccaccaagccaatggcatatccgggaagtgcataccaaatgtatttgtgtcccttggaagattttagatcaaaaatattcaccacatctctagtttttcgatggtcaaagcagaggaccaaagccaaaagcattgcagggatagcctggaacaacaaaacagttaatcaatacaacatgttttttttatctcctcgtcactatagtctgagagagaacatttcttacagttagtacacatataacgacataccaatcttaaaatcaaagaagggattagtctgtaccatgtcaccaagaccaagcatcgatgaaatctgaggcactcacaccgggcaccacaccgcccaataggttccgaggaaacacaattttaacaggtagttccagtttctttgtgatcaattgcagtccaggaagattcaactgttagcactgtgtgactgggtttga

SEQ ID NO: 3910 - DNA, 556 bp, Arabidopsis thaliana columbia
ccaagtcgttttatgaccccctatccgagaagagccaaagagaggtatccggcccaacactaccgaccgcccgacttgcctatgatatcaacctgagaccgttctaacatgccttggaggcacaagactcatgaagaaagacttgagatcttggtgagccaattctttgatcaactagctttggatacaagaaagctcaatgcaaggatcgataacatcgaagttactctcttgagtaaagtcgacgacctctttgtaaaattcaagaaatcggaagacctacgggttaaagaagctgaagctaacgaagaaaggttcaagaagatcgaagaggagcaggagagacaccttaagagcgcccaagataacgccatcaacactagggcattgctgaaacaaataacaaattcgaataaggactatgatgcgaagattgtagccttatccgacaataatgtgaacttgggaagccggatagataagtttgaggaccggttgtatgaggaacaaagaagggtcggtgatctaagtgtaccacaaaatatgtttcatgaga

SEQ ID NO: 3911 - DNA, 652 bp, Arabidopsis thaliana
atccgtctaatgcttccattggatccatatggatcatttgaatcattagtacttgataaaacacatggaatttagtgatgagcttaacaagttaaaaccatatactttatcacatataatttgtaatcaaatgatgttcgatttattccttaaattaggaaaccgataatttcgtgaaataaaaacaaagtctccatccattaaaatgtcgcagtgtcctccaacacgctcacgataaagccaagcctctcacttcctctttccattccctatggtgagtagctcaaagctctggagcgtgatgtcacgagcagtcctcgacggcgcagtcagggtaaaagaagaagatgacggtctagtggttgggtcagggacgagctgagtcctctgagcggttgaggaacggccattgcttgggacaactctgctagagcggttctctgtgaaatcagctgaagaagtggctcgtacgctcgatacaacagcttttcttgaagaacttgcgtgtcttgttgaagagattggtctttcgactctctcatagttttgctggttttgatcacgaaagagattaagaaaggatttgaatagccaatatagaaaagatttcatggttttagaaatgactcactggtgttgtatcctttgacga

SEQ ID NO: 3912 - DNA, 1058 bp, Arabidopsis thaliana
gaatctagcgaagttggagaccactttataaatcatgtaatgtgcctaattttactacgttaactaaacagaaaattaattcggactgaccaagtaaccagaaaaaagtcgtgaatttctaagtgtgatgatgttaatgctaaacatgaaaacaaaattgatttaaaaagttaatacagacagaaaaatatacgagatggcatttggcaaagataacataagcgaccatttagtatgggtatcaatcggctatactaaaaaaaaaaaaacgtctgatacaatttttttatgccatgatattaacgagatctcttaaatttgatttcgccatacgtataaagcattattatttatacacaatattcaggcccagatcggcccattaaaattgttggctgcttggattaatcctagctaatgatcaacagtataaatataaacttgaggtcacaaaaaccaaaatcatccataacccaaaaagagtcacttccgtgtcacaagaaaccatgaaactttctcttcatcaaccacttctcttcttcttcttagccagcgtcctcccattaatcctgaccgtccattctcaatcagacgactcagatttcatccgtactagctgcaacaccacattataccctgacctatgcttctcttctctttcctccttctctagctctgttcacaacgatccagccctcttggctcgagccgccatctccgtcactctcaccaagactctcgacttagcctcatacctcgccaatatcaccactctccagccagagagcaacgaagatggtgctcaccacccaaccgcagccgctgtttttcacgactgcttcgacaatcttaaagacgcggtcgaagaaatgaaaggctcgatgaaacagatgagggagctggtctcgactggctcgctcgagtccttcaggttccaaatgagtaacgtgcagacgtggctcagtgcggctttaactgatgaggagacttgtacggacggatttaaagacattcacgatgagccgaggaaggatgacatatgcgcacgggtcgatgac

SEQ ID NO: 3913 - DNA, 1211 bp, Arabidopsis thaliana columbia
tattgactaatgatttcttgttcatactatgatttgtgtttcttttatcatgtttgagttatccacttgttaggttaagggtttctcattagggattcatatggtttagtaaatcgatccctggtaagttatctatagaattcttgtatttttctcgcttactccagatttgaatgccactggggatagtgacgtttaagtctgggagaggcacgtttttctttttgagtcttattcttactcttatttttcttatttttgagtcgttttattgaatcaaaattttgttaggaattatgatctctattctttagattattgcctggttgattaatgctgcaggtttgaatcaatccgactattggaaaatccagatggcaaaccatgagacttgaggatatcctggtttctaacacaatcctttaaggttggagctaatctcactgcttttccttttacctcatcaaaacagttagtgttcatagaacttgactccttgttcatacctgatattgaaaccaatgtgaaaaagaaaagtattcctctccccttatattaaaacgaaaaagaagtaagatattgatatgattttcggtagtgtataggggtaggaatttttcccatgacctaataacactgtattttacttattttaggtgtatgtttatcatcatttagctttgcatttgctcattgtatcatttcattttgcaccattttagcttattttgcatacttaggcatctaggatcatcttgcattcgcaatgcatgttttggtgtgtttttaggtgtagaaagagttaaaaaaaggactttactcgatccattcactcgatccagacagctacagaataggcatcaattcactcgacctcttcactcgatccaggatgctacagaggaggctgccgtttactcgaccctcttactcgatcaaggcagcctcagatgaagcagcagattgatctactcgaccctcctactgatcctctactcgacccatttactcaaccaagggtgaccaaactacaagacttgttgagctatcaaagcgtcttcagatcctcctcattctccactcaaccagacatctgagcatacggataggagaggaagaatcatctactcgatcaattgatcactcggagcatagacacgtaagctgcagactctgcagcacgctctttactccatccccaagatcaagta

SEQ ID NO: 3914 - DNA, 1008 bp, Arabidopsis thaliana
tccccaatccaagacgcatgccctcaacatgtccttgagggtttgaatcgttcgttcggactgtccatacgtctgtgggtgataggcagtacttaggttcactcgagtccctaaggccttttgaaaagccttccaaaaatttgacgtgaaccttgtgtctcagtccgacactatactaaccggaatcccatgtaatcgcacaatctcgtctatgtacttctcggcaatgatttcggctccatccttatccgagattgccatgaaatgcgcggacttagtcagttggtccactacaacccataccgtgttgtgtttggacttgatccccgtcgacagtcccgtgacaaagtccatcgttttatggtcccacttccattcctgtatcggtaggttttgtaacaacccacttggtacttgatgctccgccttgactagttgacaagtcgggcacttggccatctctttcttcattcctacccaatggtagtaccttttgaggtcgcggtacatcttgttcgacctgggatggattgagaacttcaattgatgcgcctcttttaggattttctcctttaatgccctatcattcgggacacatactcgaccgttcaccacgattgtaccattgttcgaggtttggtacttgttcttattgtttagtgcccatccttttatctcctcgtcccgttcctgagccagccggatcctactaagcacatcggcctgatcaacagctcccaaccctaagggttcaacttccttagacaaggcattcacatacaatgtccccatcatgttaaccaagtccacttggtctcctccgcttccacttccaagcgcctcctactcagggcgtcggcgacttggttggccttgcccggatggtacgctatgtgcaagtcgtaatccgccacaagtttcatccaccttctttggcttagattcaactccggctgggtaaatatgtattttaggcttttgtggtcaatatagatttgggggatcctc

SEQ ID NO: 3915 - DNA, 1496 bp, Arabidopsis thaliana columbia
tgaatcgagatccaaggaaaactctgaatgtatgatccattacatgattctcaagcccctaagtgagataaactaagtccagattaagttcaaatagataagagaaagctcaattcatccaaatttcaaggagatagggattattattaagcgatctaatgatggatgttcctgaccttccaagttatcaaatagtgctaaaatggtcccaaggcaatcaaatcaagcatggtgcaattctcttcgaaaagatcacagttctcaaaacaacattttgactcaataaaagacacgattttgactcgataaaacaaactgactcaagaaaaagcaaaacaatacaaaagaatagattagtagacaaatgacaacctccccccgacttgcttcacaccgactcggtgtgaaaacagttcaaaggaaaggtgccacatagatacgataaaaatcaaaataaagatgaataaaaaggggaaaagtgtgagttacagcgctactcaacggtggtgggtggggtctcgctagagctctgctctcctggctgcctcctgctcctgcctaaccgatggcctagggactgctctggtggtgtctgcgaggtggacgctccagcagcagggaccaacctctcagcatgtcgatcctcagtagccttggaccggtgttcacggtctccatcatccactcctcctccgcgagtgcaaacacaaggcctgatctttaaaatggctctacacatcctgtgcatcatactgttgttcttccttgtcgattcgatcatccatgccatctgctgggagatatcgtcacccgctggtggtgatgaaacaaggtatggtgctggatcctcaggtagcagcaagtatggctgggcgtgcgtggaaggtgcctgatcagcataatcctcatgatcgtcatcattaccgacaacatggtcagctgtaggctgggccgctgcagtctggcgtcgtctagtgacagctccggaagggttacgaacaaggtactgcgcgtccggttcgaacgctagattcgtcgcggagagaaatgaggtaatgtgctggttgggtatcctgcaataataagtaaccccgtctctacccaaaaattggtataattgactatctggcttggtgaaattagtgcgaatcaggtactgcaaatccatttccgctaccgttgggggacaaattgtttcggtcttagagaggtcgaaattgcaacccctgaacaatggggtaagggcggtaccagcgaagatgctctgcccggctgatgtagaacagtattcttcatcttcaccaaggtgtcacacaaaactgcagctacattagtgtcgggagctggaagatctgagtacgcgggtagtagatgtttgactccgtagaaaagtagtggtaactcggtctctgtcacagctgcaatcactggcttgaagtcaaaacgctaccgaggactttcgcaacataacgcacacctggactcctaatatggat

SEQ ID NO: 3916 - DNA, 302 bp, Arabidopsis thaliana
ttttaggacttattataccatctccaacccatcttcatactcttatgacttaataagttagtgaaatgagtaaaccgggaggagtgtggactgaccatggactagcgagtggactacccaagtaagaggaaatggttgaccagtcaagtcctatggccccaacaccgaacccgtgaagaccagacccgatctgttgggccataactgatgatggaaagaaccaacaaacccacgacaacgacgtcatgatctgaaataagtagcccggaaagacataataagcggaactgcaaacgaatgct

SEQ ID NO: 3917 - DNA, 1155 bp, Arabidopsis thaliana
gagtgtttgcttcttttagccttttaggtgttcatattaatatatagtattaagcaacaacatgctgagaaagttctcattttttttgtttcttgttagttttccctgaaaaagcaaaagagaagaatcttggaatcttgcaacttgttttacatttccttattaagaaatatctctagatgtgttttctttaaacagaaactctctttcccttcaagtcaaaatcatgtacatcaaagataaatcttagaagcttgtttcaatggaattccatgtcagacttatgaatattccacttgaagttcaatttttgttgttgtttttcaaagtgtctagattctcaacactatgactcatcttcttacttttaagatttaacctctgttttatgatctccttgtagcactatcaaagtttctaaagaagttttggtttcttgttttttaaggatcatctgaagcttaaggagaaagtttctcgttgttgcttgatatattaatcttttggggtatttaaaagatgggacatttctcatcgatgttcaatggattagctcgatcattttctataaagaaagtgaagaacaacaatggaaactgcgacgcaaaggaagctgctgatgagatggcaagcgaggctaagaaaaaagaattgattctgaaatcctctggttatgttaatgtacaaggatctaataatttagcctctcttttctccaaacgcggcgaaaaaggcgttaatcaggattgtgcactcgtttgggaggtacaataacatcatcttgatttatatagtcctttatgttatttaccgctttatgagtatgtttatagcttctcgttgcgtcttaaattaaatattttcacaagactcttatgaaaaagtacttatgcttgtaaaaagtctcatttatctttggtaaacagggatttgggtgccaagaagacatgatcttctgcgggatattcgatggacacggtccatggggtcactatgtagccaaacaagtaagaaactcaatgcctttgtcgcttctttgcaactggcaaaagattcttgctcaggccactctagaacccgagctcgacctcgaaggctctaataaaaaaatctcaagattcgacatatggaagcaatcctatctaaaaacgtgtg

SEQ ID NO: 3918 - DNA, 630 bp, Arabidopsis thaliana
tcattacagttccataaatgaaacatctaaactaactcggttaacactaccacttactttctctataatgtgtgcgggattgaacagagtatggctcactggagagaaaacctcaactccagttgaagaagcataatcctatagagattataaaaatgcacttgagttagctaaaatctcaatgacacgcatagttcaatcagtggtaagcaagatcaaaactttaaggcgtaatgaaacgaattttaccttaaccttaacatctaaagcttgataatacggatctgtatcatattcaaagcaaagcctcttcaccttccactgccaaaaaccccattcataacatttcagatttctatgtctacagtaaaccaatttcacagcttttaaacacactgtcgaatatgaaacactacattacctcttgcaagcaacgaactagtacttcgccaggttcacctttaaaaacaagcaaccgtgaaccaagtttcttcaggctagaatcgagatccttgagactctcaagcaagaaccggatccggtttaccccggcgcgagacgaaccgggagagaacgcagatgggtctgactccatataatgcgggtcgataacaaaaaccggatacaggg

SEQ ID NO: 3919 - DNA, 1108 bp, Arabidopsis thaliana
gctcgaagtcgtactacgggtactcctaataggattctacgggtttgaaggggtggttggtcactcgcggtatggataaggatgttaacttccttttcctcaaaaattgtggtgaattttgcgaccacctcaggtgtaatgaagctattggtggctcccgagtcaaataacacatatgtgggtacaccaccaatactcaccgttcctggcaatgcattcacacaccggcaaaaacattctcacaaatcatacacaaaatctaaaaactacttttaaaagagagttagaacccatacaaacctgttacggggcctttaaaaggtcatggggtttttgtcgattctaagtctaacgcgtacgcgttagcaatcgtcgtctctaattttgtcaggggtcctctcgctcctgatgctggtgggggtcgtgagttgtgttgattgtctggtccccggggtttactcggacacgcgtgagagtagtggtcttgacttccacacgaataacaataaccctttggattaccttggcctgtcttcttactcggacatacattggaacgatgcccttcttcacagcggaaataacatgtgatatacgctggcgtcggttgggtaaccacaggacatgatcgtgcgaaatgtcccaactttccacatgtgtaacatgcccttggatcaacatcatttctccttctatcattgttatagcacgttctcgtccgtcctttatcattgtctctctcctgattcagtgtgaatttaggagcgttgtttctggtctctacgttgttagccttccttcctcccgatcgatcactttctttgttcacactcttctccaactcaataccctcctcgacattcactgcatgttcagttagctcattgacactactatatgtgactgcttgtagtcggccccatatctctggcctgagtcctctcaagaacctacgcaccatcaatgcttcatcgtcttgtccgttatataagtatcttcttattcgcgtgaaagcttgctcgtatgatcggacactccttgtctcttgtgctaagttcatgaactgctgctccaatcgatcacgggcctctggtggaaagtacttttt

SEQ ID NO: 3920 - DNA, 1149 bp, Arabidopsis thaliana columbia
gaaaaggctggccggagtgcaaatcctcgacaggaagatgtcgagccccgagattctaaccctaaacccaaggccactctggttcctcaaaccaaatcactcactggttagaaactcttgtttattcttcgtattcgccacgtcgtttgaatccttagtaacgcgtccttcaccccttactttgacagcgatggaaacagagggaaacgtctattgatgcttcaagactaggaaagacacgatctagccaacctttgacaggtggcgtcctgcgattcgcgagcgattcctacttcacgctcatcactcatctcgggttagttctttttatttgcgatcttttagctctactctttcgcttatacgctaactcacctttgtaacccttggttcaggcaaacagcgaactcaatgacatgattgagtattacgaaaggttgttgcttgacagggaacgacgttatggcctggaaagataagttttcttctcttgagtccgatctctactcttcctctgaagtcaagcaaaaactggaagaccaattggacaatctttcttccgaactcatgaagttgattgcgagttgtaggatcagtatcagaggtatgacaagatccaggaggaactctcgaatgctcggggcagactctcagaatttgaatccaatgtttacgacttgtccaaccagctatccaaattgcaggccaagtacaaagcaatcgccaaacttcgagatgttgagttagcgagatcagcatcaaaagccaggaaagaagtaaaaggtcgcgggatggaattgattcaaggggcgatcgtgttcatccaaaccgagaaaactaggacggagctggaatcagacatcaaggaatatgaaatcaacctcctccttctgggccaaacccatgacgaagatttttccgaagatcaagaaaggtccgaattggaagcagttctaacagagaaacgaaatcgtctggcggctcttccctcttcatcattcaaccctcaataggtcaaagagttcttgagcgagtcgcctcctgtgagcgagtctggggtagattgggctggtaagtgggaaaacctcgaagttcgataccgaacaagaatattttataggttatggacatattcataaactgcgggga

SEQ ID NO: 3921 - DNA, 1032 bp, Arabidopsis thaliana
aatatactactttgatgataaagcttgttgtttgtcttttcaaatagacatatgcacccacaaaaaaaaaacgtatgaaactgcttttgagaaaggaaaaaaacaaaataggcgcaacgggcgaggttcgaactcatcaaatagggaagaagctaaaaacgctgaagccactgagctttgctaaactgtggcatctcgagtaatttaaaaaattacaaaagggtaaaagtgtcaaaagagaggacaaagttgatttcctagggtttttgcacttcttcctcgtcgtctctctcgtcttcaagtgaacaggtgaagaagaaagccgttttccgtaatcgtttcttcaattatttttcttgtcttttgattgattcgatttcgtatctgtttcaaagattcgcatcaaaccctaagaaactgaagatgaggccgatcctgatgaagggacatgaacgtccattgacgtttctgaggtacaacagagaaggagatctgcttttctcctgcgccaaggaccacacacccaccctctggtttgccgataacggcgagcgccttggaacttaccgtggtcacaacggtgctgtttggtgctgtgatgtctcccgtaagtttctcaatttctcttcaaatagtatcgagtcgatgattagattcattgtttccccttagctacaagcttgtttagggtttatagtatcgagtgaattctgtcgtcttagtctttcaaagctgaatgtttagtgatttcttaggagactcgtcaagattgatcactggtagtgctgatcagactgcaaagctgtgggatgtaaaatctggaaaagaattgttcactttcaagtttaatgcccctacgaggtctgtggatttcgctgttggagatcgtcttgcagtgattaccactgatcacttcgtggaccgtaccgctgctattcatgtgaagcgtattgcggaagatcctgaggaacgtaagttgtacattcctagctgaattactacttacgttttagccaacttcttgtatgtgtt

SEQ ID NO: 3922 - DNA, 973 bp, Arabidopsis thaliana
ccaggtatgaaggtagcctgattctctgagactattgatgaaagatgcttctgtagtcttcccactaggattttagagattatcttgtaattgacattgcatagtgctataggtctaaaatcactcatgctctttgatgtaaaaacctttgggatgagacacaagtaagtatgattagaatctccttgaaaagtcttctccaagaagaatctctgaacctccatgaccactgattctttaatgtctgaccaaaaatgttggtagaaagctccagtaagtccatctggtcctggtgctgggtctcctccaatcgcaaaaactgcattcttaatttcatcttctgtaactggcctagtcaagtcattgttaaccgaagccgaaactagttgttggaaaccttcgaaaaattgtctcatagttgatatgatcctgccgggttgtagtaaagagatttgtgaaatatgagtaagccattttcccgatgtcattatctccataatatatatttccttgttcatcttcgatgactatgatacggttcctggctactctggctttagttgcagcatagaatagagcctgtcgccaaattttttgtgatgctatcacccaagtcaacccatgtttttcgactcttcaatctccaaaactcttcctcttcacgataagcttgggatagatcatatcgaatttggttgatttctcgagttgtgaatccagggtttgataaggcatgatcgagcttttgtttcaatagaccaatcctctctgctgcattagttttattcctgcgtttccatgtcgccatagcctttctgcaggtctgaattcgtgttgttaatggtgtgtttgggcctcctgaattccaactgtgaatgactctttctctgaaaccatctctgtcaataagtcgcttatcatatctgaaacatcctttacgttgagtgatagttggggaaatgctggtcaccag

SEQ ID NO: 3923 - DNA, 749 bp, Arabidopsis thaliana
tgaagattttgttgaagatcatcttgcagtgattaccactgatcacttcatggaccgtatggctgctattcatgttgaagcgtattgcggaagatcctgaagaccactgctgatgacttttatgtgccaaaggaatgtgcttctttcttttacttctatctcttgtttcaaaagttgagcataagtactactcaagtctcacttaagattctatcattggataaaaactcttgcacaaagtcttatcttaaaaaaaatcaaaatgtatattaaaatggtcttagttttttgtagaagaaggtgattacgacagtattttatagatgcatccaaattacataaccaatggtgtatataagaagacacacctaaacaaaattaagagtaacgaaatttgaattttcattcagatcaatgtaagtctcaatatgctcataaaaaaagctttacctaattctgattctgatgatcactctcattaccctcggatccctctgcttccttctccttcttctttccagcttccaactcgcgaaacgccttcccgatcgctgcagcttcagcaggcagaattggctcagcattctcttcttgcaacccgctaaacgccctcgcaatgactgcaggctcaccagccataatagcttccttttccgcgttcaacaactcgctcaacatcttggccatcgctctagcctcaccagcaagaaggggctcatagtaaacagggttatcatacatgcaagtct

SEQ ID NO: 3924 - DNA, 1126 bp, Arabidopsis thaliana
acctcgaatgatccaagagaggcagaggcaatcgcgaggcagatgacgacgaaccagaagctgctcggggaagaatcttcacaattttaggagattcagctttctgtcaagacacagcggcatcaatcaaagcttatcagaggaaggccgactcaaatcgcaactggacgcgactgtttaaaggacaagatgacgaagtgacttttcacgagagcaacactaacggcttggaccgtccgcttaatgattccttggacattacactaattattggcgattttaacgtcgaaagagttctggtcgacacggggagcacactagacatcatttttctaacgaccctacgagaaatgaaggtcgagatgacgcaaattgtaccgactccgcgacctatgctcgggttctctggggaaaccaccatgaccctcggtaccatcaagttactagtccgacccaaggggataaccagccgaccgtttataacacaattatcggcacgccatggttaaatcaattctgagccgtcgcctcaacgtatcatctctgcgtgaagtttccacaagcaacagcgtgaagaccatctggggaaatcagaaaaacgcccgaatttgcttcatggcagcacacaagctcagaaaccccgtcaccgagtcaacaaccgacgcaaatcacaagaaggctaagctgggccaagccaaagagaaagcaatctccgagcagttataggagctaaagattgaggaggctcgagagtcaacataaccagtccctgaccccgtaatctccatctgccttgatgacgaaaaacccgaacgatgcgtagaaattggcggagacctaggcaaagaattaacagtctagctaacttctttcctcagagaaaacgtcaatacattcgcgtggtccccggaagacttgcccgaagtaagcgtcgaaattgtagcacacgaactcaacgtccacccaacgtttaaacctgttaagcagaaggggagaaaattatgtagggagcgagcagaagctgtgaaagccgaggtagaggaactgttaagcttcggctccatcaccgaggcaaattaccccgactgactcacaaatctaatcgtagtaaaagagaaaaacggca

SEQ ID NO: 3925 - DNA, 839 bp, Arabidopsis thaliana
tttgaactgactcaggatctacggcagttgtctcaatctcactcggctcgtcagtagcgggctgctcgccaggaatcgcggagtctgaaccatcatcatcctcgataaccactatctcgaactgctgggggttgaacgacgaggaaggaagggaagctaaacgatttcgcttctcttccaggacggctttcaactcgtccctctctcgttctgcggaaaaatcatcttcatgagtttggtccaaaaggaggagattactctcgtactcattgacgtcagattccagctccgctctaaccttctcagtctggatgaagacaattgccccttggatcaattccatcccacgacctttcacctctttcctggcctttgacgtcgacttcgccaactcagcatcccgatagttggccaccgctttgtacttaagctgcaattcggatagctggttggacaactcgtaggcactggattcgcattccgaaagtctgtcccgggaagttgaaagttcttcttggatcttgtcgtacctttggtactgctcctgcagctcgccgttggacttcatgagttcggtggagaggttgtccaactgatcctccaatttcagcctggcatcctttgaagagtggagatcggactcaagggatgaagacttatccttccacgccataacatctttttccctgtcaagcagtagcctttcatagtactcaatcatgtcgttgagttcactgtttgcctggatcagataataacaagaaggggttagcgacagggtaaagaagcaaagattaaaaggtttattacggtaaaaggactacccgagatgagtgatg

SEQ ID NO: 3926 - DNA, 1155 bp, Arabidopsis thaliana
gtaacaatggcagtagcaccacataaggtttaagctaataaaaaaaaaaagagagatattgatagacaaaagaaaggccttaagaaagttgaaatacctctgcatcccagattctgatagcagcatcttcaccaccactaacaatggtttggttcaggggaccccaaacagctctattgatcttcttctttccatcaggactttgaaggacaagcacagaatcaccaacctctacatcaattacattaaatcaattccttttacccatacaaaaaagacataggctaaaaaacataagtagattttaacttagaattgacaacttacggtcttcgggatcttctgcaatgcgtttgacatgaatagcagaggaagttcccacgaagtgatcagtggtaatcactgcaagatgatcaccaacagagaaatccacagaccttgcaggggcaccaaacttgaaagtgaacaattctttgccagatttcacatcccacagctttgcagtctgatcagcactaccagtgatcaatctagacgagtctcctaagaaatcacaaacaaaacactaatcgttaagctatgaaagactaaaacaacaaagacaacgacttaaatcctaaactgaatccattccatccactatatactatttgaatttgagaggctgagaccacttactggagatatcacagcaccaaacagcaccactgtggccacggtaagtgccaagacgctcgccgttatcggcaaaccagactgtgggagtgtggtctttggcgcaggagaaaagcagatcaccatttctgttgtacctcaggaacgtcaatggacgttcatgtcccttcatcaaaatcggcctcatcctcgtttctagggtttgatgagaggagcttttcatcttgcaaacagatacgaaatcaattcaatagaaagaacaaaagataatacattaatcggaaacaagtacatgaccaaacggaggaagagatatgtgcacatacttggttgaatcgaagaccttcgggattaacgcactcaattgtcatgacggaggaggcgacggttgaaggacgacggatttgatcagcgagcgttctctgagattttgagggctttaagtggtgaatcgttaaaccggtgagcgtaccattggta

SEQ ID NO: 3927 - DNA, 1176 bp, Arabidopsis thaliana
tagtaacgtccggatcccctcaaatgcccgtatgtctgaccgtaacggtctaggtcctcacatacacttctcagggtctaagtcatatcatcaaatccgagatgaattggtaagtcttctctctgtttactcctttgcaactttaatctgatgtttctctacttttctatgacttgtttttttttcattacaagaagagcaattgggcaaaactgtcagtattggtgacgttttcatcaaaacacatacaaaacctgatgggacgtatgttgatcgaaaggcggagaagattgcagagttatatcagaagaatttgcagctgaggcggtctgagctcgaggctgaagcttctgctgtttcagatggcacttcgcggacacgggagctcacagctgagaaatgtacaaccatatttctttaggtaacattttatgtttccccatttagtgttttcgagttgtcttttttattctctaatctcagcttttattatactttgcagtccactgagagggattcgagaggcgttccttatggagtaggaagcctcaaagagtctcttgtcaatggcaagcggaacgaagcatgtgactcaacttcttttgtggctttgaagaacaattacttgaagctcaacgcaagatagaagagcaggtctcttacaattagaggcatgaatctgagattgctttgcgtgaagctgagaattcccgagctgcagatgagcagaagaagaagcttgagcacttgtccttagtggagaagtttttacgcgaaaatgatcctcggttcctcaatttcatcgaatctcctccagctaaggagacaaccacagatcctatctcaccctctccagctgcctctccctcttcatctgcttcataggtctgaatcttaactccttcctcaagactcaatatcacggttcaaagtttttatatatgtgtacttgtgttgcttgtacttatgctgaacaaagttctaagttgtagtgaatcgaacatgtttttgtaatttgggttttgtacttttttgaaatgacaataaatttgttttcatgcttcttgtattgtgtttatgcttcttgtaatgttttattttctcaggaaggtttccatctttagaacaatcatataggtattctaataacaacaatagtcgcaaatttagtcatca

SEQ ID NO: 3928 - DNA, 427 bp, Arabidopsis thaliana columbia
cttttcattcttgttttttgttaacaactaacgttgtaggcatttataatcattggttgtattatttcacttctcaatcgaaatcgttttagggttttatactgtttggtttgctgttgattttgactacctcgatcgttgttattgatcaaagagtgttaataaccaaagtgtttcgttttcctttttttcttgtgtgtgtgtcgatgtgttatttcaggggtgaaagatgcgagtgacaagaagattctagtggacatgttgttttgggcatttgacaatcctgcgccttcaaatattatgttaatttcaggagatagagacttttccaatgctcttcacaaattgagtctgagacggtacaatattctcttagcacaccctcctaaagcatcagcgccgctaagtcaagctgcaacaacagtat

SEQ ID NO: 3929 - DNA, 731 bp, Arabidopsis thaliana
tgtttcttacctacataagttgttttatttttttccataagttacattttacttatggtaaacacacatgttgagtaggtctcccttttcgagaagaggatacgaaggcgtttaccagccctcaataacagactctgatatatcatttgtgagtagtggaagaccgagtgtggatcagatgtttccttccttgtatgacgatgtggatgttccacggctctcagtcacctctgagtatggagaaaatcgattgagttttgctacaacatactcaaagcagtccatagatcttggctcaccatatgcaccaaactcttcaacctcatttgaaagtgggagacaatcattttcactacagggccaagtattttactactctaagaccagatatgtgcacatgagaaatgtgtttttcatttgtttaattctaaaatctgacaggatgagcttgaaaccgagatgagaaggctgaagatggagctaaagcatacaatggaaatgtataacagtgcctgcaaggaagcaatctctgcaaagaaagcggtatgtatgagttttcaacaatcaaaagctaatttttctgtcagattctcaccaaacttataatccaatacatttctttctcaggctaacgagttactcaagtggaaagcagagaaggaacataaattagaagaagtgagactttccaaggaagcagcgatggcaatggcagagagggagaaagaaaa

SEQ ID NO: 3930 - DNA, 1375 bp, Arabidopsis thaliana
gctctggtttagatactatgtgaactaatcaaactttataataatacatgctttagtataggatttctcgccttctctagttatcttagctctaagtataaagagtttcgcgtaacaccagcgattactctaaaatcatagtttgagttcgagaacggtacgataacaatcctaatattagctagatgtacaatttatgtatctcccgagacaattccttagacccgacgctttaatctcctgaatttacaactcatttagttgctttattgtcttttactttgtctagcttatttgaaaacatcataagtctattgtgtgaacatcgagagctcagtgaaattcgacccttaagtgctaacaacaatctcttatttgagggactaagcttaaggcaatttgaggtatatcaaatttggcgtcgttgccgaagttctcttttagttcaccattagactaggtgtcattttaagtctagatacttcttttctatcacctaatcatgtgtttctttgtcttttggtctcttgtgtttcaggtaccttcacattgagaattacgtttcaatggcagatttttatgataatgtcgaccgacaccatctgcgtgtcgatcgacaccctccgcagaaccagacggctacaataggcgattttaacagaattgatctcttctacaccaaccgatcaacattcaagctacctccatttgaaagagaagactttgctatacaccctgcctattatgatcttgtatctagaggaaagtttagaggagctcccgatgaatcaccattagatcatttggaagtcttcaaagacatcgtttcctctatcaaagcagaaggtgtaccagctaattaccttatttgcaaactcttcccccactctctcgcgagcagaggaacatcatggttgcgtcaactggaaccaggttcattaaccaattggactgatacaaagaatgcattcatgaatcacttcttcgatgaatctgtgacagaggctattcgtttgcaaatctcttcattcactcaggctccagccgagtcccttcgagcatcttggctccgtttcaggtcttatcatcgtgaatgtccccaacatggcttccaagagagccaactcatcaacctattctacaaaggaatagacaagccataccggagttaactcgatgcagcaagctactgtaacttcatgacaagaaccactagtgaagcattactcctcatcaccaatgctttaacttgtatttcgacacaggaagttgacacagaacaaagaatttcagctgagatagccaccgcgaacaaagagactcctgtttcagcaatttctactcctatccaagccccccctccaccctcatcaga

SEQ ID NO: 3931 - DNA, 1248 bp, Arabidopsis thaliana
gagtttataaagagaagaagaaaagaagagaaagagacaagtcttggaacatactccaaggctgcttagaaacacaacataatattaaagatagaatttgaatagaaaaaactctttcactttaaagatgacccttaaacttccattttcgtcactcctcttgaccatcaaattaaccacttggtttgggctcttcttgggcttgtaatgggcataaaatgacttggacttgatatatattccttgaggccaacttctgaaagttataccatggtttggatcatcaaatgggtgatttgaatgtgaatcatttgcctcattaaaaaccttgtcaagaaaacccattgggacaaaacttgacaagggaaaaagagtacaaatgagacacatgcccatttgatgatcatgtatcaaaaccaatgaggttaagataacatctttcccatactctttctccgttataagttcattttctgcttcaaaatgctcctcaggttcaagctgctcctctgcttcaagctctttcgcggctacaagctcttgatcaaattccaagtcctttgtgctttccatgatcacatcatactcggccaggtggtcgagtggtcaagtcttctactcgaccaggggggtcgagtggtcggttgaggtcgtgaagcgtctactcgaccagggggtcgagtggtttgacatgatcaggtccgcttttctgaattagctcgtcaacagctccaaatcacctgaaaacaacacaaatatgcaacatgcatgcaaaactatcctaaacatgcaaagtgatgacaaatgatgacaaatggtataaaacagtgatgatatgatgctaaagtgatgacaaatggatgctcaaaacatgcaaaatacacacttgtcactcgcttatataaactgcctcttagggttttccctagggcatccgttgttattccgtttctcatcaacttttacattttcgcaactttcatagctgtagtgtttctcctgcgattttgtattttcactttcaagtatttgatattcagtttgcgtttaagtctttcgtcatttctgttatcatgttttcaatcgttgctttgctattgtcttttattatgtctgagtagtgaaccgtatttctgaggatgggatagattagttgtggtttacttggtcgttttaggtggttgagtttagaatactagaatctcttctagattagttgcggttattgcttgtttcactggctaggga

SEQ ID NO: 3932 - DNA, 1296 bp, Arabidopsis thaliana
actctgaaagcaaaactctaaaaggcaaggtgactaacgaagggaaccaagaagttcgaatgaaaaatcaccgtgattcttggaggtccaaactttgccatgattccgttagcgctattaaaaagcataggcggaatgttctacttaaatcaagtttgagtgaagaggtaaattaccaaggcgctttaatatcatttgatgtgaaggaaacacagcacctcaaaagacctcacgatgatgctctagtcattacgctagacgtggctaacttcgaagtatcaagaattctcgtcgatacgggtagttcagttgatttgatctttctaagcactttggaaagaatgggaatcagcagggtggatgtagtaggacctccgtctcctttggtactttcacgagcgagacagcaatgtctcttggaataatcaagttaccagttttagcgggaaagatgtcgaagattgtggatttatcgtttttgacaaaccagcagcttacaacatcatcctcggaactccttggatctaccaaatgatagcggtcccctctacgtatcatcaatgcctcaaatttccaactcaaacggagtgcaaacaattcggggagaccaagaagctttgagaacatgttatttagctagccactgtttgtagatccaatagcaattaacgaagcccgcaaagaaagggatagtcccaagatttcctagtgggcagaaggtgtacgatgtcgtgatcgaggtaatattagaagaagacaaaccagatcggaaagtttgaattggagccactttgtttgacaagataaaagaagctttggtttaactcttaaggaagaacaaagcatcgtttgcatggtcggcagcagacatgccttgcatagatccaagcataatctgccacaagctgaacgtggatccaagcttcaaaccagtgaaacaaaaaagaaggaaactcagagtggaacaaactaaagcagttaacgacgtagtggataagcttttaaagataggatctataagggaggtccaatacccggattgggtggcaaataccattgtggtcaagaagaagaatggaaaagatagggtgtgcatcaattacaaccacaaaggtatgcaacaggagcatcactatcaaacgctacaccgtcgtgtagacactcggccagggtagctagtcccgtctctccgagttcttcgcagctcatggcgatcaagtaacatcgttacaagaccccatgatagcacggttcactacgaagaccctaaagtttaagatattatgaacatacggt

SEQ ID NO: 3933 - DNA, 851 bp, Arabidopsis thaliana
gtctattcgatgtgagatcactctcagacaagaaacgatacaattgtggtaccgactaccgccttagatgaatacagaatcaagactatatacaatgcaacacacacttcctgagccttccgccatacgtaaatcacacaggctactgtgtgaccagatatggaagacagtactcaggacaaaacacatcacagaaacatgatagaaacaggtgatggtatattacaatggtgaagtgaggtgcttacctcaggtgaagaaagagcggagttggtcgtcaatagctgcctgtgattgctcctagtctattgaagaatctccttgttgtgtctcagctccgccctgtgggtactcgatctcttctccttcgttgcggccatcaccgcggtcgagtgaattcctgacatggggaagtcgtattgcgtcaactatactcgatcacagctttgttcgctccccgtatggtgtggtcgagtattctgctctcttcttctactgcggccagcaccgcggtcgagtaatttcctggcgtggagaagccaaaacaaggtcgagtgtctttgattgctcggtggtcgagtgtattgatgttccctcagagaaaaaatccatttccctcagctcttcatacttatctcctgaaaacactaacaaaatgcatcaaaaacaacaaggaaaattaaaagtatgtacaaagatagacatgggacttcctcccaagtgagcttgttttaagtttctagcttgactcctcacactcattaggcttaaggagggtgatagagaagaactgaaatcttctcttcttccttagcagatacaacatcggacttagcatactctcttgacaa

SEQ ID NO: 3934 - DNA, 642 bp, Arabidopsis thaliana
catagacacatatccaacaggcaagcccctctcaaaaaatttccaccaatgatctgcttcccccctcaagtaatgcactgcaagatccttcttaaactcctccggacacctcgttgtcctaaaatttttctccaacatctgtctccaatcatcagcgcaaattcgaccaaatccaccactgaagtactatgttcccatggtacccacaagcttcattgtcccaaatagttggttcgtgcaagcggtgttggtggctgatagtaatgaggtaatttaaccctaggtgccagtggtggtggttaatggtgctaaggtgcagcaactccagatgtcggtggcagtggtgggggtgcatacgcaggtcgagtcaaaatctcacgcatcatgttttagagttcttgcatctcggtacgattcgctgcaatctctgctgcatgagctgcattagctgtctgatctgcctgagctggcagagctaccacaggtggctgatcttggtcaacaactggtgcattcgttactcggtttccgtgagggttcgcaggacgttttgatcttcttgacaacattttctgtttatagaagactgaacattagaacccctacgacaactgacactttactcaacaacttttaaacaca

SEQ ID NO: 3935 - DNA, 1518 bp, Arabidopsis thaliana
tatttaacttgcacatatatatatttcaggaattggagcatttttccgggacctatgttcgagaactttacagacaagtcgcgttcaaattctcaaagagaacatagttttaatcatctgtaacttggaaaagattttgccaccatcattttttgatgttatggaacacttacttatccatctcccaagcgaacgtgaattgggtggccctgtccaatataggtggatgtacccatttgagaggtttttcaaaaagttgaaaggaaaagtaaagaacaaaagatatgctgcaggctcaattgttgagtcatatatcaatgacgagattgcttacttttcagagcactactttgccgatcatatacaaacaaaatcaatgtaaatacatttatttatttaactattttctatacttcgatcttcattcaattacatgaatcaggttaacaaggttcgatgaaggtgaagttcctatatatcatgtccctggagtacctaacatatttatgcacgtcggccgtccaagtggtgaaatgcatgtagaatggctttcagagaaagactaccaaagcgcacatgcatatgttttaaaaaattgtgactatttaaaaccatttgagaggtatttttaatcactattcgtttgtaaattttcactaagatcactttgatttatttttctttgtttgtaaatattgtatgttcgaggattgtctttctgcgaaatattcatgcttgccagaaaaagaactctacgcgagaagagctgaagaatatcatctatgggttaaagaatatgtaagtctacatcaattttggttcattcgaaaggtgatcatttaatatatactaattgatattgtttatctattatgtaggtaacatactggaacactacttctccatttcctacttgggttcaagagattgtgcaaggacctttgaacaaggttaaaacttggccaatgtatttcacaagaggatatttgtttcatacgcaaaatcacggcgctggacgaaagacatgtaactatggggtctgtgttaaaggtgaaaattacgctgattcatcagatgaagcggatttctacggtaccttaactgatattatagaactcgtgtatgagggtatcgtcaatttgaggatcacactttttaagtgtaagtggtatgacccaaagatcgggagagttactcgacgaagccatagtggcgttgtagacattctatctacgaggaaatacaataaatacgagccatttattcttggtacgtaattattcttaagtccaaaatacgtttctattttaattattaataatctatctttgataatgtatacaggatctcaagcagatcaagtttgttatattccgtatccatatacgaagaaaccaaagaacattaggctcaatgttttaaaagtcaatccgaggggaaacatttctggagaatatgaaaacaatgatccaactcttttgcaaaatgatgatgatgttttgctcactacaattgaag

SEQ ID NO: 3936 - DNA, 1737 bp, Arabidopsis thaliana columbia
acggtggtagtgactagggacgaaagttcttgattacgtcttcgtgaagtaactagctgatcccaccaactcaaagcatagtcataaaattcagtagcagcaactcttaccctattgatctcgatgtagtgttgaaggttgaaaactaattcaatattcttttcccattccaaataagcatctggatcattctttccatggaatggtggaattttaagcttaagacctccaagattgtcttgcaaaagatctctaccttctctagcacgtctatggtgcctcctttgactattgtgagatgaagtgctcctatgccatagtactgatctgtagcttcatctctttgctcaagcggctcattaactctcatttgttctccaggacgagtctgccccaactctagtttctcatgaaacttttggcgaaaagcattcagtttggtgtccatcattttctcaaaggcttctaccaaaagtttgttgtttcgattgttgctagtctcttcctcctcagattcagccattctttctgcaaaagagacaacaaaacaacaccagtaactagttcttttgaaacaaacacgaaataacccttcagatgccatagaaccctaattacgacagtttcacttgttcagatgctaaaaattatcaaaacgttcccaaaaatttcagaaacaattttacaaaatattagactctttttcgaacccgtgacagttgatttcgaaattttagcacgcaccaaataattatgtaaattaaatcaaggtgacagacggacacatatctaaagatgaaaagacacaaaatgatagagatagagaactcaactttcggagtgtgctctgataccacatgataataggtttttcagtcaattgaacctaaagcactatcatgtcgttgtagtactgaaggttgtcaatccaaatgggtgtgatgcaaacagatgagatgtgatcaaaagtcactaagtcaagccaagcaataacagttttggggtttctaacagtcctaagcgaacatgcagaaaacagaaacaataatagaattactaaaatcactcgaccacaacaggctgatgccagaagtaggatgtggtcgagtaacagacaggatatgaaacagatatacttgactgcatagtctgttgccagacactgggtgtggtcgagtattctggtcgagtaacagacaggaaatgagacaactgtactcgactgcacagtctgttaccagacactgggtgtggtcaagtaagttgatcgagtaattgcaaaaactaagaaacaggcaatgagaacgattaagcgttaacgataaaacagagaaatcagatagacgagaaattcttaaggatggggtaatcgaatggagtggtatcctagcctattcgaatggttaacaagcgcaattaagctatccctagacaatatgttcaacaacagatcaattcactcccgtgatagaaatcctcaaacaaagctagcctagatatggatgagtttattttacatggtacatgttgattctgtaaaccaaacaatgaatttatactaaggggttatataaattcacttctcttttagctctaagataatcggaaactgtaagacaagaagaacaaggttgcttaatgatgaagttagcgttttgctataggaaaagtagggttattgtattgagttcaagatggattgaatagaggacactccctctatttatacaatacttt

SEQ ID NO: 3937 - DNA, 1010 bp, Arabidopsis thaliana columbia
atggtatgatgaacttcaaccggttttatgggcatatcgcacaactcctaggcgctcgaccggagaacccccattctcattggtatatggaatggaggcgattgttccagccgagctcaatgtgccaggacttcgtcgaatagaagcttttttaaacgaagaagagaattgcgcgatgctagacgattcgctagataccatcaacgagaggcgagatcaggccctgatttgaattcaaattatcaacaagcggcagctcgatattacaattcaaaaaataaaaagaagacctttctttgtgggtgattatgttttgaaacgcgtgttcgatagcaagaaggaggaaggagcaggcaagcttggcattaattgtctctttaggttttctttcaaagatgtgattccattcaaggtcggagtgattcgcggaagcattcaagtcgtcctactcgcccagcattcaaagaatatctcaaaaacgaatatttgaaaaatcaaggaaaattggaaagtttccttaagtgaaaatgggccatggccgaagagtaagtccaaaaaaaaaaaagataaaaaaatattcgagttcgggggacatttacggaaagggctcgggaacaggctccttcatcgccggtttggggttcgaggtggatgcctcgttcttgacgtctactttgggttcattcttcacacgcttccaagggttgttatcctcttcctcgtcgtcaccctcttcactgtcagacggaatcacttggaccggagcgtttacgggacaagaaacttgacctcgagcgtagaggtatatccaaagcatgtgcgggatcttcgccaccacagtcaaagttcctccattcccattggaagggatcgctctccatggccctcaccgtcctctcgataccggcaattcaggtcttgagcgtttgcctcttgagacccaaccgctgcctttcatcgcataggcggcggtgcttgtcgacgacctaatacaaacgaaatctgcccaa

SEQ ID NO: 3938 - DNA, 795 bp, Arabidopsis thaliana
tgcttactctttgagagtaaggtgcaagtataaataacaaaaaaccaggtgtgtaggtcgtcaattaattttgcatgttgcaaagacaatgaagatgaattcgcgagctttaatagtttggtttctattgttgtcggctgttttcgccatcaaggttgttgcctccatcgatgacacaaaacaaggttatagtcatattcttactacttctttttgtatgatctatcatatattttaacggtatttttttaatatttaaaaataggtgaaaaccaagtggaggagtcaaagtcgacatgcaagtatggaaattgtgcacagtatggagagaatcattttgtagaaacagatgaagtccttgatggggaagaagaagaagaatccaaaaataaccaaggtggaattgggagaggccaaggaggacaaaaaggcggtggtggtggtggccaaggaggacaaaaaggcggtggcggtggtggccaaggaggacaaaagggtggcggtggtggccaaggaggacaaaagggtggcggtggtggccaaggaggacaaaagggcggtggcggtggtggccaagggggacagaagggcggtggcggtggtggacaagggggacagaagggtggtggtgggggcggccaaggaggacagaagggtggcgggggccaaggaggacagaagggtggcgggggccaaggaggacagaagggcggcggtggccaaggaggacagaaggcggcggtgccgcggccaaggaggaatgaagggcggcggtggcggcggccaaggaggaca

SEQ ID NO: 3939 - DNA, 734 bp, Arabidopsis thaliana
aaagcattgatatatagtgcaaggaagtccactacataggtacctggctattgcagaaagatggcttggatcttcatctacattcatcaactttgcaagagaaaaaactgtaggcaaaaaaaacagtttgacataaactacaagccattctcaagctcataatcatcaacagagagaaaaagcagaatacctagacaagcaaatccagcagctgaagatgctaagccagcagcagtagggaagttattatgagaagcaatatgtagattcaatttctcccaatctttcttccttatcttgatccccttttccatgtcttcaacatcaccagcacgacctcgtatttccctcaaacaattttggtacctacttccagaaagagatatttcctacactaacatgaaacaacaacaacaacaaaaatctttgtaattcgataattggaatctcagcaaaaggagagagatcgtgatgggaaatgaagcgagtgtaccttgccattgagccacattcgatcccgatcaaaagcaggactaacggcaacagtggtgactgtgcagagatgatcaggatcaagagttacgctaatgctatcgttaacggggagaatccgaacctcatctctctttccccaatacttaatcacgcaatgttcgtcggagtttgcgccgtaccatgaacacccatttctccgtcgccatgtgaatctcagaagagattgcagttcaaagtag

SEQ ID NO: 3940 - DNA, 881 bp, Arabidopsis thaliana
tcccccttaagcatatttgtagaaagctctgagacgaaaatacaatttagaagaaagcaagaaacttaaaaaaaaaaagactgtaagctacaagaaatgaggagattgcaaagacttgagcttcgaaattatagggtattaagagccaccggaaacacttccgttgaaaatctcaattgtgtcgccttgatcaacacggtgccaccggaatgacctgttttcatccagtacattctgtttatagataaagaaatagccttcttgaggcagacttaactgaaacctctgttgaatcttagccaactctttcctcagctctccaacattatcccctgcgttcacgtccaccggaatcttcctagtcccggatttcggcaacaccattactctcagcttcttcgggttgttgttgttgttgttgttgctcattgggatcatcactgttgattcatgatgaccgttactggtctgttctgttgaatttgactgtgggaattgctcggttttgaacacttgaatgttgttacggctttggtcgggagaagagatggaaagttggatacgagagtggttaaggatcacacattgttcgatatcaagatgatcttgaagaacattgccttggaataaaagggtttgtttggaaactgggatacgttgatacttctcgatcttttgtttgatctccaacactgtatcccaataacctaattcaatctcgaatgtggaccactccgagtctcgaagaacacatccataatcgtatcaatggtacgtgtttcaagatcaatggagactgctaacgaagacggtgaaatgagagaagatgctatcaactttggattttagtaactaacgtttcagcattatgtggtaagtgt

SEQ ID NO: 3941 - DNA, 1165 bp, Arabidopsis thaliana
agacagagttctaacgtacaaccatcaagggaatggaccgtgagagttctgagcttagtcataccaagaaggtcttccacactactgctctctattgagtaacccctcaaggtccatgatgaatgatccatacgatcatgatacaaaagtataagatatcgatgatgaatgattcatacaaccagagaaaaaaaaaaaaaaaaaaggaattacgaaagttactaccttcgtttcataaattgactcgtatatttcctcacaccaaaatttattaactcgtatgaagatggcggccaacgtccaagggctcgcaaaagaacaattataagcataaaaaacaaaagttacagaacatgactagtgaagaacaagtaaactaaagagacattggagggatccagtaagggaggagtgatgctgacgagaaggctgagggagacttgggacggaaggaacgtggttttctagtggcgatatcgtaaacaccgaagccatcgcctgcaaaatagatggagttagggtttagaccagggaatgagcttgccttgacacaaaagggctcattattgcctaagaatatgcagagatctccaatgtcctccgtgtaacacatggtccttttatcttcttccagctctctaaacaccatgaaacgctttgttccgcgacacaggaatgtcatcgaatcacctggttggtggttctgagcgtactacttgattaggaaacgttggcctgagggagactccacaaggtatacagtcttggaacatgagtccaagagctcccactcggactgggtcaacttaggaacgttgcaaaaccgcaactcaaccaactcagagccggtcatatcctctccgaagaaagaatcccaaaaaaccaagaagtgccctccaaaactaggagtgtagaacttttcatctctctttgaatacataacctttgattgatcaaaatattgaaaaggggtttcaaagatgaccgaacccgagtccttgtgtgtgcaccaggcctattgaaattgatcactaggtctaaacacttgacagcaactgcaaaatctttgctttgatcaggtgaacaagtcattgcggcgttagtgatagcttgttgttggatagctataggtttacaaggggatctaaggaatgcttttgacaga

SEQ ID NO: 3942 - DNA, 553 bp, Arabidopsis thaliana columbia
  unsure (1)..(553): unsure at all n locations
aggattggtgattattgtataggttgctccagctgagctagaggctttgttgcttactcatcctgaaatcactgatgctgcagtgatcccgtacctcagtacaacactcagtcgtctttctatcagacacagtctatgagtctttaatgttttggtgatttgcaggtttaggaaaaagaagtggggtaatttctaatgggatatgttgtaaggaaaagtgggagtaggttatcagagaagagaataatggagtttgtagtgaaacaagtagcatgatagaagaggatacgaaaagttgccttcgtatntttaatattaaagaagggtttagggaagattgtaggcaaagatgttatcaagataggaagttttaactgtaagatttgaaattattatgagagntaatctgtatgtattatttattgtgtgtgatgtagagttgtagaaaaatctgatactatgtatgcatgttgaaatatgcagatgtggatccaaaatagagaagattagagagataaatggctagtatatggtttatgtaatagagtatatg

SEQ ID NO: 3943 - DNA, 943 bp, Arabidopsis thaliana
gtgtttttcccaaatctctctcccattctttccttctccctttgccgtactttgattcagctcagccataattgccgccgtagcgtcaagcctcttaatctcccaaccacctcttatcagcttcatgatcttctctttctgcttcttcaccaaccgacatgtcctctctttcatccccttcactgtctcctcgtacgccgcctttctcgctaagtcccaaattcccttgtccatctccttagggtatactctaaagtatcggtcgaactcctctactcctatcgtcttccgaacccctagtcgtcgacccgaatctacaacagggtcgtacaattcggcaagctgctcgaccaatcccgactcgatcatttggtcgacacgattgcacaagtgttggaacagaaccggctctaaaacatcaacccataagatgcaacatttgtaccttaggtcagagcagatcgttgaaagactcgatccgggagagaatggatcaatatccgggtcaaaacgctcggcgagtagagcgtgattgaaggagttggatccaccaactacaatcgggagtttcttgctagaaattagtttagagatggacagtgtcgccaaagaacggaactctgcaggggtgagttcaccgtcttgtgggtggaactgacctagaagatggtgcgggactcctccttgctcatgcagtgggattagatttgtgacaatctcgaatcccttgtagatttgcattttgtccgagtttatgatctcggcgggaaaaaaacgggtggcaagatcgactgagaggcgtgactgtgcctgtgcctgttgtacctgtgatgagaacaccttatccttgatatttttacgcctgcatggccatgcacgtagtactaatcgtggtgaccgaatttggtagtgcggtgggaagggagaagatgagagagtggtg

SEQ ID NO: 3944 - DNA, 1954 bp, Arabidopsis thaliana
cctttgtcacggtccctcctttcgcggaggatctcgaactcttttaggtttcatcagggagagacaacgacggcaccggaatccgaatcgattcctccgccgtcgaatatggccggttcttcgtcatggtcggcgatgctccctgaattattaggcgagatcattcgtcgcgtggaggagactgaggaccgttggcctcaacgtcgtgatgtagttacttgcgcttgcgtttctaagaaatggagagaaatcactcacgatttcgctagatcctctcttaactctggcaaaattactttcccttcttgcctcaaattggtacgccttttgtattgattttaccatttcattgatttttgtttcgtcaaattaggtttcgtgttctctgatttaggaatcgatttaggtgaatctgtgagttttgttatctctttcacattatagagacactgttgaattacctaaatcaagcttcttataagaatattctgtcaagttgatggcgtttgatcatgtcatttgaaagctattcacagttgttttgttcgcttaatggtatttgttcttgctttagcttaatatgcctttatagatgctattgtggctttgcttttgttaagagcaattggaaaaaaaaatgggatgagaattgagatagtttagtgtattttgaaatgcagccaggtcctagagacttttctaatcagtgcttgataaagaggaacaagaagacatcaacgttttacttgtatcttgctctaacaccatgtaagttatttcaaaagtattacttttccttttgcttcattcttattgttgattcagtcaaaattagaaaagtatatatggcttgaaatgaaagttttagataggctttttaagtgtgaaaacgattgaattagtgacttcctaaggttgtctcagtcttttacctagtaatgccttgtctttgaaacaacttaccaaccaattgccattaataagtattgacttttttgttgaccttggttgatgatgaagaaaattctgagctgcagtctaatataggagttgacctgtgaagtagtttgctaggcattgttaatccttttatctatattcgggtatcttgacatcactgaatgatattttgagttatattttcattccaaactcaatgaaaatatcattatattaaatttaagagcaaactgctttggaacaagttaagtaaatttttcctttgctggcaaaaggatcattttcaggatttattaatttagtttgtattttctgttcaccagcattcactgataagggaaagtttcttctggcggcgcggaggtttaggaccggtgcttacactgagtacatcatatcacttgatgctgatgatgtctctcaaggaactaatgcctacgtcggaaaattaaggtattgatatgtgcattactgaatatcctaggcggctaggcggccatttaatctctaaagcaggattgctatctcagaagtcctaaatttgttttaaggtttgtttttttttgcttagaagatgagtgtggcttgaaaactaagggttcatggtttttttttggaaacttcaacagatcagattttcttgggaccaactttacagtatacgatagccaaccaccacacaacggagcaaaaccttcaacatggcaaagccagtcgcagatttgcatcaaagcagataagccctcaagttccagcaggcaactttgaagtcggtcatgtttcttataaattcaaccttttgaaatcaagaggtccaagaagaatggtaagcacactccgatgcccatcaccatcaccttcatcatcatccgctggactctcgtctgaccaaaagccatgtgatgtaaccaagataatgaaaaaacccaacaaggatggttccagcttgacaatactaaagaacaaagctcctagatggcacgagcacttgcag

SEQ ID NO: 3945 - DNA, 817 bp, Arabidopsis thaliana
tggggtttctaacagtccaaattgaaacaactgaataagtgatttgatgcactggcgacaaaatctgaatgttttgccaacagacttggtcaatagttgagggtctcattcagtaatgagtttgctaataataaccagaatttcaatattgcattctgaaggatgtttacatgtcagagagaagataaaagatatcagtacctttggaagatatctccttgatgacggtcggacttagaaagccagtccaagttgcagaaatcgttgactctctcagtcgaggttactcctttctcactatcgtctgcaccagattttgtggcagagctactctcttcgggctttcttgaaccaaacagccaattggggctcttgagttgaatctcactgcagatagaaagtcaagaaacaataagctaagattcgaaaagtcatggtttggtttgagcctaaagctatgttcttttctaaactagaaactatctttctactttcttaaagggataaaatgtcattcccaaaactcaaggcaaaggcctaataagatgattgaaaatttcaagtgagaatcattacgctgcatcaggagccacaccagtgcttccagtgttgccacctggcctttggtctgtctcactacaaagcctcacgttctttattgaactgcatgtctgctctatcagtttgtcaaacgatgtcagcttcttccgcgagaagtcgtctctgaaagctggcactggtgcaagattgactccaataccactcataggtttagcaatggactggaccctgcatacacccaaagttagatatctca

SEQ ID NO: 3946 - DNA, 876 bp, Arabidopsis thaliana columbia
ttcattccttatgtcgatttcatcttctttaaggtcgtagaatctcggtaagttgtagccgcatcgcaaagcacatggggctaagagtcttcttcttcgctctccattggttcatgcccttcaatgcatgttattaggttatcaactttctggtccaaatcaagaattctatcaagcaattccacgtatttccttgaggattccatcgtcactatcctaagtgatgcctgtatccttgattgatcatcaacgttcttgacttggttctcctcaacttcaccttgtcttcttatcacgtcctccaaagccacatcttctttcgcgtcattatcttctagtcgattaatgcgcgtttgaagcctccatctgctatcatcgacgccttccatcctggattggattctccttaggtcatcttggctaattgaagagaattcttcacctgggcgaggtgacaactcacgtttgtctctcggttcaagatcatccccgcccgcggcaaggatggtcttttctgacaaggtttcgtgaaataggttttgccggtagcttagaccagcatcctcctttgttcctcatagaaactgtaacgcccccgaatcgctctatggccggacaagccaagggcaacccgaaaacgccacattgatagctcacacggacaacccaacttaggttccaaatggctttagacccttagccagattatccacatgaacatccctcacgaacacggtttaggcttttcaacccttgccatgatcgtgagttatgtcagtctagacaagactaatatcgcatgaaacacactcaactatccaaaacgtttcaacaatgggcccttcagcatacacgctcaaatccaacaaaaatcat

SEQ ID NO: 3947 - DNA, 909 bp, Arabidopsis thaliana
gtgatctcgcgtgaaaagacaggagtcatcgttttgacaagatagagtttcagtcattctgggccacgcttgggtctaaacatgggttttcatcctctagaaccaagagcaacgagataagctttccggtggttagatactttcataggtctttagccagtgcactatttgcaagagagaggaatgggacctttgtcaatggagagctagaattaatggagacagcattgtaggagctatatgatttagcatcagatggtacagttctagctggagatcaggcagacgcttcagtctcattatacataatcgaacatctgctgtgttatagaggatgggctaagggacttaagaaactatgaagaatggttgtggcaggagttgtgaccccaattttgagagcatgcattgtacctctgcattcgaacgattcctccgagctggattgatatgcaacaccttatcaattccaattgtttttggtcgcaacagaagaatggcctctttaaatataggttcgatcaccccgcagcaagacaatctatttttctccttccaaatcccgcttccactttgatcagagatggtggcaacattgagttttgcccaccagtggagaacctctatacttcaggtgatgaagctatgccgatggaaggagtgaacgatgatgaggctccaatccatcattcagatgatgaggcagaacccatgggcgagtcttacgcaacacaacagttttactttgaagagtactccgcgccaaggcaaagtaaagactcgaaggaaattcacaagcgtcttggttttctccaaagctggtgtaaacttcaagataaggctctcgcagcactcaacatgaagtttaacgctctccaactcaagttcagctgttcttcttctactacg

SEQ ID NO: 3948 - DNA, 764 bp, Arabidopsis thaliana
caatgtagctagcaagagccaccagaggcgccaccttatatggaatcaaaccctagaagctgttccgctgcttctcttctcagtttctctgcaacttccctggatctctccaaacctatcagccttggatacgtcagctttcttgccattacgtcttttccggctgtcttacccaattcctcagtagattctgttacatcaataatatcatcaactacctgaaacaaaagcccaatacatctcccatactttcttagcttttggatctcttcctctgttccacctccgattatagctcctaaaaccgccgctgcctccaacaaggcggccgttttgtgtaggtggatgaattctagacgctccaacccgacgtcatatggattcaatccttggctacataagtcactcacttgcccagccactaacccttttgtcccgatggcctttgccagctcagttacagaacggatcatcctctcaggagcaaccaacccacttgacacaaccgtcatgtgctcaaacgccaaagcaaggagtgcatcgcccgccaaaaccgccatgtgttctccaaataccttgtttcccaaaaaagtacttctacacttgtgagcaaataacaatattaactaataaatgattcaactctactgagcaaggcctcatatgatttaacaatataccttgtggttggtgggcttcctctacggaggtcggcatcgtccatgcacggaaggtcgtcatggattagagagctcgtgtggatc

SEQ ID NO: 3949 - DNA, 1183 bp, Arabidopsis thaliana
atctgtagaattcttcatctttaattatgcctaatgctagatctagagtaactaactagatcttgaatccagacaatagatattcccgccataggtatctgtagttggatctattatttgatgagtctggtttataggtgtgtaataagaatcggcctatttactaagatgaataattgaactcgttaaaaatgcatatttaggttgatagtttctcgacttctccggttattattagctatagatatagggagtttcgcggcacgccaccggttattccatatttagagtttgagtttaagaatggttcgataacaacctagctttcattagatctactaaccaatagtttcctgagaataccctgttcctaactctttattaaatcgtttacaacacaatcaatctgctgtctttttactttgttctcttttattttcacttataccctgctagcttaatctcgacatttaactcactgtttgaacaaaagaactccgtgaattcgatcctcaaatactgcaattgatcccttatttgaggaagtagttttaggtcatttgaaccatatcaaatttggtgacgttgccgaagttcttgggaatcatcattgagttttgtttagagatttcgtctagtttttactttgattttgttactcacgcgtttcttgttttctcttttttgtgtgtttaggtgtatgcctagacaaacaagaagcacacaacagaaggagctgatcaacttgtctattcttgacttgggaaaacttaaacgcaccaaccgcaaaactctgagattagcaatggctgacagagtcatcaaacttgatgaggaaggagttttgagagatgaggatgagcaagcctacaatcaggctggtcagagattggataatcatggactcatccaccctgatgacgccaatgaggattaggcgcggcttagtgcgcaattagctgccagagacgtaacaaggctcgatgtcgagcgacaccaactttggtgtcgatcgacatcaaccccagattcctacagctattcctccagctgcggaaccacgtcgtaatcttggggatttcaacaggctcgacctgttctatgctaatcgatcagcgattgtacccccacctttccagaggaacgattatgtgctgaaacttggctattttctttagttggc

SEQ ID NO: 3950 - DNA, 1402 bp, Arabidopsis thaliana
  unsure (1)..(1402): unsure at all n locations
ctcatcttttcaactattgtggaaactggaaacagcttttgtcttaattgcaatctaatttccctacatcctataaaatgcattaaactcatgaggtaaacgtgtatgattactgtggttacaaagcataaaacatatactacttcattctaaaacaaattttatcgataagaaataaaggtaaaaatcagcattgttgtggttacatgtcacagaagtaataagaattagtaaaaaccaaaatcgaattcatattattcttgtaacgctacttattttctacgaatcctaattactcgtaaattagctaatgtaattcaagcaaccatataaatggggaccccaactaactcctaaacctaaaaacttaaattctcctgcccgaccgtggtccaacgctatagtcaacaccggagtcaagcgcgtgacttcaaccgcgtccggacaaattaaaaaaacctagcagaagtgagctgtgtgggaccccaccagccatgtgctctccttcctgtctccaccagcctagcttcctctcaaatcattacctccttcttcttcttcttcttcttcttctcctcgagagagagttagatagtgataacgaaatcctaattccatggccgacaacgacggagcagtgagtaacggcatcatagtcgagcagacgtcaaacaaaggacctcttaacgccgttaagaaaccaccgtctaaagatcgacacagcaaagttgacggaagaggaagaaggattcgtatgccaatcatttgcgcacgtcgagtttttcaattgaccagagagttaggtcacaagtccgatggtcaaaccatagagtggcttctccgtcaagctgagccttctatcatagccgccactggaactggcactactccggcgagtttctccactgcttctctctccacttcttctccgtttactctcgggaaacgtgtcgtcagagcggaggaaggagaatccggcggcggaggaggaggagggttaacagtgggacacacaatggggacttcgttaatgggtggtggtggttctggtgggttttgggctgttccggcgaggccgagtttcggacaagtctggagctttgcaaccggagctccaccggaaatggtttttgcgcacagcagcaaccagctacactcttcgtccgccaccagcagcaacagcaagcttccgccgccgcagcagctgcaatgggtgaggcttcagcagctagagttgggaattatcttccgggtcatcatctcaatttgcttgcttctttgtctggtggagctaacgggtcgggtcggagggaagacgaccacgaaccacgttgagaaatggtattgtctttttggtaatgntatagaaaattcctatgttttatgtcatcgaagtgtttag

SEQ ID NO: 3951 - DNA, 1281 bp, Arabidopsis thaliana
atatgttcgtaaggaaagcatgttggcctctcacttgatgagataaaatttgcatgcatttatgatttcaatattcaatacctgaaagagtggcatcaaattgacacaaaccaagatcacacaagcattgcgcaaaactctcggtaaggataccgcaattgagaacaaagctacctggatctggaaggtttttttttttttttttgaaatccaagaggttttgggccgaaacccgtattcccccaagcccgaaaccacaacatgtaatattagtttcgtcccaagcgtcactcgaaacggcgacttctaagtttcgcctagagtctttagcaattgagctaacgacacttggttctttttttttctaaaattggtggtccagctgggaacgagcgagcaagccatagtgaatctgagtggtgtcgagctgtgatccgtccactgccgagagcgggaggtgatcgctgctctatgaaaccagcctcacgcattgcccaccaatgtaagaaccgcctgagccaagccttcgctcaacacacacagatcactcacagcttggactgggcagcccagaacaatgccacaacagatctgacccgtggaccgagtcagtgttccaccaacttattgtccccacttggttaacaagccctcgttactgatttggaagtttctatttaatcttattctgaataatgtagctaacatgtgtagaaatcgtcatcacaccttgctcagtattcaaatccttagtaaccatcctcttcacatattgtgtgaccataggagaagacttcacaacatctataagtggcatctgtacaatcagcttatccatcataactttgcatctagcatcatctagcttatgtttggacttcctaggactcttggggaaaagaaccttgtgtttggttgccttttctacagctgaaattgggttctggtgaaatcgcaggtctggactggtttggtgtcgatcgacacattattggtgtcggtcgatactgtctgtttctgcagtatctgtgttcactggtatcgatcgacaccaagtagtgtcggtcgacactgatatctggtcagcaaaaactgcatcatcattctcttccaaattgacgattttggctataggaagctcctgttaaagcactggatttaattgtttccactccttaactgaatagcactaacatcttctatatttgtactcaattgctatatttgattgtcaatacttgaatcttccattcaaatctttggatcagaacccaatttgtg

SEQ ID NO: 3952 - DNA, 1232 bp, Arabidopsis thaliana
  unsure (1)..(1232): unsure at all n locations
attcttaataactacagatttgtaaccgaatttaaacatatcctatatttatgctaaagttttactttatttccgacattatatttcatggacgtatattatatcagtgtacgttcaaactgctacagtttacttattacaaaatacatcataattgtaatgacttttcatggacgtacatttatatcggtgtacgttcaaactgctacagtttacttattacaaaatacatcataattgtaatgactttccatggacgtacatttatatcggtgtacgtttaaatagttgtactctatgtagaatgtaaacaaacttagttccattcataacataaacaatacaacatggaactacaaaacataacaaaagagcaggaactacaaagcataacaataaaccgattagagcatacaaccaaaggatagtaaagccgaagcatataacaggaaaacatatgctttacaaaaagtcgaaattatagccgatgcatagaatgggaaatcagatgctgaaccaacgcctttccttaataaaatatgcacaactccctagcataccagtagaagaaacaattccggcagcaggctccgtagttgcaacgacccaaacatctggtgaaaccacgaacctccatgatcgatcccacatccgaggtccttcagcatgcagtcaacttatgtgatacataaccaactcccccattgtgtttgcagcttcgaatgatggcactaaatcccagaaagtcgcattcacggcttcaacctctcgtctgttgctagttgcggttaggaacagtccatgatagaaacatgcgtaggcgtcggtgggagagatagaacccaacatggttaaaccatgagcaaccgtaacgaaattgcaagctaaacgaaccccttcaaggtaaagcgccgacattgctccccgttcaagcaggagggtaaaatatggtcggaaaggtgttttcggcaacacgaaatcaggccacgtcataaactcatccatgttgatagcggtcggcttcagcgtgcttacgggacctctgagcgtttcaatgggagttacagaaacgggtaagtagttgacgaggatgctgagtgggttaggtagctgaatggccatgtaaatttccgccggtgggggtgtcgggacgtcgattgccgagtctgagggatttttttggtgagtttaggttatatttgtcatagtaagagtaatganaagtgtggaga

SEQ ID NO: 3953 - DNA, 1353 bp, Arabidopsis thaliana
atctccatgatccaaggcacaaattccatggtcgcctatgaagaccccctggaccatcttgacagcttcgataggctctatagccttaccaagatcaatggtgtcactaaagatggatttaagctcagactattcccttctctttgggagacaaggcacaccacttggagaacactctgcctctagactccatcacctcatgggatgattgtaagaaggcttttcttgccaagttcttctctaatgctcgcacagctagattgagaaacgagatctcaggcttcacagagattaataatgaaactttctatgaagcttgggagaggtttaaaagctacaccacttagtgcccccatcacggttcaagaaagcctcattactgggcacactctacagaggagctctaccaaagatcagaaagctactcgacactgcctcaaatggaaacttcccgaacaaggaagtagcagaaggatgggagttggtcgcaaatctagcacaatctgatgggtgctacaatgaagactatgatcgctcagtgagaggaactggaggaagtgtggataaacagagcaaaaatatcaaggctctgaatgaaaagctagacaagctgttgctggctcagtagaagcagatacactacatcactgatgaatagcacttctaaatgccagaaggggggaatgatcaaactgaagagttgtgctacattcagaaccaaggagggttcaacaagggctacaacaatcacaaggccaacccaaacctctcctacagaagcacttatgtagctaacccccaagatcaagtgtatccaccacagcagaatcagtctaagccatttgttcagtacaaccaaggttatgtccccaaacaacagtttaatggaggctaccaaaagtagaatccaccaccaaggttcactcaacaaccacaacaagccccaacagctcaagattctgaaattaagcaactcattcaacaaatcattcaaggacaagctattggagctatgacttttgacaagaagatagccgaattgcacaacaagatagattgttcgtacaacgatctaaatgtcaagtttcaagctctggattccaaaatcaagtatgtggagagtcagtttgcatccacctttgctccaaagcatcctcggcaacttccagggaaagcagttcagaatcctaaggactatgctactacaaatgctatcacaatccaccaagaagatgagtctccaccaaatcatcagactccaaatactgaggacagtatgattcaggagggggggattcaactcaaattcctgcacttgtcatccaacaattcatcaagactataaagcacaca

SEQ ID NO: 3954 - DNA, 1289 bp, Arabidopsis thaliana
  unsure (1)..(1289): unsure at all n locations
cttcaacctgagtagatacctcacctacttgaacatcactgtcacagtgatgaaatcaaggagaggtcgagttggcggcactcgatcatgggagatggtgatggagtgaacggttgcatactcttttggattctttattgacttcccaggaagtcctgtgactttaggggcagaggtagatgctgactggccttccaagtacctgactttggtattcaatgcctccactttggcattcaggtcattgtagcagcagtctagcttatggcgcaattcagataatttcttagcaatttccatcgagctagatgcttgtccctgtagcagctgttggaccatctgtttcatttcagcatcaggagcagcaggaccttggttttgctgaggtgcaaacccaggtggtggtggttgctggtagttcccctgaaattgttgcttagcaacgaaaccttggttgtagggaacaaaaggtttgttctgaccttgttgttgctgtggaggatacaccttatcctcaggattggcaacgttggtgctgcggtaggagaggttggggttgttggttttgaagttgttgtatcctttgtagccaccttgattgttgatgtagctgacttcgtctaactggttcccctccccatcttggaattgagactgctcgtcatcaacaaggaagtgcacatgcttcttctaactaaggagaattctgtccagattgtcattcagtgctttgatctccttcctgtgtttgtcatcggagtcagctgtgcctctaacggtcctgtcgcagtcctcgttgtaattaccatctgattgagccaggttctcaaccaattcctagccttcttcaacatctttattctgaaaatttccattgctggcggtatccagaagcattcttatgcgtggtngacacctctctataaagtgctgagcagagaggctttattaaagccatgatgagggcattggttgatgtaacccttgaaacgttcctatgcttcatagaagctttcaccagtcttctgttaaaaaccagagatctcatttttgagttttgcagttctggcgttggagaagaactttgctagaaaggccttcttgcaatcatcccaggtggtgattgagtcatggggcagattcttctcccagatgtgtgctttatcgcccaaggagaataaaaacaaccgaaacttgaatccgtcttcactgacaccgttgatttttgttaggttgtagagtctatccaattcatccaagtggtcgagtggatcttccataggtagacc

SEQ ID NO: 3955 - DNA, 463 bp, Arabidopsis thaliana
ccgcgtttcgacctaagccgctggtggcgccggtaaccagtaccttcatatcaatccactgttgttgagaaaataacgtgcgcattcttccgtgatttcccccatgatgcaatgggaaacatgaaagaataacgcaggttttgtcgattaatctgtgctttgttctgccagtctggcgatttgttttgccattccgcgaaaaataaacagatgcgcggggatcatcaataaccagtaaaacagccccggcataccgtgcggatgccagaaagcgcggacatcgatagtacgatagtcgcctttatcttccaggctaaaacacagtcgtcccagccccggcgctttcatgccaaataacaacgtaagttgtttttccggttcaacgacaatcactttccagctatccaccgcatcgccagtctgtaaatattcgcgctccgggcggccgtttcgcagcttatga

SEQ ID NO: 3956 - DNA, 1125 bp, Arabidopsis thaliana
cttcctcgcatttttaatgtcgcagttcatgtaactccatcggtctttgaacaaatatacattattccttctcttagcagatttgtcgtacttgaaaactgcaccatgttaaaagaagttattcaccaattaggttatttaacattagaaaataaggaattgtacacataaaataacttaccaagaacatcattgacgtagaaaggagcattcttagaagcccaatctttgtaatctaacccttttttccatccgtctgatcctcccactatgatcttttttggtgtttcacggtccaaacccgagcccgaatccgaaccggaactgtttgagtcgttatcgtttgagccccaactccaactccagcctgacttaagactccagttccaactccttcttgaaccatcagggttggtacttgaacccgagccagaaccacggtttgatcccgtgccccaaccccaaccagagccattattagagtttgaacccaaacccgagccggagttatcatcggatccccaactccaacttgaaccgtcagagtctgaaccagtacctgagctagaggtacttgacccgtcagatccccaaccccaacccgacccgtaactccaactccagctccacgcctctgcgccagatgaggagagacatgcaatggccacgacgagtatgagcagctttttttgtgaaccagatagagccatcgtgtttttcttctttttacgtgctttgtttagtatatgttgtgtgactcttgctttgcttattgtgaactgcgataatctgtgttggttatgtgagaaacgtatttatagagaaagataacctaattaagacgtatattcccgattgatttgggagtagaacatataatttacaacagtttcttttttatatttcgtgtaattatcacatctacgagtaattattaattacttgcgtctatgtgatgttttcttttgtcaaccaacaaaagataattgtactataaaaaaaaagagaggaaatccttaaatatcgcatgattaattttgtataactcaaaacttaattatctagtcagtataaagagttaactataatcaacgtataccacattgttttgcatgtgctttatgc

SEQ ID NO: 3957 - DNA, 515 bp, Arabidopsis thaliana
gaggaatcgtcgaatagtccgtcaatttaaatgtaacaatgaccaaccatgatttaaactctttttcaaactttggtctaggcctaaacaatccttgaccactatgaattagttagaaatcttacgtacggttatggttaatcacttaacctattctcgttttgtgatgtagctttgagaggagctgcacaattaaaggcaagagcattgaaggaggtatggaacattgcggctgtgattcctgtagataagggtacaccaaaaggcggtggtggtggttatagaggtggcgagttagcccctgtagataattttcttgggatttgcagtaaagaattgctagctaaaggttgcgaattgcttaaacgcacccgcaaaggtttgttaatgtcttatagtttttccagtttagttcattttgagtaatttttgaatacaccatttcataatttttgttagtcctttttaaaaatactcattccatatttttcaggtgatcttcattggaaagttgt

SEQ ID NO: 3958 - DNA, 359 bp, Arabidopsis thaliana
agaacaagattcatcagattcgagcgaagaagaccgtagaaagtacaaataccaatagaaagataatagtcggagagagtgagagaagtagatgagacttacaagaggaaatcgaacggaagaaggcggacgaatcagagaagaacgccggagatttagcgccgggaaagtaggcgatggttgaacaatagacgccatgttcgagaaatggatccggagagagagattttagggttttgagaaaaagcagtcttttcttcttcttccccgcgagatacgaatttgactacaagaaaatgactctctcttcttcttcttcctttatatactcaaaaactcatttctaagtttttaactaa

SEQ ID NO: 3959 - DNA, 840 bp, Arabidopsis thaliana
tgcagttttacagctattctctttacctcttatgcctctatcaacctctcttggtcaaagtttttctgtcgcttttaagaacttctcccctcagcattcagctggtctagcccggatagtgtgctcctacttaagagaacatctgaagaagacaaaaatccttttggtttccattgaaggtactcagcttcttaaattagagtctgcaatccagacgaagattttgagatctctttcctgcctagaaggcatgttgtccctctccaactttttgttgaaaggatcagcttcagttatctcagaattgagtgctgctgacgctgatgtactgaaagaacttggtataacatacaagcaaacgatttggcagatggccttgtgtaatgatactaaggaagatgaaaaaaagagtgttgatcgaggatctgataattcagtttcagcttcatccagtactgctgaaagagagagtgatgaggattcaagcaatgctttagcagttagatacacaaaccctgtttccattaggagcagtagttctcagtctatttggggtggggatcgcgaatttctgtctattgtgcgttctggcgaaggtattcatggtcgtacgcgacatgcaatagcccgaatgaggggtgggagaactcgtcggcacctggagtcttttaattttgattctgaaattccagctgatctaccagtaacgtcatcttcccatgagctgaaaaagaaaagcactgaagttctcattgccgaaattttaaacaagttgaattgtacactacgtttttttttcacagcccttgtgaaaggatttacctctgctaatcgtcgcag

SEQ ID NO: 3960 - DNA, 553 bp, Arabidopsis thaliana
  unsure (1)..(553): unsure at all n locations
nnnnnnnnnnnnnnnnnnnnnnctaaagcagcttctgctcgccccagcgtccgtgcgccaggttatctgcgccgaggatctccagcgtgtccatcaccatcggtacgccgccttctgcctgcgagcttagcgcaatatgttccgggcgaatgcgagagtcattttacgcccggcatactgacggtagccaccgtttagcggcagtgcaataccgccgtccagttcgaaatgcgtgccttcgttattcacgcggcctgtcagcaggttcatcgccggactgccgataaaactcgctacaaacaggctggcgggcttttcgtagacttcaactggtgtgccaatctgttcggcaacaccgccgttcatcaccattactcgctgggcgagcgtcatcgcttcaacctgatcgtgagtaacgtagagtgaagtcgttttcaggcgacggtgcaactgttgcagttcaagacgcatcgtgcacgcgcacgttggcatcgaggttagagagcggctcatcaaacaggaacaccgccggatcgcgcacaatcgcgcggcc

SEQ ID NO: 3961 - DNA, 472 bp, Arabidopsis thaliana
cccattacgaccactgaacaaacttacatttaccatacatatcaagaagactactctcgaccaccacattgctacctatcccatttgtaataagcttcccatgaatctctttcccttgcttcagcctcctcagattaccacaagcagtcaaaaccgttccaaatgtagacccatccagcaccaaccctttccctctatgcatcgcataaaaaagtcccaaagcttcctcgtacaagtcgttcttagaaaacgcagaaagcacagctgtccaacaaataacatctggctcaggcatttcgtcgaacactcggcgtgcatctactggttctctattcacaccgtacaaatacgccaatgtgctagagataaaatggttccactcgaacccatgagtaataacaacaccatggaaacatctccctagcctaacttctccaagctcagagcaagccttaaccggccgaagacaacg

SEQ ID NO: 3962 - DNA, 1273 bp, Arabidopsis thaliana
aacagaaacaatatacgtaaccagctctcttattgggcttaaaacatttaggaaatatatttggcttctctttgctacaaaacaccttgcagattgaatatgtaggatcctagttacactcatgagagggcaaaaataaatcaattatatctgttttctttagtcaaaagattaaaacagtgaaggaatttttttttgatagattggattgtgtttacatatttgaaattgcagatatgtggatgggctagatgagggaaaagggatgtatcttctattcataaaaccagagatcaagactccgtcaggtctaatggcccgtcctgttttgaccagctactacaaaagtcaacatttcagaaacagaccattcaacaagtacaacgtctacactagccctgaccagaccattctttgtcaagacagcaagcagagcatgtactgtcagcttctctgcggtctagtacagcgatctcatgtcctaagagtcggagctgtctttgcctctgcctttcttcgagcagtcaagttcttggaggatcattacaaagagctttgcgctgacattagaaccggtactgtcactagctggatcactgactcatcctgcagagactcggtcttgtcgatccttaatggcccaaatcaagaattggctgatgaaattgagagtgagtgcgctgaaaagtcgtgggaaggaatcttgaggaggatatggcctaaggctaaatatgttgaggtgattgtgactggttcgatggctcaatacattccgacactagagttttatagcggaggtttaccgttggtttcaacgatgtatgcttcctctgagtgttactttggtatcaaccttaatccgttgtgtgatcctgccgatgtttcctacacgcttcttcctaacatggcttacttcgagttcttgcccgtcgacgacaaatcccacgaagagattcactttgcaactcactccaacaccgatgatgatgatgatgctctcaaggaagatctcatcgtcaatcttgttaatgtcgaagtcggtcaatactacgaaatcgtcatcactacattcacaggtcagtgactctctatacgaacacaatctaggtctgatgtggattcctaaaacggatagtaacttgtagcacaagtgacctgttacatatgtttttgtcaataggtttgtacagatacagagtaggcgatattctaaaagtgacgggtttccacaacaaagcgcctcaattccgtttcgtgcagcgaagaaacgttg

SEQ ID NO: 3963 - DNA, 504 bp, Arabidopsis thaliana
ggtagcacgataccattttccatcggaatcaatatacgttattgcagtacgtttgtccacaggattgaatggtaagaaatggatttctctaatgtttgcacgtgcctacagataaacaacctttgtatgagaaaaacttctaagaaggtgatagtcttataaaagagagttcatgttagagaaacatctctacctctctgggatctgcaagcatgctaacaatggctgcatctatagcatcctgattttctagtcgtgaagctcggcctgcaagcaacaaaattgtatccttgtccatgtagtcaacgaatacctgtgcagaaggatttgtacatttaaacaccaacaatagagaacaagacgatgaagaaggaggcaactgttcttaacagtattgtttgatgaaattcaagtcgcatctgtagtattggtacctcaataagatttttatcaacggtaagactgttcaaagtaagggttccagttttatcacagcagagtaca

SEQ ID NO: 3964 - DNA, 1073 bp, Arabidopsis thaliana
tcgagtatcaaatgtcaggaaagttatgtcatctaccacttttccaaggtaccggcacttcagtgacagagatgtatcaggcccagcagcagcaccgtacccctggaagttaagagcttcaagaaatactttagctagggcagtaccaagagtcttagatgctgaactcaatgatggcccatcaatcctgcgacgattagcagaggtaaatcctttcacaagggatgtgaaaaaaaaacgtagtgtacaattcagcttgtttaaaatttcagcaataagaacttcggtgcttttctttttcagctcatgggaagatgaggttactggcagatccgctggaatttcagaatcaaaattaaaagactccaggtgccgacgagttctcccacccctcattcgggctattgcgtggcgggtatgaccatgaacacctctgccagaacgcacaacagacagaaattcgcgatgcccaccccaaatagactgagagctactgcttctaatggatacagggtttgtgtatctaactgctaaagcattgcttgaatcctcatcactctctctttcagcagtactggatgatgctgaaactgaattatcagatgctcgatcaacactctttttttcatcttccttagtatcattacacaaggccatctgccaaatcgtttgcttgtatgttataccaagttctttcagtacatcagcattagcagcactcaattctgagataactgaagctgatcctttcaacaaaaagttggagagggacaacatgccttctaggcaagaaagagatctcaaaatctttgtctggaccgcagactctaatttaagaagctgagtaccttcaatggaaaccaaaaggttgtttgtcttcttcagatgttctcttaagtaggagcacaatattcgggcaagaccagctgaatgctgaggggagaagttcttaaaagcgacagaaaaactttgaccaagagaggttgatagaggcataagaggtaaagagaatagctgcaaaacagtatcaattcctttcttctcaacaaacagggaacatacttccgcattgg

SEQ ID NO: 3965 - DNA, 540 bp, Arabidopsis thaliana
tcttgaaaaaacttgacagattctacttcgactttagcatgacatacgttggagcaggaatgatctgtccccatattgtcaatatatctttgctttttggcgcggttctgtcttggggaatcatgtggccactcattaaaggtcttaaaggagattggttcccatcaactcttcctgaaaacagcatgaagagtctcaatggttacaaggttccatacaaaaaacactagtactctacaataaactccgccctttctttcgcgtactttcgttcttaatttgttcataactctttaggtgtttatatcaatctcattgatcctcggagacgggctttaccaattcatcaagatactttttaagacaggaataaacatgtacgtcaagttaaacaatcgcaactctgggaaatctagtaagtatacaccaaaaaaactatagaaaaatcgtcatttcaataatgtattatctgatgttcaaacgtaaatcgcagattcggagaaagataagcaatctattgcagatcttaaaagagatgag

SEQ ID NO: 3966 - DNA, 599 bp, Arabidopsis thaliana
  unsure (1)..(599): unsure at all n locations
gtaacggccgccagtgcccgtgagtatcttctaatcatgcccttagtaatataagcgttccttgtttcttttcatttttttccttttgcttatttctttgtaatgatgcctgcaggtcctcgccaaaaacaaacttgactgccctgaccttggaacgttgtgcatcaaagatcaaacccttccatctgaaagtaggcctcgttcacttgctttttctttctttattttgtcctgataacccggttgtttgactaaccaaaaactatgtgttcataggtgttgaaaaagtggttggctgggctttcggtcaccatcttatgatatgcactgaacctatagttaaagacaacaagcttgttatctctgcagagaggtgagttttcttctataggctgtgtgtgatactaagatacatgtttgatgtataaattacattttggcacgtgttgcagcatttcatatggcctgcagacgttgcatgatattcagaacgaaaacaagagtttaaagaagtctctcaaggtaatattatgttacttaatttctttcttcccaagctgcctagtaagttctggantaagagttggtttactatactg

SEQ ID NO: 3967 - DNA, 350 bp, Arabidopsis thaliana
ctaagatatgtcgttgttattgggtagagatgaccaaagatgtctcactaattcttgtattgatgtccagtgctgtatatgagagaaaaaaggaaagagtattgatgcgtttgagtggacaacagtatccataggcattagtagccaaattacagtaatcagtatagattgagctgcgggtggacttgggacattggtggatgtcatacttacatgtgtaacgtcatccgtagtggacgttggtaatctgtccagagagctctctggcgggttcgtcccgagaatatgtttggcatttgagatagttcgggtcaacgaactgaaaacctggtatagggtttagcagtatt

SEQ ID NO: 3968 - DNA, 1726 bp, Arabidopsis thaliana
atctcctaccaataccttaatatctctgattatcccaagagaatgtaatattcctcctcccgaagtacgaataggcaaacatagtgggactaactccactccagacaatttttcaaactaatcgacagacataaaggaacgggtggcaccagtatcaaaaagtacgaaagcagaattaccaaggatggataacataccctgaatagcatctgcctcttcactctcaccctaattgcctaatgcatagacgcgacttgcaccagtttgacgaccaggcgctagatcacaggtgacaaagaccttgattctgagaaacttgtgcaggtttagcaagaccattattaggacaatccgctatgaaatgtccagcatgaccacaacgaaaacatacattcttagctcggtgacacatctcactcgaatgatttgtccgaccacaatgagcacatcctttgttaactccttgtgctggccttggttgcattgttgatttgccatatggagttccacgaacatctggacgcttgtgtctgtccacccggttactgtttcctgaagagccactccccacatatgttggtgtctttttctcatttccctcgacaatgagagcacactccaacactccaacatatgttggtaatctctctgttccacctaatttcatacccaaaagttatgaaggtctgcaaaattaaataatacagataaataattaacttaagtggtttttactaaccacaactctgatggagtctcgaagtccatgctcaaatcgtttagctctagagtggtcatctggaataatatgtgcgccataacgagataaacgatcaaactcaacttggtactctcttactgtcttatctttttgcttgagctcctcaaatctcatcctcaagtttgatctaacagactcttggaagtacagatccataaatgcaccctgaaaatcatcccaagtcatctccacaccaagacgggaagtaacaatgcttctccaccaatgttgagcatctccagcaagttggtgagtaaccattcgtaacttaaaagccttaggaacccccaaataccccagcgcctctttaacaagatcaagccatttctcagcttccaaagggtcagaagaaccttcaaatttctgcaagccgactttcttttttaacctatcttgtaacacccaatagtcaagctgagggtttccatgttgagcctgaggaacaactgcctaaggtagttgctgcaacaaagtctgctggatagcagcattctgagcaaacatttgattcatagattggagcatttgtcgcatatcctccattggaacagcatttggtggaggaggtggtggaaattgaggaccattaggaacatgaggaggagttcctggaatagggacacctcgaccagcaggagcaacaggaacacatctcgcacgcccacgtctagccatctgaacgcaattgaatgagaagttaaactcttagtttagacaaatttggtcacaaaagctaacagttaaacctcacattcaaaatcctatcgcgagaccagtaagatatatattttttattttaaaaacaaaacctacgaaggcttttgaaaatcccaaggtttcgtaaaacctggctctgataccaaactgtaacaccccaaattcggtagaattttgaaagtattactaaaaataatataataaaaatactaaaattcaataatgtat

SEQ ID NO: 3969 - DNA, 944 bp, Arabidopsis thaliana
aagagagatggggaggtcgcgtttttgaagagagaaggcgatgagatcgagtgaagggataaggcggaggtcgagtggagtggagaagaagagatagatttcgttatcactttgtggggagcgtgggagacatggctgcagcagtgggtccctcgttgtctccttgtctcttctctatattctctgttcactagaaaaatccccaggaaatcccgcaatcttctgtaaacttgatgaactctttgtaacattctgtagcttctgttggtcgagtaaaatgatgatttaaatttttttacgtttttaaacatcactcaaacacgaccaatatactcgatctctaggacatcagtagagtaaaagttttgaatttttactctaccttcactttactcctttcttcctgagaaccacaaacacaaccaaaacaaatcaaaaataacaagaaagtaaaaattatttacaaggatagtcatggaacttcctcccaagtgagcttgttttaagtctctagcttgactcctcacacttatcaagaagaaaatgaactgtagagagggtcagcataatcctctctgataccatcatcatactcagcgtcctccctggagaggtctgcagcagaatactcaattcccctttcttcaaaataggcttccttctcttcttgagggtaatctgtctctggagaccatcttgaagtgaattcttttctcgggatagtgttaatcccgcctttaggttgagcttccttctgcatctgattcagcttactcctaagttcctcaatagtgtgggctagcttctctatagtttcatcttgcttatcagacctctttttaagttctttcactcgttcagtctcatatccttctcctgagatcgctttatcatttccagaggttcttccatcttcggttgacccttgtggagttttgttgatg

SEQ ID NO: 3970 - DNA, 483 bp, Arabidopsis thaliana columbia
attccgaaactgacatcaaatggatttttctccaagaggtcaccaagttctcagtttagatctttgaatgctagtacaagcacaatattgaagcatgcgaaaggaacatccagatcatttgacggaggcagtagatctttagataggagtaaagtactaacaaacgaacccagatcgaagtttccattgaaccaatcttctgaaggaacaagcggaggcgggtcacctaattcaacaaaacaaggagattcagagaaagcagcagggacaaataatgatagtgtcccaggagtattacatgatttgcttcaaaaggaggtgataactttaaggaaagctgctaatgataaagatcaaagccttagagataaagacgaagctattgaggttagtcattagttttaccctttccaagaaacgtttgcttatatttatttatattctctgatcgaaatacttgggcttgtgtttgcttttagatgt

SEQ ID NO: 3971 - DNA, 1507 bp, Arabidopsis thaliana
tgacagatcctgaaaccaggtatacgatgatggaaagcttgcacttgcagtagtaacttcagctcggaagcttcgaccatattttcaatcccatccaatcaaagtgttatcaaatcaaccacttcgaactattctccatagcccgaaccagtccggtagattggcgaaatgggcggtggaattaagtgagtatgatatagagtacaagagacgagtcgccatgaaagctcaagtccttgccgattttttaacagagttaccggtactcggaggacaggagcagccgccaaatcagacttggaagttgcatgttgatgggtcgtcatcaaaaaacggattcggggtgggaatcaaattagaatctcccacttcggaaatccttgagcagtcatttcgattgttatttgctgcatctaacaattaagcagagtacgaagcattgaatgctggacttaggttggcacaaggagttggggccgatgaggtggtcgcctactgtgactcacaactggttgttaaccagttcaatggtgactatgaagcaaaggactcacgaatggaagcatatcttgaggtggtcaaagacttggctaaaaactttaagaagttcgaactcatttgcataccacagggagaaaacactactgcagatgcactcgcagccatggcatcaacatctgatcccgaagtcaaaagaatcattccagtagagtgtatttcagaaaggagcattaaggacgaaaatgaggcattcgtcgtcacaaggtcccgagctgcagcccgagatcgcggcgaacctgttattgaaccgtacctaagccgactgtacaagaagatactgggctcgaagaaactatcgaaccaatagaagaaatcaccccggacaccacagccgaagctggaaccgaaccgtgggttgacgaagacatattagcgccaaatgagcatccgaacgagaagctcggatatttcacgaaatccgaccaaattccggctaaagattggggggctgattggagggagccaataaagcattatatcgttacaggcgagctcccaaagaatagatggcaagctaggaaaatgagaatcgttagcgcgaaattttgtctatcgaagaattctttgtatagacgaggtgtaagtgatccctacttactttgcatttttgggcccgaagtcgagatcgttatgagcgaagtacatgaaggtttgtgtggaagtcattcctcaggaaggactatggctttcaagattaagagaatgggatactactggcctactatgatcacggactgcgttaaatatgctcaacaatgcaggcgttgcaactccatgcaccactcatccaccaacctttggagttattctcttcgatctccgcaccataccctttcatgagatggtcaatggatatcattggaccattgcataggtcgacccgaggtgtacagtatctactggttctaactgaatatcgaagtggattggaggtgaagcgtatgta

SEQ ID NO: 3972 - DNA, 1026 bp, Arabidopsis thaliana columbia
gcgaaaacacataggggtcaagcgaagtcagaagggttctaacctaatctttaccacttggctaacctagagattaccctaatctaatccatcctcaaggaaccctaatcactactcaagcaacattctcaagaacacaaacccagaaattactgaaatcataccaaaatgtagatctaaacaagctaaacaactttacttaaacaactaaatgcaaaacaaaatagattaagagtaattaagttttgaagattcataaacacaaagaaaaactaaaggataaaagctcgatcctttggacaaactccaaagtgatctatttatagtaaaacgttaaaaccctagattcactagaagacaagagacttgaggcggtttgggtgaatgctcgatcttggggatcaagtaaggagggtgctgcaaagtctgcgcctttgtgtctatgctccgagtgatcaattggtcgagtagatgcttcttcctctcctatctgtatgctcagatgtctgtttgagtggggaatgaagaggatccgaagacgctttgatagctcaacaagtcttgtaaagttggtcacccttggtcgagtaaatgggtcgagtagaggatcgagtaggaggggcgagtagatcaatctgctgcttcatcagaggctgccttgatcgagtaagagggtcgagtgaattgcagcctcctctgtagctgcctggattgagtaaagaggtcgagtgaaatgatgcctcttctgtagctgcctggatcgagtgaatggatcgagtagagtcctttttagctccttccgcacctgaaaacacactgaaacatgcaatgcaaatgcaagatgatcctagagcctaagtatgcaaaataagctaaaatggtgcaaaatgatacgatacaatgagcatatgcacagctaaatgatgataaacatacacctaaaatgagtaaaatacaatgttatcagctagtaatgggaatttcatgtcaagatatccagaaaatgcaacaatgttgattgacagc

SEQ ID NO: 3973 - DNA, 1379 bp, Arabidopsis thaliana
gtgttggaaatacagaaaaaatggaagatatgtgagatttgttgttctcagagttagatgagttttaagagggtgtggatcatgcagcttaaagcatcaccggtgactgtaacggctagcagctcgactctcgggacttttaaagtggggacacttggacaaagtcacacctccatggactgattgtcaaagcatctgtagtggttgctcctatggtacttcaatttggtcattctttgttaacctttagtagtttggtggtttttggttatgtcgtatggtcacctacagggttattgcatttggaacttttaacttcgaaactacatgtatcctatatccaaatgctttatcactttgtactgaaatgcgttcatgtgaggttatttttactcatttccgctcttttgcacctaagatgtgttgaaagtggaaatgagctaaatctttgttcagattattcaaccgaattaagaaagattgacaagttagcaattaagataaactctttttttttttcttttttcaaagaacaactttgaaaaggaaacaccaccaaacgaaaactagttgtagataaatctcatagtactagtggcagatgtgtaaccaccatcaacaaccaagttatgtccggtaatgaaccccgacgattcttggcttgcaagaaacaaagctgcttgagctacgtcctccacagtaccggctcttccggtcagcaaactccctttctcagcaataatgtcggtgacctcagcgacgttgagtttgtcatggttaaggaacttacggtacgcattaaccaagatgtcagtgggaactccatgaggagagatgctattcacacggatgccgtgagacccaagctcgcacgccgttgtcctcaccaccccgttgatggctcctttggagagcgtatacgcatgtcctccaagtcctcccattagccctgatgagctcgatgtgcatattatcgagcctcctcgtcccccttctcggttttagttacatcataactaaacttagttgtcttataattaaagttggagcttcggaattaaacactatctgaggtagtaataatacatatatacctttgatcataggcttagcggcatgtttgataccatgcaaaacaccattgacattaaccgagacaagtttgttaaccatgtccacgtccatccccatgatactaccttcgttaagcgacatcccggcattgttgaacatcacatctagtctacctttacgtctcattgctagctccactgccgcctcaacatcagcctccttcgatacgtcacaatgaacgtaacacccaccgatcgattccgccacaaggatgccttcattctcaaggatatccggctctagag

SEQ ID NO: 3974 - DNA, 1417 bp, Arabidopsis thaliana
attggcgccagggtggattatgcagttaatcctggagttcaactccgttttctgcagccacgagtttcaagcgaaacgaagatgagaacgccaaggccgtggagaaggcgaacaaagttatgaaccggatgaaggctgccgaactgcaggtccaaaagcttgaagtgaacaatatcgacctgaccgcaaagctcgaggccgggaagaatgcatatctcgacgcagtcgataaagagacccaagctcgagccgacctcaaagcttgcggagagaagttgaagaaaatggaagaggagcaagccgcactgattgctgcggcgagaacggacgaaaggaggaaagtgcgggctcaattccatgacttctcttcgaagtacgggaatttcttcaaagaatcggaagaggtcgagaccctcaaagttcgggttgcggatgccaaagcgaacagagagttgcttgaggaaattgagaagggagaaattcctgatctttcaaaggagcttgaatcagtccgggctgatgaggagaagttcgctagacatgctgcggagcgaagactcctcgtcccgacccgactgaactcacttcgctcctcgccgacacgccatcggaggtagctgcggagagtattcctcctgccgaggtggcgattatcgacgatggatgctctaacaagggctccacctccgaagcagggatagcggccatgttcccggttgacgtcgagaaggactccggcaagacggagtaaaaatttaaaacattatcgtcttttggggttgttatggcccgaagttgctacccatttgtttttaagacttaaatgcttttaattttcgttggccacagaggccattattttttgaagtacttgactttggtcgtacaaacttttttgaaaacttttctctttgccaaatttgtctatggaagtgcgagtttaactcggcttatatcgcgtagaaatttgacaagaaaaagatgacattcgtttgcaagctgagctcggcttatagtttagtacggatatcacttatgaccgcgaacttaagttattagcttaattcggatatctctgaagcataggttcggatgtttagtaatccgcctgaagcagtttcagatgtgaaaaccaaatacgactttaagtatgaaaatgtttggttttattgattatagagactggacccgaagtgcgggctgcctacgtacccaaaggtggggatcaagtcagacgtagttcgatttacataagaaaaatgctttaaatgtaaaaacgttttagatgcattgaattccacgccctgcgaactgtttttccttccatgttaatcaggcggtagactccattgcggacaacatgtgtgattttgtaggggccttcccaacttatccctaatttgcctgctcccttttc

SEQ ID NO: 3975 - DNA, 1428 bp, Arabidopsis thaliana
tactcgatcacgtcactcgattgacagtccattcagtctacttgatcaacgccgcgattacaaccttcccactaaagctgacttagcatccaacgactgatcagaactcaaagcacccaaggtggacttgaaaccgctgccaaaaagactaaagtatgttttccttggacataactctacttatcctgtgattgtcaatgctggactgaacactgatcaagttaatctactgttaacaaaattgaaaaaatatagaagagttataggatattcagtagatgatatcaaagggatctcacccattctatgtacccataaaattcatttagaaaacgaatcttactctagcattgaacctcagaggagattaaacctgaaccctgaaagaagtggtaaagaaggagatacttaaactattagacacgggtataatttaccctatatttgatagcactttggtatctcctgtccattctgttcccaaaaaagggaggtatgatagtcataaaaaattataaagatgagctgataccaactaggaccataacaagacataggatgtgtatcacctataggaagtttgatgcagcctataagaatgaccacttcccattacccatcattgaccaaatgctaaagagatcaacaaaccacccctactataggtctctagatggttccaacagattctttcaaatctatatccacctatacgatcaagagaaagccacctttacatgtccttatgggatctttgcttacaagcaaatgccttttgggctttgcaacgcacctgctacttttcagcagtgtatgactattattttctccgatttgatagaggagacagttgaggtcttcatggatgatttttccttgcatggctcttccttctcctcatgtttgttaaacttgtgcagggtactcaagagatgtgaggaaactaatttggtattgaactggaagaaatgtcacttcatggtcagggaaggaattgtcttggggcacaaaatctcagaaaagggagtagaagttgataaggctaaggtagatgttatgatagagttgcagccactaaagattgtgaaggacatcatgagttttctcgagcatgcgagattttacaggagattcatcaaagccttctccaagctggctagacagctcactacgctgctgtgcaaataagcagagttcttatttgatgaagaatgtctaacaacctttaagttgatcaaggaagcttttgtctctactccaatagttcaagttcttaactaggactatccatttgagatactgtgtgatgcttcagactacgctataggagcagttcgtgggtagaagattgataagaatctcatttcactactatgctagcagaattattggcgatcacaagggaggtatgcactaactgagaaggac

SEQ ID NO: 3976 - DNA, 1126 bp, Arabidopsis thaliana
agctcacacctctatgtcattgctctcttccctcgagctatctcagcttttctcttgaagttgtcatattctctttctggccttgaaaacgatgacccagtctcatccatgttatagtcatgatcaattgaagaactgccactatagttactcatgattctcctgcaaaagattgagaactcaaaactcaaatgtcaataggttagtctcaaagaaaacaatgaaaccaaaatcgttatcaacaggcaatgaaatggaccaaattggtcgagtgtaatctagtactcgagtaaactaaactgttcccgagttcttctttaacgttttgaatcgagtagaacagaaatctacggtcgagtatatttgttgaggtcgagttcagcttgtgaaatcaagcggtcgagtaaactgtcaagtgacggtgaggaatttgcagggacggaaccacgaatcgacggtcgagtagatggtgcacttggttacggttgtgaggcggtcgagtcctgtgggtgtaattgagtagttcttgaggctttgatggtgaccgagatgggaaactcgactgcgggggcgaagaggtggtcgagtacggtgagttgtgctcatgtgtctttgctctttgcggtcgagtgttgtggcgagaaccaagtgacggtgaacgacatagtgaattggtcgagtatggcgattaaatagagtgaaatggtgttgaatcgagtaattctttggtcgagtgagagatggcgatttatggtgaagtagagaaattggagtgttggtggagagatgaagagagatgggtcgagtagactttacttttgggtagagtgagggcgaattcaaaaggtgtggtggaggtgtattctgtgattctctctccatcttatcttcaggaagaaaacgcgtgtggtccacgccctgttgttttgtctttgagcttagttccctgttgactgaaaaaattaggagaacctgaaatcctctgtaagtcattgttagtcgagtatatggttgaatataaaggatctcaaacatcaattcactcgactatggatcctcatcagcacgtggccaatgaaattgagtgataaatgaaaccttgtttatactcgatttcacaggggga

SEQ ID NO: 3977 - DNA, 1467 bp, Arabidopsis thaliana
ttatacccaataatttattagtatcaacataatttacatcttttgccgtttacaacgttataaatattgttcgtttaatgcatttcagaaagcttcattgtagtatatgcatttaaagcttcattgtagtaaatttattgttcgtattcgaatgaagtttgcaaagaaatttaagaaaaagagtataaaagtaacgaaataagttatttcaaacctgcacaatagttaacaatttgtaaatataaaaatatatgggcgtattaactatttaatactgactaaaaaaataggttaatttggctccagaaaaatataacaaaaacagctaagatgtaccaatctgatattacactaaaaccgaaccaagatttacttataaagcaattaatggtttcatactttcgttaattagaaaatcaaaaatcaaaattgaaccgaactgaaccaattttagtgtatctaaactaaacataatcatattatattttaaaatttttaatactgtatttacaataaatatattcgtgttgtagaaatgtaatataaactatgtaaagtctttatctatatttataaatttatctagtcatggtaatatgtagtgcaaatataaaaagaaatcacccagcataaaaacatttaaaatttcaacaattctttgaactacatccacaaatccttcaattcttatcttcaaatgatgtgacatatttttaccccactaaaattccactaattcatttacacttgggttagacccttcttacatgttccccaccctttcaattcaggcataaagcataaccgaatcgttcacagatagagaaagagagaaagattagaagaaacaaatatggtagatcaaaataaagcatttggttgggcggccaacgacgaatcgggcgtcctctctccatttcatttctctagaaggttcctttcgtaactttcgtttacttttgagttttgagaacacacttaattagtctttgattatctttcacaagtgttgtatgttttggtgtcataatattgcagagaaaatggtgagaacgatgtaacagtgaagatcttgttctgtggtgtttgtcactctgatcttcataccatcaagaaccattggggattctctcgttaccccattattcccgggtattctcattacttgccagttctcttatcaatgctcccaaatattcttatttcctttgttggagattttattagctttatagaataagaaatgtctaaggtttggattaaaattatattggctaggtgttgaccctctccgtacgattagggcttagcagttttgagcattggacaagttccgctattattaatttattactgattattaacaactatacttttgttaatttgctaggcatgaaatcgttggaatagcatcaaaagttgggaagaatgtgacaaagttctatagaaggagacagagtaggagta

SEQ ID NO: 3978 - DNA, 1929 bp, Arabidopsis thaliana
atgtctgcatattgaagggaggatgggacatgaacgactttgacctcgccaacaactaccttctctcgaacaaagtgtatgtccagctctatatgttttggcctttgatgcttgactggattagtagcaaggaagaccgaactgatgttgtcacaataaacgacggaggctttttatcgtcaaatgaagttctaacatcaagttttgtagccaacatagttcagccacagtgttagcgacgcctttgtattctgcttctgagcttgatcttgagaaagtaggctggcgctttgcggatcaagagaccaagttcggaccgagaaatacgcaatagccagatgttgaccgtcttgtgtctgaacaaccgccccaatccgcgtctgaatatgccgtgagacaatctatttggcctttaaccacctgcagtccatgcgttaatgtgccttttatatatcgaatggttctgcacaaagcttgaaaatgtggttgacgggggtcgtgcatgtacaagcatatttgatcgacatcgtaacttctatcaggccttgtaaaagtcagatactgtaacgctctggcgagactccgatacaaagtgggatctgaaacaccatctccgatatctactgaaagcttggactttaagtcaacaggagtcgcaataggtttacaatcactcattcatgcacgttccagtatctcctttgcatacaaagactgactcaagaacaatcatttgtcgttgtaatctgcctttattccaagaaagtggtgtatctttcccatgtctgtcattggaaattcagctttcagtgaagcaatgatgtttccagaagtttggtcgaagaagcagttaggaggatatcgtccacatataggagaatgtatgcaaggtcaactccttttctgtaaacaaacagcaatgcatctgccctgcttgtaacaaagccaaggtgggtgatgaattttgcaaacctggagttccaagctcgtggtgctttcttgagaccatagatcgctttgtgtaatcgacacacatgattgggagagtttgtaacgcccgtgtcccaagttagggagtaaacaagatctctcacccgccgaattcgaggacgaattcagtgtaacggggtagacttgtaacgaccgcatcccgcgttcataaagaggcaggtttgttttaggagaaaactagatcatggtcgaggaatggaacaaaatactaagtaggaagaacgagaaagtataagctaaaccagctaggtgagctggacaagctgtatgaactagctaggtaagctatgtgagctaaaccagctggaagactagctagctctgctaggtgagctgaccgacagctcaactgagctcggtgagctgatcaagtactgacccagctgggtggtccggtcagctgacactcgagctggtggactgtggtagctcacgggtgaagaggtgtctcggccaaaaggtgtctcggccaaaaggtgtaaggtcgagcgggtaccaatgaacggttgcatcgcccaaaggatgcaaggaacagatgtgacatttcgaaaggatgcaaggaacggatgtgacctttcggaggggtgcaaggaacggatgtgatgcttcgggaagcatccattcgccccctatataagggaggacgcccaaggcatctcacatcatctcataacatccaaaacaccataaaacattcttaaaggagtcccaacacatcctagagttgttggtcggaaagggggtgcggctcagcgagtataactcgaccgaactgatgcgcatgctaccttccggtccaacggttcgatggagtgtagaggatggagagggtagaccgtttgtcttagagacgaatcggatctggtagaccgatcgttggatcggatcggccagaccgatcgttggatcggatcggcc

SEQ ID NO: 3979 - DNA, 563 bp, Arabidopsis thaliana
ctaaacaaaatgtgattgataaaagataaatttctaaagtgagtgattagattccgcaaatcagattatttgagttaattattctgtttctttcatttggggttgtttttgttcaataaaaagttgagaagggtgttattgataagttcaaaacaaatagggtataaccaaacattccaaggaagtaagagaccgtcggtgtgaagcagaatccataattggggacttaaacataaattcccctattgctgcttttcctcctcccgctcttgcttcttgccattgctgtttcgagctctcctcaaagccctaattttctcctcttcttcttcattctctcaccatgaagctcgtcaggtatggtttctactcggattctctttatttcttcggtttaattggaatttgcttcgaaattttgagatttctctttgttttcatgctcttcgatgtttgatttcgtatctggattttttcgcaggtttttgatgaaattgaacaacgaaacagtttcaatcgagcttaagaacggaaccattgttcatggaaccattactggtacg

SEQ ID NO: 3980 - DNA, 497 bp, Arabidopsis thaliana columbia
actgtcatgcttcaggatgaccctcaaattcttcaagccagttttagtggagataccataatttcatcttgcacggaatctcatagacagggacaaaaagatcgtgctcttgcaatgctacatcaaatgattgaggatgctcataggggcaagcgtcagttcctgagtggtatttattttgtctttctctacgtctctatttgttcttgctgtagtatacaattaacttatctgctcttgctaattatgtattttagacctttcatgtagttctaactgtttttcaaacaaacaataggtaagcttcataacttagcgagacactcgctgatgaaaaccagaagttgacgtactcaaaggggacggatcagacatggccgttgagaaggatggagttcttggtcttgggctaaaatatacaaagcaaagtcctggttcagcaaatagagccgtggatggaaatcctgtttcacatgaaccagaagacaagggaaaga

SEQ ID NO: 3981 - DNA, 639 bp, Arabidopsis thaliana
gagaaataaataaattttatttatttattctgaaatcaaaggagatgagacttggcttggttttcgttacaaagacgcggaaacattaaaacggttcatatggttaaaaactctcgttggctttgtttcatccttgttcacaacctggagatggaatagtccaatgcatctaccaagaaatctgtggatacattacaacacacacaaattcattatagatattatacaatctcgttttgttctttggtgaaacttcataattttaagcgatatataaactaagaatttacctgcatcatctttagtgaaacacattggtggctttatcctgaaaacgttcccatgaagtcctccttttccgacgagaatgccaagttcttcattaagagaaaggagcaaaacattttggttaaccaactgatgcttatcaaatcgatgcttttggctttaatgttgtttacctctaagttgctcaaacaagacagatgtttcagccttggctggtgtcttgtctttccggtcactcacaagctcaatcccaaccattaaccctcttcctctcacgtctccaatgactgaaacaaacagacacggttgtaagtaaaacagagtaaatgatctgattatataagtctgttt

SEQ ID NO: 3982 - DNA, 485 bp, Arabidopsis thaliana columbia
aaatcatcaatttcaaacttactaattaagcgtaaatggatacgctcagacggaagtatttatttcaaatgtgaaattcctaacaaaacaagttgggacatacctgcagagagggacgcgacaagaatcgggttgatcacaaatcagagaatggagtctaaagagttgaagcatccgcttgcaacgaagacaacccttatcggtatacctcctcttgcatacggcaaagtgacgtatcacaagctgaagaccataacacgtggaacacgccttacaaggctctgacttttccgcagtcagtgacttacagttgtgatctactacgtttgatggaccgaccaatgtacaaccatgtgtgcatatgtgctctatgcactccatatgctcgcatagttgcatgtaaagatcctgctccattctatgtcgacgccatcttttcttcctctgcgttaaattagagatcaacacataatcagacgaatgac

SEQ ID NO: 3983 - DNA, 568 bp, Arabidopsis thaliana columbia
cgcgctctcgttccttacttccctttctccggccgcgtccgagaaaaacccgacggcggcggaggtctcgaggtcaattgccgtggccaaggtgctctgtttcttgaagccgtctctgacatcctcacgtgccttgactttcagaaacctccccggcacgtgactagctggagaaagcttctttcgctccacgtcatcgatgtcctcgctggtgctccacctctcgtcgttcagctcacttggctccgtgacggtggtgctgctttagccgtcggtgttaacactgcgtctccgatggaatcggtagcgccgagtttctcactttattcgccgagttatctaaagactcactgagtcaaaccgagttaaaacggaaacatctctgggatcgtcaattgcttatgccgtctccgattcgtgactcgttgagtcatcccgagttcaaccgtgttcccgatctatgcggattcgttaaccgattcaacgccgagcgacgtcgtcctacatcggttgtcttcgagagacagaaacttaacgagctaaagaaactcgcgagtcgactcggtga

SEQ ID NO: 3984 - DNA, 1640 bp, Arabidopsis thaliana
  unsure (1)..(1640): unsure at all n locations
ttcaaagagaaataaacgaaaggatgaaagccttcccaggcactaagtttgaaacataaaacacaaaagcctaaaacaaacgaggagcgtaagtgatcactccttcagttccccggctggcgtacaatagacaataccagaaccgtccacgagacctctcggaaacgcatctttgttgctcccgaactcatccaagccgattggcatcccttgctcgtcgacgtccatcggacgtaccaccgaaatctctgaaacctgcgggatatccaacttgcttagagtgaagtctgataccttcttcgatttgcaatgcgcctctaggtcatccagctccgcttgcagccgaggtctctccacggtcaaatcgatagcagcctttgtgatctggtcgatcaaagccaagttcgactccacctcggccgcttgaccctccagcatcgtgtactcctttttggcgacccacttttccttgatcccagccagcaacctcgaatacgcagcggccagttcaaccttagcatcgtgaaccgccttcttcgctccttgcacagtcgaagtcagttccatcacccttttggagagctcctccctcctctgctccaagcaatgaatctggtttctcgctgtctgcttgtcaacctgcaatcccccgatttccatctccatgagcccgatcttctcagcataacctttctcgaggtctttcgaagtggacaactccatttttaacctctcgatctccgcctgaaaccatagtcaggtcagagtcatcgtatcatcgataaaatatatacaaacaagacataaccgaggcatacctggaacgaaacctcatgctcctgaccatccttcacactcgttgtcagctcctggatgagggtcttcccttcttcgagctcgctcgccgagggaaccttgctcagacgttgttcatagtgagcaaccagcttgttcgtggcagctatcgcctgccaaaggaaaactaagattagaactggcataagaattgaattagaaggaggcacttatagattgtcacctggccctccttcgccatcatgtcagcataagccgaagcctcggccatgttcttcacttcgagaatctggcagttcctcctttgatgtggcgaagcaggttcgccaacccagcctcctcctcaacgatcggatgatcacggtcgtgagtgtaagaccagtgggaaggtctgcttcccgcagaccccccaccagaattggacgactatctcacttcctgagactggttcagaccttggaaggaggacctgcccccacctcttgatccntcgcctccgcctgtctgaggacatagctgcctccgggttagcagccacaggttcgccctctcctctctaggaggagcgacctcctgatcgatcacgataagctcagcctccaggcgcacctccggctgggtctgagctctcttcggagaagacagtgcaccatcagaatgaacagccgcagatggctcagaaacctgagcgacctgattgttatccgcctgacctgctgtaatagaggtcccggtattgaactcaggaagcgacggatgagaagctgaggcagatgcgctagagatagctagactgttccgagccgcagtcaccacggccaata

SEQ ID NO: 3985 - DNA, 535 bp, Arabidopsis thaliana
  unsure (1)..(535): unsure at all n locations
tnnnnnnnnnnnnnnnnnnnnnnnctaaaggacctttaaaacgctggacgttcggcttgcctttcttgcgttttaattgctcaagtacgccctctttctcttcttccgtcagcgcgtaataaacctctttcccgagatcaatacggtagagcggtggcagtgcgacgtaaacgtgaccgtgtttcaccaacgcgcggaaatgttttacgaacaaagcgcagagcagcgtggcaatgtgcagaccatcagagtccgcatccgcgaggatacagattttgccataacgaagctggctcagatcgtcgctgtcaggatcgataccgatcgctaccgaaatatcgtgcacttcctgcgacgcagcacttcgtcggaagagacttcccaggtgttaaggatcttacctttcagtggcatgatcgcctgatattcgcgatcgcgcgcctgcttggcagatccgcctgcggagtcaccttccacaaggaacagctcggtacggttaaggtcctgcgcggtacaatcagccagtttgccaggc

SEQ ID NO: 3986 - DNA, 1200 bp, Arabidopsis thaliana
cgaggaaactcttccacttcccccacgacttccaagacggttccatcatcgtcactggcttgcgtaaggtaaattcgctttactctctccttattacttttcacgcttcatttttcttttagagcaaagtccctttcttcttcctctctacattttctatccttcgaaccctcagtttactcattctctcacgatgaattctgaaaatgaaaggcccgaatccccatctttcgaaaatgtggttctagtaacgacctttgcacccggccgaacaatatcgctggtcctcactatcaatccacatgcactcttcaatccctcaatcgattgggagagctctgtcggattccggctgagattatgagagattcgcagatgtcggagcccactgaatcgccggaggaccaccgtcccgggttcttttgcgtctatgaaatctacttcaaaggctgcggactgaccttccctcttcctgaagccttggttcgatacttggccgctctcgaaatcgccctacctcagttgacgcccaatctcctccgcaccatcttgtgcattatcaccattgcggcggaggccggtttcgtcattagggttcccgaattgaatgaacttctcagtgttaggagttcgtcgaagaaaactgggtacttctcggcgtacccgaacgccaatcagaacctcatttcgaatctcctgaacaaggatgagaattggcatcatccttggttcctggtcaagaaaacccctgcctcgattggaaacctttccgatatgcttccatcgaagtggtctgcgaaacctcgtagaaattaggtcacgtacgatttttgcttatccttgtttctgatttaatcgattttattgctttcaactcgcagcttttatcactctaaccctcccgaccgtagagttcgtcgaatttttcaagatcgtcattgaaggagagaccctttggaattctttcactctcgaccggttcgtcgaagccaatcacaagctcatgacgaatcctcccggacaactacttcaacttccaccacctccacctctgcctcacggaacttctgctagggccatcgcttctcgtcgcaagactttatccaagccgatgacagaggcttgtgaagcaaacaagtcgttccttcagtccgctgttgacaagaaggaatatagcagaactctcctggttgatgatgg

SEQ ID NO: 3987 - DNA, 1753 bp, Arabidopsis thaliana
catcctctcgagttcctccaatgtcgatgttcaaggcagagggagatggcatgaaattgatgttgcgccttgtcttcactgaagtccggttctcgcatggtaggggcaacagagtcaaagctccgtatggttgaacttgaagaggtagcgatccgctggagttattttctcaagaaaatccttccccttgagatagtcgaggtcaatgaacttaggtaatacgttaggtgttccgaattccatacccacagttcctagtattggcgttaagagaccactaacacaaagactcccgcgaattcccgagcgatggatggttgcagcatactccttgtagctcaagaggtgatctaagagaacaacactcagcgaagtgtccgctctatcacccgccatcttcctcccatcttttgtctccctcaaaatgaagaccaaagattgctctatcatgcatagctccttttcactaacgaatccggtggccttctttggaaagaggatgttggcgatgcattgatggaggtatctaatcacaggatttccgattgaagaactcttgctcttggttggcgagaagggcttcggaccggcaattgtcttccaaagagatttcagctcttcttgatcatagtcttggcagattccttcgccacttggaaacccgaaaattgtatcaagatggcgaatatcaaaagtatactcgacatccctaaccttgaaagttatgtaaccaagacctcctcactcctctttctctgaatcatcaacacaaaaatgaaccttgagggttgcaaggagttggcagctctcctctttgtatcccccacattggcagctcatgtatgttgcaagattggccaattccatcaagtattcgacatcaccacaaataccaagctcttgcattgtttccttatgagggtatctagttccgtcaaacttcaactcctttaagtattgatagtactcgctcggggttggctcgctctttctccttggctggtttcttccccaacaggggttggtgtatcatcccgatgatctcaacctcttcctcagaaaccgcttcttcaaagggtgcctcttcatggtgttcttcttcagcttcaacgaccctctttccccgagctacttcttctctttgcatggttgagcggcttgagcttccaccttgaatcaatcttgatctttgggcacggcgagcttggcgaatttggcgttcagtcatgccactcatgtcaaacgcctcaacctcttcgttatcaacggaggatcttctagctcgagatgaactctttgttctggaatccatagagattggtggtgagcatcaacagttcaaacaagaaaactctccaagaggtataaaaaatgagatgatgaaagagagagtttcaaaagtgggttttagcgatttcaatgggtggaggaggatggtcttgggattctctttggaaggatagtaaaggcgagtttgaaatggtgaggggcatgggtaaatggtttgtctgttgagtaaagaagtgaaggggaacatgtgggccactcgacctcactccttggtcgctgaatcattcaagttcgagtaaaggatcgagcatcctcttgaagtgcggaatacttgatcaaacggtggagaatgcttctcccttggtcactcgatcagacggtgagggtgatttcccacatttagtcattcaaatcaatggctcaaaacactcctcctcattctactcgttcaacggttgagatc

SEQ ID NO: 3988 - DNA, 1141 bp, Arabidopsis thaliana
tacccgaacggatcctaaacttcaaaacccgaacccgatccgaacctaaatactcgatcaagtacccgaacatatccgaaatatatatacatagaaaataattcattagtaataatcacatttacaacaacttaaatgtctaaaatatttggattctaaaatatatatacataaaacatttacaatagaaaattttgagttttggatactccgggtttacccgaatccgaacccgaaaaacccgatccgaatccgaaccgaacccgaagtcttaaaatacccgaacggatcttagatttctaaatccgaaaaacccgatccgaacccgaaccgaatacccgaacgcccatgcctaattttgactacaaagtggcaatagaaaaaaaacatatataatttacaaattagtctatgctttaagataagattttacatggtactaagattgaaatatttttcagtcgttcacgttgaaaaaatatccggctgagctttcgctagtgatgtggatttgtgccatgggaacggtcttaaacaccatcgcttcgctcataatggtgcgcgacgtaagcgcatggaaagtcggtatggactcgggcacacttgcggctgtttactccgtaagtacttttgaccgtttactactaaaccaatctttttataatcatggtcataactcacaagtgttaagtacttaatatcagggagtggtttgttcgggtatggcgtattacatacaaagcattgtgattagggaacgaggtccggtttttacgacatcgtttagtcctatgtgcatgatcatcactgctttcctcggcgtgttagttttggctgaaaagattcaccttggaaggtaaatatacattatagaattaatgatattctaatcatatacaacttacacggctatgatcaatagtacaaacaactatattgcattcattaggtaactaattagttgtttaattttgtatattgcagtataatcggggcgatttttatcgtcttcgggctatatagcgttgtgtgggggaaagctaaggacgaagtgatatcggtggaagagaaaataggaatgcaggagctgccgatcaccaacacatcgacaaaagtggagggtggtggtattacccagtga

SEQ ID NO: 3989 - DNA, 640 bp, Arabidopsis thaliana
tgcccatccagaagcactgattgactcaattggagtaacccattcacggtttcctggctgtagaactggtcttcggccacatgattctgacttggtaatcactttctgatgtgcacaaaggcccattgcaaagccagtctcatcaaagttgtagatatcgtccggtaggatcccgtattgttcgattgtggctcgtacggtgttaaaccatgcttgaataacctttgggttctcttgctttgctcgctggcagtcgtattgccttgacaagcgagactcaagctccgggtggcgttgagtataattatatacccatttctggccgacagtctggattggggtggaaccacgctttgcaagcagaatattagccatttctcgtacatgagcttttgtaggagctgctccgcgtagatctaaagagagaatccactgcttaagcacttcctcttcaatctcagtcaatttatggccatttgcgcgagattcggcgcgatttgtagtcccgcgtagtcgcgtacgtagtgtagattcaggcacattgaagcgacgtgctgcctcgcgtattgatgtaactccttttttttaatacctgtacagccagtaggagccgacctccttctcatggcaattttggctt

SEQ ID NO: 3990 - DNA, 1057 bp, Arabidopsis thaliana
aggatccctgtaactaagttaatctatatatgtaaagtctttgttatttgtaaaaatcacaaatgatgtcgaaaagaatccaattaagttttttagtatttagtattgtatttaaaatctcgttatatgagccaacaaggtaacaaagcatatatatatatatatatatatatatatatatatatcaactatgataatacaacaaatttatctttatatacgttaattttatgtccataacgtctttaatattttaaaaaatcatgaatgttatcagccaaacatctaattctttttattggatattttttttttgtgtgggaaggggagtcaaaaaactccccccaatttattaagaactaaataaaaggaaataacaaacgaatagtacgagggacaccaggcccattaacatcctcgaacatgatcgaaagaacagattcgggacaaacatcaagagaaagaaaaccaaaatctaaagagaacgcatagtttgctaatccatcggcaagacgattagcttcctatacacatgagtaacccggactaaccagtcccgtgagataaagtcatggcacaaacgtaccaggaaagacagcggatgattccagtcacccatgtttgtaagaaccccacaaccaacttagaatccacctccagctccacccgtcgaaagcctctctcccaggctatgactaaaccatagtacactccccataactccgccatgggaaccgaacagatgcctatgttcaacgcaaacccacctaaccactcaccttcttctctttttattgggtatttaacattgtatttagaatctctttactggagcgtttgtcgttttctttagggaatgccaacaaaataatataccatatattcatcatcatgataatacaacaaacttatatttgtatgggttaattttatatgttcgtaacgtctttattatttataaaaatcacgcatgattttagacaaacatctaattttgttttttggtatttagctttgtatatgaaatttcttcactgcatcttttgtctttatattt

SEQ ID NO: 3991 - DNA, 1063 bp, Arabidopsis thaliana
tttggtaaggaaccggttcatctggacctctactaagttgtgatcgatcatcttcacagtagcgtaattgggtcacctgtggcttgtccggccatagggcaattcgggggcgttacagaccgtaccttatctctaaagttgtccgacccgatgtctacgaactcaggagatactacaactagatctgaaaagcataaacttgaactatgaggtggcttgatccctgaaaagggtaagtaggcagctcgtctctggtggagttcagctacccccccctcccataaaaaacgggggagtgggtccgtatatccatactcccacttttatttgtcttgtaagttctttacctatttcggcataaataaaagttctactttttataattttatattacaacgagtatcttttacgccgccttggctacaacgcgctatataaattttcgagttagaacttgccggaaatactttacgcaaaacctcattctatcttcagaaaacccggttaaatcttaacactggtaccccagctcgttgctaaacgctcgtccaagggtgagtagaatcgggtcacaactgaaatgattttcacaaaaaaacttaagctcagttcattcatagtggctctaaccaatgaactgttcggagttagcaaagcaactacaacccggttagattacaaaaaatcaaactaataaaacacattggggtctaagaagcaaaaccaagttcttaaagaaaagtggataaagccatccatgcatatgttctacagaaatacggataaagacgtctaggcacaaagtcttaagatgaagccgtcctaccatggatatctactcatgctgttcagtcgggagagtcccagcagcgggcaagtacgacccgatctgatcggtgactcccacctcattcgcaagagtctcgaccgatctatgacctttggggcttagaggagccggttcgggcgcaggggctttgagcacttccttcagcttagatgtgagacgaacaaggttcacctcggcattggcgaaatccttgggcgagtctcgacttgtttt

SEQ ID NO: 3992 - DNA, 738 bp, Arabidopsis thaliana
tatttcgtcttgaactcgtatgtctccttgtccagaattacccgataatctcttcaccgcgatttcttgcccctgaggaacacaccctgagatacataatcccaagtttataaatctctcaaataaataaaccaaagttaccggtaagaagtttgttcgaagaagcttaccttataaactgaaccaaacccaccacgtccaagttcgttttctgaagaaaagttatctgttgctgtctttagagtctcaaaatgaactaagagtgattctgtgttcgagaactcatcctcggcaattgaacccgacaaaggtgatttcccaagaactgaatacgcagatagtatttatcagaactaatagttaatccattagtaacaagataacgataacacgaagtagaacactgtgttacctttgtttttatatccagacttgttcttcctccacttcaagaccaagcataggcaaattgcgagtaacgcaacaagaagtatcgggatgactatcgcgataatgactttagatccacctttgccctttcctgcaataaaacattcactatcttaatcttagaaacaaaaacatattctgctagggacaacatctgcagtagcacacacgagagaaacattcaaacatttctatgtacctgtcctctcagttcttgcagctgattgtggtgcatcagcaggctgaattgcaggtggatctggctctaggtcggcatcaactcgtaga

SEQ ID NO: 3993 - DNA, 916 bp, Arabidopsis thaliana
agaacggtaggatcatcatatggagaaaacggcggaaaacaattaccgaagatgaaattgtcaagactagcgttcttgatgaactcatagacaaggattcgttcttgtccttctatgcaaaaacctaatagcctaaccaagttcctatgttgaagctttgcaagaagtaaaatttcgttcttgaattcactgtctccttgtcctgaagtacacgataatcttttcaccgcgatttcttgcccacccgagaacacaccctaagaaatgcatcatccttagcttataaatctaaccaagggaaaccaaagttaccgttaagaagttttctcaaagaaacataccttataaactgagccaaacccaccacgtccaagttcattttctggtgaaaagttatctgttgctgcctttagagtttcaaagtcaactaccaacgaatctgagaactcatcctctgcatttgatcctgacaatgaacatagttctcaggataaatagtttatactttgtaacaagataacgataaccaaaagaagaaggttgtgtttgttacctttgactctacctacagacttgttcttcttccacttcaagagcaagcataggcaaattgcaaataacgcaacaaaaactattgggatgactatcgcaacaatgactttagatccacctttgccctttcctgaaatgaaacattcaatcttagagacaactgctgcaacagtacaaattcaaatatttctatgcacctgttctctcagttcttgcagctgatgttggggagtcagcaggctgaatagcaggtggatcaggctctagatcggcatcgaactcgtagaatcgccaggtctcaaatctgtagctacaactaggaaaaaaccaccctaagaccaacctgaccagcacaacaacctgg

SEQ ID NO: 3994 - DNA, 560 bp, Arabidopsis thaliana
tttttttttacagattttgttctgtttttgtgtgttgacggtgagattttggcaattgatatatggtcataagccaaaagtatagagttaaataagtttgatgattgacttctccagcattgtaatatttaacattttacattattgaaaaaattatactaaattaaactcgaaggtgtaccaaagaaagaatcgttttatactccctacaaggggacgagaaaaaatcattaatgtagtgtgtgtgtatgagggagctatgaagaaacagagcttgtagctactacgggatcttgtggctcatcatcgaactgatacttgttgtaaacttggagcaatagatcacggcaagggacggtggctccaagcttgatacaagccaagaaagcgccggataatttacggtgaaggctataggcttcatcgggtggtggactgagtctatgtttcaacatggttgctcctaaattggagatactagaagcaatgttgttggttcggaaagcatagccaccgggttctgcaaaaggtagaccactatgaaaccggcttggacatga

SEQ ID NO: 3995 - DNA, 622 bp, Arabidopsis thaliana
tgttgtagtctatacgaacatggtggaagctctttgtaggcactccaagtttaaagaagctgaatctcttatagagattatgtccaaagaaaactgtgctccttctgtgccaacgtttaacgcatttatcaaaggtttatgcgatgcagggaggcttgactgggctgagaaagtgttcagacaaatggagcagcaacacagatgccctcccaacattgtaacatacaacgagttactggatgggctcgcaaaggcaaaccgaatagaagaagcttatggtctaacccgagagatcttcatgagaggtgtggagtggagctcatcgacttacaacacgcttttacatggatcatgcaatgcaggtctcccggggatagctctgcagctagtaggaaaaatgatggtcgatggtaaatctccggatgagataactatgaatatgataatattagcatattgcaaacaaggcaaagctgagagggcagcccagatgttggatctagtttcatgtggaagaagaaagtggcggcctgatgtaatctcttcacaaacgtgatttggggtctatgcagactaattgtagggaggatggagtgatcttcttgagaggatgataagtgca

SEQ ID NO: 3996 - DNA, 571 bp, Arabidopsis thaliana columbia
ttcatttattatgatttgatccatgtagggtgattttatataacataatcaccatttagtttggttcattacaaatattattttttcttctggttcttaaatgtgtgtacccgtggcaatttcaaactcagaactcatgacaaacggttcataggcacacacatatacaagaacaaaaaaatgacaaaaaggtcgaaacttttttacacacacacaaaacctatccgaagatgaaccacacattcacacgtaacaaataatctatattaccggtaaaaggccgcgtaaacaaagaaagaagtaagctacctagataaaaccgccatggccaccggtttaggcttctttaagctctccttcctccttagcctcctctccggtggatcagacctattaggtcccgatgccgaatccggagtcgcccaaattgggaagttcccgccgtcgtgtaacagaatcgaatgcccgagctacgagctggttcactccggaaatggatacgaaattcgccggtacaacaacaccagtctgggtttcactgaacggattccagatatctctctcgttgatg

SEQ ID NO: 3997 - DNA, 1710 bp, Arabidopsis thaliana
caacctaccaccaatcgattaaatctcctttagacaaggggatagcagtcgtatacggtaggtaacgtagctcccgaaaatgctatatgggtggctacgagcatatcataaaagccgaccccgtagtacaaatgatagaggacaaactcgcagaaatgaaaacaatcagatcctatgacccttctcaacatggacctcaaatatcgatgataacgcaggtctgcatagacgaatcagatcctaaacgttgcgttgggataggtcacgacttcgacccagtaatacgagaggatctcataacctttctcaaggaaagcaaagacagcttcgcttggtcaagtgcgaacctccgaggaataagcctcgaggtaacctcacacgaactcaacgtcgatccgacctactgacctataaagtagaaacatcgaaagctaggtctcgaaagggccaaacctgtgaacgatgaggtcgaccagttgctcaagatcggattgataagggaagtaaaataccctgactggctcgccaacccaatcgtcgttaaaaagaaaaatgggaagtggagagtatgcaccgactttacggacctgaataaggcatatcctaaagacagtttcccactcccgcatatcgaccgactggtagaggccactataggacacgaactattgtctttcatggacgcatactccgggtaaaaccaaatacttatgcgcccaaatgaacaagaaaaaacagctttaattaccgaccgaggcacctactgttataaagtaatgcccttttgtttaaaaaatgctggagctacctaccaacgattggtgaacagaatgttcgctgaccagctaggtaaaatgatggaggtctatatcgcgacatgctggtcaaaacagctcacgaaaaagaccacgtcccgcaattaagagaatgcttcaaaatcctaaacaaattcaaaatgaagctaaaccctgagaaatgctctttcgaagttccatcaggagaattcctcggatacctagtaaccgaaagaggcatcgaggccaatcctaagcagattgcagccttcaacgacatgccgtcgccaaaaacagcacgggaggtccaacgactaaccggccgtatcgccgccctcaacaggttcatatccaggtccaccgataaatgcgtccctttctatcaactcctccgagaggataaaaagtttgattggaacgaggactgcgagcaagccttcaaacaattgaaagcgtacctgtccgaaccacccatactcgcaaaacccgaagaaggagactcgttgtacctgtacacggccaaacacgctgggacggaaacctcggcaacttgcaactttacgcgagtaacccgaagcaccaccgccgcagctagagcccttacagcagccgcggaggtagatgcagcggaggaagagccagagctcggaacccccgaacaacctgcctcgtacgaacctgaaccgtacaacgactggagaatccaatcatcgattacatcgaacgagggatcacacctcccaacaagtgggagaccagaaaacccaaagcccagagcgcaaggtactgcatcatggaagggagactgatgaaccgcagcgtcgcaggtccctacatggtgtgtacgtatgggcaacaaacgaaagatctcatgaaaagcatgcacgaggggcaatgtggtagcactgtagtgacg

SEQ ID NO: 3998 - DNA, 960 bp, Arabidopsis thaliana
gttctctgttatacgtttaacagttttgtaaatattctgtattttatgaaagttcttcctaattcaagtattgttttcataacaaacagaaacataacagaggcaacaatggcccaacagcagccaccatcccgacgccagcagtagacaacagttcaggtgaaaagtctctttctgctgataaacatgtatcccttgaagctgtcaatatcaacaaagttcgaggggtggtgactgataccactgaggatgagtcagctagagatgggattcatgacattggctcttccactctgccggctaaagaattagacgatatgtttgtggaaaagtctgattctggtgagaaaattgtatctcatcaagataatatcttggttgatgcccccggtgatgggataggtggagagcgccttgatgatatccaaactagccctgataaacctattccagctgcagcgagtcatactcagtgtttgcttcctcctcccacagacgtcaatgagttctttgaatctgagcccagcctcccagatccatatgtggtgcttgttgacatggatggtgttgcatacaatgtaggtcagccagagtttgggacaccataccatccatagtgagttcaaaccttgtcacatagttactatgtttgtttgtttttccgtgtattggctctaacgtctgttgtttgccttgcagatagagtctgatttgactgcctaatgtaagtcaaccccacagccaatggttgatgacggtgcttcagacaaagatggagaaggacttgctgacccacctgctacagccgataatgttagatcatataattcattactttttactctcgttaccactaacaaactaattacattatactgtttcttattgtaggccaatttaagccaaatgctgatgatatctgaaccgtccctgccagccccaacaaatgatattgtggac

SEQ ID NO: 3999 - DNA, 588 bp, Arabidopsis thaliana
attggatttccttaaacaatgcatccctcactctgttttgaaatcctacaactgaagtgcttgattctaaagaaaatagcacatgatagttcacacaagcaataggcagagaaaaaagttgttgataccttgatttcactagtacttctagacaagaaacttgctagttccgccaggactgagtctgaaagacctagttgctcaagggtcatgctgaagaaacgaagggaaatttaatccaacaatataagtgagaacaaaccagcataacagttgacatagcagacaagagattcacactaagagaccaaaatgcaagaatgattaaactcctgccatttaatactaaccgaataatataatcttcaggctccaaaaaatctcttttttcttcttcgtcgtcaatggcctcctcttcactatcactgcagataagcgcttccccgccagtttgatcataataaattctccttcgacccactacagactggtcttcagtcattctttgatttctgcatcatttcaagagtgattataacgttaagatactatgcgaggggcttacatttcaacttgaatattttcaag

SEQ ID NO: 4000 - DNA, 560 bp, Arabidopsis thaliana
tgtaaccaaaacacaatcttgaggtttcttgtcaagaagaaaactttagtttcactatggagaatgtttttgttattgttgtaggcgagcttgcaaccgcgagagtacttctgctgctggaacaatcatggttttgattcattctctctgtctcttttacttgattggatattctcttattgttgtgttttcattatctgtattgtttgatgttttcagactttatcttcatgggctacttgtagtgttgaggaagttgcttcaaccggaccagggattcgttttttccaactttatgtatgtttcagaagatttacttgtttcttattgattttttggctctgtgttgactatttgctctcttgattcaggtttataaggatagaaatgtggttatacagcttgtgaaacgagctgaagaagctggattcaaagctattgctcttactgtagatactccaaggcttggacgcagagaatctgacatcaaaaacaggtgatatgaaactactccacatcacataaccagattgttagatcttttggtttcttgatagtta

SEQ ID NO: 4001 - DNA, 688 bp, Arabidopsis thaliana columbia
tgtagtgtaaaaccttgtgatgaagtccagtatctgactcttttaggcgagtgaaggctgcatcagacaacaaattcttcaagatgagcacattttcttgagcattcttctcagcatcggattgcaaagatgcagcagtatcagcctctgaagaaaccgcatcgacttgagacgataatgcagtctgcggcgtcttagggctgctcacatctgttttctttttgctgctattgagggacttaagcggtttcccaagcccttcaaccttcaattcattcttagacttttcaccggtttgttttttgtccttttctgtattcttttggtcttgtaaatgctgtatccaacaagctccaagctcccatctcatgatactatccctgtctatctcctctccctcaagcttagcaatgctttcttccagcattttacttacaaattcccgtgaagatgtaagttcatcatcgtgttgctgaggtgttttcttgttctgctcaggagaggatttatggagaaggaatctcaaactgtaaaacaacatcaaaaaaaagttacacagtaattaacaaatacgctaaagagacaaaagatgaatgtcttttcattaagtaagaaattatcacctattgatatttagagcattagcacaccttcaggctgttcaaggaggcaacaatttgagaaggtg

SEQ ID NO: 4002 - DNA, 1076 bp, Arabidopsis thaliana
caataagaagtttggttagagtttatctattatttattagtaacattggggatatctatcgacaccaccacctgtgtcgatcgacaccccacactggttgagacaaagttccttattagagattgttttcgtgttgaaattactgctgatactccaggcactatagtcacgtcaaccactgcaccgttactccttgatccacctccgaaacagcaaaggtactcatctcctcctcctaaacctccagatatataaataagactttgaaatttccaaaaactgttttatggttaagcaagccacgagtttttcgtcgagcgctttttcttgcttttgataattgtgcaggtaaaaggagtagaccacccatacctctgtcctgccttgctgatgttccacacttccttggtagaccgcacacaccgactgcttatacgccaccttggatgatgcgaggttctactaggaagtatttacttccactatttgatccacctcatccccaaactccaccaaattcaagctattgactctaaacaagcgtttagtgggaggcaacccactggtatggttttctttttctttttcttttatttttcgtttttcttttatttttcttgcttactctggatttgaatactactggggacaatgtcgtttaagtctaggggaggcgcttacgaactatgtttttttttctttttgagtcttattcttattcttatttttctttttgagtcgttttattgagtcaaaattttgttaggaattatgatctctattctttagattattgcctgggtgattaatgttgcatgttcgactcaatccgacgattggaaaatctagatggcaaaccaacagacttgaggatatcctagttttccaacacaaccactaaggccggagctaatctcactgctcttccttttacctcttcaaacggttagcattcatagatcttgactccttgttcataccggatactgagaccaatgtgataaagaaagtgttcatctccccttataaaagaaaaaatgaatgattaatgggagattaatggaattttaaaaagg

SEQ ID NO: 4003 - DNA, 598 bp, Arabidopsis thaliana
  unsure (1)..(598): unsure at all n locations
ctnnnnnnnnnnnnnnnnnnnnnnnctaaaggtagcgctgtttttccgtacgactcgcagcgtgacgttgacagcggctggcgagcatctactttcccaggccagagactggctgagctggctggaaagtatgccaagcgagctgcaacaggtgaatgatggcgtggaacgcaggctgaatattgtcatcaacaacctgctctacaacccccaggccgtcgcccagttgctggcgtggctgaatgagcgttacccctttacccagtttcacatctcccgacaaatctatatgggcgtctgggactcgctattgtacgaaggtttttcgctggctatcggcgtcacgggaactgaggcgctggcaaatacctttagtcttgatcccttaggatcggtgcaatggcgctttgtcatggcggcggatcatccgctggcgaacgttgaagagccgctaacagaagcgcagttgcggcgctttccggcggtcaatattgaagacagcgcccgcaccttaaccaaacgcgtcgcctggcgattgcagggcaaaaagagattattgttccgatatggaacgaaaatcgccgccatctggcggcgt

SEQ ID NO: 4004 - DNA, 1165 bp, Arabidopsis thaliana columbia
tgtttactatgaacatacattcatatattcccattcaaagttccaaactatcgattacaacctctacaatgcaaagtgtggtaagcacataaccagagtaaacatgtgtcatagaaacgagatgtggtcttgttatggcttctaaattaatgagatttttgatatactatcgtcggacaagacttggaacttgatccaatggaacagcttgtagcgaaggaagctttggcggaaccaaccggtcctatgactcgttcgaagactagacttctcaaccaagccgttagcggacttcttaaccacttgggcaagtatccaaatgaagtcatactaaccgtttggaactcgatagcagtccaagacgattggtaatgggctaagtcttacttgggtactctttttcccttctaaggttttgtcccaatgggttttccttagttggtttttaatgaggcttgagtaacacttccaaatccccattatcaatccggccaagcccactaagaggaccacgaatttggaaggccaagggtctatttttttgttcaaactttcacttatgattttttgttttccgagttttcttggagattgtttcaagactaactcttcccttctcttcttctctatttaaactcctgtatttcctcattgtaaactcatctatcttttaaatctcaaactcttttaagctagatcaaaggtaaatcaaaggccatctgcatcctttgtgtgaccattcactccacatcttttggtttgagtgatctcatgatctcttagatgcaaagtctatcccctactcaacctcaagagtgtctatcttagggaactcatattaagtggtatcagagcacattctaaagttgagtactctatcctttcatcacttcatcatttcgttccattctattcatcatttcatcacctcatttcattttgtccgttcatcttctcatctgtctttttttttttttgaataaaatttaaaatttattcgaaaaaacgtttttacaacaagtgcagcatgtagttaaagatctcaatatacaaatttcccagaaattttctattgctctttgcttttatcttgtgtcaaaccaaactttcatgcatccatcatagttcttgtctccttgttcccgaatataagagattcggtttc

SEQ ID NO: 4005 - DNA, 747 bp, Arabidopsis thaliana
tgatttgacgctaatattcaaaataagtgacaatgagtaagtttccttcatagtttaattcgaattatctaaattatactattctaataatattttaaattttatgtttagaaaccgtgttttggaatgtctagctactaagaaggaagctcttgactttgatcataactatcgtcgatatggtggtggagttattgtcgctgttcttggttggtggaagattgaccgttattttgatggtccaaagaacgtacgtgtttgcacagcaggcacgatatcaaccgtctttccggatcctgatattcccgagtctaacgagatccatgagatataagtttttatctatcatcaaatattcttacatttcgttattagtaattatataaacggaatatctatactattatttataattgcatgccacatttgtttgttttttaggctccgtgatgaaggtgcaaggaatggcggttgaacatctacttaaaatttttttttacatgtagcctattgaactcggtctattattatttttatttctgtatgaacaagtttccatttttatttctctacgaacaagtttacatatttcgaatttagattaccttgtgagacttgaggtctgacagtagcgcatcgctattatttgatgattgagttaaccagaggtgactgcgtgggacggggactgacctgggtcacatgggggagggggggggcggactgagatttcgtattcattttgga

SEQ ID NO: 4006 - DNA, 1298 bp, Arabidopsis thaliana columbia
tgaattcacaaagttcttttgttcaaacaatgagttcaatgttaagattaagctagaaggtgatgattgaaacaaaaagagaacaaagtaaaaagacagcagatttattgtgttgtaaacgattaggaaaagagataggaacacggtattctcaggaaactattggttagtagatctaatgaaagctaggttgttatcgaaccattcttaaactcaaactctaattatggaataaccggtggtgttctgtgaaactccctatatctatagctaagaataaccgtagaagccaagagattattaacctaaatatgcattcttaacgagttcgattgttcaccttagtagataggccgattcttattacacacctataaaccaggctcatcaaataatagatccaactacagatacctatggtgggcatatctgttgtctggattcaagatctagttagctactctagatctagcactaaacataattaaagatgaagaattctacatataacctagcaaagggggcaatctactaaaccatatgaatccctaatgagaaaccctatattcctaacaagaagactacccagacatattgaatgaaacaaacaacatgattgaataagaaagcataagcacaacaaataagataagggaaagaagggatctcttcactgtattaagaactggatgaatctctcaagaacaatggatgaatagcttatgtctctcaaaatagggtttgcaaagaacttgataaaagaaaacttaggtctaaacaatgtataaaaaaccctataaaacgtccactgactaataatgcaaatagagaagtcttcttgggcaaatttcctcttctgtaaacttgaaagcgtcttggactttgctgggccaaaactggtgtcgatcgacatgtccattgttgtcccattgcatagaatacttgaaaagacactgaaaagactcgagaaacaacataaagactcaaaatcctatacctaaaacatagataaaataagtgaaaatagggatatatcaactcccccagacttagcttttgcttaccctcaagcaaaacccaaaagccgaacccgtggaagaggttttgaaaacaaaggaactcccaacattctctagcctattgccatgaccatccaaactaagtccatatgtctaacaagtctaatcgaatcctaaccaacatgtacttctctacaagcttacacaacattctagattacatacctaagttccacaactaaatccaccaggctttgatcgctgggtctcatcaaacaa

SEQ ID NO: 4007 - DNA, 1048 bp, Arabidopsis thaliana
cggttcggacttcgtatcttgattttttgttggtatcggatctagtatgagaattcggtttgtttgttgtttgaaatgctataaagtataacaaaaagacaattattattgaaaatcctatcaaatacataaaacacaacttacacttatgttcaaagttctaaaacacacacacacattattgttcaaagttcaagggaaaagggactgaaatctaaacctattgatcattctgtggagtagctggtagaggctttgtggttgtcgaagattgagaggccatgaagtcaaggaattgcggatctgtttgtcggagatacttctccactaaggacaagtgttcgagcttgtccttttgctcaaccgtgattcaggctgtctcagcttcacgcgcagcaatctcagaatctcgcttctcattgtaggcagcctgctcctcaatcttgcgttgcgcttccttcagccgttcttctaaatctaggaaggatgatgatgattctccagggagattgcggttggcacagcctaatgtgtctttgaagctgccaagtctataaggattgcctctggaatccctttcggtggactgaaaagaaataaagaagagattagtgatagaataaccataaactcaaagtcaagaggtttagactgcagcattttatctcgagaaagatggttgtgtactcctcatttgtcagctcccgaggtcgtgaagtgccatcagacacagcagaagcttccgcctctagctgtgacaatctatctctcacattctgctcataagtttgagcaatcatctccgccttccgatcaacatacgtaccatccgacttagtatgagtatctacaaacacctcaccaatagtgagcattcttcccaatttctcctcctgcaatgaaaccaacacagctcaaatattcaaaaacatacatgtgaggtaactgaaagaggtaacagaagaacttaccaattcgtcttggatttcctgaaaagactttggcccagagaagtggatgtgatgactcaagaccgttacggtcagag

SEQ ID NO: 4008 - DNA, 717 bp, Arabidopsis thaliana
gaatttatgtcgtttttgaaatcaaaatatgatcacatttcatccctaaaaacactattcaatctcaaaatcaataatcaataatattcaaatcatatattacgattcttcactaatcattagaaatttatatttataagtttagggtaccaaatttattcaaatatttagtataagaaccaaatatgttgataatcgaacatcaaaatgtaacatctgttcatctttgtctttaagtttttacaaatgctttgaatggttccaaatttgcaatgaacaaaacgatttttatttaccgtttatgaattttggttcgcaacaaactaacataaaaagatgaactcatttgtaaaatttttggtgtatgcatattaaaaaaaaatgatttaacataactaaattttgtaaatttttaatacaaacgcaaacgttatttttttcaaaagcccatttacgacgaaaaactaactaacaagcccattagttttagtattccttttaacaatggacccaggcgccgaataaaaactaaacccggtccggatcttaatcctctagcaacagtgaaccgggtccgcttcgtcggaactcatggccaattcgaaaatggcgatagttctctagcagctcaaatccgtcccttcacatgtttggccgcgtctctgccgtcacggttggcgcctcatccacagacctcatccggtggatcaacgagaa

SEQ ID NO: 4009 - DNA, 470 bp, Arabidopsis thaliana columbia
atttatagttcacttattcaagtgtttggtggctttttgtttgataatctccctcttagttttcatagagggtatatacatgaaccttgtagtactctacgtcaaggtgtttgagcgaaaacccgaaaaagtttatagatgggaggcgatgcaagaggacattgagcttggacatgaaacctaccccatggtccttgtccaaattccaatgtacaacgaaaaagaggtatatctacatgtattttataaattatagtatggacgaatcataaagtttatttcaaaactaatcgacaataaatataacgatttaagtttcttataaaccacattacattggaacattttatagatgtgagattcataacatattaacatgttcttaacttgcaggtccttcaattatctataggtgctgcatgtagactaatatggccattggaccgcctaattgttcaagttttagatga

SEQ ID NO: 4010 - DNA, 659 bp, Arabidopsis thaliana
  unsure (1)..(659): unsure at all n locations
acacaaaccacaactcatatatcttccaactctattaacactcttaccgtgtaaacatgcttaacaaagcaagaaaactaacctcagccttacgctgtactttagcgtccccttcagcctcaatgccatccaatttgagcagctgcctcataagaagctctgcagccatgtcaaactcccgcaccgcaacttgcgtccctccattcacagcaacttctaaagcaacaacctaattaccaaaaaaaactagcttaagcacaatccttccgtcatctccaaaagaaatacaggcttataaaaactcactctatccgagagcttatcgacctctcctgtaaccgcgttaacagcagcaatagctttttccatctctttagttaccacaggaggctgttgttccactctcttattcgtatcctcaacaacaacaacaagcttagacgcatccttaacaccagcagcttgcaattgttcagcatcatctctctcaactcctctgaacaagatcttcaattcactagcttccaatccagttttctgaacaagagctttcttcacantcccctagttatcacattcgagcttaaacatatcaatcttcaactacactaacacaacttcaacaaaaactaaatagagcaagaaaaatttcataatga

SEQ ID NO: 4011 - DNA, 440 bp, Arabidopsis thaliana columbia
caaattccaagtatttctttattgtggaatggcttaaacaaaatgacaactctacaaataaatcgattcattccaccattaccatttcaaaaaaaaatggcaaaaaaaattgaaataagtaaaatctagatatcaattatctattgatttcaattctcattatacgatacataaatttatcaacaaaagaaaattcaatctttttccccaacatgctaaatgttttagggcttgcaaatgaccacaaagcaaggaagcaaagctttaggattaagcaaataaagctcctccacatttgtatacaaaccaactttgccagccagagaatcaaacccactcatcaacccattcatctcctccacattctccaccggccgatgaactcttccggcgataatcctacacacaatcaacactttcctcagcgtccgatcaacatc

SEQ ID NO: 4012 - DNA, 552 bp, Arabidopsis thaliana columbia
tgctggatcagtttaacattgaaagagcaaaaaataaatagcaagtttacttacagcagccacttgcagattcgctcatgcttgtattttcataggatccattactatttgtaatgccggagatgaacataattgctttagcagcagcttgattggcaacggactgtacagaacgaggtggtgtcaacaagctttcataatcaccaagttgttgtaagctattaattaatccttgtcgacattttccttttttctctttccactggttgcttggactagacgaagtttgatcaatccactgactttcttcttcttcgataatattggcaactgcaagtggagtgacagaaagtaatacacaaagaaaagtgtcggtgcggggccaggaccctcgattggatctctttccttcaaattacaacatatatttgtcagtagacttaaagaagtatgtgactcagaaatttaaaatattcataacgctcgacgttctcataatatgaccttctaattatgaatcatgcataagtttatatgtgcacagaagtgggt

SEQ ID NO: 4013 - DNA, 521 bp, Arabidopsis thaliana columbia
atatgatgcaatgttttgtatgataagaacataaaatccaaccagggaacatcatctgctgtgactctgcccccaacagaggagattgatccgatgcaaggtctgtcaatggatgatgagatgaaggatgtgggatttcttcctccaattgtatcccttgatgagttcatggaatccctgaactcagaacctccatttggcagtccacatgaacatcctcctggaaaggaagatcctgcatctgagaagagtgactctaaagatgggtcacattcaaaatcaccttcaagatctcctaagcagtctccaaaggaaccgagtgagagcgtctcttctaaaacagaactcgaaaagactaatgtaatttcccaaaacctgatgctggtgacaactcgacggtgatgtctccaaacctgaaaatacatctttggttgatagcattaaagaggatcgaatatgggatggtatattgcagcttagttccgcttcagttgtctcagtcactggaattttcaagaggc

SEQ ID NO: 4014 - DNA, 880 bp, Arabidopsis thaliana
ttgtcaattttctattagtgggaagatatttcaatccgtgcctgctcagttccaaacgagtaagctacctaaggcttctttatcttcaagctgttactttgctcatacaaacaaaccattttctggaaaatatatgatgagatacttttctctctttgaacagcactaccgataggagaatatgctgcaattgcgcttctcatgttttttggattgaaatccattaaagatgcatgggatcttccaccagtggaagccaagaatggtgaggaaactggtatagaacttggtgaatactccgaagctgaggaactcgtgaaagaaaaggcgtccaaaaagctcacaaacccacttgaaatcctctggaagtcattcagcctcgtgttctttgcggtaagaaagaagaacccctttgcgtttgtcaagaacttaaattaaaccatccacattttgataattgagggttctttgtctaatcaggaatggggagatcgatcaatgcttgctactgttgcgcttggtgctgcacaggtatgattcacaccatcccacaacaccacaagctttagctcactacaccctaaacatttctctgtttcaaatctgtgttatagtctccattgggagttgcgagcggagctattgctggacacttagtagcaacagtgcttgcaatcatgggcggcgcgttccttgccaactatatctctgagaaactggtatgagttaatgcctacacaagttcattcacagcaaccgaatagcgcacaagctaatgaaaattggtggtcttttgatgcaggtgggctatgttgggggagctctcttcttagtttttgctgcagccacattctttggagtgttctgagctgagtgaacg

SEQ ID NO: 4015 - DNA, 559 bp, Arabidopsis thaliana
tcatgtctgtttaatgttccaggctatacggttcaagaactatagggagtggataatgtccaattatcaggtgaggagactttagctcgtcacttagattgttttcttgatgcaaatagttttgaaatgtttcctttttctgcagccacgtttcagggagttgtataaacttgatcccgaaatcgttaatgcttccgtgttcccgcaaggcgttcagagaaaacaccgaggaaagcttcagacgtataatgtttgaaccgtttcctggtgtttacgtctttaaaatgtttcagcctgacttctttcagaaattgcttgttgaggtaatagtaacaaacacatcatcttgccacttattctctgccctgctcttacctctttgtttgattaatcaggtagagaatatgagaaagtggcttcatgaggcaaaattgatgatcaggaaaccaaacaataagagtaaatatggtgttgtgcttgacgactttggcatggatatcatgcttaagccactcgtggaggattctatctttcctatttgcaaaggcaaggcgtatat

SEQ ID NO: 4016 - DNA, 1076 bp, Arabidopsis thaliana
cttcccacttcatactacgatgatgagaaagacgctgtggagacaatctttgctagtgcaattgacatgaatctttattatttttggctctgtagaagaagaaaacacagtaagcgattaaagacaagttaaaacaggtgttacaagaaatattagtaaacgaaaccttaaagaaattccaacttagtttctcaacacaacaaagtcatacacaaaaacaaaggtgcagagatatgaacacaagaaacttttgtgggtttttgtgcccgttaaacaaaatcatttattcaaacaaaagtccaacacgattaaacaagaagaatcaatattccatcctttgcagtagtaaaaagggacttcactaatcacttgaaaagccaaatgatttagttttttttttgtttcttcgaagaaataaagaaagaaaccttcttttagcccgagagagctgcgttgatggcactgtgaacttcaacaccaatctgtgcctctgctttctcaagatctgttgtggcagaagcaagtttctgttggaactcagctaaacccttttggacttggctagggtcaatgtggtcaagcggcacagcttccaccgcgattatgtcagcgacggaatttgcgtggaggaatgcaaaaccactgctcaagaagtatttcttcacgtcagtgccttcatggacggacatgatgccaggttttagctcagcaattgttggaacgtgtccgggcaagacacccatttgtcctgttgatgcgggaatgatgaccatgtcgaccttcaagtatatgaagagaaaccaattagctttcagttatgattaaagatataagatatgaaactctaggatcagcggttcgttttaattttgtataaatagaatatgaagatgatagcgcacgccaagatggttggaaaatgcatcaagaaaaaaggctggcaggatttaagctacctacagcgaatgaccatctacgcgtactgatattcatatgtactacaagaatctgaatactacatgaaataacaatgaatatgtataactactggctacagagattactcataaaaatta

SEQ ID NO: 4017 - DNA, 531 bp, Arabidopsis thaliana
gatggaagataacatattacctccaaagataaatgacatggttatagagaactttgaaaaaggggcaggttatggagtcttgaaaataggcgacggtctatatgaggttagagatatggtgaattgcgggtacccgtaaatctgtgggaaagaacgtgcacatgccgccagttccagctacttaccataccatgttctcatgcaatcgctgcggcaatcagagaaggggtcaaagttaactcaatggttggggtacaccacaccgtccacaactacgtttagagtacaaagaattgattatgctagtaccagatatggcaacgctagcaccatcaccaaatgatgtcgaaggaggaaagctagcaccaccctatgtgaacaaccaccggggagaccaaggaaaagaaggatattttcacgtggtgaattcaaggtaattttaccgttacaggctaataatgtgtatatcaataacatggtgtcgggatattttacatatgttgaaagttttgtgaatttgtgatcagagaa

SEQ ID NO: 4018 - DNA, 530 bp, Arabidopsis thaliana
tctcaggtttaggagtcctgaagtgagcgtttgactgctgagaatggtaaggaggtaaaagaccaaaaaagccttgtccattggcattcagctgcggtgggtatccccactgatgattccacatctgatacgggtttggatagaatggtggcctgttccaggagttgaagccttgacgattgtaaccatatgaggatcgtcctccgccccgaaacctgttgttgcctccgccacgtcctctgtaagtcatctgagtaggacctgagcgttggtagttcacatgaggcgcctctgagacaacaagcacagtagaggaggatgagtggtccacatgtgttgggttcggtcttcatgatgagccgttcaggtgatcctcttcatcttgtaacatggttgtggcgtcgtcgaagcgtggaagtggctggcgatgtttgataacattgatgatgttgtcaaccttagcattcagaccattcaacacgtacatcatgagtgtcgatcttgaactggagcacaacatttgagagaga

SEQ ID NO: 4019 - DNA, 1943 bp, Arabidopsis thaliana
tcaatgccggtgtggaggtcatgtgcttgtattgctttgctaaaagctgctgatccaagatgctcagtgacatggtaacgaccagcaatgacagaattcaaaaccacatggaagttcttatcctcctcaaaaccagtcctgggcaacagaagacaaatagaagaaacaaataaatttcctgagggttcacaagattcgggacagacttcatcccccttctaaacaaaatgtgtacgaaacatcatttaatacataataaaccacgatattgtaagggaacagacctatttttcctgtgaacaatcttcaggttgaaggtctcaaaatcctgctcttgggcttgaatctgtcttacttgctcttggaccacgatggcatcctcatcctcgaacgaggtcccaggatcttcttcaggcccatgactagtttcttcctcatcttcttctttgtgctctctcccagtatcagaactatgggagagtgcggatggggaagaatttcttgaactcgcaaccttttcatcatccatgtctcttaaatttctttcagaagaagagccactgcatctttttgtcgaagagacaatcatgctatcggactggattagcccctttggttcatcactttcatttctcacaacagcatcgcaatggtttgaccattcagggtttgcagaatcatcctgggacttctgtctatcagctactggagagggaaatgagaatccaccatctgcaaagtttttaagcagcatactcgcacctttaccaggtggaggcttaacaccagcaactccaactccgcgataaggaaggagctccagatcccattcactaccttctccaggaaagtattcaggtattatactcccattgtcatcaacatcatcgctcattcctacaccaattgacctaactgcagcatttcgatcatcttctgcgcggatatccttccgacagattctaccagagttgtcctcgactttccctttcttcaacaaaattacatcattttcatggctgacaaatcccttccacacaggttcagtgtccatcaaacttagctcctctgcatccatcaattgcccgtcatatcgagcaaccaaatcagcttgcttggtcgtgctgtatgtttcagtcattgagagacccatcggatcattggaagcagtaactggctcaatgcctttagcgagtacatattgctcaccggagaaataagaatcctcctcggcaaatgaatgatcatcatcattcttggtttgacttttatcctgcgtatcaggaacacttccgtgctctgtgcctttctcattatcactaggatagtcgacttcgtgacccaaaaaccatgcctcatcctcaattggttgcctaatgtaaccaacatcatcatcgtcgtcatattcatcagagtcccaatactcatttgaatgttcattgagagcacctaagccatcgccaaagccaaaaatcaagtcagatgcatcgtctgctattccgtgacttacagacaaccagtttcctccaccagccattttgccacctatgacaccatcacaatagaaaaggtaagttataggttgcaaaaaacaaaagaaaaggtgtacgcaaaagctagccaatggtaacataatttactcatacagaacataaagttttaagatttggatggtagccatcatcatgtcaactaacctgatgaatttatttcttgtccaataggaacatctagataagagcctaataggaaagcagtatcagtattaatcagcttctcgtccaatatgtctcgctcgtgtttttcttcccaagtaaagttcattagtttatcctctgacttgatttttacatgtggcagtctaggtaaatcttccctcggagcatcatgagccagcgaaaatgctaagctgcttggaatcttatgtcataccagactgtgac

SEQ ID NO: 4020 - DNA, 636 bp, Arabidopsis thaliana
  unsure (1)..(636): unsure at all n locations
nnnnnnnnnnnnnnnnnnnnnnnnnnnctaaagaaaattaaaagccgcgctgggtagcgtctcttacatcattcatggcttaatgcgtatggatactctgcaaccggaccgttgtgaaatccgcggtgaaaactttcactggcaaggtgacgccctggtcattggtattggtaacgggcgtcaggccggtggcggtcagcaattgtgtccgaacgcgttaattaacgatggctttgctgcaactgcgcatttttaccggcgatgaaatacttccggctctcgtatcaaccttaaaatctgacgaagataacccgaatattatcgaaggcgcttcgtcgtggtttgatattcaggcaccacacgacatcacctttaatcttgatggcgaaccgttgagtgggcaaaattttcatattgaaatacttccggcagcgttgcgttgtcgattaccaccagattgtccactgttgcgttaatcaaactattctctcttgaaccagggagaatccgtaatgccggatgcggtgtaaacacttatccggcatacagaacaatactacaccgtaattaattttacccgcgtcttctgcaatgccagtttatccactctgacacagcatcatcggtaataataat

SEQ ID NO: 4021 - DNA, 1159 bp, Arabidopsis thaliana
caaacaacccatttgcttgaaaacagtctctttttgccaaacttctttcaaactgaaccttgcctagaatatataagttcaagtcatttaaatttcaactaaaaataagatgactactatgaaaatacctggatttcttcacatagggtgtcactagtctcatcagaaaacttcctccaatcatctaatagtacagacacatgttccctcacaagaggaccaaggaaagaggagcgtgtaactgaaccagggccaacgtgttcacctgtagatgtaaatttaacatctatcttatcgtgaatctgttttgcaactttgctcatcctagtttgtcctcttgttttccttttctttgtctctatctcctgggtccgagtttcctctgtggaaggttggacatcaccctctgttgctgcctcttcttctctttcaccatccacttctgtagttgcaggctgctcaccatcttcctcttcttcagccaagtcagaaacaagtacactagccacactcccttgattttgtagttcatcaatctcattcacaagtatttcatcaataacatcatttctagatgtgacattactctttactcgtctatggatttagagtcctacaacgaaaggcaaatccacgccttgttgacgaagactacgccggggatggtgcttaagtgacatctttgaccacctgatggaatgataaaaccaatgaacaaatatcagaagcaaaacaacacaacaaaacagattataaacaaaagaggaaatatgactatctaacttactctctctcgcatctgacatatcaacacattaacacatcaagaacaaatctgacaatctaactcaatctctctcgcatcagacaatctactataacgaagacccattaacaaacaaatcgggtaaacaagagtttaaatctgtcaatttgagattttgattgtgaaaaaacaaacatgcatgaccctaaatctatcaattgtcaaagctgatttaaaacgaaatagatagttatttgggtgagagtgagttgtagggttactgtgagaggcgacggtgagaggtgagagacgacggcgacagtgagaggcgacaatgagaggtgagagcgacgacgacattggaaggcgcggtgagatgcgacgagtgtgaga

SEQ ID NO: 4022 - DNA, 618 bp, Arabidopsis thaliana
gtggtttcatgttcaaaatctgccctctaatatgagcaaaattatcattcaatcccataagaaactgaatgattctgctagtctcagcctcttccagcaattccttaacatgctcacaattacacttcctcactgtgagaactctagtgttagccagttgttcccaaagtgtcttcttcttcgtatagtaagtggataaatccagatttccttgtttcagagtgtggatagactgttcaagttgatacttcctcggaagattactcactctgaatcttgagaatagatcattccacatttcagctgcatcctcataatacaagatgctatcataaatctctttactcaccacattcaacaaccaagttttaaccatactattgcatctactccaaatcttgaacatacgatcactaacatcaggtctaggaagagatccatcaacaaagctcaacttattctttgcatctaaactcattcgcatagctatcgaccaattgttgtaattcgttccatcaagaatatgagaaacaatattcagacctggatgatctgatgagtgaaggaagtacggactatgagcattatcgtacgattcaatcgatgcggaatttgatt

SEQ ID NO: 4023 - DNA, 538 bp, Arabidopsis thaliana
catacattgggtggtacttcaacgcacataaacaatattgtgggtgatgtaggtggcataaccatcttaaccctgggattaataaaaatgcatggactcaggaagaggaactgactcttattcgtgcgcatcaaatttatgggaataaatgggcagagcttatgaaatttttgccaggaaggtaaatatgtcttttccatgggtcctagtataacaacataggtgtaacatgtccgtaaaattggtggcctcataaatgaaataataggtttttgatgctggtagttgtggtctatcgttcctgctttggtgatttgcttattttttcttacgttcctgtaggtcagataattcgataaaaaatcattggaacagctcagttaagaagaagttggattcctactatgcatcaggtcttttagatcagtgtcaaagctcgccattaattgcccttcagaacaaatctatcgcttcatcttcctcgtggatgcacagcaatggagatgaaggtagtcaaggccaggggttgatgctgagg

SEQ ID NO: 4024 - DNA, 806 bp, Arabidopsis thaliana columbia
tattctgttaagactggtacattcgtataatatgttaaatgtgagtttaaataatcaattaaattatttgaaggttaatttctgaaaatttatttgtttgattcgataattaatttggatattatgataataagatatgttattctgttaagaccagtatcagcatggggcgatgcgctgcagagccaacaggatgccacgtgacagactatggccacgtgggcggatcccacgggacgggttgttatataaaagtcgacttagatcaattggtaacagcttgtcttgtgggaacgttgttatagggtgaggtcttgagttcgtggaacgccaagcgcaccaataacctacctgtgggcttaggtggcccaaggagagaggttaggatcgatgcgatacagagccaacatgatgccacgtggaggagtatgtccacgtgggcgggtcccacgggacgggttgttacagctctattgtgcaatctgtggtagtcggcatcgccaacagattattatgtattttgttagtgggattgaggtcggttaattccgtggaccgtacttctttatcacctcgttaggggccaacatctctatcgagtatattatgtaaatattctgtcagtatatggtttgggtcgactaatgctgcagttgtaccattccgacgtgcattgatggatacatgctcgttttgttctgaggttattattctgtctgatgatattattatgttcttatgatttaattatgtattttgctagcataagttctgacgtgctttactttatttaaaattaattgaat

SEQ ID NO: 4025 - DNA, 1271 bp, Arabidopsis thaliana
ccagttgtctggcaatagactgtgcagtcgagtatctgtgttatactttctgtctgttactcgacctgtcactcgacctcacccagtgctggcaatagagctgtgttggtcgagtgttttactgtttctgtttgattttctgttttctgcatgatcacttaggactgctagaacacaccaaaatctgttattgcttagcctgacttagtgacttctgatcacatcttgattgttagcatcacacccatttggattgacaacctaaaatactataacgacatgattggtgttttgggataattgactaaaaacctattatcaatttggcgttgttgccaattgggtgtttgtttgttacatttgagatttcagacttgcttagatcaagttcttgttcaattttcttttctgttactaactgtgtgtttttcttgttgtcttcttgatccaggtacacctctactgtatgcaaactcgatcaacaggcaatcagaacctccttttcaacgacaacatcgaccgcatagctcgcgaactcagagaaaggaaaaacacagtcaaccttgtaccttagcaaccactcgaaatggctgacgaacagaatcaacaaaatggccctaccaacattggtgctggagatgcaccacgttatcaccgtcagaggaaaggaatagcacctcctgctatccagaacaacaacttcgagattaagagtggtctcatctcgatgatttaggggaacaaattccatggactgccaatgcaggatccactcgaccaccttgatgaattcgataggctctacaacctgacaaagatcaatggtgtcagtgaagacggattcaagctccgtttgtttccattctccttgggcgaaaaagcacacatctgggagaagaatctgccccatgactcaatcaccacctgcgatgattgcaagaaggcttttctatcaaagttcttctccaacgccagaactgcaagactcagacatgagatctctgtttttttacacaaggctggtgacagctattgtgaagcatgggagcatttcaagggttacaccaaccaatgccctcatcatggcttcactaaagcctctatgctcagcaatctttacagaggaatcctaccacgcatctgaatgcttctagataccgtcagcaatggaaatttccagaacgaagatgttgatgaaggctggaaattggttaagaaccttgctcaatgagatggtaattacaacgaggactgcgataggaccgtcagag

SEQ ID NO: 4026 - DNA, 1651 bp, Arabidopsis thaliana
atctgcctcaaggatgtattacttaatacacaagcataagcaggctgtattacacgaagatcagtcattcttgaccaacggtgttgcttacggtgatacgattcagatttcccaaggatatgttaaactcactagtggttgaacgtttgatcactaatcgatcttaaactctttttcttattggttttagtctttcttcaagttatctgaaatatcctaacacatgtaataccaatatgagctgaaagaagagaaataagttcttgttgagttactataagctctgtgtacattctaattcacatttcttttactacttcaatgtatcactagtacaaagatcaaatgttgaatctttattgacaaaacagagcaaaagacagtaaagtttcttgctttattcaaaaactaaaaccaaagaaaaatcacattactaatttgcttataaacactctgcgactaataaccgttggatcatatcagtaaggagagaaatcgacggttagaattctttgactagtgatatttaagcggccaaatcacgaaattaacaaactttcgtcacaaatcatcagtttctctttctctcttcctccttagtctctctccactgatcttgaaactacaacgatgaacgtgtacatcgatactgagactggctcatcgttctccattactattgatttcggcgaaacagtgttagagataaaagagaagatcgagaagtctcaaggtatccctgtttcgaaacaaatcctttacttggatggcaaggctcttgaagatgatcttcataagattgattacatgatcctcttcgaatctcgtctccttctccgcatctctcctgatgctgaccctaatcagagcaacgagcaaaccgagcaatcaaaacaaattgatgataagaaacaagagttctgtggcattcaagattcatcggagagcaaaaagatcacgagggtgatggcgaggagagtcccaatatatattcatcactaccggcttattcacttgatgagttacttggccctaaatattcagcaactgtgacggttggaggcagaacaaatcaagtggttcaaaccaccgagcaagcttcaacgtcaggcacagccaaagaggtccttagagattcagattcgcctgtggaaaagaagatcaagacaaacccgatgaagtttacagtacatgtgaagccatatcaagaagataccaagatgattcaagtagaggttaacgcagatgacaacgttgaagaactgaggaaagagctggttaagatgcaagagaggggtgagttaaatctgcctcacgaagcgtttcacttggtaagcagtgagttaccattgatcgaaactaagtcattcaagtggaaccgtgttgctgatggcgatacaattgagcttatccgtgagaagtgagctaacatctttttgcagtctccatattgttgttgttaaaagaagagaaactagttcttcttgagttaacatcttttcgaaattagctctgtacattctctagaaaacattacgatcgggtggtctagctcacattttttttggtattttcaatgatctggggttcagcaacaagtatgaagaccaaatgttgaatctttgttgataaacagggcagaaagacagta

SEQ ID NO: 4027 - DNA, 882 bp, Arabidopsis thaliana
gatcgcaactccctattcattatttctctaactgcatttgcattgcatcatgcataaggggaaagggaggtactcaacattctaagggaatgtgtagggaccttgagagtaggtgacgtagaaacgcacactctatttgattatggggctacccattgttttgttagtatagaatcggttgaatcaggtgggttcaggaaagaaccaaacaccgattatggaataatacgaccggccggcagacaggcaatgtatccgaccggacttgttcggggcatctcggttgtagtgaatggtgtcaatatgcccgcggacctaatcattattccactaaagaaacacgatattatcttagggatggactggttggggaagtacaaggctcacatagattgtcactgaggacggatacaattcgagagggacgagggtatgttaaaattccaaagaataagaacaacctcgggaagcttagtaatctcggcaatccaggcttaaaggatgctcaggaaaggatgtgaggcatatttagccacgatcacaaccaaggaagtgggggcgagtgcggagttgaaagacattccgatcgtcaacgagttctcggacgtgtttgctgccgttagtggtgtaccaccggaccggtcagacctgttcacgatagaacttgaacccgggacaacccccatatctaaagctccgtaccggatggcaccggcggaaatggcggacgtaaagaaacagttggcggagttgttggagaaaggattcatcaggctgagtagctcaccatggggtgcgtcggttttgtttgtgaaaaagaaagatggtagctttaggctatacatcgactattggggattgaatagagttacggtgcaacaa

SEQ ID NO: 4028 - DNA, 994 bp, Arabidopsis thaliana columbia
tcctttcgccccctatataaggagggcgcccggaccattccactcaccacaacacaccgaaaacacaagaaactcaccattaaaactctctccctcttgggagaataaatagtcttaggattcggtagccgggctgtggccggcaataaagaaggagggtcggatcgacctaacctcgagaaggaaggtaagggatcctagactttgagtctaagggttctaggatgtgagtaagtagtcggatccttgaaaggattgactagagggcttggtagtatccgggtcatgtgcatcctacacaagactcggtccgggtagggatcagctgaggcggggacacggctcgacggaggaccggcgggtcttaactgacctgccgagaatcggccggactgatgcgcgatcttcccctctctgaattctctccacggatccgagtagtgtatggcatatagagcattgcatggacttgcatatgattaagtaaatgagattacttatggctctatgactttcatgaacaaatggtgatcgtgggaaggacttggcttaggcgcgagagactcaaggccgggatgatgggtggtgatagttcggatagtctagggatcgattatatgacttgtaatagcttatatgcaaactcataggttgtatcgaatcctttgcttaattaataaagtatccgattgtttgtttactctattcgtctcatatattgaatctcggaatcatatgaaacggattagactaggaaagaacctcataaacggatagggccgaggcacttagtggcttgggtcgagagaactcgcccggacttttgggatgtcggatacggagctttgaagatattataatcaggatcaattgaggattctcactgtagttctcataatgaaacctgaaaacaaatgaaactcaaagataaacgttaatacgttagcccaacaaaaccaaaaacacaaaccaacagagtaaaccgatcgagtat

SEQ ID NO: 4029 - DNA, 1646 bp, Arabidopsis thaliana
tccccccaatcattttatttgctctaattattcaatcgtgtgctaattctatttataatatccaacattgtgaaaagctaataggtgaagacatgaatgctttgttaggtgatatttcagaaatgttaatcacaagaccttatcttcttaccacagactttggcttgcttatctcctcattgttgacggtgtcctcatatcctcaaaccaacctagtacgcctacatttaaatatgtagagatgttggcagatttggagaagttccttaactggctgtctatacacactgaggataaatggtcaaagaaacatggataatatactttggattgacgtttattgttcatgtataaacttatttattagtatgaaactaacatgtgagtcattagatgatcatatggactggactgcttggacaatcattaatggacaagtatgtctttgatttgctgcgaatgtgtttatagctcgagaaaattgtatcaacatgtctatatacatgtggataaatggtcaaggaaacatggataatgtactttggattggcgtttattgttcatgtataacttatgtattagtatgaaactaccatgtgagtcattagataaccatatggactggattgcttggacaatcattaatggacaagtatgtctttgatttgctgcaaatgtgtttatagctcgataaaattgtatcaacatgtctatacacatgtggataaatggtcaaagagacatggataatgtactttggattggcgtttattgtttatgtataaacgtatgtattagtatgaaactaccatgtgagtcattagatgaccatatggactgaattgcttggacaatcattaatggacaagtatgtctttgatttgcttcgaatgtgtttatagctcgataaaattagcacttttttgtttgctcattcaacattaacattggagtccaacttgatataacctctctagcttctcttcttcctctcttacaataaacaaaataaccatcaccttctctttcaacctctctacactcctccctcgacgtcatagctacatcggccgatgaagaaatcggagctacaaatccagcaacaccaatcggtatatcaagccttgtaggtcgtttcctctttaaaactcctcccggaggagacgatgcagaaacgataacccgaatctagatggaggtttctcgaaacgaagacgaaatggcgatttaggagaagaaacagtggtggatatagaggaaggagaagatgttggaggtttgcgatgagaaagagattggccggaagaattatcagccatcaacatcgagattgtgagataatcggaagacctgtaattgtgaaggtaactctttctcatctgcaaatctcaactgtcgttttattagatatcaattcaaacaaaaccatgttaaccggttaagcaattgatggtttagtttgaaaaggatataattatcattttatcatccagaaacaagagaaaatgtctcatccctgaaaagtgcctaaaaaaaaaagagaatattacgtgattagacacttttttaaaagttagttcataattatgcactttaaatagagaaagcactttaaatggagaaggcactttaaataaattatttta

SEQ ID NO: 4030 - DNA, 788 bp, Arabidopsis thaliana
ttcaggctctgtatgggagagaacctcccaaactcttgcgattcggtgatgtacccactgctaacgccggcgttgaagagttgctgcaagaaagagactgactggtcactatgctgagagagaatctacaagcagcccaagctcgaatgcagaagtcagctaacaagcatagaagagaattggaattctcagtgggaacttgggtctatttaaaactcaggccgtatagacagctttctgtagctcaacgacgtaatgagaagctatcgccaaggttctttggtccgtataagattctggaacgcataggagcaatggcatataagctgcagctaccaactgaaagttctattcatcatgtgttccacatatcccaactgagacaggcgcttccaggttcagcacaagctcaaccccttcgcgattatgacttctaacttggagtgggcaacagaaccagaagaggtaatggagatcagagagggcaacacaacagaagatactaagctcttgattaagtggaagggtatgccagagtgtgagaatacatgggaaccaatgacgggcatcacgcaacaatttccagattctcaccttgaggacaaagtggctttgttacgggggagtattggtaaggcagcaactcaagcaatggagtcagcaagagaagtcagaattccaaggaagagagtaccaaagaaggtttatgatcctagtggctgaaatgaagctaaaggaagtcaaggaaatactctgtaccatccagaggctttgacaatgtctttgac

SEQ ID NO: 4031 - DNA, 502 bp, Arabidopsis thaliana columbia
tattgtgaatccaacaacgagtgaagtgtcccattagacatatacttgtaaacaagaaacttctcttcttccacaacgcagaaaccaagaagcggtgctaagttagaatgacgaagctcccatagctgattcatctcataccgaaactccctttccccgagcttacacgtactcaaatgcttcaccgcaagcgctgaaccatccggaagaagcgccttataggtagtcccagtcctagtggaaacaataatgttctctgagttgaagttattagttgcagccatcaaatccccaagtttaactttaaccaaaggcttctgaaacaaagacacttgagtaagcttatgactacgaagtctctgcgctaaaccgctaactcctacttcggttaaaccgcttcttcgtctccttgtccacttcaaatgataataccaccaaatcccaaaagctaacaacattgatgcagcagaccaaacacaccagctgcaattattatccaaga

SEQ ID NO: 4032 - DNA, 562 bp, Arabidopsis thaliana columbia
tgaatattatactgtttccacgaaccacgattgtgcaaacaaatatgttaaggcaccacgcactagtaacgtaacacgttgacacaaagtgatttgggaaggtagtgggacgcatgtctctaaatttccggtcccaccacccatgacccaacacacgtatacgaatgttcatctcttgtcggttttgttctttgttgcaactgttttatattattgttgcttagcagagaaaatagtaaaaagatagggagattagcgtttgacttaaactgagaaaacgaaacacatgagtattctatggttcaggccttggaagcagatacatcatccatagtagacgaggcttcaggtgcagcaactgcagttgctgttacatttgaatcctctgctgctacagcactggagatggggttaaagagggatccacgagagtgagtagttgatgatgatatcgcggttgcgagagatattggcattaagcaaagcccttcccttgaaggtattgcattgctgatcccatgtcttcctcatcagtttcgcactctttgttctgttgacctta

SEQ ID NO: 4033 - DNA, 1417 bp, Arabidopsis thaliana
gtggatggagagatacaagtctgttgcagcgaacagctggacgagattgaagcagtgatgccactgatggaagttctcaacctgattcctgatcctcacaaagatgtgagaaatttgatactggaaaggatcaagatgtatcacgattcagatgatgaaagtgatgccactccatctcgagctgctaataagaggattgttcaagagaagttagaagatcctggatctttcactctaccatgttccattggggaatttgctttcagcgattgtctgtgcgatctcggagcctctgtcagcttgatgccactctttgtggcaacaaggttagagttcattcagtataaaccttgtgaccggataggtcttctagaaaacccttcggcatgctgaaagatctaccagtcatgattaatggagtagaagtgcctacagacttcgtggtgatggatatggaagtagagcataaggatctcttaatactgggaagacccttcttagcttcggtgggagtagtgatagatgtcagggaagggaaaataggtctcaacctttgaaagcacatcaagttgcagtttaacatcaacagaactccacaagggtcaacagaaaatggaagaacctctggaaatgatagagtgatctcaagagaagaatatgagactgaaagagtgaaagaatttaaaaagaggtctgataagcaagatgaaactatagagaagctagcccacactgttgaggaacttataagtaagctgaatcagttgcagaaggaagctcaacctaaaggcgggatcgacactatcccgagaaagaagttcacttcaagatggtctgaagagatagattaccctccagaagagaaagaagcatattttgaagagaggggaattgagtattctgctgcagacctctccagggaggacgctgagtatgatgatggtatcagagaggattatgcagaccctctctacagttcattttcttcttgatgagtgtgaggagtcaagctagagactttaaacaagctcacttgggagaaagtcccatgaatatccttgtaaataattttttgttatttctgatttgttttagttgtgtttgtagttctcagaaaaaaaaaacaaagggagaagtaacgtgaaagtagagtaaaaattttaaatcattgttttactcgaccaacagaagctatagagtcttccagggagtttatcgagtttatagaagattgtgggatttcctggaggttttctagtgaacaaagaagagacaagaatacattgtgggatccgccgctgacgcccatgtcctccatgcaacagaccaacggacaagcaatccccccccatctcttctcctccactcgacgtctgccacatcactcgacctccatccctctctactcgaccttatc

SEQ ID NO: 4034 - DNA, 1713 bp, Arabidopsis thaliana
ggattgatgaaaatcaaaatatggagattaacacacatagcttatgctaaaaggcataatcaaaaacaaacaaaatgttatgagccctattcaagtgtattccaacgattaaaatgctttatttatagcctctttgatagatgttactagtgatcagcccagtaaatcatacaagagttgctgcattagtcatggttcaatccttttcttattatagagatcgttcacaaccaatctttttagctagttacaacattgtctaaacactaaacaacccaaaaaacaatatgtaaaggacatgtaaatgctcaactttgtttaagcaaatccaaacaacgaagggttttaacaaaacttactggctggctgtatttctattctgagatagtgattgctgtagagtcatcatttgctgaagaccaaaaaacaatagaaaacattaggtttaagagacttctttactttgtcccagaaaaaaaaaagaacagaaacttctttacttgacaatagcttagatacaaagaaatgtttcttttgagagactaccatgttaagaattcatatgcatacagacaataggggtcatactagcctgcatcatctccggagaactgaactgacgaaggaaatctgggttctgcatcatttccctcaactgaggattcgaatctagcatgcttcggagttgtgggttaagactcataagctggaatcaagggaaaacaattaatatatgttcacaatggtaaaaggctcttaagttcagatcattctaggcctacctgattcatgtattgtggattggaaaatacgctttgcatcatctgcgatatggctgggttttgcaataactggctcaattgagaagcatctggagtcgcaccaagaggtgaatccgctccaagcataccgagtccaccaaggcctccaaggcttccaagaccaccaaggccaccaaggtccaggcgtctcgcatccccaccaacatttgtccttccaggggcagttgtctgacctgtcaagtagcccacaatatgttcaattatatttagtgtattatgagtaaatgttaaattagaaacaataagccaagaaaatcatatgcaaaaactacacataacaacaaattgtggtaactacactaactcaccaatttactatacacaatattgttcctgaagcagagcagtgaacagtaacgtccatttcttataaacaagccactttttcatttataaaatattactgcatccttcaaaagacaaataaaatcgacaggagattagaagatgaaaatgcagttacttaccacctgtagcaccccaaggattaggaagtggatttgcattcggaatagtccccgttccagcatttggtgtcgaagaattattagaagcatcacttccttgcgtagtgaccccctggtttcccaacagagcagcaaatggattggagcctgtattgtttccagcattcccggacatagtggtagcattcattaacggttcctggacattttcatacatacgcctaagcatgttaaatccctcaggcatagactcaatattactcatagccctatcagtattccgcatcatttcacgcataagctctgggtttcttgccgcttctagagtttgacgaaggatgcttgggtcattgagcacatgaccaagctcaggattgcgatctacaagctcacgcatttgaggg

SEQ ID NO: 4035 - DNA, 783 bp, Arabidopsis thaliana
agaggatccctgcgtgcttgtagatcgcaatcatgagcttggtcaagagctctatgaattaagcagcattcaggcaatctctagaagcggcgagaaacccagagcttatgcgtgaaatgatgagaaatactgatagggctatgagtaatattgagtctatgcctgagggatttaacatgcttaggcgtatgtatgaaaatgtccaggaaccgttaatgaatgctaccactatgtccgagaatgctggaaacaatacgagctctaatccatttgctgctcttctgggaaaccagggggttactacacaaggaagcgatacttctaataatatttcggcaccgaatgctgaaacgggtacacctaatgcaaatccacttcctaatccttggggtgccacggctggtaagaaactgtattctcatcctcttaatttcatatgggattttacttgtagtttaaggttgaaatattaaatataaaagcaagagtggcttgtttttaagaagtgaaagtttatgtttaccacactggtcaggaatagtattgattatagtaataattggtgagttcatgttctcacagtttgttgttatgactagtttgtctatgaataagtttcttggctgtttgtttctagtttaactgttactcgtaatgcactaaagattttagaacatattgtggggctacttgacaggccagacaactgcccctggaaggacaaatgctggacttggtggtcttggtgggcttggaggccttggtggactcggtatgctggga

SEQ ID NO: 4036 - DNA, 443 bp, Arabidopsis thaliana columbia
gattaccgagatatccacttcttgcaaggaatggcattgtagaactaatgtcgtcaaattctcctgtttctgcagggctaatctctgaaatcaaaacaaagaattatcaacaagtttatcagatcaaaattttcagccaaatagaactgcaataacaaaaccatcataactaagtacatactcgaagggcgttggaagtgattgtgatacggcgaacggctggacagattgaaacagtgatcgacgaaagcatgatgctttgcaagttcagatctgataatctgttagacacagcgaaaagcagataactgagtgagatataagaacggtatgactactcatcacaatatctgcaggttgaaaagaaaccatagatgaggactatacatgcgacaatggactaggcttatactctgcaaacgcgagagatgcaaagatacagt

SEQ ID NO: 4037 - DNA, 447 bp, Arabidopsis thaliana columbia
caaaaagaaaaagaaaggaatgaggcacaaaagcagctgaagaagaaggaagaggaagttgctgctttaagatctcttttaacacagagggaagcttgtgctaccaatgaagaggagataaaagagaaagtaaacgagagaacccagcttttgaagtcggaactagataagaaacttgaagaatgccgaagaatggctgaggaatttgttgagatggagagaaggagaatggaggaaaggatagttcagcagcaagaggtactggagatgatgaggagacggttagaggaaatcgaggttgagttccgccgctcaaatggaggagttgtgatgaacctagtgggttgccaaaagactcaggagtctttactctgatgatgatcctggtatggtgaagtcaatggaccttgacatgggtgatccagaacctgtcaagcaagtgtgggg

SEQ ID NO: 4038 - DNA, 754 bp, Arabidopsis thaliana
gtagttttttaaaaactatttaggttgatggtatttttgtaaagaaatccaaaaattgtagttgatacaagaaaattttgatttgtgttgatttatttctcttttggcatgtgaatgtaagtaatctttttccacatgatttctaattctggacttgcatgtcttgttacgccagtcaacattcgttggataagttacaatgtcatttacaacttgcagattaattcggaaatcaagaaggaaaaaatctgaattagaaatagtaggttggatttttcacaaaaaaaaaaaaagtacaatattttgagatatgaccattagattcttaaattttacgattctaacttgtaagatttcaaattaaaccatgtataattcaatttaggggtaatttaatactttagggtagtaacgataaaatagataattaaattgaagtttaaggaccatcctgtaaattcaagttcggtaccggaaacacgtcagcattgatctaatagatacgagtcctcctttctctatgaataacgtaatctctctcccgtcttcattaccatcgaaacagtgtcgtcgtagtctctctctctctccgcaaaatatcatcggagaaaagaaacagagacacgaaacagagaaaaccatgcagagattcgcggcgaaaagatcggtgcaaaacatttccgtctctctatggcgtcgatgtatcccatcgacgtctcaggcagcgacagttccagttaagggttccgacgag

SEQ ID NO: 4039 - DNA, 456 bp, Arabidopsis thaliana columbia
atctgattctcaaactctaaatcactagtaatcgctgttttcgacggagcaaatctcttcaccgtcacgatcatttgattaaccatcaccgctttatacgttgtacctactgatcctcttcctaaaagctctgctgaagctctcatcaactggtcaactgtgtacattgcttctcctcctcctcctccttcgccgcagaatatcaaatctccgtttcttgggattcgctttttcgacgacggcgcagtggtttgaaattggatcttgatttctttgttatcttcttctcgcttaggttgcgtaattatcacgtcatcgtagtcttctctccggttttttataaacaacgagaacacgacgaggcagagacctagaactatcaaagaagcgagaccaatggtgaaccaagaactaaccaaccgtttttaacctttttaaccaccggtggaacaatca

SEQ ID NO: 4040 - DNA, 599 bp, Arabidopsis thaliana
cctaacattttctttcttccacaaatttccctacagagagatgatgaagatgatgatgagattgaattatctgaatccaaaagtctaattgtatagctacgaattcgtaagagtaagccatagataacatcatagccaaagaaaaactcacgcagcgacgatggaatcgacgaagaggaggcgaaggtttgcagtaggaaagtacaacggccatggacgaaactggttacgcgtcggtgtgtttgaagaggaacgtgaaaatggagttccgacgcgacggcgacggcggcggctccggcgctcaagtggagtcacagtggtcgctgatgatttttttgattcatgggaatttggtttatttgcttcgtgacgtgtcaattttggggtcttcagttatttttttgcgttgtcgataaggtgggctattgatttgacagctaggcccattaaatcgagtggacatggacctttaaagcccaaactatttcccgcaaagactgattttcaattttagtgctgtagaactaggtttctgagatattttcttgtatagcaagatattgatttttagtaacaaactgatacatgcgtagaaggag

SEQ ID NO: 4041 - DNA, 1261 bp, Arabidopsis thaliana
taaaaatgcgggatatcaaaatgccaacagaagattcttatccttacatgttattaaatcccactatagttgtcactacacatctttaatattgctaaccttccattaatcaaataagaggcggtttgggcggcatccaataatgatctcccacgtaatatcaaccccaccttttgtcaattgctctcttcactatatatatacaaagagcccatacaaagcccaaataacagaaaatagaaagaagtaacaaaaccaaagcaaaaaatggtgaagatcgaagttggaagtgtgggagactcattcagtgtatcatctcttaaagcttacttgtctgagttcatcgcaactcttctcttcgtattcgcaggcgttggctctgctgttgcgtttgccaaactaacctctgatggagccttggacccagctggtcttgtagcaattgcaattgctcacgcgtttgctcttttcgttggagtttccattgcggctaacatttctggtggtcaccttaacccagccgtgactcttggccttgccatcggcggaaacataacactcatcacaggtttcttctattggattgctcagtgtcttggctccatcgtcgcttgtcttctcctcgtctttgttactaatggcaaggtacgtactagtaaatttagttagaaaattaaaaaatacataggttttgtacttttgttaggtttggtttatatgttcgtaccgtcataggtacgttagtatattaatatatatatgatgacaaaaatattataacgtttcaaaaactaaacggtttaagggtataaaataattgactaatgagttgtttcccggtttgctgcagagcgtaccgacccacggggtctcagccggtctaggagcggtcgaaggtgtcgtcatggagatcgttgtgacctttgcattggtctacaccgtttacgccacagcagctgatccaaagaaaggatcgctagggaccatcgctccaatcgccatcggcttcatagttggtgccaacatcctcgctgctggtccattcagtggtggctccatgaatccagcaaggtcgttcggaccagctgttgtcagtggtgacttgtcccaaatctggatctattgggtgggaccacttgtgggtggtgcactcgcgggacttatctacggtgatgtgttcatcggttcttatgaagcggtagaaacccgtgagatccgagtgtaattgactgggttttgtgattgcttgatggttggttga

SEQ ID NO: 4042 - DNA, 564 bp, Arabidopsis thaliana
gaggatgactttacaatttacaaaaacagtatatgcccaccatattacaatgaaaaatattggtctccatattatattcaaagattattttattttatttataaaaataaaaaaaaataaaaaaaattggtgggaatggaatattttatctaatatttattattgtatggcatcttcaatttttatgacatttggctaaaacacaattatttccccctttacttttgtttgtattgtatatagaaaatatcgaaaacttgagctaaaacgtgaaacacactctagtgattattgactgtattatttacctaaatagtgagacttgaacaagattcgccggccaccacatcgccgccggttcaacaaggtatttcctaaatattccagcccatccaaaacctaacacctaaacatcattcacacttaaactaatcagaaaccataaactcgatcaaaatcaaaagggttaagaataccaactctgggtggtaacgataacgatgaaagacacaaagaacgttatgttcttcatgtaaaacgctttgaccacggtaacaacgtgta

SEQ ID NO: 4043 - DNA, 485 bp, Arabidopsis thaliana
  unsure (1)..(485): unsure at all n locations
nnnnnnnnnnnnnnnnnnnnnnctaaagctggtctggcgtagtaaaatcggtacctcgcggcgcgcggcccctcgatgagaattttgggttcaattccgcattcaggcatcatcgactgcacccggtcaatatccagcgtacgtggcgtcaggtggttgatatggcatccaggaaaacagaccacatcagcaatcaaccgatgttcgttgtgcaatgcgcgataggtttcttcatctaccgttgctgactggtgccagcgaaacgtttccagggcttcctgcacaaactcctgtgcctgtgtttcgttaaaaccgccctgctgctcatattcctctaacagttgtcgacaacgtggggtgaagatatcgcgctgacgcagaatctccgccgctttctggcgcaaaatttcgttctcgataagctcaaggcggagtaaggaggtaaaaacgcggaagggattacgcgccagagaagcatcatcaat

SEQ ID NO: 4044 - DNA, 612 bp, Arabidopsis thaliana
tcatcatctgctgctgctgttgttgctgtggttgatagcctgacccaagagcctgatttggttggtttggcatgtacacgccgttttgtggaatttgaggatatggactgatgttggcaactgcttgacctgtttggggcatttgagcatatggactgttattgttgactggtggcccggtttggggaatttgaggatatggattgttgttgttaactggttgagcatgtgtgaaggcagtctgagttggatgcattccaggagaaaacggacttcctgactccgcagagggactatagtcttggagctgagcttcccatgggggaggtggaaatgccgtactgtcttgggcaccttctttatattacaagattaccataaaaacagaacaattaatgattagacatgagacacaattgaagctgattcttctgaatccaaaagaaggaaattctttctccttgttgccataaccagagaaacattggcatactgcaatctaatctccagatgtgtgaaaaacaaaaactgtttatatatattaccataagatggctggactggttgctgtcaggctgactctccagggagaagagctctttgcccgtatga

SEQ ID NO: 4045 - DNA, 480 bp, Arabidopsis thaliana
ggtttggtgtctaaggtgcagcgacaatcttttccagtggctctacccaactcctcttctccttcacggttcaagacgacaccgcaactcttggtttatacatggcgacgacggtgtggcaacaacaagccttgggaaagttgatgacctaacctatctcttaattcactgtctcttcctggaaaaatatatgacggctatatgacggctatatgtaaacaacgatatacacacgagcacacacacgaaatcgcaaaacaacacaacaacgatgatctctgctaatcagatacaaacaaatgtcaatttttctgcccattgatcttcatttatagattattagggatgctgattcagaaacatgtagttggtttcagatcatatcaattctatacgtttaggctcaacttgtctctgatgtttttgattgctgctaatatggtagtttacatgcgattagcaaattgcagcgacgacaaa

SEQ ID NO: 4046 - DNA, 519 bp, Arabidopsis thaliana
cagtgtgctctaaagtaagtaattcaggtaagacggcagcaacgggcaacgacgacacaaaacgctccagagggttaacattcttcgcgccacattgtagcatcgcggtaattcataaccgagtgcctcacatgtctgaaccgcaacgtctgttctttgctatcgacttacctgcagaaatccgcgaacagattatccattggcgcgccacacacttcccacctgaggcgggacgtccggtcgccgccgataatttgcatctgactctggcatttttaggcgaagtgagcgccgagaaagagaaggcgctttctcttttagccggacggattcgtcaacctggtttcacactcacgcttgatgacgccggacaatggctgcgttcgcgtgtggtgtggttagggatgcgtcagcgccacgcgttgaatccagctggcgaatatgctccgttcacaggctgcccgcagcggttgttttcaaagcaatcgtccgtttcatcacatattaccttattgcgcg

SEQ ID NO: 4047 - DNA, 723 bp, Arabidopsis thaliana
cacgggacgctaatcactatcactctatcaaaaccgaccgtttttttgttaccattcacaagtttggtctacaaaacattgaatttctttggtcttgcagtggatcatcttgtaaataatgctgggatgacgcagatttcaatgtttgagaacattgaagatataacgaggacaaaagcagttttggtaattaaaataattaattaccaaccctttaattttattcgttgtcctgatctttaatgaatgatttgtgattaattaggatactaacttctggggatcggtttataccactcgtgctgcgcttccataccttagacaaagtaatggtaagattgtggctatgtcgtcttccgcagcgtggctaaccgctccaaggatgagtttttacaatgtaagtatatattcacttcttttaattacttagtaaagtaagctcttagggattgatgaatattattatacatataatatgttaattaggcaagcaaagcagctttgttgagcttctttgagacgatgagaattgagcttggtggcgatgtacacattacaatcgtcacacctggttatatcgagtcggagctcacacaaggcaagtacttctctggtgaaggcgagttaatagtcaaccaagacatgagagatgtaagttaaataaatctttaactcttaaccaatataattaatattgaggtcattgttgaattgtgtgtcttt

SEQ ID NO: 4048 - DNA, 559 bp, Arabidopsis thaliana columbia
ccaataacatcaagttttgaactttttcaaataacgtttcagactgattaatttccaagtatatttctgattttagaagtacctggttatcagaagcagagcttgtagggggtgggacgggactagaccttacgtgatagccttcagttggatgaggaggaacactcggtttgaaacttggaagacgtgaaggctttggactgttgtaggacgatgatccaccgcgcattggaggcggaagagggaatctctccgggatatatccatttcttcttctgcggaaaaagttaaaagggtaaggaaaaagttgacaactttgggatgaaaattgataaagattatgtttggggatttaccctaaaaggttaagctctattgtcgccttgtattgttgaggaatctccatgagagcagaaagggcaaactctgtttccttcaaggattgagctttgttctttgccatgatctctgtgaagttcacgaactagaaacagaacatcagattaaaacaccaaactaacttcgatgttattagctagaaagaaacttacttggaagt

SEQ ID NO: 4049 - DNA, 380 bp, Arabidopsis thaliana
gcaccggaaagggcactggacaccagatttggaactcctactattcgcaaagctagatgagaatagcttaataatcaaggcgcaatagcagtcgcatcatcataatccataagctaacagcaagaaattgaagaagcaagttgaaatcatcatgtatgcgaaaagcttgggtaagaaccatcgagcagagagttcaagtaacgaacaatcgaaatcaaatttgtgcagtggctccatctcccgtgtctcgtaattgaacagaaagagatcttttgtggtcgtgtcatggctatcactgaaatatatagtatttctatggagtccctcaacttcattggcgagcacggtgatgcctagatccaaaagcattgcctcgtcgc

SEQ ID NO: 4050 - DNA, 567 bp, Arabidopsis thaliana columbia
ccgaaaacataacaagtcgaatcgctgatccaaaacctgtgaccccaagacagaaaaaaaatgaaaactaactacaaggaaaatctctctctagaaatcgatcatcgtaccagatccattggcaccaaccagaagacagcgagaaccagctggaagatcgaggttgaagtcgaagaatattggatcctcaacttcgtatgcgaattgcataccgctaactctaatggcgtcatcgcactcgccgtcgcatctttcttcgccatttttgccagtctccaaaagctctcaagcggtcagatacaaggagtaggtaacgattagttggtggaccgacattgtttactttggtcaaatatgcagtcctttaaatatgtttcgttcaacgctaaatccacgtcataccagtaccttttcgccacgtcagtgatataacgattgtatctctttgcacgtcgccacgtcagtgtgctggtcatcacgcatcgtcaaccaaacgacagcgtatcagggagtacagaatgttttattgcttaaccttgtaatattttcttgtacatttatttgctt

SEQ ID NO: 4051 - DNA, 925 bp, Arabidopsis thaliana
agaagactctctatgaagttcggtttttaattgccggttttcttaatgaaccgtctattcagaccggttttaatttcaaaccccatttaagcccacatgtattttttttttttcccctaacatagccctgggcatgtggtattcgggtcagggtcgggtcggatttttcgggttcgaatttttgggtttagaaattttggatccgtatggttatatcaacaatttcgggtcgggttcggttcggcttcacttcgggtccgataattcaggtattagttaaaaaaaccataagtaaccaaaactatttcgggtttgagtactacttacccaaactttgtccaaatatacccaaacatacataaaaatatccataaaacccgaaagatctgaaattataacaagtttttccttaagccaataatataaaacaagaagtaaaccttgttttaagcttgttccataactcaaatcattaaacaagtcacattattagtgtatatatatcctcatatgtatatatagggctgggcaaaaaacgggacccgatatcgaacctgatacccgaaccgaaaaatcgggttggggtgggttagggttttaagaaattacttcattgggtaaagttttagtaaacccgtgggtatcaggtcggtccggggtttatccgttacccaaacaggatacccgaacatagatttaatatcaaaaatattaattatatttaatcttaatataatgtaataatctaaaattatacccacaaatgtaaatatatcaattacttttagatctaaatacccaactatttaaaaattatttgttatgtttgtcaaaatttagtataatatatctaaatctaattaaattattaaaatttgttaatatttaaggttttttttttgttgggtaccgctatctacacata

SEQ ID NO: 4052 - DNA, 1750 bp, Arabidopsis thaliana
ggttaagatagttttgcatccatgttccatatttgcgttgttttaaggtgatttggagtcgttggcgagctaattggaagatggactttctgaagcactttgtcaggacctctgcagctagtcactcgaccgcaacactcttgttcaccactcgaccccctggtcgagtagaaggcatcacaacttctcaccaccactcgaccccctggtcgagtatcacaaactctaccactcgacgttcactcgatcacctccactcgattacatggtcgagtaccaccatcatccaccactcgacatcatactcgacagctagcttcagagtcttctccattccacactaaaccagacactcgagcataaggaagagaagaagactccagcttaccactcgaccaatcactcgaccacctgggtcgagtgttgttcttaaatccgtcccattactgtgtcgttttgagtattagggattcagaatatttctctataagtagcatgcactttacattttcgagaaaagatttaattcgacagacactttgtgttcttgacattttgtaatccggatttctcttaatctattcagtatttgcttttcatttcgtttactaagttgttttttgttatcatcttgctattactctgttgctatcatgttttcattcttatcatcgtttatgctttctgcaatgatgtcttagtagtgcataggtttctaaggataggttagagtagtttagaattcacagtatgctaggtgattgagtttgatttatagatcccttctagattagttgttcttaatgactattgctttttctgatcaactggaatttgagcctagacatttctgcacccaaaaggtgttcgaggaaatgtctgaaccactaattccagagattcgtgactctgtaccaaagtattggttacagggagcgttttggctttaacttgttgattcataatgcctgttaggttagctctcgtcaatggtgattgagtctgagactagtttaacttgagggcctctattgcggtggcacttagacttggttattgaacttgttgtctagggatagtttattgagcatgtcaatcacctgtagattgaggaaactaaatactcaattaccccatcctcgggaatttctcatccaattgatttaaatgtttacactactatcgtttactgcttcttgttagctgttgtttagtttttgcatttctcgccgattatcactttgatactcgaccaccttgttgtctggtgacagactgtgtagtcgagtactcctgttatattttctgtctgttactcgaccacaccaagtgcttggtaaaaagctgtgttggtcgagtgttttgattattctgtttgaatttatgtttcctgcatgttcacttaggactgctagaaaccccaaaacctgttattgtttggcttgactctgtgaactctgattgcatcttgattgttagcatcacacccatttggattgacaaccttcagtactacaacgacatgatagtgctttaagattaattgatcttaaaaacctattatcaataacgatcctgatttgaataagtattagaacaagtcggctttgatctgaattggtatcagatggaacctaaatcaagataaggtgatcttgatttgggaacaacatggttactccactcttcattaaattctttaacaatgtcttctatttgagcaacagttttattggaattacttttgtat

SEQ ID NO: 4053 - DNA, 765 bp, Arabidopsis thaliana
caggatagaggaaatgttgttgttggtaagactgtcttcttaggttcaatgtctgggactgtctatgttacacaggaagagaggcctgtggaagaagctactgttgacaccgagatggaagaagttccatctaatgtgtctgcaatagtttcagaggtagatcttctggtaatcgttatatacagatttccatgactatatgcatatatattacattaatttctccacttatctaacgcttaactctatggtagcctatgtttcaggataatggaccaaaggatgttgccgaacctggcttagttggtacccatacaggggccgatgaaatagctgatgctgacatagagatggtagacaatccatcaggtttaccttcaacatctgcacacgtatgtgttagtcacttgttctttttccatatgtgtacgcccataagactttgcaaattatttttgtttcagaaagaagcaagagatgccagtgcatcgactgaagctaatggcagcgactcagaagaaacttatgagccttctgatggagatacaactcacgtacctagcacaagtgtacgtacatttttgtcactatgttctgtgtacatatatattgtttcatacattagtagaaagtttctttccgatgataaattctacaggttgaggcggcaggagaatccaaattagtgacagggatggaagttgaaatacctgagaagactcacagtgatcccccgtcaccatttcaagtagttaacaatgtaag

SEQ ID NO: 4054 - DNA, 627 bp, Arabidopsis thaliana
cctctatcccatgtatccatgtaggacaacaagatccaagaagcaacattacaactgagcaagttgttgtaacatgtgagagtttctttctgaattacaaactagcttaatgaaagaaaaggcccacctttctccaaggagtgttaaaccctctccaaaatatgtattgtccattttttcaagaatttcaacctacggaagggaaaaacaaaacaaacaaatttcaccgatgtatgaaaacataaacacgaccaattcaagtaaggctaactccataataacggctgattcaagaaatcaattaacgagaagtttcaattcattctcttttgcaatcacactatcattccccacttggaaattcactaccatggctgattatacaacatgttaaaaccgtcaaaccacaagatgaaacccatacctttcctgttcgtagatccactttcctcactgaagactgtaagaatggggaaaaaagcaaaatggatcatcaaactaaagcatcacattgaaattttcaatgactagagaatgagactcgaatcgaattcaaagacaaagagtaagacaatgccaggcaaatcaatcaccgtcccagtatagaccagtggattccgacagtgt

SEQ ID NO: 4055 - DNA, 1405 bp, Arabidopsis thaliana
gcagaaccgatcctggttatgagagtggtgcttgggattttgtgaggtctgtggctgcaggtttaggagaacatgcgatgattatttgcccgtgtattgtttgtcgcaacgttgatcgtcacttagctgttgatgttgttgatcatcttgtaacaaggggaatggattggagttataagttggggacgactggtatcatcatggagaagtgaaatcagtatctgattgtagaaagaacgcaagtcagtggaaccaagagattttagggttgttcaaagctgctgagtttatagatgaaaagctggttagtcaaggtgatgttgatgaggctgatgataaggaagaagttgagttttcagcaaagctagctgatgcagaaacacctctctatccaggttgcacaaatcacagtaagctctctgcgattgtttcactctttagcctaaagactcaaggtggttggtctgatagaagttttgatctgcaactcgagtccttgtcaaatatgctacccaagggtaatgtcttgcacacatccttgtacgaggtgaagaagtttcttcaaacttttgatatgggttatgaaaagatacatgcttgtgtaaatgactgctgtttattcagaaatcagtttgagaagctcgacagttgtcctaaatgcaattcttcacgatggaagattaacacgcgaactggtgaggtgaagaaaggtaatccacagaaagtacttaggtactttccgatcattccacgtctcaagaggatgttcagatcagaggacatggcgaaagacttacggtggcatttcagtaacaagagcaccgatggaaaaatgcgtatccggtagattctgtgacatgggatcaaatgaatcagaagtatccatcaaatgaatgttaggcttggaatctccacagatgggtttaaccctttcaacatgaagaatgttaactatagtgcatggcctgttttgctagtcaactacaacatgccacctgacaagtgtatgaaagaggagaacataatgttgacattgctgattcctggtccaactcaacctggaaacaatatagatgtgtatctagaaccgctaatagatgatctcaaccatctgtgggaaaagggagagttaacttatgatgcattcagtcacacaacattcacgttaaaagcaatgcttctgtggaccatccaggattttcatgcatatggaaatctagcaggctgcaaagtaaaaggcaaaatgggttgtccagtatgcgggaacacacagatagcttgtggttgagtaattgcagaaagtacgtgtatatgtctcatcggaagtcactgtcaccgacacatctttataggcgaaagaaagcatggtttgatggtaaagctgagaatggaagaagaggtagga

SEQ ID NO: 4056 - DNA, 1086 bp, Arabidopsis thaliana
gcttgggaactgcaagagtctgatctggcttgatctgaacagcaacaatctaaccggggacctcccgggtgagctagctagccaagccgggttagtaatgcctgggagcgtttcaggtaaacagtttgcgtttgtgagaaacgaaggtggaacagactgcagaggtgcaggtgggttagtagagtttgaaggcattcgtgctgaacgattagagcggctaccaatggttcattcgtgtcccgcgacacggatatactcaggcatgacaatgtacacattctcagcaaatggaagcatgatctatttcgacatctcgtataatgctgtttcaggttttatacctcctggttatggtaacatgggctatctccaggtcttgaatttgggacataaccggataaccggaaccatcccggacagttttggaggattgaaagcgattggtgttctcgatctatctcacaacaatcttcaagggtacttacccgggtcgctggggtcgctttctttcctcagtgatcttgatgtctctaacaacaaccttactggtccaatcccatttggaggtcagcttacaacgttccctgtctcgagatacgcaaacaactcaggcctctgtggtgttcctttgcgtccctgcggttcagctcctcgacggcccattacctcccgtatccatgccaagaagcaaactgttgcaaccgctgtgatcgctggaattgcgttttctttcatgtgctttgtgatgctagtcatggcgctttacagggtgaggaaagttcagaagaaggaacagaagagggagaaatacattgagagccttccaacttccggaagctgcagctggaagctctctagcgttcctgaaccgcttagcatcaacgttgctacattcgagaaaccgctgagaaaactcactttcgctcatcttcttgaagctacaaacgggtttagcgcagagactatggtcgggtctggtgggtttggagaagtatacaaggcccaactcagagacggatctgttgtagcgatcaagaagttgattcgaatcacgggacaaggcgacagagagttcatggctgagat

SEQ ID NO: 4057 - DNA, 672 bp, Arabidopsis thaliana
tgtaatttctgtgtattttggccatctttttggccaaatccattgctcatgttgcttgtccttggaaaatctgctatagcatgttcttcaagtctgagtctcgaattgtggaagcatgttgttgttgctgctttgtgagcccaggtggtggaagttgcggttgatagcttccctgttatagttccttaggaataaacccttgaccctagttgtatggaacaaatggtttgggttgattcgctgctatggagggtagacttgttcctgcgagtttgcaacattgctacttctgtaaaacatattaggattgttctacttgaagttgttgaaacctttgttgtagcctccctgattttgcacataactaacttcttcttattggagagtctccccatcctggacttgaaatgtctcatcttcactgagaaaatggacttgcttctattgcacaatgattagcttatccagcttgtcatttctagctttcatatccatgcggtgcttcattatagttgccatcagactaagctaagttctcaaggagcatcctgatcttaggaagaacgcctttgttcaggaaatttccgttggatgttgtatcaaggagcatcctgatcttaggaagaacgcctcgtgtagagagtacttaggtgtgatgccttagagagacca

SEQ ID NO: 4058 - DNA, 1120 bp, Arabidopsis thaliana
ctgctttccttaaactcaatacaatcaaaattgagattagggttcctatctatttctttgattccgtcgaactagatacaaattaaggttaaatatctaacattctgttacttttgtagcaagtgaatcgaaaattacatcttctccggcgaactccgggaaaatcgatgaccaaaaatatgaataaagaccagtcgcggcgcgatatcaaaagggagtataaacgaggcaacataaacgactctagcaaaggtaaaacgattatgctttattcattttgttgctggagtcagaaagtttttggattttgagagaatctgtaatgaataatatgagatgacggagactcaggataaaacgaaaggcggagaaaatgaggctccaaaccctagactcccttgccgtctgatgcatcctgacgacttccctgataaggttcgcctcaacatatactcgaagccagaatatatgggaacgctggtggaactgttggagggctccgaggcctgggatgtgttgctaggttcccagttcaagaaattatttgaactgcctgttgccaggtgttctcattctgcaaaattgagtcatggaatgcttgctagacagcttttgacacaacgaaagcatgaattgtggactgtgtatggggggtatccactccgattctctctcaaagaattccaaatcacaactggcttgaactgtgataagcttccaactgattctgaggtagaagatcaccaagaccctgcctatctatctgtttggaatcgcttatttggggagaagtgtgtagttacagtcatggatgttgttgagatgctgagaggagatgtcaatgctgagcctaggaagtgattctcaacatggaagaagttgagtctcgcattgatagtcctgcttgatggggttgtagtttgcagcaacaggaaacaacatcgggtaagtagttcatatgttgagatgcttcatgatttggaattctttatgagctacccatggggtcgagttgcttttgaatcaacaatggaacggtttggcccttccactggggaaaatgatcctattgctgaactcaagagccgtctatcacaaaaaagcagttgttgctacgggt

SEQ ID NO: 4059 - DNA, 620 bp, Arabidopsis thaliana
gtaccgaaccgcatcatatcatatcatatatgtaaataatatttttcaagaattgctattttgagatctaattaatgtcggttgacaaaaaaaaaaggcagtaagatgtggtaaaaagaactaaccaatttattgaatgctctccagctattgtggctacttcactcaaagcctcgatccattttcgactaactgcatttgttttacccatacaagttttcttgaagaccttcccaaagtctccggtttgcttctttacatcagttggatccacttcatagaaaattgtcatcactgtttgatccaacattttcctacacttcatgatctccaccaactcgttcaggcaccacgacgaggaagcgtagtccttcgagagcaagacaactgcaatcttagatcctttgattgcttctatgagttctggaccgatcgatttgctcctctcaatattattatcaatgaacgtatcgatcccttttcttttaaactctttcaaaatgtgactgagaaatgatttgcgcacatctgccccgtggaagctggggaagacatcgtgtttctggttcaagacaaagaagattggggagatgtaggaggtgacgaagaagtagttatta

SEQ ID NO: 4060 - DNA, 744 bp, Arabidopsis thaliana
  unsure (1)..(744): unsure at all n locations
tcaatgaacaattagctgccagagacgcagaagggcttggttcgaccgacacatcagaggtgtagatcgacaccttcgggattagaatgaagacacgattggtgtcgaacgacacaacagaggtgtcgatcgancaccaacctaagattccagcagttattcctcctgcaacagaggtgtttaccactctactgcggaaccacgtcgtacccttggggatttcaacagacctgacctattctatgctaatcgatcagcgatcgtacccccacccttcctgaggaacgattatgagctaaatcctggctactttgctttagttggccagcatcctttccaaggcttatctcatgagcagcttattgaccatatcgagcgctttgaggaccttgttctgagcatcaacgctaatggagtctcagaggactacctattgtgcaagctcttccttattcacttgttggggaagccgcttcttggctaaaacaacttaaagccggttccctcaagaattggagaagcatcaagatagctttcttaaacagtttctacgatgatgctaagtctgaggagttgagaatcaagttttctaccttcacccaaggtccagctgaagctttcaaggctaattgggtttgcttcaaggaatatcaacgggactgcccgtatcatggcttcagtgaggtcaaattcttggcacctttttcagaggagtcgattggagatactagatagatctagatg

SEQ ID NO: 4061 - DNA, 463 bp, Arabidopsis thaliana columbia
cgggttgagtcaagggaaaatggatttgtcatggcagaaatggacataccaggtgttttatctatcctattttctcgtgatttctctcttttgatcccttttttctgtattaagttgtttaactctgttttcatcaggtgggactgaaaggtgaagctatgaatcttgcatttccaaccaacactccctctattggatggatggatgcgtccttaactgtacaaaagcctcagcctttgacatggcacaaggtttgattgaatccaacacaactcaacaaagctttttttctaattaagaatctgaactaacgagtatattttgttttatttcagacttattttgatgcgcccgaaggaaatgagccgcttgctttggacatggaaggaatgggaaaaggtcagatttgggtgaacggtgagagcatcggaagatactggacagcatttgcgactggtgactg

SEQ ID NO: 4062 - DNA, 452 bp, Arabidopsis thaliana columbia
cattccgctgaaagtaacaaacaaatttaaacccttgttcctcccaaacatctcgatgaagaacttcaaacctacttcactagtaatcaatatcggaggtgtcttcttccccgtcgtgtaatccatgatattagacggcaaataactaaacctaggggttcctaatgtcaaatctttattcatgaattctttcaaaacaatatcttccaaaccagaaagattcatccctgcagtaattggaacaattctagacattaaaattttgttaataccattcttgaatatccgagcattcccattctccgcaaatgaccatacaataactctccattggaatctatattcattaacattttacaaccatcaaaacgaatccacaagaatcatcagatatattaaccgcaatacatttttagtgtttagttattttggtagcaaaaaaactaacgagc

SEQ ID NO: 4063 - DNA, 463 bp, Arabidopsis thaliana
gaatgacactttttggttactacacttgcagaatcactaacataatcaacattcaacaaaattataaagatctgtgaaattattctgtcattttacgtatttaggcaacgtacctggataataggaagtatctggggtgttgtagatcatttcgaggatcactgacgaacttcactagtctcttcttagataccgaagcatcgaccatatcaaccggatcagactcaccctgataccacaaaaccgcccggtacgagccaccaccaccactagccatcgccgctttagccctcttcaccgtctccgcgtagagaaactcacctttttgccattggcttagtttagtcccaccgatagagcacggaaccaaacccacctgaccaaaccggttaaccacccggttagcaaagggcatcccggtccaacaccagtagtctcattaatgtcaatgtcaacgtgaagt

SEQ ID NO: 4064 - DNA, 511 bp, Arabidopsis thaliana columbia
cgccagtgtgctctcagcagttctagagggctaccttctgccgtgcatagaagcctggccttgttctcatacattacctataagtaatctcaaagcagttgagaaagcaaattttcaaaaagagaatgaacgtagaaaagagagatgaagcgagatatacatcaaccagtgtcacaaagcggtaagctgcagtcctattatggagcccgaagaagggtacaccttccagagccaaagtatgaaatttctctgtaatgaaatttgcatctcaagactaagcatcatgtaagaattccagtgcaatgacaaggtctgaaggcactggggtaagacttactgaataatccgagataatcggctgcgcataggggtctatcacacagctcttcaaaaagaaagtaggcacatccatcagcagctagaggaacctggcgtacaacaaacaataaatttagaaataaggatcaagggatttcaaataagctatttaatggaatggtatctgaaggtt

SEQ ID NO: 4065 - DNA, 516 bp, Arabidopsis thaliana columbia
caaagcgtagaaccatgtcaacaatcgtctccaggcttagctctgtctctgagcaaaccagagccgctgctttagctgagcttagactcatctccaaacaagatcctgatagccgtctaatcatcgccgacgccggagctattccgtacctcgccgagactctttactcgtcgtcacactcttctcaggaaaacgccgccgcgactctcctcaacctctcaatcacctctcgcgaacccctaatgtcttcacgcggcttactcgacgcgctttctcacgcgcttcgtcatcacgacaccaccacttcccccgccgcggttcaatcctccgccgctacgatttatagccttttgatagccgaagagtcttaccgacctatcatcggatctaagcgcgatatcatcttctccctcattcacatcattagatatccagattcgcatcctcgatcgatcaaagactcgctcaaggcactcttcgcgatcgctctgtatccgatgaaccgatcgacgatga

SEQ ID NO: 4066 - DNA, 709 bp, Arabidopsis thaliana
tccggggtgtttttttcctctatcttcctcacaacatcatatgaaaccaactcgctttcaccattatggtctcgccttgtcccgatattattaccatcaccatctaatgcttcgagactgtgtaacgtaggcttatcaagcatatatgtaaccctcttgcaacctataattgcacggctaatcactggactgcctgaatcatctaccaacggaagatcaaacacaaggcgagcaacattttctttggggataacaggtaaatcgaagcgacgtgaagacaaactcatctttgatcctacaagattcaaagaaaggctgcaactggctgacttaaacgcactgatattaatcaggtcaaggcatcgacggagatacttctcgtctactgacaccaactgccttgggatcttgttatcgaagaaactagtggcacgagaaaaagatcccttgggaccgtttttaacaatctgtaaccactttccgctgtttgaaactaaactacattgctgtcttttctggctcaacaagttccctgacttcaataagccatttcccccagacagattctcatcaatgttcaatgaatcttcaagctcaagatcatccttctgagcatcaggagaaacacttcccatcgttccgctcgctatactcaaatcaaagccgagcaaatttcaacttcccatcttcttatacagattgaagaaag

SEQ ID NO: 4067 - DNA, 464 bp, Arabidopsis thaliana columbia
atcccccctcccctaaatatgaggatgtgccttgaagtattaattcaacaagttgacaaaacagtaagatttccttttttcatttttaggaattatttgagatttcattttgacttcaatatttattgtctttttttttttggtaggattccatattttatgttatacatacattcctacggtgtctatataagtaacaaattatagcgatatctaattctttcgttgtaattctcttcttcaaaaatcaaatcagagagagagagaaacataaacaaatggctaatcttcgtttaatgatcactttaatcacggttttaatgatcaccaaatcatcaaacggtattaaaattgatttacctaaatcccttaacctcaccctctctaccgatccttccatcatctccgcagcctctcatgacttcggaaacataaccaccgtgacccccggcggcgtaatctgc

SEQ ID NO: 4068 - DNA, 374 bp, Arabidopsis thaliana columbia
cagagtggaatcagttgaaacgcctccgataatccccactgtgttggcctgcctaagcaaagaatctgcaggaagactgtttaaactgtttctcgaatcttcactcagacaaaaacccttcttgggcttgggaagatcattgctttcgtccatatgcaagaggactgaagacggtggcatggcaaggacacgactcagtcttaccctacacgaaacccgactagagtagcataaatgagctaagccatgagatgggttgttgaaaatctgaagatacatcaccaagcttctggctgaaaatgttttctgatagttagtactttagtgacaccttttgacaaaactagcaaaagcttccaacttgttccctcccc

SEQ ID NO: 4069 - DNA, 373 bp, Arabidopsis thaliana
  unsure (1)..(373): unsure at all n locations
tnnnnnnnnnnnnnnnnnnnnnnnntaaagtccatgacatgtgcgaccgtgtggaaagaaccacacaccagcacggtgtcttccgctttacgtccgccattgcgcatcccatgcctgccccacgctatcacatgacttgccgttacccacatgctcaagcagttgtcctgccgtggcaccgcgcggcccttccagtggcgcacaataccagtcatcaaccacgcttttcaaccaggccacagtctcggcaatatctttatcatgtagcataccgataaccgccagcacgcgtctctctttcggtagtgctttcatacgcccggtgagatattccgctgcatgtggattatgcgcgacatcaaaaataacgcgt

SEQ ID NO: 4070 - DNA, 802 bp, Arabidopsis thaliana
tcacagtattagcttgtttgtgttttttttatcaaaccgataatctcattaactcaaattctatcaaaagaggaaggttacatccaaactagaagaaattacaaccaacataaaaacaattatacgaagtaattaagacaaccaaacgatgactaaactagagataaatagacgataacaatcataaacatagaccataaaaaattgcaagacaacaatctcaaaatcttttagatctttgtcttcttggtgtgcatgcaatatatatttatattttttgaaaagaaaatggtgtggaaaatattgcaatcgttcgtacgtatatttttacaaaatattaaaaccaagcccatgcaaaacacatatacaccaaagtcaactttctttttcaaaagtcaccgaaccagaggttataaaactttcactcaagaagaggaaccagaactcggaggagcagaggaggaagaagaaaaaggttcttgatctgcgcatgacagcttctcgtgaggaccagcttcttctcgtccaacacctatcagatcaagataatacaaataatgagaaacaatgttgtgcatctcatcgttatcgaatccgctgttgcagatttgatcgccggtagagaacgtttatggtggctcgaaaccccggagttcgttttgcagcagtctcagtctttgttggcttccattttccgacgaaaacatcgtgcgccgacggtaaatggctcttcggtggcgtcatccaccgccaaatcgccgcttgaaacgctaacgtagcattgttctcgaaatactctgga

SEQ ID NO: 4071 - DNA, 568 bp, Arabidopsis thaliana
aagggttagtttatcaatgcaggctggcaacctttctgccttctatgaagtatgcaaaggattagaacttgcaaggaatttccagtttcctgttttaagagaggtatcagataataacttgtttgttacatttaaatttgtgatggcaggtactttatcaatactaaataagtctatttttgtttttttcaagcctccacaatcttttcttacaacaatggaggaatatatgagagacgcacctcagatggtcgacgtcacatctgggccactggtacatatatactctcattgtggtcctactcctacagaaaccatgatttttcttttataacttatttctaaaaactttgtcaacatacagcttctgacctatacgcctgatgatggtcttacttctgaagatgttggaccttcacatgaagaacatgaaacatcatcgccttcagatagtgccgttgtccctctgaagaaacgcaactttcttcccagtctcctccttcagtagaaactccacagaacttcattgatactgatgatctattggtaaattatgcttattacatat

SEQ ID NO: 4072 - DNA, 442 bp, Arabidopsis thaliana
  unsure (1)..(442): unsure at all n locations
nnnnnnnnnnnnnnnnnnnnnnnctaaaggttaggaaagatcgttgaacgacgggaccaagtgcgcaggggcttcttgtctccgctttccaccgctttctctaccttcttcagcaagtgcaggtcaataaaaggacctttcttgagagaacgtggcatggcttatcctctaaaattatttgctacggcgacgtacgatgaatttatcagtacgcttgttgctgcggggtcttctaacctttggtctgaacgccccacggagttaccgggtgcttaccaaagttacgaccttcaccaccaccatgtgggtggtctaccgggttcatcgcggtaccgcgaacggtcggacgaacaccacgccagcgtgcagcaccttgctttacccagaacgcgcacgatatgctcagcattgccaactttcgccaagagttgcacggcagtct

SEQ ID NO: 4073 - DNA, 1582 bp, Arabidopsis thaliana
gaacacctgaacccatgccgaggaagtagacaaaccaaaggagccagaaatctgccttgacaaaaacttggccaaacttgaaatcctcacctctccggggttttctcttcttcttcacggcaccttctgcttcagcaagaagtatttccatatccgactcatcatctccctcaaagataggcccaaggtttgaagctgaggtagaaggtgtcagcaacggttcttcatgagtaccttcctctttggctagattgtctgaagaccccagtggagagctcttggcatttgaacggaaaagtgtcatcttgatgggaaccgcaagaggcgacaacaaaagtaacaccatgatagccacaagaacatatttgagtatgctgggcagtataaacacctcactcaaaacagtcgtcacaacaagataagcagcaaacagtatactagtgacaagcagaaaagcgaaatacatgggctcagaagggtcttcaccagtagccggaatacaggggcggatgaaatacatcacagttaagcatataaccggaataccaaccgtaagaaacagaagcagatccatagctgaatggtgaagcaccatgctgaacaagacagtgaatgctgcaccactgatcccaatataacctttgagaagtccagccacagggcctcggctcataggaaaattcctcatattggtgacaagagatgctgtaccgaaccacgagttgctattggtagctaaagctagagctacaaaaagctgtcaacaacaacattacaaacaaatactaaacttttgagttcacacgaaacaatagagtttataaatctaatcgatgacacaaaccaacaagatctaaacttgattaagcattcgatgcaatctagggtttatgaaaacccccaaaataaaggattttacaaacttggtcgttgtatctcattttggcgtttaaggagtatgaagaaacaattcgaatcagaaatttaggaatggataaagttttgttaccagccaaaaaggcaagccaagaacgatttggctgacggagagccaaagaacgccgaagccgaggaaacaagaggaagctccgatgagaagcatcgaccatggaggaagcttgttactggcgtatccaggaagaagacccatgttttcacccaaatcacaagcaacgccaaggatcgtgacctgctgctggctaaaacccaaaaccgatttgagagcggaggagtaaagcgggaacgtcgaaccacttcccgccgagacctgaacccatgcggctgccgctaatcccacccacggtggtctgcttcccgatttttccgccagcttcgtcatctcttccgatctctcttctcctgtgggattttagaaaagtgctttgcttaaacagaggagatgaatcagactcactcactctcactttattgtttggtgtgtttctatttaaagcattaaacatcttcaaaatgacgtcatattttttaacatatttaaagcatacgttatagtagtttcatactattttttaaaaaaaaactcaagaggataaaaagcgtgattcgcaagaggtttagcatt

SEQ ID NO: 4074 - DNA, 1685 bp, Arabidopsis thaliana
catgttcccacgtccacatctcattgtcaaacccggcctgtccttgcgagcacttcatagagcgctctgaaatttgtggcgcgcgtctctttggaactgaggatacatcccactcgagcctcgaacgctgatcggaaacatcgccggtcttcaccatcttcgattatttcctcttcgaaattaaagttttgaaagatggaaaaggtgcagagaaattctttacgtgaacccggagagaaagattacattatagcgacatggctcttatacaaaccgaaaacgtcaagaatttcgatttctaatgccacaatgttaaaataagtttgaaagacagattcttttcgtgacaatggagagaattagtaagcttcttcttttcttttgtcggctaaagcataattagcttttagttacaacatagttagtgctaaagcatacacaacacttcttaattcatgtagtataactttttgtatggatgcattgactttttgaaacatggaaattcctaagtttgcttttccatgatcgaatccgtcatattcaaaacgatggacatagtttacataaaataaaataaagcacattgtaactaatccaaatttcaatttcctcccaacacactacaaatgctttgtcttctcccctcaacataacctcaaaggatgagagatttgcaagagttctgatctccagctcatgtggtttcacaatccccagtgttaatgcatttccagacagagcaaacgcatggaacttttcatttctctgtctctttagcgactctgcagctctcagtgccctaagagttttcacggtcgctagaaccatgtccatttcagtttccacttctcgtttgtcacatctctatggaagatgggtagtcacatatcatgatagacgcctttcgttcagagtcttgcgatgaaggcaaccgctgccacagctcttctgtaatataaggcataaatggatgcagcaatctcaaaccagtctcgagacacacccagagagcatcttgtgcatgaatccttctttgagtgtcagcagaaaaataaggcttaattgcctcgataaatacatcacagaactggtattgccaccaagcatacactgttggcagcatccgataatgcaaacgcattcaaggaatccactgtcttcgatattgttagtaaagaaagaatccattggcagctgaaggtcatggttttagggcgtagagtttgcacaggaggagtatacccatcgccaagcttcatcatcgcaaatctgacagcattccacagtttgttacaccactggcggtacgatggaatttggatttctgtatttttaactaaagaaatcctctcaaattctccaaaataattaaaattcaaatccacaaattgattttaataacagtggattttcaggtggattttgaaatcatgagttcgataacactgagtttcatgagttttataaaattcatgtctgaataacatatgatttataaattctacatgagtctcttaaaatttcacttgcagtacacctcagattttacgatcacttgtgatttcagatatgcagtagaaaggtgaattctagtatgctcagacttgctcgaatatgcgtagatctgcttagggatcacttgttgtgaacttgtaaatgatacggaagtttcatcggaattg

SEQ ID NO: 4075 - DNA, 462 bp, Arabidopsis thaliana
agaggatcgcagaagatgcaaaatagtactgaatatatcaaaacaaaaacaaaaaaagtgaaacaactatagaattcatcatatcatcaccttcctaatagttgtctcccgatatccattagctcagccacgcttttatcaccatcacgaataaactcaagaatctacaataaccatgagaagttgagaaccataacttcgacttaagaattgcagaccataaaaatagtaaatgaaattgaagaatagtgaagtacctgagtagcaataagtgctacagcttcagtgtaattgagtctaataccacgagcaagacgtttctgtgcaaggaaaccagcttgatgtagctctaacttctcgatctctcgcggcaacaacttcatttctccacctcccaatccaatcttacccacgtctccggcaaacagagcaacgattccgttaccgagaagtcgtactggt

SEQ ID NO: 4076 - DNA, 713 bp, Arabidopsis thaliana columbia
aatataaaagcaaaaaaatctactctcttcctcttcctcttccttctctctatctctttaactcgattccttctctgtatctctgcctcaaattgaaacaatcgaaggagtctctaatttttctgaacttcggccatccttccgccgttatgtcatcatctccacctacactggctctccacggtgactttcgttcatctaatcggcgagttcgtcttcaacaaaacgacaatctcgtcaagaagcttcctgatcagcttcatcacaatgttatggtgagtatttatcctttcagttcttctatttataattcaattttgctcctgttttaatgtatatgatgattatgtgttctctcttttctatttcaattgtaggatatatgttattgttatataatatcgttctgctatgaggtttaagagtttaccagtaagctattgaggttagttgtggagttcaaattggtttacactgaagcaatggattttttggtggctctcaacactctaacccggtggctccaccatgcaagatattgaatcccactgtttgatgaaatcagctgttctccgtaacctctccgatttcgtcacatacgctcctgagattcctttcactgaatctgctgagaaaactatgctgccattaaggtctacatagctcacaatgttaagctttattgcaagcatcatcatatttagctttaatat

SEQ ID NO: 4077 - DNA, 852 bp, Arabidopsis thaliana
tgaagccttgatgagaatctgaaacgtacataattcaatgaagctcttgttgagaatctgaaacgtaaaagaagtgtaacctgatttagacttggtcgacctcttggtctcggtggtggtaacaggacagtagcattcttacatgagctcttgttgtgcccttcttgcttacaattagagcatgtcattattcgattagcccgtgacatcttgttcttgtttgaagaagaggctgtttcatatcttcctttctttctagcatagttactttgtcttccaggattgcctcttctccaaggtggcggtaagacaggcaacctactcattctaggccacaatggcattccttggacaggcctaataccatctctgtatgtctctctccatcttacctttgtgtagtagtcactaacatagtcttcaaccttttcttttctgcctattatcacacatggtgtatgaacacatgggattccaaccatctcccatttcctgcaaccacaagtctttttatccatatcaacaaagtatccaacatcattcacatatatctcatgcaaattgtttctcgccaaatgtctttcgcaacctgcagaaccagcaatcattttttcaatctcagcatgagctctcggagtaaatcttgactttaacctctcagctatgataaacctctttgcagttctgaccatgcattgcctccggatgtcttctagcatatccaataacggctttcttctggcttgtctaatagtcctattaaaagactcactcaaattgtttaggttgtcattacagcaggtacctattcgaaagaaggctctgaccaggtcataggactagtaagctgca

SEQ ID NO: 4078 - DNA, 1660 bp, Arabidopsis thaliana
ggtggcacttagatttggttaatgaacttgttgtctagggataatttattgagcattttcaatcacctgtaaactgaggaaacaaaactactcaattaccccatcctcgggaattctttatctgattgattttattgtttactccacaggactttctatcaaagttcttctccaacgccagaactgcaaaactcagaaataagatttctgatttttcacagaagacgggtgaaagcttctatgaagcatgggagcgtttcagaggttacatcaaccaatgccctcatcattgcttcacgaaagcctctctgctaagcactccatagataggcgttttaccacgcatcagaatgcttctggataccgccaacaatgggaatttccagaacaaggatgttgaagaaggctgggaattggttgagaacctagctcaattagatggtaattacaatgaggactacgataggaccatcagaagcacagctgactctgatgacaaacacaggaaggagatcaaagcgctgaatgacaagctggacaggattcttcttagccagcaaaagcatgtgcacttccttgttgatgacgaaaaatatcaggtccaagatgggagggtaaccagttggaagaagtcagctacatcaacaacaaccagagtggctacaaagggtataacaacttcaaaaccaacaaccccaacctctcctaccgcagcacaaacgttgctaatcgtcaagatcaagtgtatcctccacaacaacaacaaggtcagaacaaaccttttgttccttacaatcaaggttttgctcctaagcagcaatttcaggggaattacagccgcaaccaccacctgggtttgcacctcagcaaaaccaaggtcctgctactcctgaggctgacatgaaacaaatgctacaacagctgcttcacgggcaagcctctggctccatggagttggcaaagaagatatctgagttacataacaagctggattgtagctacaatgatctcaatgtcaagtggaaacactgaataccaaagtccgatacttagaaggagattctgcatcttcttcagctccaaagcagacaagccaactaccaggcaaagcagttcagaatccaaaagaatatgctcatgctatcacactgcatagtggaaaagcacttccaactagggaggacccaaagacggtcactgaggacagtgaagatcaagatggggaggatttaagtatcgagaaagatcaagctgacaaaccactcgatcaaccactcgacccgtcactcgagcaaccacttgacctgtcactctagcaaccactcgatctgccactcgacaacgttactcgaccaacaactcgacctatcttcccagcagcatcaccaactgctccaaaaccagttgctgtcaaaaacaaagaaaaggtctttgtccctcctccccacaaaccacatctttcatttcctggccgtcacaaaaaagcgttggcagataaatatagagctatgtttgccaagaatattaaagaggttgagttgcggatacctcttgttgatgctctagcgcaaatcccagactctcacaagtttctgaaagacttgatcgtggagagaattcaagaagtgcaagggatggtggtattgagtcatgaatgcag

SEQ ID NO: 4079 - DNA, 1521 bp, Arabidopsis thaliana
  unsure (1)..(1521): unsure at all n locations
caaaaacaattttaaatcatatttatgtttcaatactgatgcattcaactttactttatatgaacagatattatataaaataatttgtaaatagtaatacgtaaacccgcacgtagtgancnatcgatctagtattaattaaaagttacatatcttaaatcacaaagagcccaaagataaggagagaaagagagagtgacacttcaccacaccatctcctctctctccctcttcttcttcctctttctctttctctgtttctgcaacacaaaaacaccattgagaaccaatcaaaatgtcgacaaaccctaacccatggtcaccatacgattcatacaatgattgttctcaaggaatctgcaacatctactgtcctcaatggtgttacctaatcttccctcctcctcctccttctttcttcctcgacgacgactcttcctcctcctcctccagtttctctcctctcctcatcgctctcatcggtatcttaaccagcgctctcatcctcgtcagctactacactctcatctcaaaatactgtcatcgccaccaccaaacctcctcttcagaaactcttaacctaaatcataacggtgagggtttcttttcctccacgcaaagaatctccacgaatggagatggactcaatgagtccatgattaaatcaatcactgtttataagtataaaagtggagatggattcgttgatggttcagattgctctgtttgtttgagtgagtttgaagaaaacgagagtttgagattgttgccgaaatgtaaccacgcgtttcatcttccttgtattgatacttggttaaaatctcactctaattgtccactttgccgcgctttcgtcaccggagttaataatcccaccgcctccgtcggccagaatgtttcagtcgttgtagctaaccaatcgaattctgctcatcaaaccggttcggtatctgaaatcaatttgaatttggccggttatgaaagccaaaccggtgattttgattccgttgttgtaatcgaagatctggaaattggatctcggaatagtgacgctagatcggaattgcaactaccggaggagagacgggagactaaggatgaagattcgctgccgattcggagatctgtatcgttgaactctggtgtagtggtttcgattgctgatgtactgcgagagattgaagacgaagaaggagaatccggcggagttggaacttcgcagcggcgagaggaaggggaagatggcgatgggaagacgattccaccgacggaggcgaatcagagaagcggcggagtttcgggtttttttgtacggagtttatcgacgggaagatttattttctcgaggtatgatcgagggcgaaattaccgtctgcccctttagtgtaacagaatttcaaatttactgttttgttactgtatttactgataaaattatacagctcactaatagtgaattagtgatttctttttgaaggctgagaaaaagtgatgattattttttaagtacagtaatttggg

SEQ ID NO: 4080 - DNA, 1320 bp, Arabidopsis thaliana
tccccacaatctttcgtcttccctgaatgataactcagccgtgacatgtaattcaccgaacctttcgtcttccctgaagcatataactcagccgtaacatataattcacactcatctttcgtttgcccttgaacatataactcagccgtgacatgtaaatttatagatgtcttcccttaaacatataactcagccgtaatgtaatattaccgaacctttcgtcttccctgtaacatataactcagccgtgacatgtaaattgactgaacgtttcgttctcctttaagcatataactcacacgtaatgtaattttatcgaacttttcgtctttcttggaacgtataactcagtcgtgacatgtaaattgactaaacctttcgtcttcccttaagcatataactcagccgtgacatgtaaatttgtcgtgaaacaataagagatacaacatttcgtctaactttatcatcgagcaccaacttcacaaatttgtcgtacgttgttttcgcatctatctgcacaagtttacaccctcttatatcagtgttaaatatgtatttgtgtttctatacccaattcctggaaacaacaattaccaaaactagatcaaccatatcgggagaaagatgaaagaaattgaagaaaaatgagaaaaacgatgaggaattagaagttccggtgatgtgaaaaagtcaggtgaagaagacgagttgaaaaactttggccctatttttttgtcctttgatgatgctgacatggaatgatgacatggaatattacagccaacgtcgttttgaattgatgaggtggcaactaagccaccaaacgaacatttgataacttagccatcaagcaaatctataagtcagtcgcaacatgaatactattacagtaattgaaaaaggaaaaaaacaaagttaagtcagccgtgtaatgtcgtaactcaactaactcagctgtaccgtttaaaaactcggttgtaactgcatgctattatagtaattaatcttttgcacataagtcagccgtaacaaggctgagttatttagtaatcgagctctttacggctgatttataacactcgatcataactcaaccgtcacatcatcccataactaagccgtccaaaaatataactcaaccgtgtcgaggtaataagtcagccgttttctcataactcggccataacgttatctgggttatgctataaattcttataactcggacaacattccttaactcagccatacagttacctgagttatcgtataactcaggcaacattttttataaaccagccgtaacgtccggctgagttatac

SEQ ID NO: 4081 - DNA, 1324 bp, Arabidopsis thaliana
cccacaactcccgaggcgatttcatcatcaccaccatcttgcgtgaggtaaattcattttatttctttcttacttttacgctttgcctttagaaagaaaattttctctcttttttctctgcaaaccttctcttcttcaagtgctcgatttttccactctcttccatgtccttcgatgagggggttctagcagcgacatatgcactcgcccgaacaatatctccggtccacactatatatctacttgcacccttcaatccctagaacgactgaaggatctctgccggattccgcttgagattatggtggaatcgaagatgccttaccccttagagtccctggaggaccatctccccggttattattgcgtttatgagatctattttaagggctgcgggttgacctttcctcttcccgaagccctagttcgttacctagaggctcttggaattgccctacagcagctaacccccaaccttctctaaaactatcttgggaatcataactattgcggcggaaccgagatatgttatcggggtccccgaactgaacgagcttctcagcgtgagaagttcatcgaacaaaacggggtatttctcggcgtacccaaacgctaatagaaacctcatctagcatctcctgaacaaggatgaaaactaacatcatccttggtttttgattaagaaaacccctacttcaatcagaaatctttccgatgcactcccatcgaagtggtctgtgaagcctggtagaaattaggtcacacataccttctctattcacctttatttttactgaccaaatctgttgtttcacttcgtagctttcatcgctcaaactctcccgaccgaggaattcataaaattcttcaaaatcgtccttgaaggggaaaccctctggaactcattcacccttgattggtttatagaggctaatcgcaagctcaaaatgagtccacttggacagctcctccaacttccattgcctcctcctttacctcaaggaacgtcagctcgggcccttgcttcctggcgcaaaacgttttccaaaccgagggctgaggcctgtgaggcaaataagacatttctcatgtccaccatcgacaaaaaagagtatagtaggaccttgctagtcgacgatagcagcgccgagggggccagatccgctgaacgtcatggtggccgttcgcctcgaagaaacaatctcctcgtcgcggctctccttgtcctctccccgaggtggattgagtagcgaaccagtcgctgacttaattcgcaaaaagagagacagaccagcccgaggtagctcttctccaaggagagaga

SEQ ID NO: 4082 - DNA, 1012 bp, Arabidopsis thaliana
gaacataacaagagcatgagtagcaacataacacaattaaaagacatcaaagtcaacttccacaatagagcatcaagagaacacgattaacaagagactagattaacaagagaacacgattcacaagtatagaactgaacaaggacacacgagtattcacaagagcacacacgagtattgacaagtctactatgttacacaacacataacaaacatccaacaaagcccatcattcacaactatgttccaggattcacaagtctactggttacacactacaaaggcaaataacacgaaaacaaattagaggaagagagacttaccactcggtttttggcctgggaatcagagacaatacacaagtccattgctccctgtttggcactgagagaatatcttgcagagccaccgccgagtcttcttgaagctccggcaacgtcctacgagcttcctcttggaagttgttcccttgagacgaagggtggctgtgagctagattgtcagtatctggcgactcaggatcttgctgagcaggctcttccgacggtggattgaagtgaacctctttagatcgagcggagcaccaccacgctaaggttgagtggtggagttctggaagagttgtagtagcggtggatattcgcgtacttggggggctgacgttgaacggacaacagcttgagccggctgcgtcgctggaacttgaaccgccgacgccggagtgaaattgtattgctgagggagatcccgaggttttggcgtcgttgaaccgccggctctctgagtaacattaggcgtcgtcttccgctttcgggagccacctcgaccgactttaggcatgttagatcgacggagagatctgcttggaagaagagagatctgtcgagatcgattaagagaatatgaagaagttgcagatcgaagaaatgaagaagaggaataagatcaaagaagaagagtagggatcgaagaagaagaagatcgagagatcgaacaagaaggggatcatcta

SEQ ID NO: 4083 - DNA, 244 bp, Arabidopsis thaliana columbia
tgaaagctggccaagatgtagaaatggctgacttgggcgataccgctgaaaacgcagcggagtaaggacgaaaattatgccgattcaaaaatgtaagccaacgtctccaggacgtcgctttgtagagaaagtggttcatgaccatcttcacaaaggcgcaccttatgcaccgttggttgaagctaaaaaacgtactggtggtcgtaacaacaacggtcacattacgactcgtcacgttggtggt

SEQ ID NO: 4084 - DNA, 1009 bp, Arabidopsis thaliana columbia
tcaggtttcccagtcaacagggaactaagcttaaagacaagacaacagggcatggaccacacgcgttttcttcctgaagataagatgtagagagaatcatagaatagatctccaacacaccttctgaattcgccctcactctatccaaaagtaaagtctactcgacccatctctcttcatctctccacggacactccaatttctctccttcaccacaaatcgccatctctcactcgtccagagaattactcgttttgacaccatttcactcgatttcgtcgccatactcgaccacttcactctacctttcacacgaccctacactcgaaggccaagaagaagctgtcaccgtcactttgttctcgccacaacactcgaccgcgaagagcaaagacacttgagcacaactcgccgtactcgaccacctctgcgccaccgcagtcgagttccccatctcgttcaccgttaaagccttaagaactactcgattacaaccacatgactcgaccacctcacaaccgtaaccaagtgcaccatctactcgaccgtcgattcatggttccgtccctgcaaattcctgaccgtcgactgatagtttactcgaccacttgacttcactggctgaactcgacctcaacagatatactcgacctccgatttctgttccactcgattcaaatcgttaaagaagaactcgggaaaagttcagtatactcgagtactagattgtactcgaccaatatagtccatttcattgtctgttgataacaattttggtttcattgttttctttgagactaacctattgacatttgaggagtatatcaggcgaacgagttttgcagtacatgatatccttgcttgattactctggcccaacttggattactagaggatgtgcagcacatgtgatttaagtttgggggagggctcaggaagaagtgtgtgttgcattgtatatactcttgagtctgcattcatctaaggcataaaaaaataaattgttttt

SEQ ID NO: 4085 - DNA, 612 bp, Arabidopsis thaliana
gtttttggttttgtacaatgttgtaatacgatcattttctgaagaaaaaaagtagtgtatgtgaatatggaagttattatctatagaaaatataaatgttcatatcataagagtaaaattcagagttttcatttcacaagcattttccatcgaagacaaacagtaacaaaaagtaaaaaagggtaaaacacaatcaccgtaaaaaaagcaattactggcaaagttgttcgacggcagtgacgatctgagctggctgaacaaccgtccattcttccaatgtaccggcgtaaggagttgggacatcctgagaagacaaacacatcaccggagcatctaagtaatcatgaaagttctcgtttattgcagccgtcaaactggctccgattcctcccgttctcatacattcctccacaatcaaaacccggtgtgtcttcttcaccgagtttccaattgtgtagagatcaaacggcttcaacgaccttatgtcgataacctctggatcataccctttgttcacagcgtctttgcagctgcattacatggtactgatacaagtactctattagtctgtgttgtttcattcaatgaagaagacttttggttgtgattagt

SEQ ID NO: 4086 - DNA, 419 bp, Arabidopsis thaliana columbia
agaactcgaacccgaactctcgggctgcaacaacaaacgcagcttcatccggagactcagcttcataagagacattcccggactcttcatcggtctcaggtattgccgtgtgacacacagcaagcaatctgaaaaacttctgcaacacggcagcctcaggctcttgcacccaattcccattcataaccctttcatcctcaaagttaaaccctttaaccttaggaccagactgatccacaacaacatccaaatcttcattaaccaaaggcgaaccaccgcttctcacagccatagctctttcatcttcagttataccgcgtccataagccttacccgcgatagaacatttgataaactccattgaattgcacgttaaagtccccgttttatcggatagaatcgtatcaaccataccgagt

SEQ ID NO: 4087 - DNA, 1150 bp, Arabidopsis thaliana columbia
cacaataacccagaaaactttttgacagaaaacttatttacaagttacaacaatccgacagttcacgacgctaagcttatttacaaacgtgttgacttgacttccttaagagggtatagagatcaacacaacacagagaatttcttagaactatattcttattgataacaaactgtttacaattgttatctcggatattacttgatctattctacccaaatgatcaaacccgactaagaatacctaagcctaattctcttctctgtttcttatcactctcacgtgaagacaaggagaactacacactcaccttcaagcttttgcaatgctctgaagtttacaattgtatgacagtattctagagtgctcaaagcgcctcacactaagctctagaatacttatacctactctccagaaccctaaacctaggatctccgagaatctcgttttaaggaatctttcttgttttctccaagcttattccttcctaatttttcaagacgatatcttccatatcttctcggtgattcttgtctttgacaccacgccaagtcagcttccatccttgactctccacatcatccgccttagcttgccacgtgtgctctcgcatccatgtctgcaactcaagcgtctgatgaaactcgatgcaccttcctgaaatccatcaacgctcagatcgccatcagctgattgattgaactctgcatcttcaatctccccctttttgactgagtttgatactcaagcactcctttattgatataacctgaaactcaaatcggagacataacacacatactctagaaacatcatctagcataaatgattagtctgaaagtaaacattgtgttaaaaatattacagacccatgtttacgatgatataatcatcggtttaaacaaaaacacaaaagaaactgttttggtctgaaatacaatgaagcttataacaattaaaaacttaaacaacacagctcccccacaacttaatctcccccagcatcaacggagtccgaaggggccttatctccccctgcttgagcacagaacttagtcaaaaatcaaatactcaatcaaagaaatgtaatatacaatcgatcaggctgagcatacccagcgttggatgtgggagacgaatttgagcagca

SEQ ID NO: 4088 - DNA, 594 bp, Arabidopsis thaliana columbia
ctaaaaaacatatctctttaacaatttctgtttttggacaagagatttatgcataaactcaaaaagagcaaaataaaatctaacaaaaggagattttgattatatattctgacttccttaaaatgttaaaacacaacagtctcgaaactaagaacatcattgaacaacataacaacattttaaaatctgacaaagaaaaacagagaaattagctaagcgagagagagatttgtggtttcttcttcgtctaacatttccaagcagagacagtaacaagttctttcctttgccaacacatgacaagtgaagactgccttttctcaacgtgaaaccctctcaccggatttctctgcaacaaacactccgcctgagcttccgccatctgactcaaactcgccggagaaaacccacattgtgtaaacaagattctccacggtggagatctttcaatccaacggtgtcgtttcatcaacagcttctctatcgatggttgacccaaaacctctcgatactcgaatcgtcctggttctgattagcatcaagagactcaagcagagaagtgtggtattgaagcgaatgaacactgcgtttgga

SEQ ID NO: 4089 - DNA, 583 bp, Arabidopsis thaliana columbia
caccgccacccgctccagcttctgttgttcctgatcccgggttgctgtaccacgacccgatcttctcctgatacattacatagttcatatataatcttatcagaccaatccaaagtaagagagcaaagagagatcatatttggtggaagggatgatactaacaatgtctttgtcttcattcttctctttctcagctttctctttctcttcctcttcatcaagctccgtgtatggattcacaaacacacttgcctcgattatcttaatctcttcctgcagaaattacaaaatactctcaggagacagaaactactaaagaacacagtgagttgagtttttggaacttacaagaggacggtcgctttcatctacaggtacattctccattgctgctagtgttgccaaaccaccaacaactccaccaaacactgtgtgcttgtagtttaaatgggtcgctgatttgtataagacgaaaaactgagaaccatttgtgtgaggtcactattagccatactaactacgcctcttcctgagtgaagcagcttcgagtttggctcgtctttgaatggcttccccaaatgga

SEQ ID NO: 4090 - DNA, 627 bp, Arabidopsis thaliana
catcatcaacgtaaccaaccatgtacaatacaacatgtccatccattggtaaaacatctctttcctaagtctcaaaccggcgcaaccagtttaatcattctttctgaaccaaaatataacggtttgtttaacaggcatggcttaaacagtaccggaacggttgggcagatggtccagcatacataactcagtgtccgatccaaacaggacagagttacctttatgatttcaatgtgaccggacaacgcgggaccctctggtggcacgcacacatcctctggctacgagccaccgtctacggagctattgttatcttgcctgcaccgggaaaaccgtatccgttcccacagccataccaagaatctaacataatcctcggttagtgaaaataaaacaaaaccggtcggtttagtcccatccttaaatttttctttttctcattgccttggttttttatttgactgtaggagaatggtggaacaaagacgttgagactgcggttaaccaagccaaccaattgggtgcacgcctccgatgtcggatgctcataccattaacggaaaacctggaccgctatttccatgttccgagaaacgtaaaagttctaaacctttttaaaccgtaagt

SEQ ID NO: 4091 - DNA, 471 bp, Arabidopsis thaliana columbia
gagaggctcccaattctgtcaggcagtattagaatagatgactagtctgatctatggcacttacagctttggtaataagaccatattctggttctagtaaatgtgtaaatgatgttccagtgtcgaagagagctagcagctgaaccccaacagcatctccccctacagatacttcggtcacactcacagcatatgtcggactattttcatttggtataaacaagatcacaggagacagaaacagaatcagtatagataatacatcaaattgaaaacttttattcgctgtcagatcaaattggactttactatgtaccttggttcggtaggaagtagtggcgtctccatctggtctgtgtatcctttgtcaccgaagctgattcttccgacaacgtcaatgatattcccgaacacattgagaaagagtttgcagtgatttttgcttttgccagtatgctcggaacagagtaa

SEQ ID NO: 4092 - DNA, 577 bp, Arabidopsis thaliana columbia
aatgcaagtgtttcaaaggaaagaagattcatcttggggaaactcaatgcctacaacaaattcaaatattcaaggatctgaatctttcagcttgactaaggatatgataatgtctacaacacaattacccgcgatgaaacattcgggtttgcagctgcaaaatcaagatttcaacctcatcacaatctactgaagaagaatcaggcggcggtgaagttgcaagctttggagaatataagcgttatggatgcagcattgttaataacaatctctcaggttacatcgaaaacttgggaaagcctattgaaaattatactaagtcaattactacctcgtcgatggtgtctcaagactctgtgtttcctgctcctacttctggtcaaatatcttggtctcttcaatgtgctgaaacgtcacatttcaatggtttcttggctcctgaatatgcatcaacaccaacggtaatatgctgtgaaccttttgtgcttttactattctgaatcgatctggcgcattgattggttgattgggaaatctttttgcaggcgctgcgacatttagagatgatgggtttggt

SEQ ID NO: 4093 - DNA, 491 bp, Arabidopsis thaliana
cagatgtaaatgaagtattctacaacttccatgtaaactctgtaactttaccatccactttcaacgttctgccatctgccacagatacccttgtcaaccccgtagattccaccttacaacccaacctcttagccacagtagagtcaataaagttatgtgtagaaccagaatctataagaatgaagagatgtttgttgccatacattcccttaaccctcatagtcctgtaatcagaaattcctgaaaccgcattcacagaaatctgaggcatgttctcctcctcctcaaccaacagctcttcgctagcatcctcaaactcatcatctacctccaaacaaaacagttgtgtcttcttatgaaccaaatagtgctctggagtatacttctcatcacaaaaatagcaacgtcccttagcacgtctttcactcatttcctgttgtgacacctcttagtatttgtaggtggtttagcagcaaacttgttagtatagt

SEQ ID NO: 4094 - DNA, 628 bp, Arabidopsis thaliana
ttcttgagagagctgcggaagtagtggtggttcctcgagtcatgcatgggaattctaatgatggtctctggagagcgtcatttgatgaattcttcaaccttcttaccaaatactgcagaagcaagtatgacacaatccgtggacagaaccaagggagtgcagcggatgttttggagctggcggataaagagggaaatgcccgctgagcttttacgtgcgagtctgcgtcacaccaatgacgaccagaggaactatttattaaactttggtcgtaaaccatcagcaattagtgagtcggcatctcatgcaaggggtggacagatcaactctgaatctgtgaggggttaataaaaaagaaagagaaaccatgtgcttggaagattccaattcttggttttcatggctgtggtgtggactcaggagacaaacttgtaagtaacctggtggtgtaggaatcttttcacaagggtttcaggtgaaaagtgcttttagattctgctcttcgtcttcgttttttaactttgaactcttttatatttcgtataatcttttatggtggacaaatgcatattctgctttggtttgtgtattggatgatgggtaagaatgtgaacatggagtagtaggg

SEQ ID NO: 4095 - DNA, 531 bp, Arabidopsis thaliana
attcccccttgtagacccaaaaaaaaaagattacaaaaatgcctaacttctttaacattttaagaagtcttatcttcacagcaccttctaaaagaaaagtgttctttctgtaattaaccttttttaaacattaaaacataaagtctatccttttaataaatatttgacttttatcatttgactccttcgctaagtccgacgtgacggacatataggtaatttgtgtatataaaccagaagtgttctgctggtaatcatatcttgtaaccataatcgtcttgtgtcttttatttcacagagacaaaatggaaaccccaaacatcatcagccacacaaatcttctatcgaagatagacctggaaaaacaaaaccctgcccccattttcccgacaatcactgagcttaaaagtgaggctaggtctctcttctccttagccttcccgacaatcctcgcggccctcatcctctacgctcgctccgccatctcgatgctcttcctcgggcatatcggtgaactagagctagctggtg

SEQ ID NO: 4096 - DNA, 499 bp, Arabidopsis thaliana columbia
cattgatatgcaacattctatggagtacacctgtacatggagcatctaccaacgtatgttataaagtttttcgagctaaactcgcaatggcatttgataaaaagagcttacctccaagatttgacaaatctgcagtgaggtcagagagactaaagttccaaggtatctgatcaaatggcctgagagggtctctagaatttccagctcctccatctgatccaagttgtaaccctactgaagttccgacatcagatgtgaaagcagagtcaagagctgacgtgtccattcccatccctgacatgtctgaagcagcaaatggaaagtgtccgcttgacgccacagaagctggacttactggcatatccgacataccactatttggtggaatcattggagttggttcagccatggttgtatctattaccatactacaccaagcaccggaaacaacagtaggaattagttctcaagtctatagcaccaaaaatgcaaaaacaaa

SEQ ID NO: 4097 - DNA, 551 bp, Arabidopsis thaliana columbia
ttcatttgacaagaaatgcagtggcagccatgtatctccagtcatcttcatagttttctcgctcattatacgtattagatcctaactttgtgacgttggcagaagtatcttcttcaactccttccagttttggagatttctcgatctttccacaaggacgatatttggtgggcatgtcagtagcaagccattggaacgtcactggagacacttccgatgacgctctattgtgtccattatcactaatacaagattctccctttttcttgtgtctaccattccttaggagccaagaggttacaacacgcttggctccaacagaaatcagtaagcgaggactttcgcaatcatccactgcatagtcttgatcgcacatgtctggtaagttaggtacgtccgaagacatcatgtgcatatttgatacgcagcaaactgatctcacagctgagcctccaacatgttctcctaaaagctctgatgttgaccaatttccagactcagatgcatacctagacgaaccccaaatactttaagacatttaaataaaatga

SEQ ID NO: 4098 - DNA, 511 bp, Arabidopsis thaliana
cagaaatgatcccctaccaactctaataaacaagatgcaagaatgacaaaagaaaaaaagggaaggaaacgacacaaaaaggttgactaaatttgccgtattggtacaacaacaaattacattaaactaaatttgtcgtttgatatctcgattgaaccgttggatgaaatcttcgactcgtctgttcaactcctcgttcgacatcttcgagaactcctccgactcttcttttacattctcccacttcttcgtcgcctcctccatctcctcgtcagccttcttccccttgtgaacaaccatccatttcgagctatccgattgactccgatcgtaacttttatgtctatgtttgatctcttgacgacgacgttccttggatatcactgacccacgagccttatccgatttgcttcgcccgtaggctttagagttcatcagattgcttgcgttgcaagtttcttcttttgcagctattatatgaacattttgctcagtcactggctcacacttt

SEQ ID NO: 4099 - DNA, 530 bp, Arabidopsis thaliana
taaaaccatgcaaatacgagtccattataaccgtcgtcgagaaattcttccatggtcgacctagaaacgtcataacatcggttaggtcaccgagtggagagatgttacaacggtgaatcgagattcctgtgttcatgttcggatcagtacgtccttgagccgtgattgtgttttgttgtcctttcattggtcggcgagggagaatccggcagctttggagaactgaagctgagttaccaaagatgaaatctactgttccgataatggtgcattcacggtagaattggcgttgtgcatgaacgtaaagcgtgtcttggtatgcgttcatcgtgcaacggtaaaatgctgtgagatctgcgcttaccattagagcaacagcttgatgtttggatggaccagctgtgttgatgaacccatgtctcttgccataaacccttttccaaacacagctgcagcaaacagagcatgtcaaaaaccgatttcttgggttataagtaatgatattatgttcggttttctagttgatatta

SEQ ID NO: 4100 - DNA, 1530 bp, Arabidopsis thaliana
gaaaaggcctcatagcagaatggacaacagtcatgcttaatagcggaaatattaccaggatcatggatcctaacctccacggtgcttacaactctcgttctgtccaaacctttcttcagaaaaagatcaagtatgtcccaagttgttatcgaactaaaagagtgtcttactactaaaactctcgatgaaaggtaagaattaagtcacatactctcatagttcctttgaaataagcatgagctttgatacaaaagctgtgcctagtgcaaggtatcttattatataaagtatggttttcaaagttactaactcttaagatcgtgccacgtgtcaagtcaaacgatcagatgtttacaagttactaactcttaagatcgtgccacgtgtcaagtcaaacgatcagatgtttacatgtgtcattcaaaatttaattttttattctcttaataaaatagaaaatcttaaaaagtaaacaaatttacatatactaatttatatatctatatatttataaacaattaacatttattcaacaaaagggatattaacaaatttgtccttaactaatgtaatcataagtgaaaatagaacattttgagaaaaataacttagcttataggatttaacttttcaattatttttaacgagaatatttttatttattaattttaactcatttaatattaatttgcatgatgtaaaattaacttacgagattacggcatatataaaaaacaatattcaataatgtttggtttctaaatatttttgtggatttctgtttttttattaattattagccctaggcgtttgggtattcgggtcgagtattttgggttcgggttttgggacttagaagtttaggacccgttcgggtaatttaagatttcgggtcgggttcggttcggattccagtttatttatatattgaaatatcaaattttgtctgcaaatctattaaattacttgaaaattttaaaaattcccaaaacaacacgaatagttttgcttgaatatatctaaaaatacacaaaaataactaatatatccgggaaaatatgttctatatataagtataaatgtaactaatatatatttatatttgagatatgtttggatacttattcaggttctggttcgagttttttagattttgaagtttagacccgttcaagtatttaaaaatttcaggtacacccgcctaaatagacgggccttatctagtattgtataaaacttgattttcaaagttagtaactcacgtgatgatcgtgacatatgttaattctttcaataacatgttgatatgtgtaaatatatatataacgaacgaaataagaaaaagaaaatagaaaaatattgtctatatctaaaacttttaaattttatttttcttaaccaaaaataaaaactaacaatttatttttacatgttttagtagtcaattaaatttggcatgtatgaagcttttttgaaaaatcatttagcatagatattaaacaaaagatgactattgaagttcagaataac

SEQ ID NO: 4101 - DNA, 990 bp, Arabidopsis thaliana
cgctcatcgttgggtttcgacagaaaaggacgagagagatgaaagaaaagagcaaaagagggcagatcgagaaagaggggagtactagtagagaaacgaaggagatagcaaaagaaaaaagacgagatttttctatctttacaaaacgaaacacagtaaataataaaggaggagagaagttaccttgacagtcgtgtgagttgttgtgacgtcaagtggagagatgggaagttatttaaagccgtcatcaccatgattttcgagattgcagagatctcttctccgcgcctgatctagaccgtcaaatgcggtgcgctgaagagacgctccatctcagtcgttcacatcagcaacgacttatctcgcgtatctcctcgaaatctttcggttaaggaatctgaaatcaaatcgttttgttgagtttatcctcaaaaccgactgatcttatcacatctatcatctcatcaagaatattttcgcaatcttacctgacctatatgtccgctcatcgagttcgcctactcactcaatgggctggggggcaaatgttggagctggatttccctccaggaatccacctgcaaaaataccaagccaacccacaaaagcccaccaagcccaccaagtagaggacctacgcagctaatgagctcacatacgcgaatgggtacttgggccagataagcccagtcacctgatgaagggagataagcgaataacaacctaggaactgatgaggagatattcacggagcggacctgatatctcggaactgacctgccgaatatccaggacgatctccgcagatcccggacggaggtaccacgtgcgtagacctatataagggaacaaggacgacttggaagattcattcaattctgtttatattcacacacatactcttacacttgtaatctcctttcacattgtaaaatctttgtcattatcaatacaaaaagtccattcgttcttagcaatataactctcaag

SEQ ID NO: 4102 - DNA, 914 bp, Arabidopsis thaliana
tgaatgtgcctcaaagattcaagaacaagaaaatgaactaagaagaagtaaaagagcaaaaagagctaacgattttggaacggactttatgacatatttgagtgaatatggatgtcaaacataaaaggctgtaatcgagtcatcatatgcaccttattggaaagagacaattaagagtgaagttgaatccattttgagtaatcatacatgggaattgattgattattgacataaatggatattcacaaagaagtgaagaccatatggtacgatgaaaaatataaagcaagactagtggcgaaaggattttgtcaaaaggatggtcttgatttctttgatacatattctctcgtgactagaatcccttctatgagattcttaattgcagttcggccatatatgaactagaaattcatcaaatagatgttaaaacatcattctttaatggtgaactagatgaaaaaatagatatggaataatcctaaggctttacagtcaaagagaaagagaagagtatgcttggaggtttgaccagcctattttctcacataaccacatggataaaatcttagaacaaaatacggactttgcaaacccgtatgtttgaggcaaatgcctagaaggcaaatacttagttttcaaaaagcaaaatgaaaagtcctccttgggtttaaatataaggtttaaaagcctcctcgagcaaatgaataggtttaaaatagtaagtttgatagagtatgaaaataagatgaaacaagctccatttaaagtggacgcaaccactaagaatcaatattcatctctagatcacccaaggtagatgggtttggaagggttccacttttaattctttctcgttctagatctttggggtcaacaacaagagccggagtgagggggactttgggaggggt

SEQ ID NO: 4103 - DNA, 1704 bp, Arabidopsis thaliana
cgtctgaatggtttgaatcgctagaatcgacaagggtcgacggtgattgcgaagaactcattctcggctcgggacgttggacgagaagggaacaaccggcaaactagaatttctatcccggcaaaatcaaaaataacaagaagaacgacgggacttcgccggaaaagaaaaaacgatagaaatatcaagatcagagagaaggaagcaaaccttgtttattttcttcgaaaacttcaaatggagtaatgaaggagtggctcgctgcaaatatagagtttttcaaaggcgcgtcggatccgcattaaacattcaaaatgcgttcaagcgcgtgggctcggcaaaagaaaaaagatccgcatgatcctcgggaacaagcgaaaaacgtttccactcctcaaaaatagtcggtgacatgcaacagaagtttgaccgtccgagaagatgaagcaacaaaaactagaaggcgaacagtcggctcgggaaatccattcatgaagctcgtcattctactgaatcactgagctggggggcaaactgttggggtcggatttgatccaggatagcgagccgacctatgagtcaccgcctcgggagccatcgatgaattatcccgaaccagactaaaacacctcggagttctcgtcaagaacccataccgaggtaatgtcgagaacgcttcggggcagtcccataaagtaatccccgacccgacctaggacgcctcggggataagacttggaaaatcatcccgaggcgggctccaaaacacctcgggagcttgccttcaagtaccgcagaccaagcatcccgatcatgacccgaggccagcttaatcacggctcggaaagatctcgttttagacagaaaaacttcgaaagacttagccgataatcttcgaagatatcaccgggtacaaaaatcccagaatcttcggaggataaagacaatctctttcaacgagataaagataaagaggtgatattctcggaccctataaaaaggaccttagagaacaaacaaaggggcacgcacaaaaacgctctcaacttcaggctatcaaaaacgctctgactttgaaggcaaaaacacctatttctcatactctatcacacttgtacgataaaaccattactttctcattaataaaatcaagaacaccgtccgcggtaattgagaattctgttgttctttgagaatctcacaaagatccgttctttgaagaaacccttaaaacaaattctattgtgcgagttttgactctcacaatttggcgctagaaggaggggctatgtggtctttctcttccatggattttaccaacatgtcgtcgatgtagacttccatcgtcttcccgatctgtaaggcgaaaattttgttaacgaagcgttgataggtcgccccggcgttcttgagtccgaaggcatcactcgatagcaaaaaattccttgctctgtgtaaaaagcggttttttcttgatcttcggggttcatcatgatctggttgtaacagcaaaagcatccatgaacgacagtagcttgttttcagaagttgattctacgaggcgatcgatgtgtggtaatgggaaactgtcctttgggcaagctttgtttaagtccgtgaaatctacgcagactctccatttgccgtttttctttttaccacgactgggtttgcgatcagtcggggtacttcgctcggtgatgg

SEQ ID NO: 4104 - DNA, 1228 bp, Arabidopsis thaliana
ggtatgtacaatggttgaggtggtgttacctcagtgatcaggtgaagtagatggagacataatcatccatactctcttgggtatatgcaggggccgaagttgaggcgggagggtgttgctcgttctgtccggtcgagcgtgtggaagctcgtctctgccttctccttggctctctcaactcggagatcacttcctgaggctcaaaagatgaagctcggggttgatcgatccattcagctctccttgtagctgagctcgttgaaccgctccttcttactttgggggttggagatggtggccttggcttgctctggtagtccttgagttgaaaagccatactcttgagcgacttcttcattgttctcatcttcttcttgaaacccttcattgtcttgctgggaaggttcccaagctcttcaagtacaccgagattcttgtgaacttcagcaaactcatctcctccttggttagcaccttcttcataatgagcttgctcttgttcgctggtcccatgctccggttgatcaatatgttgctcaaactcgatttgctcctcataatcagcttgagtaaattactcatgttgctcatagtcggctggactatattctggtttatcttcctgagctcctccaatgtcgatgttcaaggtagagggagatggcatgaaattgatgttgcgtcttgtcttcaccaaagtctggttctcgcatggtaggggtaaaagagaaggtccaagctccgagtggttgaacttgaagagatagcgatctgccggagttgttttctcaagaaaatccttccccttgagatagtcgaggtcaatgaacttaggcaacatgtcaggggctccaaatttcatacccacggctcctagtattggcgttaagagaccgccaacacaaagactcccgcaaattcccgagcgatggatggttgcagcatactccttgtaactcaataagtgatccaagagaacaacactcaacgaagtgtctgctctatcacccgccatcttcctcccatctcttgtttccctcaaaatgaagaccaaagattggtatatcatgcatagctcctcttcactaacaaatccggtagccttctttagaaagaggatgttggcgatgcattggtggaggtatctaatcacgggattacggattgaagaactcttgctcttggttggtaagaagggcttcagaccgggtattgtttccaaagagat

SEQ ID NO: 4105 - DNA, 789 bp, Arabidopsis thaliana
tttttttcctcacccaaaggtgcctgcgacatcggagcagattatctgagttgtggattccgacgcccactttgcaagcccaaagtcagaaagctgtgaacaagatttctctttttagtatctcgtgaatttttcctcttcgatgtaaacattggaaactaaaagaaacttacttgtggttcaaaatcatcagacaataatatgttagatgacttaacatctctgtgaataacaggttgtggagcatcgttatgcagatagtccaacgcttcagctattcccacggccaccttatatctctcgttccaacgaaatgcaaccaggtcttttttgttgcctaatctcaatctcaaaccttgattgttagaaccagaacacaagaaaatctgcaagtggctaaatggtcagaggcttaccgtgaagattctcttcaaggcttcctcttgagagataattatatactagtaacaggttattgttttcaaagcaataacctaaaagggaaataacgttcttatggtgtaaggttgtgataatgtcaatctctgccacaaaatccttcaagacacattcggttcgtttgagaattttcactgcaacctctcttccatttggcagataacctctaaaaacccggctgctgcctccttttccgatgaaattatctgaaagtacattgcttttcttatttagacaaaaggaaatgacaagagtcttaagaaagttcaaaacaaagcggtcgttaaattatgagaagagaggaacaaaccagcacagaaattggatgtc

SEQ ID NO: 4106 - DNA, 954 bp, Arabidopsis thaliana
ttctcccggttgctaaattaggtttccggcctaaaaccgctcggctatccccgacattcatcacgtaaacgtcttctcctttcatcaatgtcacgagaacacaagaccccatcaatgctaactctggattctctttaaccatttgatcagctagctctaaatacgcgtcttcggttttcctcaaagcttgtaaaagagctttaagaacatctttatggtttgttgtcgtcgaatttgatcctttctgatcacacctgttatcagatttggtcttgttatttgacttcttctcccattcacatctccatttcaaactcttcgcttggtttcttgcaccggaagcaactgcatcatcattgtttatcacgggacaattctcttttcctgactcgggatcttcctcatcagaacattttccggttttggtcatgccgttttctcctaaagatctaagcttttcgtcgttccaaagtaacccattgagctccttttgcacggcggtgtaaagattgttgaggagataatccggcgcatctggaccactgaatccgtcatagattccgacaaagacccatccgttgtcttcagatacaaccacgtgtacacgatcctcccctgctttcccctgagcccattgaacatctaaaacagagttcatgctctgtttttcatcttcttcttcaagatcagatttagggttctcgttgcttcgtgaggaagtaatcacaggttcatgatgaagacgaccagaatctgatgaatcagagccgttgatcggctcgatcacactcttcttcaagcgaggtttattgttgttagagattagattcgcgaatagtgttttgaatgtgagaaaattcttcttcgatttaggtttttttctgatcttcttcggtttctctttctccgtcttcttcgttgattcaatcggacccgaataccgcgctcgtaccc

SEQ ID NO: 4107 - DNA, 573 bp, Arabidopsis thaliana
ctaagctgatcttaattgcaacatcttctacgaattaatcaaaagccaaaaacatatacaaataaaagttgagacaaacgaagcaaagaaaagtagaacatacatatacatacagaaacacatttgcacaaatcccaccgttgattatacaaatcatattagaacatcaaatatttagtggttgccattttgctctaactcttttttgtgggctttccactttaaggccacaagactaagtgcttttgtcgaagtcccatcatccttcaacaccctacaagctgcttccttcaactccttcatcttgttcctcactcctttgccttcttcaccttccatcaatccttttaccactctagccacctcttctcttctaactaacccatcgtccccggcacgcggcctaagtgccgacgaatatcttcactcaacaaaaccgcattcatcttctgttctgcgtataatggccatgctataagtggaataccgcttactacactctctagagtcgaattcatccacaatgagttaaaaatctcccgtggatggatgcgcaagacttgggcttgtgga

SEQ ID NO: 4108 - DNA, 1160 bp, Arabidopsis thaliana columbia
ctttgtcctttcctggacttgatcaatgttttccgatctttgtctcttccgatattcgatcaaatttctgatcttggtccttttccggactcgaccatattctcgacttaagtcttttccgactttgtcaatatttccgaccttggtccccatcggactcggtcaatattcccgacacaggtatctttttgaccttgtagtttttttccatgatcttggtcaatttccgtaagatcaaaaccccagaaatagtcaaatcccgactaagtctgtacccaatcttagtcaagttccgacaagatccaaattccattgatatcggtccatctccgaatatatcaacccactttcccgtcatgttgaagttttgactacaaggataatatcttggttcccgatcgtgagttgggtaactattttcgtttccaaacacatcgatccctcaacttccttatccgccaaactcttactatgacgttttcccgagcacttatccatcctaggatcaagcatgctctaataccaacttgtgagaccccgtcccggacgtctcggtgtccgggaaccttggactcacgtttgcgcctcttcatggccgaatctcttaatttttcgcgattcaacatagaattgcctttacgaggctaaattctataatcactttcttattacacagcggaagtctttctaaccttggtttaattccagccaacccttgtatcggttccatcatctttgtcccttggacttagatcgatcctttactcggtcaagatatgcataatgttcgctaaccattctaagcctaacaatcgcatatttctttatcctaatttcacggtcaattaccaaatgtctatcttaactaatacgctagatcgttacataccttggccaatatgcggatttgattccttagcccatttgtcgccttactccattcgttcaacgactcgtatccgatcgtgaattgatgaaccaatctctattgtttcttagccatacaaccaaccaaccccactaacctaagtccaacgatagagattggggatcgtacgattcccttggatcacgatgaccgaatcaagctcttggctcattggtccatccgtcctccaaacgtacgcaccttcggtttcatggtgctcgattgagccctc

SEQ ID NO: 4109 - DNA, 404 bp, Arabidopsis thaliana columbia
tgagagctttgattctgttctgaagcctttgtggaaaggtattaggtcgcaccgtggtaaagttttagctgctttcttgaaggcgatcggttttatcattcccttgatggatgctatatatgcgagctactatacaaaagaagtcatggttatcttgattcgtgagtaccagtcgcctgatgaagagatgaagaagatcgtcctcaaggtggtgaaacagtgtgtaagtacagagggtgttgaaccggaatacattcgtagtgatattctgcccgagtttttcaggaatttctggacaaggaaaatggctctggagaggagaaactataagcagcttgttgaaactactgtggaggttgcgaacaaggttggtgttgcagatattgtgggaagagttgttgaag

SEQ ID NO: 4110 - DNA, 569 bp, Arabidopsis thaliana columbia
cgtatatcatcagttataggtggaaatacattatgagtctgaataagtaattgcctggaaactctaagaaaactgtcaaaaacatagatagagaatagtcttacatcctgattaattggtatacggtggtatgtcctcataaagcctgcaattagactgcagaatcttttgctgccagctggaggttcaaacgggaaataggagctatttttcaagacactagcaagataggctaggaatggaatcttctcatcagcaacagtttcatcttcaaaagataaatccagtgaattactgatttcttggaatccatttttcaagaagtcaaagattatcttaacctgtcaatcacaaccaacttaattgactactttgttgttcatggtaagataaacacattaagtaaatgaaagcttctttatctacccaccagatttggttggcgaatctgacaactataaaccgataaagcatgggagattcggccacagcattcccataggcccatgctgttcgagcacaaattggttggtctcagaaagtccataaagactcaaacgatgagggct

SEQ ID NO: 4111 - DNA, 545 bp, Arabidopsis thaliana columbia
cttccttaacgggtttgcgttggaagagtgcaaaattataatcatttcctccgatctctcccatgagtatcaaagcattttcaatcatatctctacaatctaaatacaaaacagcaaaataaagtattacaacttatagcaatataagcatataagaaaatcaaattttgatagtttgatcatataaaacatgaaacaccaaaaacagagaagaaaaagttgagcttcccaacctgaaggtgagccacataagttaggtaaactttccgtgaagctcctaagctgaacgcttagactgacgttggtgatagtagaatgaattcctctctcctctagaaaggaaggttctaatgcagttgctcccgcgaccgcgaaattaactccctttttaaagtttgcattttgacatccataaaaaggaggcacaagcggaaaccccaagaattcagctgtgaacataaccgaaaaaaaaaaacaagagagagctgtaagttgaggaccaataaggaggccaacaacacttaatatggttgtatgtagatggt

SEQ ID NO: 4112 - DNA, 537 bp, Arabidopsis thaliana columbia
atgtttttcaattaaactttgtcaactgagattcaaatagagcatttaaatataaccaaaaaaaaaaagaagaagaaaggaggaagcaaatgataatggagtaatgagaacacaatgaagttagagatctcctaaaatctttgattcttttcttctgcttagttagactgaaacctcttcgatccattctaactttgacaaatacataaaatactaaaagaaaagaaaaagaaatagccaattgacgaagtctcggctgaaactataaaatgactcatttttttattgcggtcaaagtcaacccatgttagaacccaataagatattattatatatacacctataagcttcattggctatctctcttatgtacagacaagatgagataaatcattcatctcatttcttcaactggctttgcttctttctttcttcttcctcaattataattttttcacaggtatcatcaatctctattctctcttgacctttttttttactagcaaaagcttttaattagctgattatgagagtttt

SEQ ID NO: 4113 - DNA, 469 bp, Arabidopsis thaliana columbia
gaaaggatgggagaggagcgagagcgacaccaaggagacgatcgtcacgtagtttaccttgaagtaagggagattcctccggatccgagaatacgcatcggtgagagactctggacgtgaaattgcgcttcgatctacgagttctaaccatggacgccgctgcgataggctttggcggattgacgacgagaggcgagagaggaacgtgcgaaacgccggtgttgatacgggttgctgagattgggaaccaccaccggaatggtctgagatcggtaacgttggaggattagccatcatcacacacgactgcgcgtggggatgcgaagaaggcgcgtggattaaaggcccgtacgaatgaattgatttcttttgaagcaacctgtttcccgtgttaacgtcatgatctcgtgtaataacctcaccatagaccgctctctgcatcgtagcatctctaccgtccacgtggatt

SEQ ID NO: 4114 - DNA, 591 bp, Arabidopsis thaliana columbia
ctgacaatactaatacatgtcttgatcgacagtttcttattttaaatctcgttattcgtctgtatcattctcattgacaatttagttcttcgaatattagcgcttcagttaaaaatcctagttatcatatttgctattttattgtgaagatagtacacagtatacgatacaaacaagttgaagaaacatacctccttcaaacgtatatttacagcaaaaaaactatatgaaaacatatttcaatccctttgagtacagtatatacctaatttctatatgtactataaaaagaaaaaccaaacaatacctgtaagtaatatgtcttacaatatgtatattcctagctcaaaaggttaaaaactactaaccatttagttacaacataacaaccacattttctataatctacactatataattagcttccgttagtattaattttagaaaggagcacggtgtgggacgcccttccgtctacttgaattccggtgattatatatcggcggtgtcccggagaaagtttaaaccgctctcatcacggagctcgaagacggttgatctcctgcaagtaacacatttacggtggagatg

SEQ ID NO: 4115 - DNA, 492 bp, Arabidopsis thaliana columbia
tctaccataaatccaccgtcagcgaccacgtactgtgattggcttacactccccaccgtcaactttgatgattcacatcccaaattatttttcagttacgaattagactcaaagaaagaaaaaatcagatttttgttttgtttttaatcgggaaagatgaaggcggagacgatgacgctgcttcttgtgaatctagccggaataatggaaagagccgatgaatctctgcttccaggtgtatacaaagaggtcggtttagctcttcataccgatccaaccggactcgggtcattaacgttgctacgatccatggttcaagccgcttgctatcccttagctgcttacatggccattagacataaccgagctcacgttatagctctgggtgcatttctctggtccgctgctactttccttgtcgctttctcttccactttcttccaggttttgtcctttttccacaattaaggtttatggtttgggtttagtgag

SEQ ID NO: 4116 - DNA, 1307 bp, Arabidopsis thaliana
gcaaaaccaaccgttcaggtggaggggctggggattctttgagttcatccgaaagctcaacacagctccagaggttgattgcaacggggttcactgtgctagacaggtaatcttttatgaaatgcttacagtccagtatttttgtggctgcgtcaatcatttgttctcttgtagctcgagacctatactcggccatggtttgtgggtgcaataaagtttcatacaaatatcttaaatcctgtttgacatgctccactgatgcattatttacatcttgattagataagcggtgcacattgttgacagattcaagcctggagttcatatgcaaaggttaagattattatgcacactggaaaccaaccaatcagaataagaagaaacatctcttgtaagtttacctgtactcaaagtcgtttgaaccaggattgcaacgtgagctgactactcgagatccatcatccaccaaaacccctccaaaatgcttgagacagtaatcaatcagttgtggagaggctgatttgcaaatagacctcttgagagcccaccttgtaacccagttggcttgtgggcgtcctgaagctttcagtatcttaaccatggtttgctgtacacgttccacatcacttttagaccaagcacacagtacagacgacttagatgcaggtttggaactgttctcacgaatcatctgtaggagaaaggagaagaggtctttgacagtcacaagctctgaacacgagagtgattggtagaagctaataatggagtggagctgagttcttggtttcctcccctggaacaaaaactcagagagaggaatcgcagataaagtatccactgcactctggtaagcttctttggtgagtgcatagctccccgatttgaattcataaccccactcactgtaccacgcagaccctctagtaatcccatgaagcaaccggtagtccatcccatacttccttgacacatccatcacactagcttttcgaacagcaagggaggaacaaagcctatcccagaagtccataatggcacgaccagtcaaaaaaccagagccaccttctcttccattaagacacagtagatgagcgtagcattagagtggataacgccgtgaaggaggtgagtgttatcctctagctgagagtaaacccagttttcaatgtctaaagccatgctgcaccatttgcaattgctaccttcagacaaattctgagtattaccacacctcgtgcaagccttagtgtctcctcctgaccttatgatgaagcggtacctctttctacacactggatgactac

SEQ ID NO: 4117 - DNA, 570 bp, Arabidopsis thaliana
gatagaaacaaaaatagaaaagaaaaacatcacaaaagagatctgtggtttgatttggatcaccatggaaaaagtagaggtaccaccaattcataaccatccgctgttaccttttactcgtttttcctacaaggcttgtaaagggtgtgggtatgttggttacatatatggaggctaccattgcaatgagttggggtgtgaatctgtgtttcataaagagtgtgccgacccgttaccagaaatcaaccactattctcatccagaccatcctctaaagctcctcataaatgtcgaaccacttgcttcttgtagccagtgtccatcttcgtttgaaaatggttatctttgttcgatttgtgacttcaagttggattttcgttgcgcgacgaggttgcctttggaatttattcttgaagaatccactgtccacgagcatccgattcagctctctgatggaacccgtgacggttttgtgcactttgcaaaacatgcaaatggggagttttcgatgctgttcattacaaatgtaataaatgcgatttaagctttcatgtggagtgtacaaacttt

SEQ ID NO: 4118 - DNA, 429 bp, Arabidopsis thaliana
cagtgtgctgtaaagcgtgttcgatggcgaaatgacggtcgaaggcgtcactgctcgcctggcaaccagctctgcggaacgagtgaaacttaccgaacgcggattcattcctgtgatggtagatcccgcctgttcattgcttgatgaactgaaaccgctttgcgcggtggacgctattcttgcgaaacagaatttgggaatgcgggcagatatggcaccagtaacaatcgcgcttgggccgggctttactgctggggaggattgtcatgcggtaattgaaacaaatcgcgggcactggctcggtcaggtgatttactctggttgtgcgcaggagaataccggtgttcatggcaatattatggggcatactaccgacgggtgatccgtgctcctgctgcaggcattatgccgatccaacgtgaaattagg

SEQ ID NO: 4119 - DNA, 483 bp, Arabidopsis thaliana columbia
atcgttatatatcaacgaaatatctttctaaatttcaatgtctttttcaaattaaaataggatgggactcatatctttggctgcccttccttcccttgattgtaagtaataaaaaatttcacttcaaagtcttcagtgtattaattatgtagctgtgaataaacaataattgtatatggttggtgtaaatattgaaggtgatattgatagtaggagcaaaacttcaaatgataatatcgaaattaggattaaggattcaagaaaaaggagatgtggttaaaggagctcctgtggttgaaccgggcgatgatctcttttggtttggtcgtcctcagtttcattctcttcctcattcacttggttcttttcacggtacacttatttacttttttacatttaccatcttaagttatgtttttgtcaacccttgtcttatgacgtgctaaatcgagtatcttctatgtattctgtttatagaatgca

SEQ ID NO: 4120 - DNA, 430 bp, Arabidopsis thaliana
ttgagccagttccttagacagttcttggttttcttctcgaatttcctccaaatcaactgtctgccctgcttcttccgcaccacccaccccatcgccttctttctctatcccaacaccgtaattaacatctgtgtctacttcttctgtagcctctggtacatgtatgtccagtgatttaccagcttctgaatccttgtcaacatcttctttgacatcatccataacagtttccttatcattacttgtttccccagtaaactgagtaacaacagctgatgatataacagttttgtcggacatctcagtagccacgtcatgcacctctaggcgcatagtttctatctctaattcagtagtactatcaaccttttcttcctccttagatttcttcaatacctgtatatccatttcatcttctgtaacatccaca

SEQ ID NO: 4121 - DNA, 356 bp, Arabidopsis thaliana columbia
cagactgggtggaaaataaaacgaaaaagccgctgatatttttccgaaagaatattttctaattatgtaatccgaaaaaacattttctacttatgtaatgtggattacgagctgtatgttcctttattatatggttgcttatgtagaattctgctagtactaagatgcatgactttacttttggatatatctaatacaccactaaatatgttgacctttatctacaccacagttcgtctaggccaagtgtggatccaaaatctatccttagaaggtcaaaatccagtcctcgccaaagtaacatgcgagaacaaccgaccagacagtgagtattgtagttatattgatggttgtgc

SEQ ID NO: 4122 - DNA, 466 bp, Arabidopsis thaliana
  unsure (1)..(466): unsure at all n locations
nnnnnnnnnnnnnnnnnnnnctaaagtaatttcactgcctttcagcgcatgtccgctcaaacgacgataatccatcgcgaatcccgtgcccgaaataaaggtttcaatacaaccttgtttaccgcaataacaagggacttcctcgcgataacgcagttcgtcttcgtccatccacggtagcggattgtgtccccactcacctgccgtgccattgccgccgatatgcgcccgcccattgaatgccacgcccgcgccgcatcccgtgccgataatcacggcaaataccgtctgcgctcccgctgccgcgccatctactgcttctgaaaccggcagacagttagcgtcatttgccagccgcacttcccgctgcaagctcgcgcttaagtctttatcgaatggctgaccgttgagccaggttgaattggcattcttcagcatagaggtgtaaggtggcattgagccaggg

SEQ ID NO: 4123 - DNA, 576 bp, Arabidopsis thaliana
gcgtgttggtgtggaagtgattgagcaggctcttggcactggaagtgttaaaattccagaatgtagtcctgaaatgacatggacacggatggaagtttcggtaatgttagagcatgtgcaagcccatgttgctcccactgatgttgacccaggtgctggattgcagtggctcccaaaaattcgcagaaactccccaaaagtgaagcgtactggggctctacttgaaagagttttcatgccttgtgacatgtattttcggtatactagacacaaaggtggaactcctgatctaaaggtaacaccatttccttctgcatctgctcgcatgagccaatgcacaaaacaccattttcatccaaaagtaggcatagaaaaatctctgttgtatatataactatggcctgggcttctactatgattaattttcttcccttgaaaaggctacaaattagattggtaaatactagatatagttaaaaaaaattcaggtcacacaatcccgataataaaagttatacttgacattttgtttatgagttactatcaactttattaaatttgaaatacaaggggagt

SEQ ID NO: 4124 - DNA, 578 bp, Arabidopsis thaliana columbia
caacgccatctctcctccctctctccctctctccctctacgcaaagccaaatatttataagaaaatcattaaacataaaaaaattcaaaatccagtattgggccgggttgggccgcgtaaacgggtatccaaattagagggtcgttgaactgagtctgactcactgagttttgtgatcgagtcaaacaaaggtgagcttgggaaataatggcgtactctactagctcaagtttgagctctcccataatgagtacatcaagcttgtcctccatctcctgcctcctctggagatctctctcatgatgacttcgaaggtttgaaaaacctaactatgaatcttaggatctgattacgtttgacatgtacgttaaattgcacaatttaggagttttcctgagttcaatagaaggtgacaaatttggttcttgattgcttgaaattgacaggaacggaagttgttcacagatcttagtgttattcaattagaaaaagatggaaacttttagccttgttttgctttgtcctgaaattatactctctttgattgaaatttgtgttagagctatcatctttgggtg

SEQ ID NO: 4125 - DNA, 528 bp, Arabidopsis thaliana
gctcgtagttgaaccttgggatgggtcggccggtccgcatgtacgcactcacagttgacgaggtgatcgagcaacacattggagcacttgggtttgctcagatcttgcatgctctcttggtctctatcgcttggatcttcgatgctcagaccactcttatatccattttctccgatgctcagcccgcggcgaggcttcttgcaaccggtgccatcgtggagggtgcctccttgtgtggattggccagtggagaatgggaatggattggaccaaagagtgacactgttgtttctgagtggaatctcatatgtcaacataaatttcttgtggctgttccttccacactattcttcatcggatctcttttcggtatggatcataaaaactatggatatatagcttcttaagtttgttaaatacgatttggtttggtaagggctcttttacatgattcttttgttttattttacaggttctggtgtgtatggatatcttgctgattcatggtttggtcgaaagaagacttta

SEQ ID NO: 4126 - DNA, 531 bp, Arabidopsis thaliana
gcgactcaagagagtcatcttcaatcaaactctgagcagcagaaggattgcttgctaatgctttcatgatatgaacaacactaccctccacctacacgaatgaaggggcacaaagtatttattatttattaagctgataaagcatttgtgtaatataaacttggttgtcatatgtagctcaaaacaatgtcgaataacatatctaatcgtattatgatttggaaaaaaaacaattgaaacagaacctcaagtcgtctagtctggagaactatgtatccagcatctttttccgctgatacaacttctaagtcaccagttattttacttttgcttagttcatcatatgctagaagtgcaatgagaacgtgtattagacaacagaatatcccagaatccagtagtgattgtttgtcgataggctgaaaagaacacataagaggcaacacaatataaggcataaaaccatcaaagagtaaggatcctggacgataagaaattgagctttgcaagattttatggagtgagtaagat

SEQ ID NO: 4127 - DNA, 591 bp, Arabidopsis thaliana
gcttatttgttcagcaaagtggtaatgcaagtggatgtgactgtgtcaatggttgtggcagtggctgcctttgtgaagccaagaattcaggtgagattgcttatgattataatgggacgctaataagacagaaaccgttgatacatgaatgtggatcagcgtgtcagtgccctccaagctgtcgaaaccgtgtgactcaaaagggtttgaggaataggctagaagtgtttaggtcactggaaacgggttggggagttcggtctttggatgtattacatgctggtgcttttatttgtgagtatgctggggttgctttgacaagggaacaagccaacattctgaccatgaacggtgatacattggtatatcctgctcgtttctcttctgcgagatgggaagattggggagatctgtctcaggtccttgctgatttcgagcggccttcttatcctgatattcctccggttgatttcgcaatggatgtgtccaagatgaggaatgttgcttgttacataagccacagtactgatccgaatgtcattgtccagtttgtactccatgatcacaacagtctcatgttcccgagatcct

SEQ ID NO: 4128 - DNA, 572 bp, Arabidopsis thaliana
  unsure (1)..(572): unsure at all n locations
atttaacttgctatccacggcacagaaaatcccatgtagttgctctcgtgaacacttgtctagcttctcctcccaactagaatacttattctcacgcttcactctctttttagtcaccacctcgtttcctttccctacatcgttgacgaaagtctccacgttggtttctttcctgcagctggtcgacactgtgtctttgtacttgcgtatgatggccctgactttggtctcgtccttcggccatatctctggctcggaaatcaccacatcggtagccttcgtgggaccgtagacgatgagacatgtctcgacgccgcagagagttgagaactcttgtgccttcttgtaaagactagctttcctcttcttgtaagttgttatccttgtcttatcgttcgctatcctttgtaggtcgaccactttcggaaccatcctttgtaacctgagttattgttatatattacaaaaaaaaacatataaacatataaaccttttcccaaaaacaaaagtacaaataaattgaattgatatgtnttgaaaatactttgtttataggcggtttgtgaatagtt

SEQ ID NO: 4129 - DNA, 611 bp, Arabidopsis thaliana
  unsure (1)..(611): unsure at all n locations
catctgagctggattgctcggcgaatggtctccgccggttatctccgtgaatgtattcaagtctacggaagcgttcgcaaatccgccgtcgattcaagtttccgacggttagggatcgagaaactcagcatcggagatgttcagaggctaaattgggaagcgcttgagcagaagatccgtcgttggatccgagcagctaagatctgtgtgagagttgtgttcgcaagcgagaaattgctctgtgagcatgtttttgaaagcgttggagctgtcaatatccacgaagcttgtttcatggaaacagtcaaaggtccggcgattcagctttttaacttcgcggaggcgattagtatcagtcggagatcgccggagaagctttttaagatccttgatctacacgacgctttgattgagcttttgcctgatatcgagtcagttttcgatctgaaatcttcagattcgattagagttcaagcggcggagatattatcgagattagcggaacggcngagagggatattatcggaattcgaaaacgccgttcttcgtgaaccttctagagttcctgttcctggaggtacgatacatccattgacgaggtatgtcatgac

SEQ ID NO: 4130 - DNA, 631 bp, Arabidopsis thaliana
tggctgtgggtagagtgggttcaagtaccgatttaattgtccaaagggttgagtttgtccttgactctgacaaaagaagtcatctcatggacctgcttcacgctcagagagagaatggcatccaaggcaaggtacaaactgatactcctcttttgtttggaaggaatcatctattgtttagttcatgatttattaccaaagtagctggtcttgcctcaatatttcaacatgctccttcatactttctgatgattgtattctttccatattttcagcaagccctgaccttagtttttgtggagacaaagagaggagctgactctttggaaaattggttgtgcatcaatgggtttccagcaacctccattcacggtgacagaacacagcaggtttgttattcaacttaaagctgaaaatgttgtatgttaatgtggacatcaaaatccagtcgtacaaattcattattgagaccaaagagaagatctcgtgttaaaatatagttcattgaactaaagcttaaacataagtcaaaatctgaaggaaaaactattgaaatgcactctttgatcatcattatcaataagtgtttaggacataagttatgtgttgctatatatgcgatgaaggaaag

SEQ ID NO: 4131 - DNA, 609 bp, Arabidopsis thaliana
taatacacataaaattggatttaattaaatagatgtggacctttttttctaaataatataaaagaaggaagaaaataaaataaataaagaaaaagagagagtgaagaaaagtgggtttaacaataatttgctgcaaagttagaagaggcttcagctttattaacttcttgtttgctttcattctctttctctctatctatcatcatcatcctcgtaatcctctcctttctccttcagacccctcctagttgctgtttaaacaaacaaaaaaagactgcttctctttcttatttctctcatcatcatcatcaatggttttatgagatttatatcaaaaaacattgaggagctagagagaaagagagagtgtgtgtgtagaaaaagattgaaacatcatcaagattgatggagcaaggaggaggtggtggtggtaatgaagttgtggaggaagcttcacctattagttcaagacctcctgctaacaacttagaagagcttatgagattctcagccgccgcggatgacggtggattaggaggtggaggtggaggaggaggaggaggaagtgcttcttcttcatcgggaaatcgatggccgagagaagaactt

SEQ ID NO: 4132 - DNA, 520 bp, Arabidopsis thaliana columbia
actagaggatacgaggtacgctctttattcatcaataataatttattttctccctgcaggcgggagtttttaaccaagcacttgaaaagtttttctccaccggagaaactactgtcgccggcgatgggctgcatttgtttcaaacgttggcgtcgatcgtcttctccgtcgataacatccaccatcaccgtcatcgacgatctaggtaaaatccaacgaattcgccagccactcctcctatgcgttaattagattctgaagaagacgatgatcgagagaactaacctaatagttttggctgccgataatgaagaagaagatgaaggaagtacttgtcctaatttcctggagttcagcttggaacagttgagagtcgcaattgacggattctccgccgacaacatcgtgtcggagcacaacgagagggttcctaacatcgtctacaaaggccagctcaacgacggaagaaagatagccgtcaagaggtttcaacggctttcatggcctgattctttagaat

SEQ ID NO: 4133 - DNA, 634 bp, Arabidopsis thaliana
gcaagtcagaattaatatggtttttatttaagtcattttctagaccatagacttattttcatgtctatatcttttataggtcattatgttcctcagcttgccaaaaagatccatctctacaacaaagctttcaacaatacacccatcattaacctcaaaggattcatggtaaaactacggttctatttatcacatttccgaaaccttaatccctccttaatgcatatatattcttttgcacaggtgggaaatggagatatggacaagcattacgacagattaggagccgccatgtatgcgtggtcacacgcaatgatctctgacaaaacttacaagtctatcctcaaacactgcagcttcactgcggataaaacctcggacaagtgcaattgggcactctacttcgcctacagagagtttggcaaagtcaatgggtacagcatctactcaccctcatgtgtacatcaaaccaaccagaccaagttcctgcatggacggcttttggtagaggaatacgagtacgacccttgtaccgaaagctacgctgagatatattacaaccgtcctgatgtgcaacgagctatgcacgctaatcttacctccattccttataagtggacattgtgcaatatgg

SEQ ID NO: 4134 - DNA, 191 bp, Arabidopsis thaliana
agtacatccttgtgttcttcgaacagcttcaccggcagcaggatcaggtcgtcgaagtccactgcattgaacgccttgagcgtacgctggtagtgggtgtagacgatggcggcggtctgctcgcggggattgcgggctttttccagggcctcggcgggcaggatcaggtcgttcttccaggcaccgatcat

SEQ ID NO: 4135 - DNA, 848 bp, Arabidopsis thaliana
agtccatgatcactgtaccgtacgcaccacgcagctgcgggatagcacgcagaacggcctcacgcagagtcccgccttgtttcagctcccagttcaccagatgggcaatcacttcggtgtcggtttcagatacgaaggtatagccacgcgcttttagctcttcacgcagcggttcatggttttcgatgatgccgttatgcaccaccacaatgtgttcagaaacatgcggatgcgcattcacttctgaaggttcaccgtgggtcgcccagcgagtgtgagcaatacgagtgccgccatgcagaggatgttcttccgctgcctgtgccagcatctggactttaccgaggcgacgcaggcgggtcatgtgaccttcagcatcaacaacggccagaccggcagagtcatatccgcggtattccagacgacgtaaaccttcaagaaggatttctgctacatcacgttgcgcgatcgcgccaacaattccacacatagtttttgattccgatttatatcgttgtcggtcaacctgtatgcccgttttttcgggcgccccgagccttgtagagagtggggttatttttatagttactgcttgtgggagggagattatgttatctcctcatcccatgtgaccgggttagccggccagaatcactttttctttaccggacgacgccagccttctttctgagtctgcggcacacggctgactactaatgcattttcgccgacattacgcgtcacagttgtacccgcagcaatggtcgcgccttatgctactgtctacggggccaccagctgagtgtcggaacaccaaacacatcgtcgccgataatggtcttaaattt

SEQ ID NO: 4136 - DNA, 448 bp, Arabidopsis thaliana columbia
gaaatttctccatcattgctcatattgatcatgggaaatctactttggctgatcgtcttatggaacttactggcacaatcaagaaaggtcatggtcagcctcagtatctcgacaaattgcaggtactgtctttacctcaaagttgatgtctttgcatgtcaatggttgagaatgattatagttttgaggttatatgtttgaattgagtagagatggaaatgagggttagtgatatctcaataaagttttgatttttaggtagagagggagagaggaatcactgtgaaagctcagacggcgaccatgttctatgagaacaaagtagaagatcaagaagcgagtggttatcgtctgaacttgattgatacaccgggtcatgttgactttagttatgaggtttctagatctttatcagctttgtcaaggagctcttctagttgttgatgcg

SEQ ID NO: 4137 - DNA, 577 bp, Arabidopsis thaliana columbia
agaaagtcgaggcatgagtgggatcccttgcgttttggttagcgctaccggtttagctagaatgcacactaaaccagaagtaatgtttggattaatcaacggtgcagaaaaacaagaaatatggagttatttagagtctgctaaagatatgaaagaactaattcgtatcggaagacatcctaattcatggaatgaagtctctgttttcagcattgaggtacgtaaaaaaattcatttggtttagtaataccaatcgattattgagcatttgatttatgaatagagaacaattaaatatattgcagtggaagggttcgaaggagtggtatctgattcaagaaacatactacgatgaatcaggagcaatgataatccacacttgcgtagaagcgccatattttgcagctgcaataaacggtggggatttgtctggcgtcgaactgttacccagtggattcccataataccatgcgaatcacaagaatgtgtcgtgacagctagttgttatgttaaggctgccaaactatggtcacgagccaaatgagctggggagttatatggagacatggtcactaca

SEQ ID NO: 4138 - DNA, 599 bp, Arabidopsis thaliana
cgccagcgtgctcaaaagttttttggtacatatattgaaggtacaaagcgattaaaagagcctataagaaaactcgagggtttgtgagtgtcattgtttgaattccaagaggtagcgaggatgatcacaatcaccactcactcatgacccgcacctatgaaattctcccccattgctgcaaatactgtaagatacaacagaacttgagaaatttgagcgagataacactggagatggacatttggaatgttctgtctgagttttttacggattgttcacgagtcttgcgcagagtcatcatcgacgttggctttttcatcaccaggaagaccaaatatccgtaggttacggtccatcgaaccgactgcaacgtactgtgcatctgaaccaaacttcacacacgtagctttacctgcaagtgtaagggcttcgaaattagcaacattatcgctatgtgatcattgaaggagttaggtaagggactttaccagtgccggagagatctgggagtgtcttgataaggtccattcagcttcacacttgccgtctggtatatctgcaccaaaacacataaattgtgttacccaacgtgcagatta

SEQ ID NO: 4139 - DNA, 593 bp, Arabidopsis thaliana
tgtgctctaaagccgctgccgaaagagttgctggataaaatgctggcggcgaagaactaccaggcggcgctgtttattctgcgtcacgtggagttcggcctgtttgatttccgccttcatgccgagttccgcccggatcagggggcaaaaatcctcgaaactctggcagaaatcaagaaactggttgccgtggtgccatctccgtcctgggggccgtttcccgcacgctttcagccatattttcgccggtggttatgccgcaggttactacagctacctgtgggctgacgtactggcggcagatgctttctcgcgctttgaggaagagggcattttcaaccgtgaaaccgggcagtcgttcctcgacaacattctgagccgtggcggttcagaagagccgatggatctgttcaaacgcttccgtggtcgtgaaccgcagctggatgcgatgctggagcattacggcattaagggctgatcattcagtgaaaatctgcttaattgatgaaacaggcaccggagacggtcgattatctgttctggcgtgcccgctggggctggagcacgatgaagacaacctgatggcgctggtg

SEQ ID NO: 4140 - DNA, 521 bp, Arabidopsis thaliana columbia
ctcaagattgatacatccccaaccggcaccagccattccgtcatcatctttgctcgcacgcacatctcggctataaagcttcaccgctctcagatccctcttagtctcctcagattcagctacaacgtggctcaaataagagttcatgactttatctctaagcttcttctcgaacgtgagctcgtagtaacgtttctctttttggcttgcctcgttctctgattcaacataagtccatctcagctcgctattctcgaaagtatccaagatctcttctcctttctcgatatagattgtgaagtgcttctgcttagggagtttacctactcgtaaacgggctgtctcgggtccgattttgttccggaggtacacctctgccgcgtcgaacacttggttcctcttaaatccgatgatctcgtcgataaccatagtcaaattctttgatttcggagtgaaaaaccggttgagtaagtcggtgatgtatgatcggagcctctccggtacttcatcattgaacagtg

SEQ ID NO: 4141 - DNA, 613 bp, Arabidopsis thaliana
tatcgttgtcgatcacctccctgttgttcccaaggagaagtttgagaaactagaaggtgttgttaagaaaatttacaaccagttaggtgtgattaaggaaaatggactgttgatgcccgttgatcccgatactaagatgacattgggctactgttttattgagttcaacactcctcaggttgtttatctactcgcagcttaaagcttaatctctctgtttagttagttttgcttaagcaattgtgtaggcacagaactagattgttttcaatggtaagtgtattttctaagagtttgtctcaatgtctgtgctgtttttaggaagcacaaaacgctaaggaaaagtctcatggctacaagttggacaagtctcacatatttgctgttaatatgttcgatgatttcgataggttgatgaatgtgaaggaggagtgggagcctcctcaagaaaggccctatgtccctggggtaagtttagttttcttcatattactctttcagcgacaccattatatgtttttgaataagtgccactgcgcctgtgtacttcttgatattggttgtctctgaatgatttcagtgatttatgtgtttacagctgaattagtgttag

SEQ ID NO: 4142 - DNA, 603 bp, Arabidopsis thaliana
  unsure (1)..(603): unsure at all n locations
nnnnnnnnnnnnnnnnnnnnctaaaggtctaaaatagctgagacattatttttcaatctcgataaagaaccctataaaaatagccctgaattacaggggttgatttggaataagttggttgtatatgtcaatgaatttaacttaagtaatcgagaaaaaacaaatttaatacaaaggctatttgataatgttgagtctatatttaatgaagtacctgtcagcattttagtgaatgatatttttatgaatgatttctttatgaaaaatcctgagatgattaattggtacttccctcagttacttaagagttatgagggtgaaaagatttattttgataatttaaaatatgatttaaatgataatgataaggaatctaataaagaaattttgaagaatcaaccagataatgttatcaaagaaaaactgaataatgaatacaaacttagatttagaatgatgcaaactatcttgcaatcgagagttaatgtattccatatattaatgaacagcgtttaaataaactaaatccaccggaaaatttacgtatagcaatagaacactttgggtggaagaatagacctatcactgcataaaataatgtga

SEQ ID NO: 4143 - DNA, 604 bp, Arabidopsis thaliana
gtaacgtccgccagtgtgctttaaagctgcgcgatacgcagtagtgagttacacgttccttcttctccacagctgatcaccacgccgacgctgtggcatctcgcaactccctttgaaggtaaagcgaattcgcaagaaaacgcactgactctggcctgtctgctgcatccgacccccgcgctgagcgatttcccgcatcaggccgcgacccaggttattgctgaactggaaccgttcgaccgcgaactgtttggcggcattgtgggttggtgtgacagcgaaggtaacggcgaatgggtggtgaccatccgctgcgcgaactgcgggtaaaatcaggtgcgtctgtttgccggagcggggattgtgcctgcgtcgtcaccgttgggtgagtggcgcgaaacaggcgtcaaactttctaccatgttgaacgtttttggattgcattaaggagcgaggatgagcattccattcacccgctggccggaagagtttgcccgtcgctatcgggaaaaaggctactggcaggatttccgctgaccgacattctgacgcgacatgctgcgagtgacagcatcgcggttatcgacggcgagcgacagttgag

SEQ ID NO: 4144 - DNA, 606 bp, Arabidopsis thaliana
cacaccttttatgcaagccgacagttccacatcgcggacttatggtggaactggcataggtttgagtataagcaaacgtttggttgaactcatgcaaggagagatggggtttgtgagtgagcccgggataggcagtactttttcatttactggagttttcgggaaagcagaaacaaatacgtcgattactaagctggaacgattcgatctagctattcaggagtttacaggattgagagcattagttattgataacagaaacattagagcagaggtcaccaggtacgaacttcggagactgggaatatctgcagacattgtttcaagtctgagaatggcatgcacttgttgtatcaggtactttacgtacattagtgtctgtctgtctttagagattatagtgagttcactaaaagcgttttattgttctggaatctttgcagcaaattagaaaatttggctatgattctaatagacaaagacgcctggaacaaggaagaattttcagtacttgacgagttgtttaccgaagcaaagtaacctttacaagagtccaaagatttttcttttgggacttctggactcttactgagcgcagtgagatga

SEQ ID NO: 4145 - DNA, 587 bp, Arabidopsis thaliana
catccggatgctggtaagattcctctcctttgttttctcagctcgttgtggttagatgttgaaggattgaaatttgtatcttaatgcaggcaggcgcattcccacgtgaagagggtgtacaatcggagattccagagtttaatgtgtcgtacaaaccgcaagggaatgattcgaagcgcgagtgtacagtgagacagttgctacatgacaagattcgtgatgcatgcgcacatcctcagtttatgtcagatgtaataagaccgcttcagattgagcagttgatggaccaagtggtaaaaactctgtctggtggagagaagcagagggttgccattactctatgccttgggaagcctgctgatatctatctgattgacgagccaagtgcgcatttggactcagagcagcggatcacagcttcaaaggtcataaaacggttcatcctgcacgcaaagaaaaccgcgtttattgtggagcatgacttcataatggcaacctatcttgcggaccgagtcattgtgtacgaaggacagccagctgtcaagtgtattgtcattcccacagtcgctgctcagtggaatgaccac

SEQ ID NO: 4146 - DNA, 528 bp, Arabidopsis thaliana
gatccctcagatgagacgttttcttctacctgtacccataagaaaaaaaaacgatgtgaaaagatgacaccgcaatgattgagtaaaccagaaacacctagagcagtttaagaaactgcaatccacaaaaataattatacactaaaaaaaagattatcgtcaattaccattttctcagtaggatcagaggcatctgtgacatcattaacgccctgcaaaacaattaaggcgattgtttgtaatattcataagcatcataatccacaaaaacaattataccaccaaaaaacgtaattatgattcctttatctcatgaatcaaaaaatcctatgatttcatctaaattaactaataaagttaaaaaataaattgtcagcacaattgaaacgaccgaaaaagatatatgagttaatatatgctctaaaattaaaaaaatcataaaaaatttgttaaaaattaataaattaatactaggttttcccgattttagaaaaaagtcgggtattattttgattataaacttataat

SEQ ID NO: 4147 - DNA, 453 bp, Arabidopsis thaliana
gtgggttctgaacttctactccgcttgatttgtgtgactttgtccactccacaagaggatcatggatgaatgtctccaggatgctcatcaacgtctccctatgtgtcctcaacactgtgagagtgatttcacataccctcatgaagatgccctcatatccagtgatgcccaaaccatcaatcatgttctgtggtttggaaaataacaattcactattatgacaaacgaaaacaaaataccaacagaacacaaacaaacgattttgcagtttcttgcctgggtcaatctgaatggcaccaactcaggcttctccagttgtaagcctttgtcaaataagcaactgaagtctacatgaacacaatcacccgaagtagaatcaaagagaatatttctccatgacggtcacaagccaacaatgtgcccaaccatggccaaactgctgtggtgtgagca

SEQ ID NO: 4148 - DNA, 423 bp, Arabidopsis thaliana
ccctcaagcctctttttttcggcacgccgctaacaaacgcggaaatgagattaaacgcaaaaaggtgcgttcttgacttcctttggagaatctcaaaagacttaaaaaaacaaaagaccacaaacattatcataaactccctaaacctcccctttcactcttaccttctgcagaaacacaaaccaaaacatattcagaaagttgggatatgccaaaatagatgaaaacatagagaaaaaagcttacccgaaaacatcgattaggctccgtcgcaggccagagcggctttaatccgctcgacagtgcatttgatcagactattgactgtagcaactgaaccgagagagagtttagcggtaggaacagagtcaacaagtatctgaaacgcaactgtgagtagtgaaccgccacaactcccagtag

SEQ ID NO: 4149 - DNA, 630 bp, Arabidopsis thaliana
ccacggcgtggtcctatgcaagaccatgaagagagagttgaacgggtctgcacaacggcttgcgctacatcctgagcacgctttagcatgacctgaacacattttccagcattaatcatcatcaagacaaaagaaatacctgtccatgaatctatacatttaatttttccacatccattcactaaaaaagccgcaaccttttttctcatgatattacagtatttgcattgtgaaccacatatgctacctgtgtgccgcttgagacaggccgcagaatcgccccagcaccagccacttttgctttcgcgctggctatagaaggcaaacgagatcctatagcagttgcagaccgataaacaacactaaggaccctggtgtgttcaacctgatcacgtaggtcatttgaccatgaggacgaggttacctgccagtaaatagaccaaacaaggatcttatctgtgtcaaaaatgggtgtacgtataatacttacaagaaaatttgaaccatggtttgcaaaagtggatataaactggagaaccaggatgggaacaacccacagtaagagttaagaccatagtttccttttccattgaacacttgtgggagaacttttgtcacttgcaaagagtg

SEQ ID NO: 4150 - DNA, 781 bp, Arabidopsis thaliana
acatataaatatgtcacatgtcttatctgagtcgttgtttgtcacatgcttacacataaatgtaattatgtaactcgctaggggtccttacctcacctaatcatgttagcttttagaggaaaatttgatatgtataatgtattgtactgatttacgtcatcatattcatcacccatcatgatttaatacagaaaacaaatccatgattatcatctacacatttggaatatgattagtagttttagatcttctatttttagcaattatcgagagaggaccacaccgtgctagttatgcaagtcagattgatgtttgattttccttgcaaaaccagaaatacattacatttttaccccaaaataaaacaggtactacttttatttctatggtataagaattgcctaatgtaacgatctttgcccctataggtaaagattcgaatccgaaaacctcggaatgggcaaggcaacaagagggatcttgagcttcaagacaatcccaaacttctctttcaaatccaacacgtggccttccggtatcttccaatcgaacgaatgcaatagtgtcgcgagagtgtataaaaccatcctctcggcgagtgctacaccggcacaaattctccggccagatccaaatggaaaatagctataattggctccagtgaaatcacaagagttattatcaagaaacctctcaggacgaaactcagttggattccccacacattggggtcctctgaatagacaaacatttacgaagatcttagtactttagggatggt

SEQ ID NO: 4151 - DNA, 487 bp, Arabidopsis thaliana columbia
taacccccccatatcaaaataattcaatccaattcaactcacatatcaaaccatcatgttttattttattttctttaaattatgtgtttccagagagctatatgtttcgtttggcggcctcctgatgttgcttaagggagatccagctcacatttctcacttcgaactcgaccagaggctcttcctactcatgaggaagctgtgaggtgccattttttcggataaaaactgaattaatagagagcttgatctaatgtttaacttttactacttcaactcttgcaattttcatgaagcaactcttgtgcaaaagcaagtttttccgttccgttttaaatcccattccacaaattgactgctccggtccggtgaaatgtactatttgtagctctaagctattgatgaagataagcaattgagaccaagaacataacaaaaaacacagacaaagacacagttttttttttggtcaaggacacagttttgt

SEQ ID NO: 4152 - DNA, 573 bp, Arabidopsis thaliana columbia
gtatctcgagacattgaaacaggctcgacgattttgaagactttgatgaggatgacggcgagggaagagcaaaaagccatgtggatcatggtgagtgtgatcggaaaaggccaattgtacatcttcttgtcgaggatgtatttgttgtagacgatgacggtgaagctcaggaagatccagatcgcgacgtaggtgtaggagaggaggatcttcttgatgactccatcgctaagtgcaccggcttttcccattgtctcggaggaggaggagaacggaggaggacggtggtgcgcaggatagcgtcgtctgagggatgcaggataaaatgcgcagtttgtgtgttgtgtttttagagacttttggtgtgagagagtctgtctaatgtagcgagcgagagggttggcgtgactgtgctatggcctaaaggtgtttttctctttccaatttactaatgggcttatctataggcccactaacttatttactgtttaattaatcacttacctctttttattgactaattttgataggttggtgcagtttgtgaatattaaattcaatatgaattaaatt

SEQ ID NO: 4153 - DNA, 1115 bp, Arabidopsis thaliana
ctctcttgaaatgtcaacctggccacagtttaactttccttgaaatctttgctgggatccgtctttgctttctccagcaattcgattccatgtggttttccttcttacaaaatccacaccattttttgcctttgttgtcacgccaattactcttcatttctcctcgtcgtacaacgacttttccttctcgtgataaaacatgcaatgctccttcggtcatgctttcattacgagacgacacacacttttcatgtgccttcagagttcctatcaactctgttaccggcaacgatgtcagatccttcgtttgctccattacagcactatgctgtcaaatctttcgggaagagaaataaggaccttctgaacaatttgataacctgtcttctcttctccatgaactcttaactgatttgccaaatcaattaacttgttagtgaaaaacttgatgatgtctccttcattcatctttaagttttcataatccctcctaaacgactgcaagttgatcaagcgtacttctggagaaccttcaaattatgactccaatgcattccaaacatcctttgatgtggctgctggtgctatccgaggaaaaatctgatccgtgacggcagtttgcaagagttgcagcgccatcaaatcctttgatgatgaatcctcccatttggttttcaattgaacggcttatgtactgtgatatcgttgcatcagcatacttcgaacactagactccaccactttccacaacttctgtgttcttaagatggtcttcatcttaatccgccagaaagaataattatccccatcgaatatgggaatcacttgatttattgttgcatccatgatctcaggtttttaatagaacttttgtctgaatttttcttgtctttgtactcggattggcccttgaatcaatagagctctgataccatgttagaaacttaagtctcaaaacagaaacaaagtaaaacagagagaaaatcaatcaataagtaacttgaatcaaaagaaacttctattttattcaatagaaaagagaaactgaacaacttgtgtttcagtaatacaacttatgtttgaatagacttcaatcgggtttgaaagttaagaga

SEQ ID NO: 4154 - DNA, 561 bp, Arabidopsis thaliana columbia
atgtgtgtgagagatttgatttctctatttctctctccaaagaaagcttatctgcttcttggattgaccacaaagggatggctctggaagctgctttctccatgagtttttgctccttctctgtccctaaagcaatcttctgtgagagagaaacttcatcttttcaacgaatcacctcgagagcaaagggaattgcgggtgagagtcaagttcaaagctctgatggagttgagactcaagtcaaggaaacttctcccaaagtatttgataaactgcctgaaagaaatttagatacttggagcggtggcagagaaacagcaagaggactttcaggttcagtagtaagaaacactgtacgaaaagatactactttacgacatatctcaccttctagtcattcaacaaaggttagaggagataagccagagatttcagggggtgagaagaaagctattgtagatagaagcaaggcctacgtaaagctgaaatctttagggaaagaagtgagagacgcaggctatgtaccagagactaagtatgttcttcacgacattgatgaag

SEQ ID NO: 4155 - DNA, 543 bp, Arabidopsis thaliana columbia
cgactatccctgaggtcttgcaaacatcaaaatctttagccttagcaattaatttttcattttcatttctaaggctagcaagagatatgttcaattcttcaatcttagcaagcaaattatcatttctaagattgggaattggaacatcacaagcatttgaatcaaccttagcaattaaactagcattttcatttctaaggttgttgataacttcatggcatgtgcttagctcattagttaatttctcacctttttcaacttctagagcataagcatttttaaccttaacatgctttttgttttccttgattaggaagtcctcttgggtgtccaagaggtcatccttctcatggatggtactaatcaattcatttaactggtctttatgttgcatgtttaggttggcaaaaagagtacgcaaattatcttcctcatcactagcattatcatcgttagaggactcatatctagtggaggatttggttttaacgttctcgtttttgccgtcctttgccatgaggcacttgtagccgacgttgggga

SEQ ID NO: 4156 - DNA, 428 bp, Arabidopsis thaliana columbia
taccttttttattcgtcaggatcgttaaaagtgattcctttctgacaaattagggatttcgatttgtgggttgttcttctttttgcattaacatttgtctgtcccataaacttccccttgatttggatactagattaaacaattgttgattctgttggttaagaaaaatcatgtcttttcaattgattggttgtttcttgcatagatttgatttgtgatattgaatacgttgtactgattgccttgcttttctcttccaccagctggacaggttcataccgaacagatcagcgatgaattttgactatgctcactttgccctcactgaaggaagaaaaggtaaggatcagactgcagcggtaagttcccatccaaagaggcctacaggaagcaattggctgagaccatgaacttgaaccacacaagga

SEQ ID NO: 4157 - DNA, 818 bp, Arabidopsis thaliana
tgaagacatcccaaccgtaggacaattcgcgggtgtgtttaaagcattagaaggcttgccgcctccccagagcaatccttttgccatttaccttgaagttcgagctgtcccaattgcgaagtcccttaccgaatggcgcctgcagagttagcagaattgaaacagcagctaggagatcttcttgagaaaggatttatacgcatgagttcatcaccatggtgagacccggtgttgtttgtgaagaagaaggatggaagcatgcggttgtgtatcgactaccgtggcattaacaatattactatcaaggataagtactcgcttccaaggatcgacgaactcttggatcaactgagaggagctagttggttttcaaagatagatcttgcatccggatatcatcagattctcattgccgaaggagatataacaaagacggcatttcagactcgatatggacaatacgagttcgtggtcatgccctttggtctaactagcgcccctaccgcattcatgagattgatgaacgaagtacttcatgactacttggataagtttgtcatcatattcattgacgatatcctcgtttactcgcgaagtcaagaggaacaccactaccatttacaaaaggttctagaaagactcagagaacaacgactctttgcgaagttcagtaagtgcaagttttggcaaagagaaatcggatttctaggccatcgtgtttcggaacaaggagtcaccgcagaccctgagaagatcgcagccatccatgaatggccacagccaactcaatgcaacggaggttagaagttcttaggatt

SEQ ID NO: 4158 - DNA, 344 bp, Arabidopsis thaliana
gtgtgctctaaaggtggcaaacgctgtcgcaaaaagtacgctatgtcgcattgttattcctttttttggcagggtgataatgcccggcgtcaccggcaagtgcagagttacttaatgaatgggcgggtcagcagaccaacagggccagtggtgtaccagcgacggttggcgcgactgcgttagtcgcgctcgacggcctgcgtcagacgatcgcggatactggcgaggatcacactcccgccgccgccaacggtggcaagccccatatccaggcgaccgataccgcgaagtatcatctgacccaacccgccgacggcaatcatcgaggcgatgaccaccataga

SEQ ID NO: 4159 - DNA, 551 bp, Arabidopsis thaliana
gaatcaaggcttttgcgtgcgggcttcacgtcattggagagcctccatccgccatggaagctgtggccacactggtcaacattgctgctctagatcgtccggagatgagatttcagctcttccttctatattagctgagtgtgttggaagggagatagaggatgtttacagaggaagcgacaagggtatcttgagcgatgtagagcttctcaaagagatcactgatgcctcacgtggcgctgtttccgcctttgtggaaaaaacaacaaatagcaaaggacaggtggtggatgtgtctgacaagcttacctcgcttcttgggtttggaatcaatgagccatgggttgagtatttgtccaacaccaagttctacagggcgaacagagataagctcagaacagtgtttggtttccttggagagtgcctgaagttggtggtcatggacaacgaactagggagtctaatgcaagctttggaaggcaagtacgtcgagcctggccccggaggtgatcccatcagaaacccaaaggtcttccaaccggtaaaaacat

SEQ ID NO: 4160 - DNA, 568 bp, Arabidopsis thaliana columbia
ctatctctacgttggacactggtaaagttcctttatagactttcccaaatcctcctttaccaagaacctcagtatccttgaaaccctttgtagcaatatgcagatctttgaaagcaaacctatgaggaccaaactgaacttcccagtcctcaagaacttccaatagcttcttcctcttcaggaaaagccataaactgagactcaagataatgagtatgatgactcctgatacagttaaactgattgtcaaaatcccatttggactctggatccatggctgattataacgaggaattttgggaaggcgagaggggtctatatctggagtagtcccattcatcttgaacgtccatcccaatatatagtgagatgcagttaggtcccctgtagttgaagtgaatccaacatacataagttcaagcaaatatggagaaagatccttttcaagagacagaagtggaatctttggcttagggacataaagaggatgaagtgtgacattaatctgtttctgtttactgtcatactcaatccagatttgcataggttgccactgttaacaagagac

SEQ ID NO: 4161 - DNA, 512 bp, Arabidopsis thaliana
gtctgcacacctcattctactgctcatgtctcggtctccagatctgtccgccttggcttggaatttttgatggaggccttgcggagttcacaccattcgtatatgcaggtcttgcagagttcacaccattcatatgaccagatggcttaccaatgtggcactgattctgacttgaaccagcagatgtatatttcaatggtcggttcccactcttatatgggctcttctgctgcgtttgagtttgtgtgattacaggccaagtttggccttggacaggtggttgcccctgaagattcctggggttgttctgagtccaattctgatgtggtcgggattgtgttagtggtggccaatgtggtggattcggggtattgtagctctgtgaccaattgtgctgcatttgctggttctgtggcctagcctgaccatgcagattacggacattgtgcatactgttagcatgatgttgacttgggaggcttattgatctgtacaaagactcttgaatgtgt

SEQ ID NO: 4162 - DNA, 640 bp, Arabidopsis thaliana
cataacgccgtttcctccgtcgttgttgttaccggataatgcaaaagggtacacatacggatacggatgaaacggatcgtagccatccatcgtcatcatcgtcggctgttcctgaagcggttcgtttccagaagtagatccttgaaatgggttttggtaaaagcaagggtaaggacgaagaaacgtgttgttgtcgtcgaggatgggtggagagttagcgaggacgccgaggttacgacgagcagcggcgcgttcgcgtttgtgagcgttttggtgaccgccgagagcttgagatgtgtagaactttcgaggacagtactgacatggaaagagacggtgggaagctggatgtgcagaggaggagaaagagtggcgtttgcttgatgatcgagtttttgcaggacctacgaaatgaaggtaagacggtggtggttccgccatttttgagaggttcttaagctacagaggaagagagatagagaagatgagagtaaaagcaaataaaaagcgagagagagagagagaagagtgaaggatgtgtgtgggttttatgggaagggtttaagctgttgttgcttttgtttgtttgcgtcgtttgttgcagagaatatctgattctgaagttactcttttgccctca

SEQ ID NO: 4163 - DNA, 410 bp, Arabidopsis thaliana
gagctcgaattcgtatatggtgtgcatatgagaaagcccatcgttacaggtgatattgacgatcgcttccacatcatttaaacgatttttggggctctgaggtggaattcttccctcgaccgatggataagtcttagtccgccgaaggggcttagccggacaggaatcgctaatcttaatgaatttgtcgttatagaccagatagtgattccccggctgacgtaactcaggctgatgaaccacgtctcccggacgtagataccaggcatcgccttcctcttcggtcgaatcacatcctggcttaatcagtagcttaaaccatgtgttgccagtgttacttaccgttcctgtcaccttgtcgaaggaccatttaaactgaacctgacgtggtcgtactaccagaatggtat

SEQ ID NO: 4164 - DNA, 475 bp, Arabidopsis thaliana columbia
ctcatctttcttataggttctcaatctgggaagttaccacctttgcctcgctcagacagtaatggaaacgtaagttgatttttcatatatgttctgaaaactttcataaagatattgctcacagctatgtaactattactatggataacaggttgaacctgtggcttcagagagggagaggttacttcttagcagtatctccgacctccgtgctaggttagtcctcttcttcaagcaaagcttttgtttctaaagaataatgtagttagtctttctaagtggatcttcctgcaagctttaactgccaaaatcttcaggctggacgacttaacggaggaactcgatatagagaaatcaaaatacagccaagtaagttaacacattttcaactcgttaaaacgcaataatctgcttgttgtgtttcgtgtcatcaagcaaatctttcgtttatgtctgtgtgtcagctgcacagaaa

SEQ ID NO: 4165 - DNA, 462 bp, Arabidopsis thaliana
  unsure (1)..(462): unsure at all n locations
nnnnnnnnnnnnnnnnnnnnctaaagtggtgacggcaataaacagatcaacttgatcgatatgttcttcggccagtagttcttgatccgacgcatcaccaaaaaagacgatcgtattctgtaacttttccgccagttcggcagcgcgctgctgattacgttcgatgagtttaacgctgtaatctttttccagacgacgcgccagcnctgcaccgatattaccgccaccaaccagcatgatccgcttatacggtttttccagtcgctgtaattcactcatcaccgcgcggatatgctgtgaagcggcaataaagaacacttcatcaccagcttcaacaatggtcgaaccttgcggacgaatggggcgatcgtggcggaaaattgctgccacacgagtatcgatatgtggcatatgttcgcgcatggtcgaaagtgcattaccaatcagcgggctgccataata

SEQ ID NO: 4166 - DNA, 573 bp, Arabidopsis thaliana
tgaggaggaggaaataaccaaatttcgggtgggctaagacttgattaggattaccgagcccagccctcagagccaatccagttctagaagttaggtatttaggcagatgctcatttataaagaagaagaaccctagccgcttatatttggttgaggtttccaccgcattgtctctctccagacgaaaaatgggtgctttcagggtaagctctttgattccttgttgatttcaatgacactatttgctgctgattcaagtttcggactcgaagaaagaatctgatctaagctttgtctggtttcatttgcagtttcaccagtaccaggttgtgggaagagctctcccgacagagaaggatgtgcagcctaagatttacaggatgaagctctgggctacgaacgaggttcgtgccaaagtcaagttctggttagtaatcatattctttctctctctcttttccatttttgttgctgctgagaatgatatgagcttgatctttaattagagtgtgttatttggattaggtatttcttgaggaagctcaagaaggtgaagaagagtaatggacagat

SEQ ID NO: 4167 - DNA, 499 bp, Arabidopsis thaliana
tatgatgagatgtattattcaatataataataaaaagaatattatttcccacccaaacaaaaacataataaatcttataaacaatatcttaaaagaaaagaactatattgttatttttctgataagatcgataaaaaatgatacatactattccctcagtatggtttcacgaaatcctctctgcgcagcactctatacagatgagttttaccacgcatcagaatgcttctggataccgccagcaatgggaatttccagaacaaagatgttgaagaaggctggaaattggttgagaacctagctcaatcagatggtaattacaacgaggactgcgacaagaccatcagaggcacaaccgactctgatgacaaacacaggaaggagatcaaagcgctgaatgccaagctggacatgattcttcttagccagcagaagcatgtgcacttccttgttaaggacgaggattatcaagtccaatatggggagggaaagcagttag

SEQ ID NO: 4168 - DNA, 580 bp, Arabidopsis thaliana
cgacgggtgataaactccgcaaatggaattctgaagcttggcatagttgtgtgttctgtgatgaggaattggagacacgagatcacctttttttttcgtgtcccttttcctctcaaatctggtgctctttgacaaaaggtcttcttcatggtcgacgcatctcgagttggagccttatcactccacatctgctggatacatcccgtccgtatctacatctcttcactcttcgttatactttccaagcaacgatccacagtttatggcgagacgtaatagtaggcgacatggggggcttgctatcccggtaacgcaacttgcaaagatcatcgacaagaatattcgaaacagattcagcacggctataaagtctgggaatacacgactccaaggcgggctgcagttttggttcaaatccatagctagaaatcattctaattgttcttaactcttttagattcttttaaatcatgtcgcattcattgtaacaatcgtttttttgggtgaatatatttttacattctttcaaaaaaaaaaaaaaaaaaaaagaatgatgtttttacttcgagaaactgggtga

SEQ ID NO: 4169 - DNA, 511 bp, Arabidopsis thaliana
aaactgttgtcattactaatttcttttgcttgcagtttccttttttctgtagtgaccgagagtatatcattggccggagaatatgggagtctgggaagaagtattattgtgtcacaaaggtaatgtcatgctacaagaacttgtttttgccttccacagaacaagtgtgtagcattccacatgtctggagaattctaaatgtttacgccagaattctgtaggggacaaaacaccaaagtttaggtttgacaattctgaatgtctggagataattcatgggaccattgtctcttagtttctagttctattaagtttcattgcatcattactttatcagtgaaaaaaattgatcaaatagtatccaacatctgtttatcctaaacatcctattaagtttttatgctgaaacaaagctcaaagctcagagctaaggcgcttatcttctttgatattgcatggagtatgcttctacttctctaggagatgcgttttatggaaatatcaaagaaga

SEQ ID NO: 4170 - DNA, 645 bp, Arabidopsis thaliana
ccccatttctgaaaattctccttggtttgtttgtacagtataaagaacaaatttaagcatggatttacaaagaactttgatgttctcttgttgggttctgtctcttttgatcatcaaaacgacagcgtataacgagaaacagctgttccagccgcttgaaacggaaaacgcaaacgcgatgaccgcggttatggagcgaggattaaagacgcagcggcggccggagcacaagaacgcttatgcgacgatgatgtacatgggaacaccaagagactacgagttctacgttgcgacacgtgtcttgatcagatcgcttaagagtctccacgtggacgctgatatcgtcgttatagcctccctcgacgttcctatcaactggattcacgctctgtaagcgtctcatcatcttctttttcttcttctctctttacatcgtcaaaacgccaccgtttaattggttagaaaattctgaagtcttttttttttcttttcttctttgaatcaaggaaataacattattttgtagaatagtttttctacctcatttggattatacaaattaatatatactatgttttttaatttagagtaaagagaccatggaagagcagtaatctggggacagagcatgaattaatttttaaa

SEQ ID NO: 4171 - DNA, 519 bp, Arabidopsis thaliana
tgttctacgcctacaagtgatactaaagatattattaaaaaaacatttctttaaattatatcaaacaatatatgaacatttataattatgtatacagaaataaaacttagttgaaattttgaaaatacacaaaaatgaagactaaacgaatttcggcggccatctaagcaatgcttgaatgcctataccactttataaaacacttatttacttttggagacacgagatcacctcttttttcttgtccctattcctctcaaatctggtgctctttgacaaaaggtcttcttcatggtagaaacatctcgagttggagccttatcactccacatctgctcgattcatctcgtcagtatttacatctcttcactcttcgttatactttccaaacaacgatccacagtttatggcgagacgtaatagtaggcgacatgggaagcctgctatcccggtaatgaaacttgcaaagatcatcgagaaaaatatacgaaacagattcagcacggctataaattctgg

SEQ ID NO: 4172 - DNA, 532 bp, Arabidopsis thaliana columbia
tggatctttcttgtctaacgatgctcaaattctagacagattgcatctcaagcttaaccaaaagtattctgcttcggacatcaatttttgggttcaagtcgcggttaaccgatctgtgagagagctgagaatcgacttgtttggcaaaaccctagaattgccgtgttgtttgtgttcttgtataacactaaaagaattgactctacatgatttatgtatcaaggttgtcccggcttggtttcgcttgccatcactcaaaacgttgcaccttttgtcggttaagttctcgagtgacggatttgttgcaagtatttcaagaatttgccctgttcatgatcgaaaggttgtagacggaaccaaaggagtcaatgataagatcccaatatggatgtgcctaatttgaggagcttatcttttcgatctacgggagagctgagaattgagttgcttcgcaaaaccctaggattgccaacttgcttgagtagttcagaaacctaacagaattgatactccatggattaggtacaagggt

SEQ ID NO: 4173 - DNA, 564 bp, Arabidopsis thaliana
gaatgattttagactaataaaaaagatatacacacaaagggaatttaccagattggaatgatgaactttgcaaagcactttcatctctgctgcaaactctttagtttttgtagcagtcatccttttgacagcaacttcctgtgataagttaaaccaaatatgacatcaagtaaagccattacgacaactcaaaacaaggaaatgaaaaacaaacctgttctctaagtagaccaaagtatacagaaccatagtttccatgaccaagaagattagaatccgaaaactcatccgtagccgcacgaatttcttcataagtaaacaccataggcttctctatctcaaacattccatcaccaagagctacattcatacaagagaaaaaatccgtaaaacaattaaaaaagaaaactctttaaaagagaaaccacagatgatgaaaccaaaaaccaaacctttaggaatagcaacaacttgagtttcccattggtttgtctaaatccctgatctcagcagttataccgccagaacggaaaagaaccggatttctaaggatttggagttgtg

SEQ ID NO: 4174 - DNA, 1295 bp, Arabidopsis thaliana
attcaggtaattggagttgattggagagtgaagcagacagtgggagttgtgagagagtagcagcatctccatggttgtacatatacggcgagaagttgctaggattcaagtgttggatctggttcagatacgatggtgttaaactctgatgcaccaagtttttgttttgttgtttctgcgactcaacaatacgaagcctttcttgcagagtagaaagagtccgttctaaggaatgaatcaattgagagagttgttgaggagagtaatgatcaaagtcaggataccaattcttcacataattcttctttttcgaattcgtcttccccttgtcatttgtctttgtctttgtccttgtccttctccttctcgatgaagtcatgaagattgagactcttcttgcgttttgtggcctctttatatctcgaagccatgtctttcactgtctctctatccttaggccatgttctcagatcaccgtctggtccgtaatagatgacgcaaacgtcaatagcacagagaatcgaaagctcttctgctttcttaaagattgttttaagtctgtttgttaaacttgttggattacatgacgaagaagaagaagcttgcttcatcgtgattttgccttgattcgccaagcaagaaactagggttttttttttctccgacagagagataacacacaaagaagaagcagaattgtggaattgatggtgaaagattgtgaaacttcactcaatatgtttatatagattgccttggtgcctacgggaacaagcatacggtcggcgacgcgtgaagaagataaaagcagtatctaacctcaaatctaggttacctcttctcttattatttagcttatagtatatattacgtcaaataagataattgtttttcaagtttcattttattatttttataaattttacgtttatgtttttagaatatgtttctaaaaggttagttgtataaaacccaactttcttcagttgaaaatgctgtgaacatcttccacaatttttacaaaaaaaatctaaacaaaacataatgttgcctcaaccataagaaaacagataacaatctaacaaaacacactgtttgccttacaaaattcgaacccgtcggtttcactcgtttcttgaacccatcgacgacgagttaacgaccttttccaccctgcaagaatgttaacatatcaaacctgatatctaacatctacctacattgcatctatatacagggggatagtatttcacaccttatgaggtggggttcctggtctaggaacattgttgttg

SEQ ID NO: 4175 - DNA, 475 bp, Arabidopsis thaliana columbia
gttagaaattccatcaccccctcccttcgcggatccaaccacatcaggcaatagaatcctccaaggagttaactacgcgtctgcagctgctggcatcctcgatgtatcaggctacaactatgtatgtttttgttcaaagatatgttagtgttaaatggatagaggaatgataatgtggtgtgcagggtggaagattcagcctgaaccagcaaatggtgaatctagagacgacactaagccaactgcgaacgatgatgagtccccaaaactttacggattacttagcaaggtcgcttgtggttctcgtttttggaagcaatgactatatcaacaactaccttatgcctaatctctacgattccagcataagattcagaccacctgactttgccaatctacttctcagtcaatacgctcgccagcttctggtaatgttttacatcaaatcttcatatggtattattttattaatcaa

SEQ ID NO: 4176 - DNA, 485 bp, Arabidopsis thaliana columbia
tgctaagagctgcttgaatcagaaccggcccttcaacgaaattgtttgaaattctacaatctgatggtgatatcatcagttgtggatgtcaggaacaggtaagcccttcaactgcaactgtttgtgcatccattgccagttttctggggttacttctccaccgagagcacggatgacagatccaccactgcatgatcccactttgcaacattcttccaaagacaatccctttattagtccgtacagaaacccgcttgcgaataggtcaccggctcctgtggcatcagttgctactgtctctcctatggctgatatatgtaccacctgatcacacgtaaggagatgaaaatactaattcgctatgaactttaaagagttaaattaaggctaagtgaaatgtaaagctacattataagctaccacgttttttaggaaagacaaacctctttatcatgttttgcaatgcacctttcgaccctaaagtt

SEQ ID NO: 4177 - DNA, 590 bp, Arabidopsis thaliana columbia
catgtgtcatggtccactttaatgattatacatgactggtattatgattggcaaaccaatctagggatgataaaagtaactaaatctacagcgtgctttccagttcttactttttttagttagaaattttgatctaacattcagaactgcttgccttaataaggttcttgaaggaagatcttacaggctgcaacatccttgggttgggatagtgaaccgttcacaagcagatattaataagaatgtcgatatgatgcttgcaagacgcaaggaacgagaatattttgataccagtcctgactatggtcacttagccagcaaaatgggttcagaatatctggcaaagctgctctctaaggtattcaatcaaaggctgaaatacttgagactttatcggattgtttattcattgttattcatttgatttatggtctttgtttttttatgcagcacttggagtctgttatcaggacccgtattccaagtatactatccttaataaacaaaagcattgaagaacttgaaagagagttagactgaatgggtcggcctgtcgcagttgatgctggggtgagagagtcaattatgtg

SEQ ID NO: 4178 - DNA, 511 bp, Arabidopsis thaliana
ccataattcacacacacaaaaacgacaacaagattgtaatgaaaaaaggaacacataaatattcttcatttaaacgttccatatgtgtaatagttttacctggtgcggcatacccaatggttcctctaacaccagctgagcttagttggttgaagaaagactcctggtcgaatttgaggagaagacgagcgagaccgaagtcgctaacatgggcagttagatcatcgtcgagaagtatgttgcttggcttaagatcgcaatgagctataggctcatgacagtgaacatgaagatagtccaaaacagaagccacgtctatggcaatgttaagcctttcaagaagtgtcaaagttcttgagggcctatgaatctcttcgacttcctctgggtgcagccatttatccaaacttccattcggcatgaactcatagatgagagctctgaattcgttaccttggaaatcaatactagcgcaacgtgtcaatagtttcacgagattacgatgccttat

SEQ ID NO: 4179 - DNA, 439 bp, Arabidopsis thaliana columbia
tcaacagagtgagcaagactttacaagctgatgacattgatattgatgttgctattcttgagctgaaaggattagtttcatacttacaaaaatatagagagacatgatttgagaaagcaaagtctgaggctatacgaattgcagaggctatggatatagaagctgaatttcctgtgaaaaagaagaagatcattagaagaaagaagcattttgatcatgggaatatgaaattgtcaacagaggaggatttcagaattaattacttccttacactcatagatcaagctctaatttctcttgagtcaaggtttgagcaattccaaaggtatgaacaaacttttggatttttgtttgatttacaaaaattgacatatgcaaatgatgaaaacttgatggcatcatgtgtgaatcttgaatcatcccttaagcatggtgagca

SEQ ID NO: 4180 - DNA, 555 bp, Arabidopsis thaliana
ctagtactgatttccaaggaaacgaattcagagcgcttatctatgagtacttgccgaatggaagcgtggatatgtggctgcacccagaggaagtcgaagagatacgtaggcccccacgaaccttgacacttcttgaaaggcttaatattgtcatagacgtggcttctgttttggactatcttcatgttcactgtcatgagcctatagctcattgcgatctcaagccaagcaacgtccttctagaagatgatttgaccgcccatgttagtgattttggtctggctcggcttctactcaaattcgacaaggagtcattccttaaccaactaagctcagccggagttagaggaaccatcggctatgccgcaccaggtaaaaatatcacacatctgtaatgttctatgaagaaacttggtatatattttatcgttacaatcttgttctgtgaattatggtgcagaatatggaatgggaggacaacatcaatacatggcgatgtgtatagctttggggttcccttttaaaatgttcaccgggaacgacaactgatgagtt

SEQ ID NO: 4181 - DNA, 565 bp, Arabidopsis thaliana columbia
tctagaattctgtgaagaactgacctgtaatactgatttaactctgcgtcatttcccttgttttcaggattttgtgcgacaagaagcctttatcttgcttcacaatgctttggaaggctgcggtggtacagctgctgccactgcatactcagaagcataccgtctcatcactagattttccactttggataaatcattcgttgtgagaattgctgctgctcgttgtttgaaggccttttctaacattggaggacctggtcttggtactagcgaatttgatactttagcctcttactgtgtcaaggtaagttagtgaaacctgtatgtttttaaatcgctcttctttcaatttcttggtgggctgatgtctatctctgaatatatacatacctctgttaacgtagggtattgaagattcagaatcatcggtccgtgatgcatttgcagaggctttgggctcattgcttgcactaggaatgcatcctgaagcgcatgtaggcttattttactagtaatttgcgtccttgtcttcataattttgtggttatggaatttggtttttgtt

SEQ ID NO: 4182 - DNA, 885 bp, Arabidopsis thaliana
  unsure (1)..(885): unsure at all n locations
atgttcattgtcatgaacctatagctcattgcgatcttaagccaagcaacgtccttctagacgatgatctaaccgcccatgttagtgactttggtctagctcgtcttctcctcaaattcgacgaggagtccttcttcaaccaactaagctcagccggtgttagaggaaccatcggctatgcgcaccaggtatactatcacacatctgtagcattatatgaagaaaattagtatctatcctttctttttatcattacagtcttcttaacattgtttctatgaaatatggtgcagagtatggagtgggaggacagccatctataaatggtgatgtatatagttttgggattctccttttagaaatgttcactggaaaaagaccaaccaatgagctatttggaggaaactttaccctgaacagctacactaagtcggcattgcggnaaagaatattggacattgtagacgaatcaattcttcacattggtctcagagtcggtttccctgttgttgagtgcttgacaatggtttttgaggtgggccttaggtgttgtgaagaatctcctatgagcctattggcaacgagtatagtcgtcaaggagttgatctcaatcagagagaggttctttaaagccagtagaacgacttggcgttgaagtgtcaggttttgtctacaaactttgcaacccaataaaaaggcttataatatcttatgtcataatattggggttttgtctaagaatgcttgtagaatattgctaatgaaatgcttgtgttaattaataaaaatgtatgaatgttgtggtaccaattttatttggagacaacgtagctttatagttgcaaatccacattgatcccagtaccgcggagatcggattatatg

SEQ ID NO: 4183 - DNA, 642 bp, Arabidopsis thaliana
ccctgtgattccgcgtccaagccccaatggtgagccagtggcaggccttgtgcaaggtaaacttatctctctctctttctctctacttcttgtatatttctatttagtcgtaatctgactgtctgatatatttaatgtgcaggtgtttttgaagtatgccgatacagatggctcgactagggcaagattcgggatgaatggtaggaaatttggaggaaatgaagtcgttgcagtgtattaccctgaagacaagtttgaacagggtgattatggagcctgatcacttctttgtttgctttctattacttaaaagttaagtactttgcttcagtttcaagacccttttgcgtgattgtaagagtatgagattatcgacacgttgcttattataacgtttttatctcatatctttggtctatttcttaaatatttatctcaaaaattattcacagaataacatcatgagtccctcgtaaaacatcattcgtctctcgtaaatgtgacatatgttctaaatcaacacaagaagttgagtactctctctattgaaatattcaagtagtttggttctcttctgatagaagaaaaaagaaagaaaaagaagcaaacttgtaaaacccaaaaatctctgttaagcactaa

SEQ ID NO: 4184 - DNA, 594 bp, Arabidopsis thaliana
gcacttaacctcataaacgacttctactccacaggtattgagcaagcccatatctcgagtggttatgataattcggctcccaggaccaaaccagtttttctcttttgccaaagcatgcacctgcgccactttatccacaccatcaagcacaagaaaaaccttttgattcccaagtctcttttttatctcttggcatccagcttccacgctccataacctaatatcatcacagaggatactggagagcaattctttttgcaaatgctttagatcatggccattgtctttactaacactcttaatgttttctatgaaacaatgagctggaaatttaggtgagagctggtcatagagacacttaacaatggaggttttccaattcctcccattccccagattcctaccaggagaacctcattggattcctgatccaagagatgattaagaccttccatgtgagctttcatcccaacaatatttccagagtctattttatgcatcaatgtcacacgtcttgaaatatctctagcaatttctccaaccattatagcgtcatcaacactaataatattgaaattgagcaggaaaattata

SEQ ID NO: 4185 - DNA, 918 bp, Arabidopsis thaliana
gaattaaactcggaaagtatcgattgacatggtgagacatagctgtctctcagttgacatcggcaaaagaatatttttcaagtggcctagtgataatttaaaatatatggatatatctataaactattttacttagatcatcaatgtaaattgtgaaaggaaaacaaattcatttttcttgataataacattgagatcactagagaagagagattgaggtttgattaatttagtgaattcagcatggaaaaagtggtgctacgggttcatgaccatcctttgttaccctttgaacgcttttattttggccgttgttccgggtgctcacgtgaaggctacttttatggaggctaccgttgcaatgagttggcgtgttttgcggtgttccataaggagtgcgctgagtccaaacccgagatcagccaccatgcccatcccaagcatctgcttaagcttggcaatagacgtcaacgttgtcatttgtgtgaacggccggtgggaattggttatttttgttcgatatgtgactttggtatgcatttggtttgtgcgaagtccccaccactctcacttcagccacaactctctagtattgagaattacaaggtgcatgaacatcctcttaaacctttcaaaacagcatggcttgcagaaactggcaattgcaaagggtgtaactacattatcggcaatggagatagcgctcctttttatgaatgtcgtcggtgtaaactttacattcatgtgacttgccttgagctctttttcaccacagatgcacgccacaactctcatctcaaacaccctctcaaatatctcaaaaatggacccccgacgtacgccgaccataaatgccttctttgcggaagagagtttgaagatcaacaaggccaaaaatatgagctttatcactgtgat

SEQ ID NO: 4186 - DNA, 476 bp, Arabidopsis thaliana
taggcaaatctcgtaagccatgacgttcatcttttatcttgtacacaatgtaaactgaataatgagttcctagggataagatttgggtactcatactaccacccatctggaaagaacgattattgagaagctctggtaccttttcaaaactgcataacacatttgagcaacattttttcaatcatatgttcatgaattggaaatataaatccgaaatacgcaatataatgacatctatatacatattgttattatgtactaaatgattgatcgtcaattcgtcagtatagtaatgtattgtcttaaaattttatttatattttgaaacaataaagccaattgatttacaactaaatttcggttcgtttcaagttcaagcatttcgatttagttatgctcagtgtttttttatataataacaaggagtcattacaatcgagatttaagtaataaatacctagattcacaaagttcaa

SEQ ID NO: 4187 - DNA, 626 bp, Arabidopsis thaliana
tctttcgtagacacataatttcccctcatcatcacaattacaatcaggattacacttcaaagcttggtaactagtagataactctggttgaaactttggatcctgaaacagtagtaatcacaaatcccttaagcaatgatatactacaaaccaaaagcttaatcacatttaggaaaaagataattcacctgatgcttcccacactgtttacaagtagagcaaggaacgtaagtaacagtacttccagtatcaacaatcaaagcaaactcttgtggtggtgttccaatccataatcgtgtagtgtagtagctgcataaacatgagagtcataaacctaggatttgctggaggactaaatggtaattaaatcgaaaagacgaacccgttggagaggaggtcatcgtagagtttcatgtgagcgttagggagctgagattgatgaaggcgacggcggcgaaaatcctcgactcgcggtcgcgagtggtaaggaagagtagctaagagggaaaatcatcggcgattcatcggcgggtggttagatcgaagaagaatatagagatggtggtggtggtaaagaggagaaggaggagggaagatcgatccgatgggtggtggattggggtttg

SEQ ID NO: 4188 - DNA, 500 bp, Arabidopsis thaliana
gatggttgaatttgtgtagtcggttttgccaagtaatccaaaacttatattgttcaaagatacgttaaccaatggaaccatctgcaaagtacatagatacaccattattttcacacagataaatatgccacacagatttgtttggttctcttaccagtcccccatagtcatcaaatagcgcagagaaaaagtcccaatttctgcatgaatgaccatgttatcagttcccccaggcaaaccctggtctgctagctttaaagcaaatctccttggtggttttttcaaaccactacggacaataaaggtcttcaactcattccctatgctccatatactaaatggttctacctctgccagacatcagaggtatccacaaactttcatccgcaaaatgatcaccagctaccatatcgctacgagcgcatcttaatttggtgaaaatatatggtttcggtgagctttacatgcacacaaccaaagaaacaaaaccggtggagctg

SEQ ID NO: 4189 - DNA, 348 bp, Arabidopsis thaliana columbia
tccctcatatttttctttagaaaacaataggaacttcattgatgatatttaattcagcttggtttggtaaatactctagttcgctagagtatagcacattgacaaataaagtatagtacattggcaattgtttttttgattagttgataagagtggagcagttaaagaaaatttggttgagttattcatgtcaaagaaatatcttctttatctctgaactctgcaattgataggctgtttgctaaacattggttaagtttgacagttgagaggacaaggttatgatagagcaagtaacatgaaaactgagttcaatgggcttagatcattggatgctagggaaaatac

SEQ ID NO: 4190 - DNA, 560 bp, Arabidopsis thaliana columbia
  unsure (1)..(560): unsure at all n locations
gtacctgactgacgccacaataggtgcaaataatggcggcaggaatggccggaaaaagaatggcaagctttgttccgagaatgacttcttggagattagagagaaaatctttaagacctttgtatggaaccttctgaatcactcggaggtctgattttttcctcaaagaagaagaagacatgttgtgagcggttcttccaagtcttagttctctgctcgatcctttcgccgttatgcttgggtttccgttctcagctactgaccacggctctgtcacgattcccgccatttctctactgactcaaaactttgtaaattctgagacacaaacgaaggtttttttgtgtctcttcgaattttgctttgctgattctttatgtttgttttgtaaagaaatggcgtcatgatttgtttaaatactactgattagttttgtttattgggtcaccaaggcaacttccacgaagtttcccaagtttccctttgagattttaattatttaattttttgggatttatggttttaatatttggaaccanaatcagaaatggttaatatag

SEQ ID NO: 4191 - DNA, 629 bp, Arabidopsis thaliana columbia
cctcatcgcgaaaaacggaacattctacaatctcaacggtaaaaactaccatggaaaagaggctttaaagagattccttaaacagaacgaatctgatcaagaagagctcatgaagaagctccaagacaagctcatcgccgatgaagctgcagataaggaaactgaatctgaatctgaggaagaagattccctgagagttgtggtttcacctgacaacacagatgatgaatcaccagctcttgttgttggagctgctgcagtggttgttgaggcagcatgattagcgacctccggtttagtataatattcttcctttggcctagagttttccggtttaacgcggtttggattcggtttccttctcctcatgtaatttatgtgctagttaaatcacatttacatataaccgttgttgtgggtgagaaaattttgtagtttttatggggaaatttaatgttaacgaaaagcagaatatttaaatgttattgatcaattttacttccaccaaaatgctattattatatagtaactatattatagttttagatattagacctcacaaatgacatatcacattaagttaatcaaaagatgtcttgcctggagatacagtttcttgggacaaatag

SEQ ID NO: 4192 - DNA, 601 bp, Arabidopsis thaliana columbia
gatcttttttctttcttcagtgttgtttgtgactgtgacatatagttcatgtttctttttggatgctctctgtgtcaaacaaaaaaacagagcaagttgagattttttggaaatttcctacatcaacttgcaaagtctgaatctgtgtctgttgaatctttttttacaggaagagtagtagtatcttctttttcacagtctcatggctacaataaacgatattggagtagcagcagcaatcaatatagtcacagcatttgcttttctcttagcttttgctatattcaggattcaaccagtaaatgacagagtctatttccctaaatggtatctcaagggcttaagaagtagttctatacaaactggtggctttggtagcaaattcatcaatttggacttcaggtcctatattcgtttcctcaattggatgcctgaagcacttaaaatgccagaaccggaactcgtcgatcacgctggactcgattctgttgtctacttgaggatctacttactcgggtatatatatatatactgatctatccccaagccctcttcttttttttttctggtttaagagatttgagttcttaatggataattt

SEQ ID NO: 4193 - DNA, 500 bp, Arabidopsis thaliana columbia
gagcttacagtttacttgctgtggttctatatcacactggtgactttaaccaggtctgtatatattatatggttagattgtgatatctttcctttatatgacaattgtgaaactaaaagattttgttaaaacaggctacaatatatcagcaaaaggctttagacatcaatgagagggaacttggacttgatcatccagatacaatgaagagttatggtgatcttgctgtcttctattataggcttcagcatacagagctggctctcaagtaagtttagcactcttgattttaaaagaatcgcgaggttagatggtttaaatgtttgatgtctctttccatcatctaaacctggatatgattgtttttgttaggtatgttaagcgtgcgttgtatctcttacatctcacatgcggtccatctcatccaaatactgctgctacatacatcaatgtagccatgatggaggaaggtctaggaaatgtgcatgttgccttgaggt

SEQ ID NO: 4194 - DNA, 623 bp, Arabidopsis thaliana
tcgttaaccgggtcgccttcccgaaccaaataagagctctctgtgtacagacacggcttcaaccgctcacagattgcatcgagcagcctctcatccatattctcaaacaatggaacctttccataagaaaaatagaacaagatggtttcatttatgaatcaagattagaaaaaggcttttaaagtaagattcaacttaccctccgaaccaaagccagacagagatggcgtttgatatctcttctcagatcctttgggaggttctgaaccaaattctcttcatcaactccgcgtgtctccaaccatttgtactggtcatatcgtctgactcgttctcgcagttccggtggaagcattcgatgatgcatccactgttctgaatcacgtcttttcactctcatttcttcaagccggattgtaagggattgaagataagtctgcatgtttccaataagaagagcaaagagaagaagtccagcaatggcaagtgctatggagaatataacttctccagggtatgtgctggtttcaagcccttgaccaagagtgctgcatttgacatcgacaaagttactaatgcaacagagacttttcataatgactatagaagacggattctttaga

SEQ ID NO: 4195 - DNA, 767 bp, Arabidopsis thaliana
cttcttcttcctcttcttttctaagttgctccaatttcttcctctttatgtaccgtcgccatgctgcttgcatgaagcaagcggcccaagtcctccattgctgtgaatagaatctgaacgtgtgttgtacttgtctgctatggagtctcctgaactggcttgcacgaatttcagctcatcggctatcagagcgaaacttccacttcggttaaggccttcacggttcttgtagaggaagggaggttagaaccggatttgggatcaagcgcccatgtcaaaagctcgtcaccgcagaaatctccttctttaagtaaactccggttgtagaatccgcttctaccgccatcagtggttacactttcgagcctaccacggataatgaagagcatctcgttgactggatctccctcacgaaccaagtacgacttctcagtgaacagacatggcttaagcctctcacagattgcatctaacagcctctcatccatattctcaaacaatggaacctttgccataggaaaaagaaaacggatttaaaaagacttttacgaagatgttaaatcgagtgaattacgaaaagaaacttactcttcggactaacgcgagacagagatgacgtttgatatctcttctaagatcctttgggagattctgaacaagattctcttcatcaactccacgcgtctccaaccacttgtactggtcatatcgtctaacccgttcccgcagttctggtggaagcattcgatgatgcatccactgttctg

SEQ ID NO: 4196 - DNA, 565 bp, Arabidopsis thaliana columbia
cgtgcctaatcttattgccaacacttttttttctctaaatcttcttccctttcatactctgtcaggagtgcaatctttaccagcttatgaaggatcgccctaagcattttgcagaatctgatatccgaaattggtgcttccaggtcttccaaggcctttcttatatgcatcagcgtggatacttccaccgtgatcttaagccaggtaactaatagccttgagtttccaatcaacatcagcacatgtgcgatcgagatggactgttttgtatctctgtttcagggttgttcatcacagtcaatttcaattagtttgtcaataaaacatgtgtaattttttttctgacgcagaaaatctattggtctcgaaagatgtcattaagattgctgatcttggcctggcccgggagatcgactcgagtccaccttatacagaatatgtctctacacgctggtaagatttgctctcctgattgctctgtcgaaattacagaaaatcaatatatatatatatatatacacagagtgatcatatattgatggtgattggcacatgtgttgatttg

SEQ ID NO: 4197 - DNA, 533 bp, Arabidopsis thaliana columbia
tgtatattttgtaacattgtaggaggaggaattgggaagaccagtgagtgttggtgaggtcttcagtaagactcatacaaaaccaaaatggtacgtatgtcgatcgaaaggtagaaaagattgctcagacctatcaaaagaaagtgcaagaaaagttgacagagcttgaggcggagacttctgctgtttcagacggtacttcacaacctcgagagctcacagttgatgaatgtacaaccatctttcttcaggtacacgtccaagtagttatcatccgtagttatagaatcttagattgttttctgacttcaagaaatcctctaaacttattgttttttttttctgacgtgtcacagtccactaagaaggattcaagaggaactctttatggagttgggaacatgaaggggatttttctcaatggaaaacacaagcaattgagagattctttttcctctatggcaatgtaagaacagctgaaggaagctcatcataaaatccgaagagcatgctgcatataatgacaccgtgat

SEQ ID NO: 4198 - DNA, 506 bp, Arabidopsis thaliana columbia
caaagaaaaccagatcaatgccaacaaactttatctctgcacataacaaatcgcttgcacatagccatctcctttgtagaatctacaatttggtttgccaagtgtttctgacaatgttccacaatcagcgtgtaccatgtaattctgtatgtactgtaaaacattaactttgcaaacaagaatgaagaagcaatgtacaaattacaaaacataagttttacattttattcatcataacaaaaggtttgaagtgattgacattgtagccgtttgcatagcacaaaagttgtgtcgctagatgccggtttcaaaaacaaaagatattacggccaggaaacacgccatttttgtatcgacaaaagattcgagtgagaggcattcactaacattgactcttaaaataattcatccttactgagttttggttgtcaccgtgtcatctggctttggcattggttggattctttgataaggcttcgtggtaagagtacacccctaagagcagc

SEQ ID NO: 4199 - DNA, 575 bp, Arabidopsis thaliana
cagatatgtgagcagtaagctttatcttctcattacatattgcattctatacagttacaacatcagaatccctgtggtggtatactataaaaacgtaagataccattgtcttttggctaatgaaggatagctacttacatgtattgttgtctcaggtactccatgacaaaggctttctgcatagctttcctcatgacattcttctcggtgtttgacgttcctgtgttttggccaattctgctgtgctattggatcgttctctttgttctcaccatgagacgccagatcgcccacatgatcaagtacaaatacatccctttcagcttcggcaaacaggtaaaacttctaactgattgcggttttaacttgcaagtaaattcatccatttgtctactcatgcatgtaacatttagcaactgaatttatgatagctacaccaacttatccacattcatatcggtcgatacaagatacttgatgaatagtgttatagattttgagattaattaggctacttccaaaaagtctttgtattcttggtaataattgttggtttgtgtggcagaaatatggtg

SEQ ID NO: 4200 - DNA, 601 bp, Arabidopsis thaliana
ccttcgccgtcttgcaactccagagaattcttcccgatgcattgcctccggtacagtatctcgtgtcgaggtggggatctgatgtgaattcaatgggatcttatagctatgatatcgtgggcaaacctcatgatctctacgagaggcttagggttccagtggataacttattctttgccggtgaagcgacgagctcgagcttcccgggctcggttcacggcgcttattcaactggattgatggcagctgaagattgtaggatgcgagttctggagcggtatggtgagttggatctgttccagcctgtgatgggcgaggaaggacctgcctctgtacctcttcttatatctcgtctctaaactccatcagttatcgtttactagaaggaacctcaagtgatgattgtcttaatatgaaactaaaattattctcgtgtcggatcgtttaaaacattcccagtcttattttctcagtgtttttaattcaataaattggaacattatatccttgtgatattatttatatatgataatcatctttaagaattcaagtactattttcttttctcacttgtgctaactaatataaacaccaatcttga

SEQ ID NO: 4201 - DNA, 562 bp, Arabidopsis thaliana
tgaaacctattatatttctctagggtcaacgaaaatagacaatccaggtggtgacttggtccagtctacgccgtcatcgtcatatcggagacgtttcaaacaccacaaatcctccggcgagacaccttccaatgtggaatcccaactctgagcggctcacagctcgccacctcagcagccacgacggcacaaccgctttttctagctaagttatgtgcgtgtgagcaaagcgcctccaccatctccgccgctcgtggcccttcgccaccgataccgtacataaaatgcatcgcgaacgacttgaaaagattgggaaacgacgggattttcaaaaacggaaacgctccgtcgaaaacgcgcggttgacttagctaacatgcgtttaagacgcgacgctcctttgacttgaagtctgtaaacatctttactgttccaaatacttataacggcccatgacccggtctggtcgggtaacgaccggaaacgttgcacctccacgtggcacagcagataagtgccgagggagagtttgttggtgaggattgagttgatgtccgaagga

SEQ ID NO: 4202 - DNA, 1412 bp, Arabidopsis thaliana
atagtagccttttcttcggatctgttgttttctcacaaacttggcaccaataaagaccagtagaccacttgcatttttctcataacaaagggtgagaatatggtcatcatcgtcatgcttaactttgtaaggaagagtggcacaacgaaagcataaagaaaaatcacattccgcataacttaaacttctaatataacataattttgtttgacatattgaacacgcttgcgcagttactcgttcatagattaatgatataggaaactaggcattgatatatggttagatacgtggcaatacatgagtggagacagtagctgtgagacgtggcaagagaagattggtcgatgggagtgttagaggaagaatcgagatgcagagatatatagctaatgaagatcatttgcagaagataagaagattttggatttgttgtttatagtttccttttggattctctctgagaatcgttcctcatcgttcgccggagtttcatgttgaactcttgtagatgagaagttgatatcgcgtttcatgaacgttgtatcaatctgtcattttcattaatcgaagcattctatttcgttactctgttttccgttatcactggtatcagagccaatcgtgtcctcggtggagatcaaagctacttgcacgatgaagagtcgtcggcgcatatcgtgggaagagataaacgagagctggttgaatggcttatgtgtgttttgcaaagagccagaagctcctgattaccacctgaaacacaagaacttagggcttcttatgatctatggtaatgacgatcatctctctaatggtggaattggtgaatcaattgatcatcgttcaatgaatttggtacatgaggaacgagaggagcactccaagttggataatcacaaagatttagtacagagaactatcatggaggaacgagaggagcactccaattctgagattctgaaaagtgttgaacctagggaagtaaatttcgggttagaaaatcttgattctgtggtgatgaacgagtatcaggagcaagattgggttaaacagaacatgaataagaggtttgaggttgaagatgatgttgataggggtcagaaattgttgagtattacagaaaattgcagtgcacaccaagtgttcggtaaaacgtctcaacatgaagaaaagctggaaataaagaagaaagcgaaaggattcaaatcatggatgttcaaattcaaacttgctaagaaaacaataaggaaacgagacaataagggttggttcccacttggagcagaaaagtgggttggaggaagacaagcctatgaaattgcagtttgttcacatcaggtgaaagaacatcacatagggatgaagctcttttgcgggaaaaagtcattagcgagagatgtgtgttgagt

SEQ ID NO: 4203 - DNA, 284 bp, Arabidopsis thaliana
caaagaccatgaacggtgaaaagggccatgaccatgtggccgagccatatatggtatttgatgcttgactccgaggttaatcccattgccggtagcaacgatgacccacgagccaccggtaagaacaagaacgccaaacatatgtttccgatcagtcctaaccttagcgccgctgattccagcttcgcttgccaccttaattcatatgtgatcaaccgattaactatgttaagtattttagaaagaaaattgttcctttttatgaataatttgtcaggagattt

SEQ ID NO: 4204 - DNA, 524 bp, Arabidopsis thaliana
taagaatttatgctaacacacatgtcagtaggtcagaggcaagataccgtaatgatagattagaagtgccttcaaggggattcaatgggtcaaacagacagttaagagtgaatgcttcaaagactggtggcctgaatggtatcaagtctcatgagaagtttcaatgttgcgacaacagaatcagtgagaggtttgacttcagttcttgcagttgcaaaccaagttgtgaatatcgggcaaaagtagaacctaaaaccgctggatccagaagcacgcgagaaccaaaaaccatatccaattcggactctgctcttgatgcctccaagccagtgttccaaggcaacaggtatactcaaccagactatactcgtgagttaagacttaaaagcaaggttggagttggccaaatcctctactactagagatcactacatcaaaacaagtttgggacccatggaccaaagaagtcccacgaacaactcgtctctgaagtacagctagatgttcacatttaggctgagaga

SEQ ID NO: 4205 - DNA, 565 bp, Arabidopsis thaliana
catcttgctttagtaagtttttagagaatgatcttgctggttatgcagaacctcttccacgccctccggttgttcctcctctgttagacgagactgaaccaaatcctcataacgtctatgtctggccatggatggggattgttgttaaccctttgaaagaaacggatgacaaggagcttctacttgattcagtatattggctgcagaccctttccaaattcaagcctgttgaagtgaatgccttttgggtcgaacaagattcgattgttggggttattgctaagtttgacagtgactggagtgggtttgctgctgccacagagcttgaaaaggaatttgagacccaagggtcctgcaaaaaagagtggactgagaggagtggagattcagagtcaaaggcttatggttggtgtgcacgtgcagacgactttcaatctcaaggtccaataggtgagtacctctccaaggagggacgctaagaacagtttcagatattttcaaaacaatgtgcaggatagaacactcttctggacgtacttcaaatatgattgatatgacaacgaag

SEQ ID NO: 4206 - DNA, 1067 bp, Arabidopsis thaliana
ctaaccttttgtcatttccaagtcctcttcatctttattgctttttttattccctaactcttgttttattggcatagaaattttcttcggatcctcctcactgtctctctatactccactcttcatcaagcgttgggtcatcgccgtcttccctttccttccctctctaacgtaagctccagatttcttctattctctgttttctcattgaaatccctagtaatgattttctctattctctgggcatttcgtgcttcaatgcctttactcacttcttctttaagaaaatattttggatttctctatgttccttatcatgcatgcgacatgcgtgaatctcttagctgagttttgtaaatgctgtatcaatttcgtctcttttgctttctctagtgtatcttttccttaagttcttccctaggggtttctcttgctctgaagatttccatactatcgactcagtttgctagaaattgagtctcttttgggctttaaactttgctgcatgaactatctgatgtgacagactcattttaactctaaaaagtttttcgatttcttagagattctatttagcttgtttggtgaatgcatcatcctcttggttgctatttttcatttgttatcattcttttctccaggtaaagcaggtaggatgagcatttctgatgaagaggctgagatcagcgagtcagagattgaggactattctgaaacaccctaccgccttttacgcgacgggacttacaaggtgaaggtgaatggacagctcagatgcccgttttgtgcaggcaagaagaagcaagattacaagtacaaggagttgtatgcacatgctactggggtttccaaaggttctgccaccagaagtgctttacagaaggctaatcatcttgctttagctatgtttttagagaatgagcttgctggttatgcagaacctgttccacgccctccagttgttcctcctcagttagacgagactgaaccaaaccctcataacgtctatgtctggccatggatggggattgttgttaaccctttgaaagaagcggatgacaaggaac

SEQ ID NO: 4207 - DNA, 451 bp, Arabidopsis thaliana columbia
agaggatccctatgcagaccgagggagttaagtttcgcatctgcgtttgtagaagtcatcttatttttccacagaagcctctgtgtctctttgttaaaaaagttcatctctgatttttccttgtcatctgaattaccagtaatatctctgtgactgcctaagaatctacatgataaaccatatgcacacttcattccagaggccacaaatgggcattgccctctatatcatctgccttctgcatttacaacagagaaaaaatattgtcagttaacttctttctcaatatcatccaaactagttccagtcaataccacaaaattatactatattcaatacacccaattcatgaaccagataagcaacagtaaaatgcaaaaaagtgagtgagtacctgagccttgaaagcctcaatatcatgattaaaccggcacttgtctttatactgaca

SEQ ID NO: 4208 - DNA, 557 bp, Arabidopsis thaliana
actagaagaaaactcaaaactcgaaactttgaaagtgtttctcatcaaacgaactgaaaacaacaccactacatcagagcattgaagttatctatgaaaatttcagagtaacaacgagctaagaatccagaatccaattcatcatcagatcaaacctgatcaattggtctttggatcaggcattgggaacaaaccaaccagcaccagcagctcctctaggtggagagaaacccaagaacttctgcagattagtccttatactaatagaacaaagcagataaagaaaagccatggaacaatcagtggaatcatcgcctttcaatcctctatgactcatcttcctcacaatcgtaatcggatgaaacggaagcttcgctaccactttcccttcgaaaagcgaattcaacaatccaaacacgacaaagagaaccaaagccacaacggcaccagatttaaacttgaagagtgatagatctctgctcgattcctttaagctggattcaacgcgatctatcttcttcgtcttcgatttcttgtttgttagcttcgaggaagga

SEQ ID NO: 4209 - DNA, 353 bp, Arabidopsis thaliana columbia
ggtcgacttggaaaacaattccagattttccaatgaaagcataagcggagtccaagatgaaactttttggctgctctaattcgctccggaagaaattccactcccatgctgccacttgaagttgagaaatggaacctggcaagaaagtatcagatgggaaatggagcatgttctccaaaagccgagcataaccagtaatgcattctgttgccatcaagttcttagttaagagtcttcctgaagaagcaattgtttgagcaaatttagagagccttccatctgatatcaagggtgagatagccttcaacaatgcatcaggatcgtttcttcgaaaaaatatgccatgaacttca

SEQ ID NO: 4210 - DNA, 544 bp, Arabidopsis thaliana columbia
  unsure (1)..(544): unsure at all n locations
nnnnnnnnnnnnnnnnnnnnnctaaaatgtgacggatgaaagtaacggagaaaaagctcaatctccacttcaaggttctacagtagtcccttcactccgtgatacaaggtctatagctaatgaagttgactttagagaatcgtttgaaactttgtcgcatggttcacctgataattcagtaacgtcacctgataagtgctgcaatagttgtggttccagatctgtggaacaagatgcttattcttctcgagacaaaggaaaacatatttctgagagccctacaagtgagtattcccaaccacagagcagtaaaggtatcaatgagcattcttcatcaactattcggtcgcctcctgtaacgcaaccaaactcgagaggtggtttctttggcagtactaccactaccattcatgaagtagatgatccattagtttcagtgaaagatgtgaagcctgatacttgtgaaactgtactgaccgcactaaagcaagcgaactgntctctgcaagagaaagtcaatagcctacatatcagaaacccggat

SEQ ID NO: 4211 - DNA, 515 bp, Arabidopsis thaliana
ctttaattgggttaaacaaaaggatgggttttcgcatagagttggaatttacaataccatgcttagcatagctggagaagcgagaaatctcgatatggtagatgaattggtgagtgaaatggagaagaatggttgtgataaggatatcaggacatggaccattcttatctcagtgtacgggaaggcaaaaaagattggaaaaggtctgctagtttttgagaagatgaggaaaagtggattcgaactcgatgctacggcttacaatatcatgattaggtctctatgtattgctggtagaggtgatcttgcgcttgaattctataaggaaatgatggaaaaaggtatcacttttggattaagaacgtacaagatgttactggattgcatagcgaaatcagagaaagttgatgtagtccagtccattgcagatgacatggttaggatatgtgagatatcagaacatgacgcttttggttatttgctcaagagtttttgtgtttccggtaagataaaga

SEQ ID NO: 4212 - DNA, 967 bp, Arabidopsis thaliana
tcaaacttcttaaaagcaggattgaacattccatcgaaatgatccaaaagcttatcagccataaaatacacatcttgtccctttggattatacgtcattgcattgtcgaatgtcaatctgacatcagtagcaaaatcaatcggcgaaacgtagaatcctttatcaagattcaatttcactgtacccagatccataggtttcttcacaacctgatgataatcatgaagccctaaaccaaccacatcaacaggagtgttgaacacccacgcccatttatgcttcattagcttcaccaagatctgactacaggtattcaacataccggccaataatttctccgactccggatccgacggaccaaattgattgttcgcttgagacctgacacatttttcttctgtttcttcttcttcggtccaaggtcattcttttcaccggtgaagttattcaacggagctgatcgaacggcgggtacctctgggatagtataaccttgctgagtctcgaacgtccctgactcgatccgttctctcaggatccgaatctgcttgagctctgaggtaaagcgcttcttaagctccctgagctgacttgaggtgtacccagcgagattaaaagtagcatagcttccaaattccgacgagtcatcgcactgcttgctcgaattgctcctttcgaaattagggttagggttagggttgaagagcggaaggttattggtgttttcggtgacggattggtttgtaaatttcctcataaaaacggcgccgcattgttcctggtacgacggttcgtttaaggtagcgaaaacagccggagccatacgaatcgcaaggtcatttctggggttttactcttctcgagcttttagaagaaaaaaaaattcacctcccaaaaaaggcgcgggaaaattacatcaccggcgaaaattccggcgatcggggaactgaaaaattttagagcttca

SEQ ID NO: 4213 - DNA, 497 bp, Arabidopsis thaliana columbia
ctgattttcaccgacaaaactaaaatataaaaatatgtttaaacattttagaataaagacaatatttcttacacactactcaagtaccatataaaaatttgtaacaactattctgactacaaagtttagtatagaaaaaggaggaaagattaaaacttacccgcaaatatttcatacaatatagactgttcaccaaagaaatcttcacaaaagatatacctgtcaaaatgaaaacaaatgacgttaacaactgggtgggtggtgagaaacaataacacaaatagaaaagatgaaagatcaacagaactcagaagtagctgtatccataagtagcttgtgcaagctcctgaagagcacttcataaggatacttgagagagctggcttcggctatgtgcgggatcaaagcaggttgatcaatttcctacatcactcatagtgaaacttaagtcttgtaacaaactcttgcgatataatacctccaagtcaacgataaga

SEQ ID NO: 4214 - DNA, 877 bp, Arabidopsis thaliana columbia
acctgagagattagatgttttgaaaagaaaaaaaaaattcacaagttttattgtggtttgtatccctatcatttagcatataaaaaggttcaatatctgcatatatatggtagaattgtatatgttgtaaaatttaatttgtctccctgtgttaacttgccccacaacacgttgcaaagtgttattcatatgatctggttttaaatgaattgttataatttcttcaatcaattttggtttcagtaaatggaaaaaaaaaacaagaaatcgaattaatattgatttagttaccaatatatatttgataaattttcaaagaatttaagaaatctgtattgtgttcaattttttggttccgtttctgggtaggtcggccccgggtctttcttttcctgttgttctgttcctgccacgagaatgtcaaataactttgaagacagaagttatcctatcgatgctgtattcatgcctgttgaaaatgccacctaagaaaggacggaactgtcgagtaaggattggccgggcagaggcctttggtgtccactccagtcaagaattggagcctccaggtattagctgttagccgtcggactcatttaaaggatttagtttggtttctacgagcttcttatgattgctaataataagtaaacaagttaaataaaccattccaggataatgagaatctgtcaatcagatacacaaagtcagtgatatctcgcaagcaaatcatctcaaaactcgtgcacttctttatacgtgtcataacaaggaatatttttctttttctgataagatttggaacgtgagaaaaaccatgtagccggcagtttaaaacatattttcgttataagcaccctaaaaatgatgattggat

SEQ ID NO: 4215 - DNA, 342 bp, Arabidopsis thaliana columbia
  unsure (1)..(342): unsure at all n locations
ctggcatgtccttccttgtacctaccataagtatttaacaaagagaaatggttacctgggacagatgagaaggagacatgtctctaatgctaaatgcaggaaatacagtaaataccttcagcagccaactaccccacagataacgcacatccagagattctacgttgtttaacaaacacaacatactgaattttcaggttgctgttggcaatatcagaanacctgaaaataaaggacaacacccataaagatatgtaaaagaaaactgaatattttcttaaaaaaagcnagaaaatgacaagagtcttaatgggctagaagaatctggacaattagaaatac

SEQ ID NO: 4216 - DNA, 534 bp, Arabidopsis thaliana
gttcttatgagcttaaaacgttccaacttaaaaaagatgaatcacattttgatagttgctattacttacaatgacaaaaatgacttggaagatagcacaagtcttgtaacgaccccaatacgaatcgctgagaaacgctccaaccaatgagaagatataaacagtccctgtccatttgctaacgttgttagctgcgtctgcgttgttctgctgcaaaacgcgagttaggaagagcaccaagttcactccaactccaaagaaggctagtgtagccagcccctggttcactgttaaccggaaaattagattagaacccggtttagagagagttaaccaaattattattgatttgaaagaaaccagaatagatgaaagaattgaatgaatgattgttaataattgttccgtgttcgtcaagatgatgttaacatttctttggttggattgtatttaatgactacttcattattgttccacttctaacgaaatcaaatagaaaaatgataatgaaatctacaaataactacaatttta

SEQ ID NO: 4217 - DNA, 453 bp, Arabidopsis thaliana columbia
gaggataaaaaacaaactcaggctcagaccacgaaggtgctctctcgcggtatggaatcccctcgcttaaacacactctgacagaaaagcaaatcttattggttgatcaggccataaacacagacgaatataatcaacattcttaatggtctaacatattactcgatgacaaggtctcttataactcctgctagcacaccatcagttataggcgcggtctgaacctcatactcgctcaaactcgcgccgtagagattctctgatgacttcacctaaaatgagatgaaacagtaaatcatgcagtggtaaaatgaaattcagacttctaaaatgcaacatagatgatgaccataaacatcctaatcacaacataggatgacttgtgcttgaacattaaaaaatcaaatttttgttagtaccctgcggcaaactacgataaagtctgtgatgcag

SEQ ID NO: 4218 - DNA, 701 bp, Arabidopsis thaliana
ggtcatgacaatctgacccaccatttgcctgcatttcatgatctcggccaactcatcaagacaccaagacgaagaagcatattttcttgagagcaaaacgattgcgatctttgatcctttgatagcttctttgagctcaggaccgatcgacttactcctctctatattattatcaatgaatgtgtcaattccctttcttctgaacgattccatgatgtgactaagaaaggttcttcggacatctgctccgtggaagctcgggaagacatcgtgtttccagtttcgagacacagaagttgcaggggagggaagagataaagaagaagaattactttcttggaatctgaattttcgaaaaagtatgaagaagcctatagcagctgcgactacgacaaggaaaaaagaagaatccattagaatggtgaaggatggagcaagatcctagatggatggaagaaggattttaacaaggaagaaaaggatccgtgtgaccgttgactattggcacagaaactccatggatgtttcctagaaaatgttacaaacgacaaaatctttaacatccccaattatataattagtagttgggccagtttgttgttaataagttgcagcccatttagcccaatgactaaatatgacaagggtttctttgttacatttgtgtgcttgtgtatatcgccgtctctgattttggacga

SEQ ID NO: 4219 - DNA, 575 bp, Arabidopsis thaliana
cttcgcaatcccatcgatcatagtcgaaagagctacaacatcgggctcaaagcctctctcaattaatttgtggtacatgttaaccgcagccttcatgcgtccggatttaaaatatgcattcatcattgtagtaaaaatcaccatatcaggaactaaatcacttttctccatatcttctacaatctcagttgcctcctttagtttaccattaccacaaaggcctgatatgattacgccgtaagctgttatatcaagtctcatcccttgattgagcattttggccagaaacttcatggcattatccgaatctcctctctgaaaaaaaccatcgataatcgtagtgtatacaagagagtttggctcaactctatcctcgaccatccttgaatacatttcctcagctctctgcatttcccccttcttgcagaaaccatctatcaaagcagtataagtaacaacattcaaagacatccgaacgcgtctcatttctttgtataacgaaaccgcaacctccaagtcaccagctttacagtacccatcaatcaaacaagtgaaagtaaccacatttggagata

SEQ ID NO: 4220 - DNA, 447 bp, Arabidopsis thaliana
atgtgtttgacacagtatcagtaaatgtttaccaaaaggcaaggatcataaaaaggatacagaaccatcatcatgcacaacctacacaggaatcaaagaatgaaaagttcagatacaactcaagttgataaatcgatatatacaacaatgaaatagctactcacctgaattatcactgaggtggtggtatttggattaacagtcaaaacacaaatactctgtatcgtccttttcaatatcatctcactctcctttccccctttccctatcattctgcaaagtccaagtcagtcagactctaacacccaagactcacctctaccgcatactcaaggcacacaacaccatccagacatgattcacgtaaatgcatttacgaagcaatctggccggatttaggcttccatatgacttcaaaacaaagcttctcagcattttcgttctttt

SEQ ID NO: 4221 - DNA, 535 bp, Arabidopsis thaliana
ttgtttactttatataaagtcatacatcaaccaacaagttctgcgaagaaaaaaaagctcgctttgatctgaaaacgaacgagatctttattcttcatcacacaagaagagaagagatccaaaatcatctactactttaaactaaccaaaacatcctaacaactaagtagctttgcatgttttcttgttatgtcctagtcccttgcacttgctacactgtagctgacgtttcatcatgtccaacggctcaaccttctttatctttggtcttcccggtgtcctccgtgtgggtggaggagtcacgcaaactaacccctccggcggatcatccagcatcatcctgtccatgtttgggacaggttgaatcgactctgcatacattaaccggtgactctcaactgttaagtacgtagagcaatactcatacgggcttttctctatgcatccaatcacggcaattgcatggctacaaggtaacccagttagccgccaggtcttgcagtcacaatcacactgattgatacaactatactga

SEQ ID NO: 4222 - DNA, 329 bp, Arabidopsis thaliana
gatgatttagcaaagttgatgagtggtcccgatgtttccttatatacgtcaaaaatctgtagaagattagtactattcttctgatgtgcttttaagagaaagatagagtcatcagcaaacaaacaggtgtgacactgctggtcctccattacttattcggatggcgtgtattttcccctctaatgtctactgggtcatcagtgtgctcagaacatcgacacatagtatatatagagacggagacaggggatctccttgtctcagtccccgggttggctcgaactgaccatatgggctaccatagattaggaccgagaatgagactgtac

SEQ ID NO: 4223 - DNA, 1484 bp, Arabidopsis thaliana
  unsure (1)..(1484): unsure at all n locations
cttgaccaccttcgaccaaaacctttttcttctgcgaaatcgagtcattgatgaaatggacagtgtcagtaatgtagggctccaatctgtcagcgtatctcttgtatgcttcaacttcttcccgaagcatttcaggagtatacttgaacccttgaaaccttgccgctgcatctgatagtaaaaggtcaagcttttgaggtaaagtatccatgtgcctgagatcacctactctaataccattccttatcactttactagagtaggcaggaccaattcccctcttggtggtgccaatgaacgacttggcaagctcagattccctgagcccatcaacctcttgatggaaatcgaataacaagtgagcgcgatcagagaccaaaatccttcctttacaggagacaccattggactccaaaccatcaatctctttgaagagacctggcaaatgcaccacaactccgtttccaatgacacaagtagtatcctcattcaggatacctgaaggcacaaggtgaagtgcaaatttctttccctctgaattgtatatagtgtgtccagcattagctccaccctacggtaaccaaaccacaatattcaaacaaaaagacttaaactttgccggaacaatcaaatcaggaacagaaacttagtaaaagaatcaacaaattcaattcaaaatgttcacaaatctccaattgcaaacacagattaaatccttaatctttacgaaaagttcataaggaatatgaaaaaggtaaaaatgtaaactttacctgacaacgagcaacgatgtcaaagtgttgggctaagatgtcaacgagtttgcctttaccttcatctccccattggcaaccgagtacaccagatacttgactcagtgatccaatccgtccaagagactcagtggcggctgaatcagcggcgacgctcagtgaagcggagacagctggacgtttagcagagcaagagacgaagcttcgagggtggtgaagaggaggataacggcggtgataaggtccaccaacagcgaatcttggattggagtcgagagtgagggaagagagagacatcttcgaagagagagaagagaagaggtatcaaaagtcttagggttcgccggcacttgagtatggggaaacctgaggaagaccttttttcaaactgagctcaggtgaactaaaatgaccattttgacctttacatgaaatatgtaatgaaattaatttggttaaaccgagactaaaaccggtcttaacacaaagcaagaactaaactgaatttaaaaagtcagcgttttgttaacatgccataattgaatgctgtaattcaaaatttacggagacattctgccgagtatgtatatatggagacattcttgaggctgagcaatttactcccaaagntccagcttttttgtnttttagattttgatcagctggtctatggagacatcttaaggtgatattttgtagtgagtgatattt

SEQ ID NO: 4224 - DNA, 681 bp, Arabidopsis thaliana
ctatcggtgttttcaaacctgagagatatcacagaaacccatatgaatgataaaacaaacctcatgatcaaaatcttaaaagagccattaacaaaatccataatgcaacctcaaactacatgattacatctcctaaactcacccatcaactagaaaatccataagatcaatgttggattcaagataatcagcagcaataagacgtgaattgacttgttgcctctgaagatttgcaacaacttgtgtagcatctttcctcgcctaaacaaaaagacaatctctttattgaacaattgcataacaaaacaaaaagagacaatctttggattgaatcatgagaagagatggtacctccaagttcaaattaggaagagaagtgagcaaacggcgaagagtatcagccttaaagaactcctgagtcaactgagcacaagcttcagcaacaggctcagcctcactgtttccatatagaatcaacttcaaatctcgtatgctcttacttagttccaccatctacacaagcaattatcagaaaatcaaacctcaggattcaatcaattcaaatcagatcagaaagttttcagatttgagcaatcgaaagtaaaaagagaaaaccttttcctcgcgtttggactctcgaaggtcagggaaggagttggatcgatcggcgtagaggaggag

SEQ ID NO: 4225 - DNA, 446 bp, Arabidopsis thaliana
gaaaatcagaaattttaattaccatatataatcacctcatttaaactaaattgaaaattttggtattgaccgctaaaaactaggatgaaaaggcataaaacgccgtcgtttgggctttttgactggtcgaataaaaactcttttgactaaaacgtcgacctaagattagaatacagagtctacacctctctactacgcactgtcacagaactcttctttattgtgcgacatagaaatcgataaagtgaagagacaagcaccgtgcttttgatcggagatcggaggaatttaggttcgattctccgtaattctgatattgggagagactatggcaacttcttctcgttcggagcgatttccgataacgcagagtacgcgagctactaatatattgacgattacgcctaattctagggttttgaaaagccctctcactgaacaaatca

SEQ ID NO: 4226 - DNA, 472 bp, Arabidopsis thaliana columbia
caatcatcaaacatttgactagaataaataattaactaataattacaaaatatatagatcctaaaatattataagaacagcaataatatatagtttccgtacagattataaaacacgagcaaaactaatccggtaaacataacaaagcttatatattttttatttttttttgttttgttttgttttgtctcatctctaaaccctacgtcaaactcacaattacaaaacatatatatctcgttcttacattcccatgcatcactcatagataaaaattaataaattgtatcacccaaatggcgagtttcttccttgtattaatccaccattagggttcatcataggactcaatggtgatctcctaggcgatggcctttccagtaatttccaccattattccttcatccctgataaacctgatttcctttcgtagatctccgacaaagaatccaaatccgtggagacatgtgta

SEQ ID NO: 4227 - DNA, 502 bp, Arabidopsis thaliana
tgtgaagaaaataatgtttgcctgtgtgtgtgtgtgattttgcagagtgtgataccaggaaacatcatagttcgtcaacggggaactcggtttcatcctggagactatgtggggattggtaaggaccatactctgtttgcattgaaggaaggacgagtcaggttcgagaaaagcaagattacaggacgcaaatggattcatgttgatccaacaggtggtcatgttcttcaccctatctacacaaaagctgcagctgctcaatcgactaagttgaagacagcttcatagcaaactcggcaatctagacgtgtcttcgtgtcgtcttttagattatatgatctctcgagtaaaagatgatggtatcttagaatatcaacactcatttcaattacagctgctgttttgtttcctctagtctctgtttggattcaacaaatcaaattttttattcggaagtagaagttaatcaaatctgaaattctctcatacgtgttagacaaca

SEQ ID NO: 4228 - DNA, 476 bp, Arabidopsis thaliana
catcgtgactctttcttctccgactaatccccgccaaaacgatgccgtttgttttgcagtgctttcgaatcacttgcctcacggatacgttatcaaccaactcggtactagtcagaatctttccggttatagggcacgtgatgttcccggatccgaaccatttagtgatggagctccgatcataagtgtggcctgtttctataaccacaggatccgtcataatctctagtgaaattggacaaaggagatcctcaactttcaatcctcggatcaagtcatgatctttctttataccatcttcatgatgattatgatgatcatctctctcgatccgtccaagtataatgcatctgcaataacatatgaatcccattaaactactgagaagctcgacttgatcgctactcttcttcttcttctcatctaaccgttctgcatctatctcttcgtcgagaaagtttatctctttaacgcaa

SEQ ID NO: 4229 - DNA, 488 bp, Arabidopsis thaliana
tgatgtcccagcaacagagaggtatcgaacagatacaacttttcccagagcctcctcgtcaatgtttagacaatctaagaacccgagatcattgagctgtggacaatgcttggccagagcttcaatggcttcagaagtcacatctctaatcccagaaaggcgaacgtttttaagcttaggacaacaaaaggcaacagctttgatagcatcactagtgatcctctcacaaaagtcaggtccaagttggagactctcaagtgcctcatgtcgcgccactatcattgacaatgtggcatcagttattttcttgcaatagtcgccgcttacttcaattagattcctagctttgagatgtataagggaatcagctgattcaacaccacgaaaccttaagtaatgaagattaacacacctagaagcaagagaagctgccattgaagcatcaaacttgtgaggcacgagatccaatgaagtccacaaacaagaag

SEQ ID NO: 4230 - DNA, 523 bp, Arabidopsis thaliana
cgaactttaacgacgacattagctactccatgtggaccttcaagctttatcgctctctccttcttcttcgcgattctcaaatttaactgcttcgcaacttcctcgaccttcctcataataacggccgtactctcatcggatacaaactggtcgcaatgatccggcgtcacgagatttccaaacaaaccggagagattcgagctcgacgccgaagaaatcacatcgaacgcgtttagaattttaccgttttcttccagatcgtaatcatcggcttggattccgatgatttcgcttggatctactccatgattgaaccacggatcctttagaattcctccacggtgattcgcagttccggatttggctccaagagacggcggaggagtttccgcagatctgaagatgtccaatccggtaacttgtattgagccttgtggattttccggtagagtcgcatgatgtttgcatacgaaacggcaagtagcctgcgttgagaagggcaatacgacgccgcatgaccaaa

SEQ ID NO: 4231 - DNA, 534 bp, Arabidopsis thaliana
ccagaatatatcaggcacaagaacatctgctttatctgcatacaattttttaaaccttctggcattttgggcctcctggacatagtttagctcctgataaactctgcaggcgaactcatcgataagggtaaggacatcggtagtgatgaagtctacatacttgttaatgagtttcccaactcctctaataaggtaaaaatcaaggccaatggcttcttcgatcccagggcgttgaactttgacagcaacaacctgacctgaatacctcagctgagctttgtaaacctggccaagactagctgctgcgattggctcaggagatacagacgagaaaatggtctctagcgacaaatccaactctctctcaatgcaagcaaatgcctctgcatcagggaaggttggcaaagcatcctacttagacactcaagcacataatatagagaaagttagagatgttctctttacctattttcaaacagaagattcttaattacatatacgtaaagcagagagaggaaagaggagaacctgaag

SEQ ID NO: 4232 - DNA, 796 bp, Arabidopsis thaliana
cagatcaattctgattacaacctacgagggaaaccataaccatccgtcgccgccagccgcggtaccatggcttctaccaccacggcggcggctaacatgttgctatccgggtcaatgtctagtcacgacgggatgatgaaccctacaaatttactagctagggctgttcttccttgctccacaagcatggcaacaatctcagcctccgcgccgtttccaaccgtcacattagacctcacccactcacctccgcctcctaatggttccaatccttcctcttccgcggctaccaacaacaaccacaactcactgatgcagcggccgcaacaacaacaacagcaaatgacgaacttacctccgggaatgctacctcatgtaataggccaggcattgtataaccaatccaagttctcggggctgcagttctctggtggctctccctcgacggcagcgttttctcagtcacacgcggtggctgatacaataacggcactcacagctgacccgaatttcacggcggctcttgcagccgttatttcttctatgatcaatggtacgaaccaccacgacggcgaaggaaacaacaaaaatcaatagaaaaatattacattttttttttggggtatctacattttttttccaactgggttataggaaacagagagtttatttcattgattcacatttgttctgtttcgtaccaaaatcccagtaaatatacaaaagcaaactatactcaagttcatattcgtaaacactataaatagttacgtaacttaattagcattgcctttca

SEQ ID NO: 4233 - DNA, 1157 bp, Arabidopsis thaliana
cttgttccttataactccaacaacactcgtcgagctcttcactttctccttggtaccagaaaatttaggagaaaaaggactcaaagtatctaactttttagcatcaacgtcatctccttcatcacaagaactctcatttctcttaaatctactcatactcgaaaaacctctcctactactatccaaaacacgatgtttacccattgaatcacatgtcgcagaaactaatctcctcacatcaataggtgtagaatcaattgaatccgaacatgatctcgacccttgatcaaatttcttcaccggaccatcgttatcgttccacaaatcatctgcaccagctttcataaaccgatcagccaaggttttgatatgttctttcgggctcattggtccatgactctgcttcaatttcgccgttttctcaccggaatctggatgaccccacattttagctcggatctcggtccgaattcgagcttcgtaaagctgtttctcttgatccaagagcttgttctctttctctcttgctttcttctcgtgcatacgtttccattgccacttgtttagtcctccagggaaagttctcggaccaccacccatgttccgagagaatattcggttccataaggacctttcagaagtgatgcgcttactaagccctgaaatatccagtgacacaaagataaagataacatgacaaaaagacactttcacgaaactgagacacagtatcgaacacataacattccttagatgtatgtatgtgataatggccatgtgataaaagtgagaaacagaggctatgaaggaacaaaagtaagagcctaatcaaaattgcttgcatcaaagcccaatgttaagcagtatttcaaaaactaattgatactaggaagtagtttacaaaaacagaagccttgaagatgctagaaacagcccacatagacccttgaaacaagacattgatccggtacacatatcatcacgtaagcatccaaattttaaccgaacaaaccgaattctgaagtaattgagtgcaaagaaactctctttaactcttacaatacatttctagagttaagcaatcgaaagcagacatttttctggaaatcagaaccacaaatgaataattgaacttatcaaattcttaaacacatata

SEQ ID NO: 4234 - DNA, 596 bp, Arabidopsis thaliana
ctaaaggcacagcagcttgagtatctcaaaaatagcatcaaaagcattcaggactacccaaaacccggcattcttttccgcgatgtcaccagcttactggaagacccgaaagcttacgctctcagcatcgacttgctggttgagcgttacaaaaatgcgggcattaccaaagttgtcggcaccgaagcgcgtggcttcttgtttggcgctccggtagctctgggtctgggcgttggctttgtaccggtccgtaaaccgggcaaactgccgcgtgaaaccatcagtgaaacttacgacctggaatacggcaccgatcagctggagatccacgttgatgccatcaaaccgggcgacaaagttctggtggtggacgacctgctggcaaccggcggcactatcgaagcgaccgttaaactgatccgtcgtctgggtggtgaagtggctgacgctgcgttcattatcaacctgttcgatctcggcggcgaacagcgtctcgaaaaacagggcattaccagctacagccttgtcccgttcccgggccattaattatcgccagtcttgtgctgcccacgctacggacagcacaagatgtgcat

SEQ ID NO: 4235 - DNA, 536 bp, Arabidopsis thaliana
agacgtagcagagactgacctcaagagaaacagcggacaagtgaagggttttaacattgcttatccctgcaaccagattcgtaacataaccaacaatatcctctgtatcaccatccacataataattaatagtcatctggaagacgctcccatgagtgtagcttctacaagggaacccaaatcaacctcataatcttctgcgggataaccagaatagtcaagatagacaagactgggtgtatcaaacagacgaaaacccttgtgaccgttagggtaacggggccaatgataagagctggtcagtcgtttgataagagaaggactagacacggtccctccatcaaacaaatattattaaaaggaaaaaaaaagagataaatgaaaattggtccataagacaaatactgaaaagacgaggggttaaattgaaataaatccctcctcttctctgtgcacaaaatcctcgcgccacaaaaccctagctgaacggaagaaggttagtggtttatctcctctgggaaagctgcttatgttga

SEQ ID NO: 4236 - DNA, 530 bp, Arabidopsis thaliana
tgagacacaatgcccggcttggaaagggctcgtatcgagtccttccatcaaacggctgaacatctatgacaatccttccgagttacgttatgaggcttacaaatgttgctttcagatacccagccttgtgtaccttgactattctagttatgtggcgaaacagtatgcggttgatctggtttcccttgaagaagctagactcaatatccgatatccggagagacttgtagatcagaatgaggatatttttggtgatgttacggatttgcttaaagggataagcaatgttaaaacccttcatttatcttctgattctcttgaggtcagttttgctacctattcttcttctatgattgtttcaatttgaagtgtatgctagctagcaaggtctcattttgtattatatgtctgttttggttatgactacaaatccaggtgtttcacttgtgctgtgatacaatgccggtgtttcataacctccttactttatcttttgagagtgacgaagaaataggctggcaagtggtgca

SEQ ID NO: 4237 - DNA, 979 bp, Arabidopsis thaliana
cttctaggtcaagttttggtatagatttgatcaaaggacgaagcgtgtctgctcggaaaaactcttgagttaacaaaagacaagcttcaggaacaggctcagcttcaccattaccataaagaatcgatttcaaatctctaatgtttcgacacaactccgcacaaatccctaaccttttcgagtttctcgcatcggtttcttcttcttcggattccgctaaagcgatgagatctcgagtctgacgtacgatttcaccaggaagacgtgatttgttcttgaagagacctttcattctcgtgcttcctccatggtttccgaggttcccgcttaaactgctaagcttcccgctaaatgtgatgttgatgatggattcatcatcggtggatccgacgcgtagatggctccgtgtacggcggtgctttgacgacggagctaaatcggagcttccgtgtcgtttagcaccaccgattatggagacacacgcacctatgtttctcctttttgttgacctcaaaacaaagtacaaaaagaaaaacagagcaaaaacaaaatctatgcctttctctatctttttattctagggtttgttcaaaagctttttcaggggtttcgctgtgaaatccaaaaatgttgtttctatgaaatcttcttctttgaagaaaggaagaagaaagagacaacaaaacctaaaaatggagtctttgattggctaattttgccgcgctgaattttcgttgtggttagtttgaagaatctttgatgtcaattagatattaaacaattttttgaagcttattattctacacagtccatatctctagtcaactaattatctaattatgttttctctaaattaataattcttcaaaattttaatattttaaaattgtgtctattcattaaaagtcttttgttttcatactttttcacaaatagttgcattttttcaccactaattgttttgctaattatgtttgga

SEQ ID NO: 4238 - DNA, 607 bp, Arabidopsis thaliana
caggtcgccggatcgcgtggtttactatcacgacgggctgacccagagcgagatcagcgatcgtctcggcctgacacgtttgaaagtgtcgcgattgctggagaaagggcatcagtccggcattattcgcgtacagattaattctcgctttgaaggctgtctggaatatgaaactcaattacgtcgtcagttttcgctgcaacatgtccgggtgatccctgggcttgcggatgctgatgtcggtgggcgactggggataggcgcggcgcatatgttgatgagtttacttcaaccacaacagatgctggcgattggttttggcgaggcaaccatgaatacgctgcaacgcttaagtggttttatttcgtcacagcaaattcgcctggtcacgctctccggtggcgtcggttcttatatgacgggaatcgggcagcttaacgcggcgtgcagtgtgaatattattccggctccgttgcgggcatcctccgctgacattgcccgtacgctaaaaaatgaaaattgcgtcaaagatgttctgttagccgcgcaacagcggcatgtggcgattgtcgggattggtgctgtgagtcaacagtgacgatgcgac

SEQ ID NO: 4239 - DNA, 552 bp, Arabidopsis thaliana
ctaaagtaaagcccgtgaagaacgcggtgggatctcatttgagagcgaagaagcgaagttcattttcaacgctgaacgccgtattgaacgtatcgaacagacccagcgtaacgacgcgcacaaattaattgaagagtgcatgattctggcgaatatctcggcggcgcgtttcgttgagaaagcgaaagaaccggcactgttccgtattcacgacaagccgagcaccgaagcgattacctctttccgttcagtgctggcggacgtggggctggaactgccgggcggtaacaagccggaaccgcgtgactacgcgagcctgctggagtcggttgccgatcgtcctgatgcagaaatgctgcaaaccatgctgctgcgctcgatgaaacaggcgatttacgatccagaaaaccgtggtcactttggcctggcattgcagtcctatgcgcactttacttcgccgattcgtcgttatcagacctgacgctgcaccgcgccattaaatatctgctggcgaaagagcaggggcatcagggcaacccactgaaaccggcg

SEQ ID NO: 4240 - DNA, 679 bp, Arabidopsis thaliana
atcaaaaccaactcatctagacatagttcgagacgccgagtggtcgttagctgccggggaggagatccttgtctatggaggagttcatgtgctaatgcttggaggtcatgactgttttcaccaccgagccccacggcgacagaagaggaagacgatgatacaccgtattggtgacgtggatcaatgaatcttcgttgttgcgtggcccatgccgaagaagacgtcgtttgatcgaagatggatgctaggtcataggttgagggcaagggtgagactgatgcaggtaaatcggttatggcaagagggggaggaggagtgaaaaagagcggttgcggttgcggcataggctgtggccgcgtttgcggttgaggtagctctagtgatgccaaatgggcttgtaagtaagaaacttctgcctgtagattcaccacctatgtatacactttacgagttagaatttgttttgcatgatatgtaaacatataggtttaaggctaaacctgtacttttctggaatttacgtaagaatgcgattaatggcttacaatttattgcaaatattatgcacttagtttgatcagtgaaatctctatctcttacagtagttttttatacgcttaacgtgatagcttaattacctaaaatagttttttttgttttttgtttttttaagaagata

SEQ ID NO: 4241 - DNA, 523 bp, Arabidopsis thaliana
cggtccatgaccctcacgtgacctctctcactctcacgtgcctctcttctcctccgtcattaatataaaacagttggggaatttataactttcttcttcttcttcttctctctctgtttctctctgtgcgagctctctcctctcatcaatggaatctctcatcaatcccagccatggcggaggaaactacgattctcactcttcttctctcgatagtctcaaaccaagcgtactagtcatcattctcattctcctcatgactcttctcatctccgtttccatttgcttcctcctccgctgtctcaatcgctgtagccaccgctccgttctccctctttcatcttcctcttccgtcgcaaccgtaacttccgattcccgacgattctctggacatcgagtctctcccgaaacagaacggtcctccgtgcttgattcgcttccgattttcaaattctcctccgtcactcgccgatctagctccatgaattccggagattgcgccgtttgtttgtcgaaattcgaa

SEQ ID NO: 4242 - DNA, 549 bp, Arabidopsis thaliana
gtcaacacaacatctaaatcaaactaatctatagcaagtttatcttctcttccttacactaaaaatgatgtaatagagaggttggcatacctcggacaatgtacatgttgcctcaccgagaaattgctgttcgtcgagcttaagcaactgaaaacattaaaaaaaaagtgtaacttatattaagactacctagtgacaaacgaaaagatgaaaaattttggcagatacctcctccttagaattttgaaactgagtgtcaatatcatagacacgaaacctgtgcagcaaaaggtgttaaagttgattccttttcctcaagtttttcacacatataaccgaggtttcaaggaacttcacttacagcaatgtttgcacaatctcgaactgataaccaatagtaaaattcttaatccatttaggattcaaagaattcaaaacaacttcactacgaaacaattcagcaagtgttccatctcttccttttgtataaacaaccaccattgcatcactctgagatatacaaccaaagtaatgatataagcttatata

SEQ ID NO: 4243 - DNA, 1500 bp, Arabidopsis thaliana
ctcctcttgtcgcgtgctatatccctgcgcctactagtgggtacctttaaattgtctggcgaggcacagaagatacacagggtactggaggcgttttctgagagatactatgagcagtcaccacacatactgattgataaagatgctgccttcgtgttagcttactcgattatcttgctgaacacagatcagcacaacgcccaggtgaaaacaaggatgactgaagaagatttcatccgtaacaacaggacaataaatggaggcgcagaccttcctagagagtacctatctgagatttatcactcaatccgccacagtgagattcagatggacgaagataaaggaaccggcttccaactgatgacagccagtcgttggattagtgtgatttacaaatccaaagaaacgagtccctatatccaatgtgacgcagcatcccatctggaccgtgacatgttttatatcgtgtctggtcccactattgctgctacatcagtggtttttgagcaagcagagcaagaagatgttttgcggagatgtattgatgggttattggccattgcaaaactttcagcatattatcatttgaatagtgttttggatgatctggtcgtgtctctctgcaaattcacacccttcttcgccccattatctgctgatgaagctgttcttgttctaggagaagatgccagagccagaatggctactgaagctgttttcttgattgcaaataaatatggtgactatattagtgcgggctggaaaaacatactggaatgtgtcttgagcctcaacaaactccacattttaccagatcatatagctagtgatgcagcggatgacccagagctgtcaactagtaacttggagcaagaaaaaccttcggcaaatcccgtgccagtcgtatcacagtcacaaccctcagcgatgcctcgaaaatcatctagttttattggtcggtttcttctgtcttttgattctgaggaaacaaagccattaccaagcgaggaagaattggcagcttataaacacgctcgtgggatagtgaaagattgtcatattgatagcatattctcagacagcaagtttctccaagctgagtctctgcagcagcttgttaactctcttataagagcatccgggaaagatgaagctagttcggtcttttgcctggagcttctgattgcggtaacctgaacaaccgagacagaatcctactgatttggccaacagtttatgagcatatcttgggtatagttcaattaacattaacaccatgcacgcttgttgaaaaggctgtttttggtgtactgaagatttgccagagattattaccatacaaggaaaacctaacagatgaacttctgaaatcactccaactggttctcaagctgaaagcaaaagtggctgatgcatactgtgaacgcattgcacaagaagttgttcgtcttgtaaaagcaaacgcatctcacgttagatcccgtactggttggcgaacga

SEQ ID NO: 4244 - DNA, 537 bp, Arabidopsis thaliana
  unsure (1)..(537): unsure at all n locations
cttatctctctcatacacgcacacacagtgtngcttaggtttactgacacactgaaagatctcctttcttttagagcttggccgtaggacatgctgaaaccaagggcatttcacgcattacaacagttatacctgcaacagatgaatcggtcagcaaattggtgcagcaactttacaaactcgtagatgtgcatgaggtgggattaccaaaagctactgtctttcttatatatttaacagtttgaatgtcttgatggccctatcattcctttgctgtcttagaccttttggctttttttaaaacgtagattagaggaagagtttctgctaaatctttctggactttcctatatcatttcctggtcttgtctgtttactcgaatgagacctcttgttccagaaagtcaaactgtacaggcttgatgaaaataattctgaacatgatttgccgcaactttccaagctgttattaactttgtgaggattttctgcaggtccatgatcttactcatttgccattttctgaaagagaactga

SEQ ID NO: 4245 - DNA, 532 bp, Arabidopsis thaliana
atctctctctgcctttgcttctcaaaagctttatccaagtttgctttgcgttcagcttctaccttcttgagcctctcagcttctacattagaggaaaacccaaaaaataaacagaaacaaggggttattaagaaaaacttcaatatcaaagtcaaaatgatgtggatttatggaagcaagtccacaccttcctgcttgcgagcttcctcttcttcctgcagcttcctaatcctttcttcttcaattttcaaataatatatctgcttcctcttgatatccctttcttgcttcttctctcggattattttactgatacgctcctctctctccgtcctgattctgtcaaactctgcttgtcgacgactaatcacttgtgcttggaatatttcctgggcacagaaagattcgattataagtacattggaaggaaaagttacaggaaaaatgtaagaaactagagagctttaaaattaattcaataacgaaaagagattcagatcaaagatgaacattaagagaaacaacatgacat

SEQ ID NO: 4246 - DNA, 548 bp, Arabidopsis thaliana
gggtaccgagcttaaatcttgatactgaatttggctacagttccttggaaccgagagatattatccgtgacgttctcactggtatatcgagtgtaagacagatgatcatctctcaacgtactctagaggtaaataatgtttctctgtgattaacaatttagtttttctagctatggaatgattcctcacttaataacattctgtttctcttttgcaggtcatatgtcgttattcaaaactcgggcctattcccaaattccatcacctatctcatttgaaggctgcattctccagcacatcattacaactattgcccgcctttcttgagagctgcccaaacctgaaaaaactcatcttggtaagaatctgtctttgatctttgatttggcaaattaagatcattgttgcatatattgtaagctgattagctctttttattttgcaggacttatatgtttcagcggcgctgaggaaatcgatcttaccaatgtgcctcggtgtatacatcgactctggagtgtattgagattaccaactgattaggaagg

SEQ ID NO: 4247 - DNA, 550 bp, Arabidopsis thaliana
gaaatttattggtacaccgtacacgaaacatgcaaacaaacatacaggatcatatagtcttacgatttacgaccctcccttattgcatcacacacacatatttacaaacactcatcatcaccgtcaccgaacagcgtttatgcagagtcaactccataaaagaagagatcaccaaaccgatcattggtttgagctttcccaccaaacatcaccagtcctttcttaccatcaatggtacctgtcgtggacgcagaccaacctctgatactcggagtctcttcctcttcacctaacttatccagcttctcccacttcaacgtctctgtatccaacgcaaaagttccaccactcaattgacccggaccttcgtgagcttttgggtccatcgctatctcacctccaaagaccaaaatgtgtttccaacaaccgcactagcgaacacactcctagcgcaaggcttctcaccgaacgtctccacttgtgtccacttgtcttgagctggatcgtagcaatgaacatcatctacttcacatccgttgaatccatacac

SEQ ID NO: 4248 - DNA, 1006 bp, Arabidopsis thaliana
ctccaaatacccttcaataggtggagtaagcgtaccgttacctcgactcaccggaaacggagtcaaatcacgcactaaagccgccttcttcaaattctccggcaatgcctcaaccgcagcgttcctcatcttcatcaaactaatctccgctacacgtctcgctctatgctctctcataagcactctactatactctttcgcaagtctaatcccatcctccactgtaaccttatactttggtaactcatcttccgtaaaaatccctaacgaaatgtaatccaatcctggagtcccaatcctcatcggcgcagtagtaactcccatcgtaaaggatccacctttcttctgaaaatcaatctgtttttgcctcgctttactgattagccctagcttctctcgtctcgcttctcgctctctttccttaggtctcaggtaacgaacaggacaaggagcgtttatgcattgatctgagattcttccttttcccttatccacctcatcaccacctctgccaccgccgtttccaccgccttttttgattgtgagtttgttgcgtttcaatgattggcctgtcttcagcttcgattttcctttgggggttccactagcgtaacatttctggagaagattgtaactcactgagtcaattataggttttggtctcgcgaatctgatcattttcagattctgatttcctcagagctctctctgtttgaaatgaaaatggtgattgaagttgatctgcaaggtttagggtttcaaggtacgccgtcgtttcatggagtgtaatttaagttcaaatcgagggtaaatcggtaatatcaggtagtgtcatcaaactcacactcattttttagccttctctctggttcgtcgtctggttcaaaagctatagatcgatcctaggcttacctcaaaccatcagtctccgttgactactgagactcgtcgacctctgatccgcttcttcgactatacggatctacttccgatctgtaagaagctt

SEQ ID NO: 4249 - DNA, 714 bp, Arabidopsis thaliana
cggaagcgttgactggagtagatgtcttgggatgaaccttagcaaaccaaatggggacaactcttgaccgtccgatgacgcacatgtaccgagcctgacccaacatggctactatcaacgacgttaatatcccgaaacttgctccaatcccaaccactctcgtcacccattcccatccttccgatttactaaacgccgccgaatacggtgcctccgcatctatctgcttacgtacacacaaccacaccaaatcattcacccacaaaacccatagaaaaaagcttaaattaaaaatgtgtatttgatggtacggaccagatcgtacgggagaagcattgacatagagatagccattaaacagtaaagtacaatgacgattgcgactgagccagagattcccattggtatgtctttgactgggtcttttacttcttcagccattgtcgaaacggcgtcgtatcctatgtaacttagataaaccattgctgctccgttaaacacacccgaaactccaaacgggaagaatccggatgggttttccgggttatcgggtcgggttaaattctttacgtctcctttcgagaaacccatgacgatcacgaatactataaatgcaatgtgtaacgccgttaataccatattcaccttcgaactctctctcgtactgtaacagatgacgaacgtgacggcgaggacgacgataacggcgatggg

SEQ ID NO: 4250 - DNA, 876 bp, Arabidopsis thaliana
  unsure (1)..(876): unsure at all n locations
tggacccgcattatttcatctcgtttctaatactacgatgatctagagaaagtacacaacccaaacaaaacaaagaggacaacacgatttgcttcatacaatattaatcaataatttttgtagccaacaatacgtaggaacacattacacaacaatctctcaaagaccgagcgagaaggggaaaccggtcgacgataaccagcctccaccaccaataaactgaccagccgtatatttttgagcttcagcagcagccgtaattaccttaaagcccctccacttcactctatttgcagttccagcccctgctcctgtgttcgaatactctctgtaagtcagagtgttcaacgcaaaangcccggtccactcggaccacccttcgggtcggatcacgtcggagatagccgactgcattatcaccgtttgtgaatattccttccatggccgacccaagtacgtcggaaaactacctttcaccgactgtaaatccgacgtggcaccgatcctacatttctggataacgatccctgtgttctggttaggatccgttcttccctgagctgtgaccatgtttttctgaccggaattagggcggcgagcgtggatgtcacagtcttggagcacgacggcggcgtttccgaagatgaagtcaacggttccggcgatgagacatttgacgaagaattgacggttagagtggacgtatagagtgtcttgataagctaacatgtcgcaattgtagaaggcggagaaatcagaacccacacggagagccaccgcttggtgcttcgacggacccgccgtgttttggaaagtgatgtcacgagctaagaatctctcgccgacagcagctgggcccacaaaaagaaacaacgg

SEQ ID NO: 4251 - DNA, 741 bp, Arabidopsis thaliana
agagaaataaatttatgtgtgtttttaatatacaggatatgtctttgaagaatcatcctccagacaaggataaggacaaagacactatcatggaacaacctagtagtccacgtcatcggaaggtaatatgatgtaatctgatgcagaatccaaaaacttatataaatcttgaaacaagttttgttcttacataatgtttttttttttgtatatgttaaaggttgttgctagatggttacctgatgaagcacagaggccaattatcaatgacgctcccgtattcactccatcactagaggtactaattgctttgttgtttccatgatcttttgttgatgtttttgagttcttgttcgttaatttccctctttattggttatcaggagtttgtagatccacttgcgtatatcgagaagatacgtccactagcagagccgtatggtatctgtcgaatcatcccaccatcgacatggaagcctccttgccggcttaaggagaagagtatatgggagcagacaaagtttcctactcggattcaaaccgtagacctgcttcagaaccgtgagccgatgaagaagaaactgaagagtagaaagcggaaacggagaagaaactcgagaatgggttcgtctaagagacgatctggttcttctccgctgaatcgacttcatcaccgaggctgaggagaagtttggtttcaattctggttcagacttcactcttgatgagtttgagaaatat

SEQ ID NO: 4252 - DNA, 581 bp, Arabidopsis thaliana
taacatcattatgtttccatttactttcgcaggctgaaactcaattgcttataccggagaatgatgcagtgccgagtcctccagaagaacagtttagtcttgacatacaacctaatgctaaaactgcatttcttctgagcattgatgaacttctaaatgcagtgagttatttttctttttggttctaaatgcaaacgcataaacgtaaacaaacattcgagtcatgagactgacagagaagaaaatgggtgcaggtgtctcagacaacagcacaattagggagatactcagtgtctgatccaccagacatgacatacacagaaatggcaggtcattgcgaggctcttctcatgggaaagcaagagaagatgtctttcatgtctgccaaaagcaacaaatttagcagcagccaaaccaaggaagctgttgctttgccttgcagtggtgggaaccgtttgtggaccagcggacgtcgtgggagatgatgggattaggtgcacccgcggcttcaaatatctgtgtcacagagtatcaaaatcagcctcctttcttcaatcctccttcctctactcctttcgaca

SEQ ID NO: 4253 - DNA, 517 bp, Arabidopsis thaliana
  unsure (1)..(517): unsure at all n locations
cnnnnnnnnnnnnnnnnnnnnnctaaagtcccatcactccagaatctgtcatttattatgtcattgacacgatcagttatccctgtgtctgcaacatttccacgagaagctatcattgttatatctaatgctagtcccggattattcaatattagagagtcaaatattctttgtgatgctgtatcgttccaccattttgtcaatgcttttgcagcattatcatctgcttgctgctgtgcagggcttttgggccatggaattggcaaggggaatggtctaggaaaaacttctaaccccagaggatctgtattcgtaactggattcaacggatactgataaaaattccatccccccttcagcccaatcggatcctgagtgatataccgcccctgcagcgggtcataatagcggtggcggttgtaatacaggccggactcctcatcatactgctgccccggcaggcggataagctgctgcagctgatgcgggttctcttcattcagcaggttgcccattc

SEQ ID NO: 4254 - DNA, 609 bp, Arabidopsis thaliana
ggtttaagcttacgtagccgagaagattattgtcttggccggagttgtggaatcctctgttcctctttccactgacaatctcaagaaccaaaaccccgaagctgaaaacatccgattttaccgagaatatcccctccattgcgtattcgggagacatgtagccgctacatatacaattaacaaaggatgaaactcaacagtcaacattatgagtttttcaattaaaagaaacagtgttttcagacataatgatgttcagtttcttactaagttccaaccaccttcctggtgttagcttccgtctcgtccctttcaaatatcctagccatcccaaaatccgagatctttggagtcatatttttatcaagcaatacattgcttgccttcagatctctgtggataatcttaaaccttgaatcttggtgaaggtataaaagtcctcgagcaataccattgataatgctaaatctcgtttgccagtttagcttattagagctttgggttgtttctgtgtatagacacaaccagataaagttaacttatttacattaaaatttaattgttggtatcaactactacaaaggtgagaggcactaccgaagagatgag

SEQ ID NO: 4255 - DNA, 556 bp, Arabidopsis thaliana
atgtgagtttgcttcttctattgcaggtgaggtgttgggaaatatcccgtagtggagcctctctagccagtgctcctaaagcatcaatatcacatgatcagccggtaatatgtcattcttcttcttatcttacctttttttttcttttgcctttgaatctgatgcatatacgtcctttcttgtgttgaaggttttatgttctgcttggaaagatgatggaaccacagtctttagcggtggatgtgataagcaagcaaaaatgtggcccttgttgtctggtggtcaacctgtaactgttgctatgcatgagggtcctatcgcagctatggcttggatcccgggaatgaatctccttgcaactggaagttgggataaaagtttgaagtaagaatgattgttcattatttcctatgactgaatgtagcaaattatagaatgttgactgattcatttatttgctgccatgaatttaatgatgtatgttggtttccttccagatattgggacacaagacagcaaaatcctgtacatcccaacagcttccagacaaatgtta

SEQ ID NO: 4256 - DNA, 549 bp, Arabidopsis thaliana
gccagtgtgctctaaaggtcagcaatacactttcgccaggcatacagcgtggcagacacgcacaatgtgaggcagaaagatcgctgcaccacaggctgaacttctcgttctttcgatgatcgcccagtaccatactgactgaagccagaccgaaaaaatgatggatctcacgagcgacgtcagcgatcagatcgtcgagatcaagatgtgacagcactgcattagtaatatcaaccagtacccgatgatgatcgcgatctttctccagcaaacgcagcgccacctgctgttcttcatcattgagccatgattgcagaaccggggtgattatccgcgccagcgagttaaacagtgtgcaatcctgggaagtaaaacgactgccgtgggtgcgaataaagcgtagtccgccattccactactgccgagaaggacggcgtgacgcgaataatcgaccatctcgccctgatactctgttgttgccgcacatcgctgccatcatcatggtagcggtaatagaagttgcttttgagaacatgcagttcaataagt

SEQ ID NO: 4257 - DNA, 579 bp, Arabidopsis thaliana
gatcatcacatcttccgcaaacatcaaatgggagatagagaggtctcttgtctttgggtggtagtgaatataaccagagtcatagcgagaataaagcagcttggagaacacttccatggctaacacgaagaggtagggagacaagggatcaccttgccttagacctttagtactgttgaaaaaacctcccgagaccccattaatagagattgagaaggaaggcattgagatgcactgataaatccagttgatgaaccgatcagggattgcaagcgccctcaaagctgcaatgacaaactcctatttgacggagcaagaagcctttctcaaatccaccttgagcattccccaaggtgagatatgcaacctgttataaccatgaaccatctccgtggtaaagagaacattctcagctaaagatcttccaagcaagaaagccgactgagattgaccaatcacttctgacaataagccctgcaacctgccagtcaaaaacttagatataaattttgtacagcgtattaaggtaggagatgggcgtaaaatctgatatgaaagaggcgttagaggttttaggga

SEQ ID NO: 4258 - DNA, 541 bp, Arabidopsis thaliana
gtgtgctctaaagcatcaacggatccgatcaaaaaattagattacacagcggttactttactgaataatcaacgggttggtaatgtaaaacagagctgtgaatatgacagtcacgctaatccggtggactgtcagctaatcattgttgatgaaggagtaaaacccgccgtcgaacgggtttacaccatcaaaaatacgatcgattattattaatgctattgtgcggtcggcttcaggagagtctgacccggtgttttgtgctctgccagatactgatgctggaatatacacatgcgaatggcattacgatattgaccattaataaagaactcgtgcatcaattcaccttcaaccgaaaagccaagcttgcgctaaatgtgaatcgctttttcattctctttatcaacgatcagatacagcttatagagattgagaacggtaaagccatagtccattgctaatttggcggcacgggttgccagaccttcccctgatactccggggagataattatctgaaattctgcgcggcgatgaacatg

SEQ ID NO: 4259 - DNA, 949 bp, Arabidopsis thaliana
ccatggtttcattgtataatcacatgtgtggtaatagggaagattacttgacggaaaagaaattgcggtaaagagactatcgaaaatgtcctcacaagggaccgatgagttcatgaacgaggttagattaattgcaaagcttcagcacataaaccttgtccggcttctaggttgttgcgtcgataagggtgagaagatgttgatctatgagtacttggagaatttaagccttgactcgcatctctttggttagtgactcaaacagcttctgttctaataattgaacatttttgtgaaaacgttaacttgttgttggttgtgttggatgtgtagaccaaacacgaagctctaacttaaattggcaaaagagatttgatattatcaatggtattgctagaggacttctatatcttcaccaagattcacggtgtaggattatccatagagacttgaaagcaagtaacgtattgcttgataaaaatatgactccaaagatctccgattttgggatggcgaggatctttggacgggaggagacagaggctaatacaaggagggtggtcggaacttagtaagcaatcattcttcaacaaaacaaaaaaagagcttttatctcaagtccaaatattttcttaaaaacctcataacatatgagtttatattttgttatgcagcggctacatgtctccagaatatgcaatggacgggatattctcgatgaagtcggatgttttcagctttggggtcttgcttctagagattataagtggaaaaagaaacaaaggattctacaactcaaaccgtgatcttaatctccttggttttgtaagctaaatacctcttcaattcgatattgttttgcattcataatctgattataacgctaaagaaatattacatcctttatgcacaggtgtggaggcattggaaggaaggaaagagctagaga

SEQ ID NO: 4260 - DNA, 1344 bp, Arabidopsis thaliana columbia
tatgaaattgaacaggttagcaggagtggcaatggtggctccggtggtgaatttccggtggccgtctattccaaagagtctgatgccaaaagactacagaagagaagtggcgaaatggtctgtttggatagctaactattttccgggacttttgcaatggttggtgactcagaacatgttctctacaacttccatgctagagaaaaaccctgtctacttcaacgaccaagacattgaagtccttaagcacatcaaaggcttcccaatgctcactaaggtaaatattactctttaccaagaagactataatcccttagagctttttccgctatattcttttagaactattatcttattttaaaatatcaccaaatgtacacccaatatttattgatctaggagaccaaattatcaagccatgcattttcaacaatttaaatactaagagttttacttattataatttatatcatagtgatttgtgttagtgttgcccataatctagatttttgagttgtagacgggccaaaaatatataatgtactcattgaattaagctttcgaatatcaagagtcatgttacttaaatttgtttatgacaatttccaccagaattttagtgagaaaaacatgaagtggttgataaagttgatagccttcatgatttttctaaattatatatacgtatttaaattacaaagtgtgatattagttcagaactagatatcttgaaagaaaatatggggttgcttagtcaaattacgaatactcatgggtactatcaacaggagaagttacgggagcgcggcgtcttcgggacgctgagaagcgattttttggtagcattcggcgactgggacttcgatccggcagacctacctgacccgtctctgtctggaccggaaaagggctcttcttctgttcacatatggcaaggctacgaagacaaagtgatgccatttcagctgcaaagatgtttgtgccgcaagctaccatggattaggtaccatgaggtccctaaaggaggccacctgatcgtgcactacgacggcatatgtgatgcgattttgaaatcacttcttttaggagaagatctcccaatgtacaaaccaaaagctgtgatcactgagccagcttagagactaagttactattcttaatttattcggtttcttgcttgattctttgattttgtttgacaaaaatcgaattctcttatttgtaaaatatatatatgtacttatgaatttttcatatcttgacatatttattttaccactacaaagataggtaaattcgctagctacgacaatttctgtcgaaaatcatgatatgtttcaagga

SEQ ID NO: 4261 - DNA, 977 bp, Arabidopsis thaliana
ggtacacaattacaatttcgatataccgttcaatttgtttgtatgcaaagttaaaaagctgtttcattttcttcttaaactcgtctccctcttacttcgattgcctttggaacaacttcgttgttgggacttttacgacatttttcccgtaatttattcgtggtcgacttgtggaaaactcctgccaaacagtgttaattattatctaaacccaaagattagaaccgaatacggatcaaaccgataaggataagaaaaaaaaagatattataaaacctaatttaaaccgtttcattatagatttggattaacatgttaatacctataattttaaaaactctaaagacatactacatccaatctgaaatcagattaaacgctaaatttggatcattaatactacaattataaaattagttttttagcaaaataaaataaaatagattggtttacttgctaatcagattagatgtgtttgacatttttagcacatgtaactcaattctcgttttttgtctttgaaaaggaacgggattcgaaattggaaaaattcgttccaggatggagtctacggaacgatgtgcccaatcccaccggggaagaactacacttacgctcttcaggttaaagatcagatcggaagtttctactacttcccctctctaggatttcacaaagctgccggcggattcggaggtatccgtatctccagccgtgcattgatccccgtccccttccccactccggccgatgattacactctcctagtaggcgactggtacaaaaccaaccacaaggtattaatattctcctacatctcacataacaagacaaaatgattattgactttggagaatgagacaaagtgttcgtattttgaacaaataggcaatcatgcatgaatcatgatgtatgtaagtatgtaacgttgactcttttatttgattaatctttgtaactctccttgtaggacttga

SEQ ID NO: 4262 - DNA, 591 bp, Arabidopsis thaliana
atatcatcaacaccagaaacagagtgttttcaaagaaataaacagagcaaaagagaagatactcctgcacagcgattaatctccaagtttaagaaaacagtaggaaacaaattaccttctttcatgtattgtttgttgtttactcataggtttgagttgtcgtgtaacttccactccaaatagctttcaatgatatctagaccgcatagctccttcacaaccggcattgtagctggaactggcaactgaaacgctgaaccggaggaaccattctcacctttccacatacatagctgtttgcgtgcttctttaacagcctgtctggtagcgcagtgcaccgaagctgccagtagcaacggaggctctcccgaggctgcacttacacaaacaatatgatcaaaaatgttgattgcatatgttttgcgtaggaatgagtgactgacctttagaagagagtacgcgtttttcatgacatccaccatttagtatctcgacattgaactgtttaggaatggtgtcaactgttggaatcttgtatgtccatgtgctatccgtcagaaggagtccttctggatcttctatgtactcttc

SEQ ID NO: 4263 - DNA, 696 bp, Arabidopsis thaliana columbia
tgcatcgatggaaggagtgatgacggaggcgatgaaactgattcaatcggcgtcaccaacttggaaatcagctgtggctaacaatttattgatttttgttctcggttcaccgcttcttgttaccggattgtccgcttctgggatcgccgccgcgtttttgcttggtactttaacttggagagcttatggctctgctggtttcctcttagtcgctgcttacttcgtcatagtaagtgcatttgtgatcaacctgaatgtaattcggtaactgactcttagaacgtagaaattcgctgctttgattttgatttcgagctgatgaatgaagaatgtccttagattttagatgtgttattgtttaatttaggaattgtggacgtgttagagatcctaaatcacgtttacagattaaggagctactttttctgatcatgctcaacattgagatacttagtcttttctctgcaatgctttaagttttagatttcaatatcgtgtttcaccccagagctggaaatagtaacagtaaatttgcaattgattctggcgctgaagttggtttagatgatttacaatatcacagggaacagcggcaacgaaggttaaaatgacgcaaaaggaagcacaaggtgtggccgaaaagagaaagggtagaagaggccacgcagtgtgattggttcaagtgctgctggttgt

SEQ ID NO: 4264 - DNA, 511 bp, Arabidopsis thaliana columbia
attcgtgttggtgagatctctcagcatgagatcttttagatgatatattactagcagcttctctctccagatcatcccaggaaagttcttccccattgtttggttcttcaaatccattctcttcactacgttgcaggaagacaaacccaattaaccataagaaaactaagctgattttcacaagaaccaactcttgtaatctcattgcacactcaaatcctaaaatgcatccctatccattatgaaaatcatcaaaaagaggtaatgttttgcatcaattcacatccgcaatctcagaaagaaaccgaactactaatcaagcgtaactgaggaaggattaatccgaagttctccttataataaatggaaaagaaaactctaaatccaagatatcgaatcatagaacacacagaatctccaaacagaagtcgaccaaatctcgaacgatcaagctcattgaggcagagtaatgcagcgaagaaaatgaaagacgaaagaaagatactcacag

SEQ ID NO: 4265 - DNA, 462 bp, Arabidopsis thaliana
caaaaaaacgaatgtctagttttcttttgtaatctcttgcttagagttaaggctgtaagaaaaagacacataactttagtttatttatgtgttcaaattcatatattagatatatatgtcagttgcatctatatggtataaatcgttccgtaatagataacaaccaaaaatttgggatcatatatataatgcttcaatttaaatttagacggtgtatatatttgcatggcgtttatacatgaaattcttagcagaggactcattgttcctatttgatgtctttttgtaaaggagcgggattcgaaactggaggaattcataccaggacggagtgtacgggacgacgtgtccaatcccgccggggaaaaactacacctacgctcttcaggttaaagatcagattggaagttctactacttccctctctcggctttcacaaagctgccggtggatttggagcta

SEQ ID NO: 4266 - DNA, 505 bp, Arabidopsis thaliana
tataatagaaataaaggtcaaaacgttcccatcacaaaactactacgtgaagtgaataccagacttgttgaacaaggaaagacgatacaagaactcttgttgacttgttgtgatagctttaaagatctcttctcctcgaaaccacattccttcaacacatctataactttctccttcacccccatccatctctatatcatcgtcatccattttgttgtcgtcatcatcttccattcccacgctctgcaccaagatctatggcggagttgtttaaagcagcagcatctccattgttttgcaacgacgctagtacggcctgaagagtcttgtagttcttctgaacaatcgaatccacaagcagaggttcttaaggatatcgatttgtggaatgatattcctcctcggtaatggttcgacggtgctcgattcgaagatttgggttttctttcggttaaacatatgtgggaaaaaaagacacacttgtaatcttgtccttgggctacat

SEQ ID NO: 4267 - DNA, 913 bp, Arabidopsis thaliana columbia
gtcggattcccataactccggtatcgcctctttcatgttgtgaatgttttccaacgcgtaatccgctcctttgactttggtcgatttaccaacctgaaaacaacaataacaaactccaaagtcaatattattaaactatcctgttttgtttaattaaactttgattatgtttggttaattaaactaagataatcgtaccagaaccgtgtaaagaccaacgcgttttccagcttgtacgtttcggacactgtcctcaaagaacagctgcgatgagaaataatataaattttagttttgttgtccatgtatttaaaaaaacgaaaaaaatgaaagtatccggtttgctataccgttcggttaggatcaatattggcgatttcaagagctttctcgatagcagattcagatggtttacacacaacaggcgttttgggaagtgaaccgaccggttcagaccggttaaaatgtccaacgatatcaaaaatctcggaattgttagacgcagcgtttgtgtgcatgaggtttagcgtttcgaaacatatgattccttcgaaacaatcctctaatcccaacttcttcaacgccttggccgcgtgaactctgtccgcgttggtaaagatctgattacgggaataaacaatgttgattaattttctattcaaactatattatatagcgtatggtatttaattaaataaaaatgtgattatgacacgtacgactttgcggagagggaggctaagcaagaggctgcgaagaacaaggtcgggttttatgttgtcatagggtaaacgaccgtggacgaagctgtggtactcatcgtagtcaaattcatatccgatcgcctagagaacgataaaatgttacaaaaataatttgtaagaataaataatggaagtttagagatgatatt

SEQ ID NO: 4268 - DNA, 1607 bp, Arabidopsis thaliana
  unsure (1)..(1607): unsure at all n locations
tcaaacaaatttacatgacggttagggtttaacaaagaaagtgccaagtaaggtgtccagcaagtggcaatgtcatataattcaatacaaagacagaaataaaaagagagaaaatacaatgccaattaaaaagagaaagcatgtattgtggcgttcaagtcatggggtgaaccattgagcatccttgagattcatgttggcgagttgagggaagcgtttgagggtcttggttgcaagattgaacacatatatgtccagatcaaaagggattttaaaacgggcacggtcatgacgagtaaaatagatagagtttggcttgatacctagggtatggttagcaggcatggtaatacccaagtcaagaagaagggcttcatcaccaagagaatctacctcaagaagcttgggggggggtggtggtagacatgtgggtcgtctaagttgttaggatcctttgaagagacaaaagatcctctagttttcaaaggttatgccctcaaccaacaaaacctctcctgatattatatccgcaatgctaaaagaattatgttctccgagaggggaaaacatttgctttgggttactcccggtgacatcctcgaaacctttgatatccagacaaatcaataactcgagcgaaacgacgtttggttgcgatgtaaagacggtaaccccagagtactagatcagttaagccatttacaaccttggggacctggtcagacaagggaatgacagtgttatgagtatcccccttcttgcaatagaataaataggtataagggttaaagaaccacactacaacgaactctcccgtcttcttgtctacccacaaacggcctctcagatcatcggcgttctcgttgcaataatcgccactaggtaattcaaaacagtattccttatctaccacacgcttgagagtatatgtatctgattggagcgactctagaggcagaaaattgatcctcctatcctggctaaacacatctataatagctaaattgcatccagaatataacattagacaccatttatctgagtttgtcaggaaccaaatccctgaggattctatcagactcctttcaattttgccttctttcgggttgtacatcacacaaccgtcgtcaaggaaaagcattatccatggagatccacttttctgggtgatctaatcatcagaattcgaacgtggggccttaaaacattgacgatctgacaaattagtcacacaccgtttgagttatggtatctcaattatgagaattcaggaagcacaatctctcgttgttcgcgtctgagcttgagggaggcgtgaaaacgcgagatggctattgtcttcatatattaacatgagaaaataaaaaataaaatttgcaatatattaaaaagaatttttcacattagtggacgaaaaaagaattactcccatgatttgtcaaagtgagatatgatttttaccgtttgtcttgtcaatcattttcggaccaaaatatccttaatggaagcaccaaaccgcacatgagttggtttcggtttagtttctcggttcagtttttgaaaaaaaaaatgaacggagaactganngagagaaatgagaagagaag

SEQ ID NO: 4269 - DNA, 1042 bp, Arabidopsis thaliana
tatttgtatgtgtgtttgttcaacattacttatagaagttgtattcgtttgttagcctccttgcgaacgttgacaaggcagatagagcattttgctttactagcggaatggctgctcttagtgctgttacacatcttatcaaaaatggtaatttccgatactgacttctcctggattgtaatgtctttcagtgtattagatcggtagcatagacttggtttcattgtagtacatttgattttgtttctataggcgaagaaattgttgctggagatgatgtatatggtggctctgacagattactatcccaagttgttccaagatctggcgttgtggtaaagttagtattgctacctttgattctgaattatataactagttattcttacaactaagataacttaatgataccattaaaaatcttgtagacgagtaaacacaactaagttagacgaggttgctgctgcaattggtccccaaacaaagcttgtgtggcttgagtctcaacaaacccaagacaacaaatttctgatatacgagtaaatactctgtttctacaaagtttggagccagataccacatggccgaaatcgacttattctgctgtaatgtttaattggtttgatggttttctgtctttgtagaaaatatctgagatggctcatgctcaaggtgctcttgtgttggtggacaacagtattatgtcaccagtgctctctcggccattagaacttggagctggtgtgtaaaacaactcagacttgctttctattggctaaaattttcgtttttctgttctcaaatttgcttcttaatactcatatttcaacttgtctggctttttagacatcgtgatgcactcggctactaagtttatagccggacacagtgacgtgatggcaggtgtgcttgctgtaaaaggcgaaaagtatgttgcctctactcttttctatctgagacatttctttgaaatatctgcttttcttataatagtgttaaactttccagattggcaaaggaggtgtatttcctccaaaactca

SEQ ID NO: 4270 - DNA, 1180 bp, Arabidopsis thaliana
ttttcctttttaacaccttttttgaaattaatgtttttcaatttcatttcgaacagagtcctatatacatcacatatccaattcaaattgaaatgaattttgatattctgtcagaaatttttataaactttcatctgaaaaccaataattgtgttcccaacattgttaatgagattctgaaaaaaaacttaccacccatccagatccctgtacagcagcgccttccgcgttcattttttggatcaatccttctagtgatccgaaatgagcatcgatcgccgaagccaaaggatcatgcggtggtttgccacctccttcctatatatcaatttgaccccttagaagagacaattaaactcatcagaaatagacacatggagtgacgacaaaaaaacatttttgtacatgaaccggggctaggtttttccagaagattgcatggttaacgtgccctacaagcaaagcaacagaaaaaaaaaaatcaaaatccttacgatcaacaagcacctatcggaagaatttaatgagaacttagtcgtttaaagctagggtttgacctcgccgttgacttgatgaggctttggagtttgacgacggaggagtgatcaccgtcagccatggcagaacgaaggctgttgagggctttgttgtactgagtgacataagtctggtggtgtttctgatggtgtagccgcatgatctcctcactgattgctggctctagcgcatcataagcatacggaagatcaggaagcgaagcagtcttcattgattcgagacacggttccatggttgctcctctggcgtcgtgaagagtcgtagcgaagatggcaacgaagataatgataataacggtggtcgtcatgatctttttatatatgtagacactagaaaatagaaataaagcgagaggtggatttattcagataagtatataaaagtattttcttagcaaacaaaagtatataattttactaagccacgtaaactttgactgatctacttgtcaatctctaaggcttcatggctttaagcgttttgcatagttgctcgatttgtgtcgcaaccttaggttgatgcatatttatgttgtttttgcatgtgcttttgtctttgtgtagtttatggcaggagaaacgtaaaacgcacctaacattccaaacctctgttaataaaaata

SEQ ID NO: 4271 - DNA, 1846 bp, Arabidopsis thaliana columbia
tgcttgtcaatattacgagcttttattaggatcaactcaagaaaacgttatgcatatatgcaccatcacccatgacttggtaactatataaagttaatctaacgttagtaagtgaaattgttgcttaatatataatatctaagcaatgaggattgatatatatatatatatatacgataacaattaactagtacttctaggcttctagctacttgaatactcttattactgcttgctaacaattttcttatgctgagagatttagttgctggttgaaaggaggtacgaccttatgaaacaattcatatatattgtgcatacttttgtgagattgatttttaattacttgtacaaagaacaaaaagaatatattaattaacgagataatgcactcaactaaaatgattcttgccaacatttcccttgattctgtcaaattttgttgccactcgtgattttctccactgagtttcgtgtgccaagagatcgtcgcaaaatttcatgatatctgttggaatatcccaaaattaagacttaaattccagcatattcttctttagtggtaccccaaacctgaaatatagggagcatgcataagatatcgatatcagttcaataaaatgaccatttacttacttttgaaataaataaatatcatgatccgattatttaattttagtgaaaaaatatctcaaatccacaacaaacatcaagtattcagagaatatcatcgagaatatcagagaatattccaataatatacataattcgatattatcaccaaccaaaaaaaaaaaactaaaaaaccctaattaatacttctatataaatcctaacgtcatttcatctcaaaaaccatcaaaaccacatttcttctcacttcacatacttaaacctcaaaagtttcctaaaaaatccaaaaatgaagaatctcgcaattcttgttgttgccatgatactcttctcaagctgtgtcacatctcaagtcacagcaaaaaatgtggattcatttccattacgtactgaagagctcgaatggtggcattacaatcctttctaccctcacttttaccctaagccacattggccattccccaccaccggaaaggctctcccaccaatcccagccggcttccacccgattccattccatccaccaccggttgtaaccaaatgcttggccgattgcaaggatgtaaaaacatgtttggcggatatcgctaaagctttcttcacccgcaaaccagctattggattggattgttgcgcctccatccagaagatggatgaagattgtgataagactgtctttggagcctaccacaaccctttctttgactgtgtggttaagcttcattgctctaccaaagctaaatccactccgtctgctcccactccagcttagggttttaattaggaatttattagaattagaagtactgatttctcttagctagtttctttctttctttcttttcattttaagttatgttttttttttcactttttattatgctttactatgttattcttctagagttttaagtttttctttcttaataaagatatcagtgctttttatttattaaattttgtgcattgttatttgttatcatgcttacatttacgcaatttggtacagatctcataccacataagaaaaagaaaagaaaacttagaataaaattaaaattagtttgttatattttaaaaaatttacattttagaatacatgtctatctatttacaagatggctatagctttagagcaaatacgttcccaacctaccttgccagagacgagtgatatcgtgatctcgatttatgcgacctttacacgtttgag

SEQ ID NO: 4272 - DNA, 852 bp, Arabidopsis thaliana
tatatgtctcacatgatatagaggggtcgttacggaaatctagcagtttgctcttcagttcaccattgccatcaataagcctctttgctgcctagaaaaggtcaatgatcaaactctacttctcaagccaatagaccaagctctagtttaccttcgtaatcaagggactctttaacttgttggcagtctgatagttcacagagtcagcatcactggataaatataagatatcagacttgagaatgagaccaaaaaaaaaaaagagagtataaatttgaaactgtacattggttgtgggagctcatccttgattaacaagccgtctttcacaagctcatctagagaaatcaacaatgtgttcccacaatttgcatcctagaagaagacagttaccaattatatctgagaaaaatgtgatagaaacaatgaattttgaatctatggaaaaaaaatcacaaacctgtcctgcataaggagatcctccttcgtctggaggaacaagaggaagaacctgaaatatcatcaacattgctgttaaattaatttcgtctactcttgagactaatcacagagaaattcacctgccaaacggagcaaccagtagaatgaagccaatcgatgaaccggaaggcttcttctccgagatcaccaatgccatgaggaccacgaaacgacgtcgggtgtagcaaaacgccagctcttctcctgctctctggatccggaaccggtagccactgctcatattctgatggaaaatcttcaccgacgctaatactagaaagacacgtggaattactcgaaacgacctccattcgaaacgactgcgacggctttgtcctgttcctgaggaca

SEQ ID NO: 4273 - DNA, 674 bp, Arabidopsis thaliana
tctgtagattgcttcttgataattataaataaaaaaataaaataaaaaaaattaaaaccaaaaaaagggtcatagattgatatatgtaatatcctttacgaaatggtttcgatatttgcttaatcttaattattttattttgcagaatgtgaacaatattttagaaaatctctatttctcgttggagaaattggtggaaacgattataactaccctcttttggcattccgaagtttcaaacatgctatggatttggtaccatttgttattaacaaaatcatggacgtcacaagtgtaagtagtaaacgtttacattaattattatctatataacgttaattagtccaaatattcgttcattaaccaacgattttgggtttggtataatctgaaggcattgatagaggaaggtgccatgacactaatagttccaggaaaccttccaatcggttgttctgcggctctactagagcggtttaatgataatagtggatggctttatgactcgaggaaccaatgctacatgccattgaacaatttggctaagcttcacaatgataagctcaagaaaggcctcgcggctctaagaaaaaagtacccttatgccaaaattatatatgctgattattacagttctgccatgcaattcttcaactcagcttccaaatacggta

SEQ ID NO: 4274 - DNA, 578 bp, Arabidopsis thaliana
ccctgcaaattcgcaaattatatatcaccaacaaagtaaaagtcagaaagaagagctttgtcgtggagcttactgcatggagaagatcggtggtggctttgatagatctaccaccgctctggcagccaacaatgatgttatcggattgtccgaaatgggaggagacttgttccaggaagtcggggttctttgacatccctgtttcacaatcacaaaattatatccatcactcagttatcaactaaccaaataaaaacatacctgatgctcctcgattcatgtaaggcacgttgatcgccccacaggcatgtccctggctgaactcttctggagtcctatattcatcatccccattacatcaagatcctaatgatgctatgttgatgattgaaatagtcaaaagagaaaggtggggcggtacctgacgtctagatagcggtggccggctagaagaaggtcgtgggcgactgttaccgacaccgatgatgggactctgctctcctccgccatttttttcaatggcttattattatatttgactggacaaagacttcaataatttcattttatataaatta

SEQ ID NO: 4275 - DNA, 513 bp, Arabidopsis thaliana
cacttgatccatgagactacagctacggctttggcatacggaatttataagacagatctgccagagaatgaccagctcaatgttgcattcattgacattggacacgcaagcatgcaagtctgtattgcaggcttcaaaaaaggacagctcaaaatcttgtctcacgctttcgatcgctcccttgggggaagggattttgatgaagttcttttcaatcattttgctgctaagttcaaggacgagtacaagattgacgtctcccagaatgctaaggcttctctcaggctccgcgctacatgcgagaaactgaaaaaggttctaagcgctaatcctatggcaccattgaatatcgagtgtttgatggctgagaaagatgttaggggtgtcatcaagagggaagagtttgaagagatcagcatcccgattttggagcgtgttaagaggcctttagagaaagctctctctgatgcgggcctcactgttgaagatgtacatatggtcgaggttgtcggc

SEQ ID NO: 4276 - DNA, 1047 bp, Arabidopsis thaliana
gaaaacaataatccaaagaaaaggaaaagctcgacagttgttggttaaagaagaatcaagtttgggagaatagctgaatattattgaccatggtttctattgtaacatttttcagagcttcattaatggagtctaattgcaattctcacaaaatcaagaaaaagaaaaaactttgttctgcttgtaactgttttatacacatgaactcggagttcaaagaaagccagcctctgttcttgggcacaatcattttttcacaaatgcagattcagccaagtcgatggctcgagcaagaccagcggctttgttctggcactcacagtgttcgtcttgcgggtcactatcagctactacaccagctccagcttgaagataagccacccactcacgccgtttgttagcatccttgtaagagtacattgtattgtattgacatgctgtcggaaaaacgattgtcctaagggataaagcaatgtccatgtcaccagtgaaggagactccaccaaaaccgccactgtatggtccacgcctcgttggctctagctcatcgattagttccatagctttgacctttggtgcaccactaactgttcccactggtaaagccgcacgtagtacgtcccagcaagtcaaaccatcttgtaattctcctgtcacctacacacagaattagaacttaagatattaaggaacacactatgcgagactttagatatttgatctactactagttatctaattaacaattaccgtggagcttatatgcataacatgggaataacgttcgatgttcataagcttctctactttcactgatccgtatttcgtaacctttccaacatcgttgcgaccgagatcaaccaacatgatgtgctcagacattgcttttcattctctagcagttccttttctaatctcttatcctcaacttcattcttcctctcttgctggttctgccaatgcgcgattcactacttgttctgctcaaatatgatataaggttagctcagaaatgatataaagataatgcactttgagaaagagaga

SEQ ID NO: 4277 - DNA, 494 bp, Arabidopsis thaliana
gaaatctctgccccaacaccaacgcaccttgtcgggtcggactcatctatgtttaccatctcggtgcggcacaactcggactcctcgtaagacctactcggggtcttggcttccttcggcgctggagcggttaactgctataatttcttggcggttcgatttttgtgctcaatgaggaagcacgttctagcgacctgttggttacctcggagagtgaagatgccgttgtgcgttgggaacttaacgcactgatgataagtggacgggatggcttgcatttggtgaatccagggggtgccgaggataacgttgtagaccgctggtttgccaatcacgacgaacttcacccaggcgattaatcctccgacaaagattggtagtttaatcgtgcctattgtcatgacgaaatctccatcgaaaccggcgagaggttttgagactggcttaatctgacgatccgttatgttcatcgcggttaaaacatctttgaattc

SEQ ID NO: 4278 - DNA, 606 bp, Arabidopsis thaliana
gactctagaggacttaattctgtcacattcttggtgttgaggccacttcaccattgccttaatcttttctggatctgaagccataccagttccagagataatatgccccagataagatatctcactgttgccaaaagaacatttctttacattggcataaaactgatgcttcttcattatatccaggactttcttgagatgctcgaggtgggtttccatgtctttactatatatcagaatatcgttgaagaaaacaaggacaaaccgcctcaagtagggtctgaaggcatcgttcatgacagactgaaaggtggatggcatgttggtaaggccaaaaggcataaccaggaactcgtaatgcccttgatgtgttttaaaagccgtcttctccacatctgtagcccttacacggatttggtgatagcctgatcttaagtccagcttggagaacacagttgctcccttcaattcgtccaacagctcatccaccaatggaattggataccggtctggaatagttacattattcatcgctctgtagtccacgccgaatctccaacccccatctttctttcttaccaacaaaacaggactagagaagggact

SEQ ID NO: 4279 - DNA, 1200 bp, Arabidopsis thaliana
ccctatatatagtgaaaatgtcatctctctctttctctctgtagtgcttgtttctgttgttctctttgaagtttgagaagtgcatttgtgttcatattctgtaaattttatttatgattacaaactttaataagatcctttctcttcttatgctattggaccactattttcatttccaatttcatacttttagttcggagacaaaatgagattattattatttttccattgagtatgatgaatataagaaaattggaaaaatagaggataaaaccccaaattttcattttaatagaaaaaattggggaagaaaatttacagtgttgaaattggttaaaccctgacactagcaccttcctcagtcgcatcaccaccatgtcagagcgcgaccgccgcgaacgagagagggataaggaccgtgaaccagaccgtgatagacgccgaggtagagacgaccgtgaccgtgaccgtgatcgagaccgggaaagagatagagagcgcgaccgtgaccgagggcttagaaacaaaaaatcccgatctcgtactccagaccaccacgctcgtgctcgccacgtgcgctctccggagaggtatcgctctcgttcccgctcgattgaccgtgaccgggaccgggaccgtcaacgacaccacaggcgcaggtctccttctccagatgctccgtcgcgaaaacggcctcgccagggttcagtagacgatgagaaagaaaggaatcgcaaaagagtagtgactgattccgttgacgagaatgcgtctactattactaagaagaaggataaacaaccaagtgatgctgctgataatggcggaggcgaagatgaagaaggaatggatgtgaatgagattgagatgatgaagatgttagggattcctactggatttgattccacaaaaggtaaaccagttgctggtgctgatgttagtggtattagagctgtaactaagcgtcaccaagacagtacatgaaccgtcgcggtggatttaacagtcctctaccgtccgagcgtaatcgctagtcttctcaaggttaggctttccactaagcttcccaagtgtatgttctatcaattggaagataggtttagctcctatgtgtagtatgactaaattagataggacctagttcttagacttgttggctgcattagaaaatgcactcatcagcatcttttcagataatgg

SEQ ID NO: 4280 - DNA, 590 bp, Arabidopsis thaliana
gggggaaatgttcaattacattattgaaagagttaaaaaacgaacgtcgagttggagtgcgaaacatttgtcaccagctggaaaagagataatgctcaaatcagttgcaatggccatgccagtttacgccatgtcctgttttaagttaccattgggtatcattgttgaaattgaaactctcctaatgaatttctggtgggagaagaatgcaaaaaaagaggaatcccctggattgcttggaagcggttacaatatgcaaaaacagaaggtggattaggattctgtgacttggctaaattcaatgatgccttacttgcgaagcaagtatggaggataattcaatatcccaactctctctttgcacgggtgatgaaagcacgatacttcaaggagtgttctgttttgtatgctaaagagcgaagatatcaatcttatgggtggtcttctctacttgctggaagagacgtcataaagaaaggaagccggtttttagttggtgatggcaaatctattcgcttacaacaagacaatgttgttgcgttgcaccgcctagaccacttatcttgaatgaccttatacaaatggaacct

SEQ ID NO: 4281 - DNA, 920 bp, Arabidopsis thaliana
tgacaacttattaaactttataagtctgctacaaatattgtcaaatatttactaattaatggaccaaaatcctctaacttgcaaatttgtatctacatcaacttaaaaattaggaatatgcgacccaaaaaaaaaaaaactaggaataataataaaaaaatggaatgatgtggaggaagctctttactctttgagaggaagtttataaattgaccacacatttagtctattatcatcacatgtattaagacttgacaacttgtctttctcacaccaaacccctctcctctgtttcataacatctgctctttcttttttttcctaagcccctaatgacaaaccataatgccttaatctctgatgctaaaggcagcatcggagttgcggttagagttccaaaccaatctctgttttctcccggaggtggccgatacatcagcattccccggaagaaactcgtgcagaagctagaggccgacccgagtcaaacccgtatccacacttggatcgaagccatgagggcttcttccccaacccgtacccgaccggggaacatatctcccctcccggagtccgatgaggaggatgaatactcttcttggatggctcaacacccgtcagctttaaccatgtttgaagagatagctgaagcttcaaaagggaaacaaatcgtgatgtttctcgactatgacggtacattatcccccgattgttgaaaaccctgatcgagcttacatgtctgaagaggtttgcttcccttcttacttcttcattcccttgtcttagtttttttttggttttctgacaacttttgattctcagatgagagaggcagtgaaaggcgtggctagatatttcccgacgcgattgcactggaagatgccgtgataaggtacgtttaatatttgaataaacatttg

SEQ ID NO: 4282 - DNA, 886 bp, Arabidopsis thaliana
ctctagcataatcttttaattaaatatggtcaattcttttattaatatatataaaaaaaaaaaaaaagtatggttttaattaatcacttatatttatattaattatggtatgtttttaattaaagaatcacacgtttataacattatatttgagttattatatattgtctttgttaaaggaaaacataaaagtatagttccaagaaattattataaacaattacatggaaaacaaaaaatcaaactaaaaagaagcaaaataaagagaaagagttataaaacatgcgaacatagagacaaacaagaaatggaagctagaaaaaaaaaacatgaaaacaagtggaaactgaagaacacttgaaggcataacgcctaattatatctgactctcctttttattgtttattgtatggtcagttgctccaatttgccttcatggtaaggtctgatgcagcagctttcccaattttccctcagtgtcgagtctcgctcccaccattggtgaagtccgtgagctgtcgttgacttagtcggtttgttcttgtttacagtcatatctgctgatggaagaaggtggagaggttccgatgacaaatccgacggtgatagttttcctcttcttcccaccaatagactcctaactgattttctagcaccgattctctcgatgtggcttgctcctatctcagacatgaaggttttgtgtctgaagtaatcgatgtatcctgcacatattggatctgctggattcacatataaataaggtatccatgatgctgtctttggatcgtcttttggaacctgtagtaatttaagacaaacagtttcttgtaagaaaatcaacttgtatatagtagtactcagtttggagtggccaacaaggaat

SEQ ID NO: 4283 - DNA, 548 bp, Arabidopsis thaliana columbia
gaaagttatttgtatcaaaggtatcaaagctctgtctttccttggagtcatggttcatacacgttttcatgatgagtcgaaggagaagggaaaagaggtggaaggtttggatccgatggaggagaggatggcgaggctggaggcgatgatggaagctcatagcaaagcgacgatgaagaatctggctgatatgatgactgcgatgagcagatctacagctcagaaacagccggatgagcagtccagtggtgagcggagtctacctcgatcatcaacttcaacggatgatagagtggtttttcaggatgtccgatgagaaaatcgaccagagcaggatcaacgacgagacaatcgtcacgaacaggatcagcgaagggaaaatcgtcatgatcaggttcgatttgaaaacccaaacaattatggtaacttgacgcgtttgggtaagattgatttgcctcgttttgatggatctggaatcaaagaatggttgttcaaggtagaggagttctttggtattgattatcccatgcagatctgaaggtgaagat

SEQ ID NO: 4284 - DNA, 781 bp, Arabidopsis thaliana
gataatcaattcggtcgttgtggtcggactctattatggatttctgaccacattctccatagggcccttttatctcttccttctccgagctcgggttatggacgaaggagaagaaggaaccgagaagaaagtatcagcaacaacaggttttattgcgggacagctcatgatgttcatatcgatctattatgcgcctctgcatttagcattgggtagacctcatacaataactgtcctagctctaccgtatctgttgtatcaattctccatctgggcgatctctgtcaccaaggaggcatctggatgtatcatcggaccttcgatgcgtgaactgggaactaagtattggtgggtcatccggtccacgtgacacctccacaccccgacatactttgcttttgtatatttgctattatgtttatctatttatgtatatacatgcacatgatcacatgtacatatatacacatgtataattgtatatatattatacctaattataccatatctatatgagtaatgtacacctctatctctatgcatgtacagctgtcgttcagataagtatgtctcctaggaaacaagtgctctcggagtggggaaattatattattattatcggactttttaagttctagtgtcataaaaatgaagattttaagattttgtagtaactagtatatgataggaatagcatatttgctccacaatcaaccagcgaaacctaacaataacgttatgctccctatatatatactcgctcgagggacataatgttatg

SEQ ID NO: 4285 - DNA, 1209 bp, Arabidopsis thaliana
aggtgcttgcaaatcgttcacatcactgtactgcacatcaacagagaatgttccagaacgataaaacgttagagccttgacactaggaatgggatttcctttgggaaaaacaatggtgctctgctgattctcagctcctccattttgagcttcagaagctgctcctttccaagcgagagaaattgagaaagggaagctctcatgaacctaagagaacaaaaaataaatcacaatatgactagtcagataatctagagtataaaagttctcgagttgcttacaagtacatgaaaataacgacatttacttaagcgtagatatgcaccaattacctggaattcgcgaactttaaaggtcggactgagaatggcacactgcaaggcacatccccttgacacacactcacttgcattcattgtccgcctgggctccttaccaaaaaactcagttagaatcttgatcatagcagggacacgagagccagagccaataacctcaaccatatgtacatcttcaacagtgaggcctgcatcagagagagctttctctagaggcctctttacacgctccaaaatcgggatgctgatctcttcaaactcttccctcttgatgacacccctaacatctttctcatccatcaaacactcgatattcaacggtgccagaggattagcgcttagaacctttttcagtttctcgcatgtagcacggagcctgagagaagccttagcattctgggagacgtcaatcttgtactcgtccttgaacttagcagcaaaatgattgaaaagaacttcatcaaagtcccttcccccaagggagcgatcgaaagcgtgagacaagattttgagctgtccttttttaaagcctgcaatacagacttgcatgcttgcgtgtccaatgtcaatgaatgcaacattgagctggtcactctctggcaaatctgtcttataaataccatatgccaaagccgtagctgtagtctcgtggatcaagcgcaagggatgcaagccagcaatagtggcagcatcgagaacagccctacgctggaggtcggtaaagtaaacaggaataccaatacagcagtcgacaacagctgtattcaaattcttctcggcaatacctttcaggttagacaacatcatgcccatgacttgagtcggggtaaaggctcgcttctctctcaaataattagcatgtatcaaagga

SEQ ID NO: 4286 - DNA, 820 bp, Arabidopsis thaliana
cgtaagatggactaacctgcaaggagagtacggataaggaaggttggtgacgttcgcatggagtgcaacctgcacatctttccggttaaagtaattctcggcataactttcagtgcatggatcgtacccggccggaaacttgtcccacaaatcctaaaccatcaaaagagaagaattggtaagaaaaagtaagaagagagattatggtaattacattatgttacaatgatactatattgtattgtagattacgtacgtcaaaagtaaggagacgaggagacacgacgattttaggttttcttggagaagatgacaacaaagaggagaggcaaacgggagtgtagatactgtatatatcgatatcattgtaagcatccatgaaccctttgaaattgttgtagcattgttcggtcttgttggtggtatcttcctcaaaactgcacgagccatggatgctggtgtggacctcgtccgatattatagcgtggctccatgcgtagtccactagtcctgccatgtctgttgcctcattgatcaccgcgttccctatctgcaacatcaaacgaataccttttatgtttacttatagcacaagaaacgttgcttcctcgtttcgcaagtaaccttactagtagtatacatatatatagagtgcataccatgaatcccttgagattaatgctagagtctttcgtaaccttcttgttcctgtcgtaaattacctccgcgagctgaggaacatagtgacctgagaaaagaagatcaaaagcatgtgattcaatctttgttttatataatattaatatacaagattagggga

SEQ ID NO: 4287 - DNA, 798 bp, Arabidopsis thaliana
atgaattagaataaagtgtggtaagcaagaatttacatgaaatgtatagtgaaaaaaaggtagacattgattttgcaaaatatcaggttcaatccatattaagatgaaaaaaatttaaccatgtgaaaacaggaccaacatttttgtttaaccagcatgatttgaatatattttagttttactacgttatgagtattggatgattatattctgcaatgctacattaagtacctcgagtacgaaacaagatccggtggacggtggcatgcaaaaggacggtaatacccttaggatcggcatactctaacaaatcggcggcggtgtgtctattgccgttgcggtcaaaaatagtaccgccaaatttggtgccattgatatgatcataggtgaaaccattattagggacaatcccagcctccaataagccgtctctcacggccgtttgccaccgccccatcggaggctgaaacgccaccttagcttcaacccactggtacgactcgttcgctagcgctccgtcccaacccatgttcctaacaacatttcgattcgtataaattatttattttaacgtggacacaccaagtcaccaaaaacatcaacaataagaaatatcttgtatgttgtactatgtaacgaccctaacagattaaatgactattctacatataagtataataagatcgttttctcttttatttttatttttacggcaaaaatcgttttctcttttattaagtgtgtgtgataatatatagttatacatatatttaatgttaccttaaaccttagttgatt

SEQ ID NO: 4288 - DNA, 1055 bp, Arabidopsis thaliana
gagggtgagaaaggtcagtaattgaaattataactatagaaatctgcgttccatagcgtttattagccaggggttctctagtaagggcagaattaagtcagtttacgagagagagctgttggccattgtctttgtagtggacaagtggaaacactatctagcaagcaagaaggtgattataaggacagatcagaggagtctcaaacatctgcttaaccagaaagctgtgtcagctatacagcagagatgggcatccaaacttgtcagtttggattatgaaattgagtacaaaccaggcgcagaaaatcgtgtagcagacgctttgtcccgacgtccagtcacagagcaggtgatgaacatgttgttgctggctccagctactctgcacaagattgaattacaagatcaagtacaaggcgaccctagcctcaacctcatcagagaaaagcttttaagtggacaagagtctgaaaaaggatacagtttggtggttggcaccttacataaagatggtaggataatgattccaacaaattctccttttattccaaagttgttggaaaggttccacactagtcccattgggggtcatgaaggggtgctcaagacactcaagagattggcgagtgaagtttattggaagggaatgaggagagacgtggtagagttcctcagaggctgtcaagtgtgtcaacaaaataagtactcaaccttgtcaccagcgggtcttctcacaccgctacccattcctactaaggtatggtcgaacattagccttgattttattgatgggttaccaaagtctgaaggctatgatgtggtgttagtagtggtagataggcttagtaattatgatcactttgtaccgctgaagcatccttacacagccaagtctatagcagatattttccttcatgaaatagtcagacttcatgggtttcctgagagtatggtctcagatagggataaaatctttatcatcaatttctggtcttctctgttcaaatcacacggaacatccctggataagagtcatcatatcacctcagacagat

SEQ ID NO: 4289 - DNA, 1571 bp, Arabidopsis thaliana
aatatctttatactcagtcactcaaactcatctttcaggattagaatcccatatccattccagtggggactccgatattcaaagcgagtcatgtttttggaatgtttggtgctgcaattgtcgcatctgcagaggttgttattcatcatattagtttctagcttatgttaaatattcttcatgttacatgctacaacttgttcttatgttatgtatatccttattttctttagtctaccggagtatttttcgctgcatctagactagcaggagcaacagcgcctccagcacatgtcgtctctcgtagtatcggtctacaggttttatttccagacactaagaaagttttttttaatcttttcgttttctgttctctctgctaatgttccgaataagtctataagctgttatattttcctttaagggtattggtgtgctccttgaaggaatatttggttccattactggcaataccgcgtccgtgtaagttctaaatatctcttgctatatgtgctactatcctttcagaatttatacaaagaaactaggtatataattcatcttgatgatatatacagggaaaatgtcggtctccttggcctcacacgaatagggagtagacgagtggtgcaggtttcaacgtttttcatgatatttttctccatatttggtttgtctttcaaccctctaatcagtcatcttgactaagtatagaaagtagccgttcatgggttttaaatccgcgtgttttcaatgatcttcaggaaaatttggcgcgttctttgcgtctattccgcttccaatctttgcaggcgtatactgtatactacttggaatcgttggtgagtagcattttgtatatgaacctacactacctgatttcttgtaaaagccggggctgcttatgatacttttgttatgtgattggcccagttgctgttggaatatcgtttatacagtttaccgacactaattcgatgagaaacatgtacgtcattggtgtctctctcttcttaagtctttccatcgctcagtactttcttgccaacacttcaagagcaggatatggaccagttaggacagcaggaggatgggtaagcctttcaaagacccattgtttgaacaccattttacggtagtatagggagtgatataatatctctactatatagtgtttctttttcttaaatgtgatgtcgcggtgaattgtggtgcagttcaacgatatacttaatacgatatttgcttcggctccgttggtggcgaccattcttgcgaccatactagataacacgttggaagcaagacatgcaagtgacgacgcaagaggaatcccgtggtggaagcccttccagcacaggaacggagacggcaggaacgatgagttctatagtatgccccttagaatcaacgagttaatgccgacacggttcctttgaagactgcccctgaacgtttcttctgtatttggaaatgtaagatatgattatgtgcataccttgtagcttcattggggaaaaattgagtccagtggatacaaatgaacataggcctttgatggataaagctat

SEQ ID NO: 4290 - DNA, 875 bp, Arabidopsis thaliana
tgttttgcaataaggtctcattgatgccttaattgtttcaaaattttgtttgcaactatttgtacttacgttaatttgcacgagtctaaactttcaattgatttcaagtcaacgtaagaaagcgtcatgcatgttagaaagtagaaacacttgttgaaaggtataattaaaacaagagattcttcattagctctttctcgtccatttagacgccacctagagatcaaaaagaggaaaatatatcaattcaaaagttcgaaatcaatagaataacattttaaaagaagaaagagaggatatatatatttacgcaccataatctcttgttgtcttgcatttgaagcattctgccctgcttgcgtagttatgaaccccacatcccaccctaggacaaacccaatcgccagttttccatccgggaggacaagctgcgccatcattcccgtaagcaaccatttgagctccatagtactgttccgtatactcgactttgatcattccacatcggtaacaacttgttcggctcgcgtaattgtggctcccacaattcaatgcaccacaataccaatcaccagccataacttcggtcctgttgtacaagtacgttgacacatcaacccctccaaatttggggtatccgcatttttgacatgattctcttttcttgaagtttgcgtgctgacacggaccacatagccaatctcctccggtccagctcatatttctatctatgtatctctaacaacctgaaaagttaactagtagcactcagccaacttactcaagatctagtaatgatttagttgtggaacagcttatgatgaagaaggactaaaattgaaggaaaaaatgatcgacctgagaagcaagagctg

SEQ ID NO: 4291 - DNA, 1703 bp, Arabidopsis thaliana
atttaaacatagctcacgcccatcacaatgcattcgatattatgagtaataaaagccagtttttgaggtatctaaatgcacaaatggaaacatgataggatactcacaaagagaaactctgcgtgctagcgaaatcttgaatctgctgccttacaacatcgattcctctatcgtctgatgcgttcagttcaagaatcatattccggtactttggtccatatagtttccgggcaacagctagaatggtggatgttttgccagtaccgggaggaccatacaacagaagatggggcaatttgttctcattggtcagcctatcaactgttttcaaaatcacaacaacaccttcagtgagcatataggtaataagctataacatgcattagcctactcaatcatatatgaaacaacatcaatttcaattttagaaaactgtaaacactaaatccctaaaaccctagggtatggggaaatagagggagagagtgttatgtgtaaagttcaattactcgtatcaataatgtcacgatgtgcagccacgtcatcaagcgactgaggtcgatacttctcaacccaaggcgtcgccttactctgcggcggaggtccaaaaccgacgacgtctttgcccttgtttatcggcttgcgaggctgaatttcgtctacgtcaatgtccatcgccgacgttagctcagtcatcttcaccgccgtaaaagaaattatttcagaatctctctcgctcagccctaatttcactctctccccggtaatggcgccaaaccctcaaggctctttccttccgccattttctctaccttcgttgtcgaattcccattttacccccaagaaatgtagcttatgctggggtcattttcgtaaagcttccggttacataaaaaaaacaccccaacaagtgaaaatttctgaatctttgcttaaactctgttgcattttgctattatatgatgatatatatattcacaaaatattttccttgtttctatgataacaacaaaaccaaaaaccaaaaacctcaaaatctttttactacaccactttaaaaaagactcttctcttgtgtcaaagctctccatctgagaccaagttcttgttctttgaagaatcacttcctgagaaaagctcttttatcaaaccaaatcctattggataagcttcctccgacagatctcctccatagtcgtgattcacactgttaacagaatagttcagaggcaacaaggcaacacaagaagaaaagagaaattttattattgatttgatgaaacagaagaagacgatacaaatcaaatcaaatgatatattaaaaagaggtgaataaaggttcagacttgggaagtttgtcacagtctgaagaaatccatccaatcctctgcttctcattgtcatagatcaccattatcccttggaaagatatgtctatcacacacatagacacgagatattgttgtcaagttatgaacaaaagaaacctgagaaaaacttagtatatatatacgtacctccaatgatattgtagccctcgagaccgatttcagttccattcagaatacccaaacatactcttcctttttcctgagaaaacaaaccagaagaaacagacttctcagctatagatttttatggagatacaagtcatatctaggccagtatatgtgtgacttacggtgattatgagatacgactca

SEQ ID NO: 4292 - DNA, 568 bp, Arabidopsis thaliana
agtagtttccggttacctggaggatgcaacctccgagactcatgccttcaaacatttgatggaagcaaagagccgcaatgagaccttaaatggtgcatgtgtcatttgttgcgcctagacatagcccaataaccacagagtgaactataattcctagctccaacacatatcatatgtgtttataaaaacaaataaaatggtaattaagtacatttgttaaaagtggaatatttatttatgaggtagtctggtagactaaccatagcaatgacacggtaccgcaataactgtgaagaacgaacatctttagtagttaatgtaacgccatgaccatgattatggccatgagttattatcggattcgctctctcctcactcggaaacaacatcatatatatcactttactcaaaggtaccatttgatcataccttattggcttattctcactctatttttttgtaatccgaggataaactcaaatttttgatattttggcaataaaactggttataggttataggagatgaaatgtccctaaaatttcaagataaagtataaactcaactg

SEQ ID NO: 4293 - DNA, 785 bp, Arabidopsis thaliana
ctacgatctcagaaacgcagcgttttatatgtttgaagaagattcactagcagaagatagcaaattactcatctaaacactacaaaaagttgagaaagattcaacatcattctcaagtgttcttacaacaaaagcagcaacttacataagcttgagctattagtgttcatcttcaagaatgatacaagacaagtaaacattttttcatgaaactaatctgtgatagtttaccatttttcccttggagtaccatcagggaacacaggagtaagtactttctcttctttctttctaggactacttgattttctacttgaaggacttaatccaatcttcacgctatcttcttcttcgtcttcatcatcatcatcaaagttaggaggcacatcttcctctccttcgtcatctgtccaatcgccatcatcatcattgccaccatcttcaccttccaagtaaccatcaacatcagaccattcttcagcatcactttcttcttcttcctcctcaccatctgcatcgcttccatcgatctctacctctcttccttcttcgtctttcctgggtcctcctctccttgggaaccttggtacagaaacaagtgcacgcatcttctctttcacaagagttaaaggatctttatctatcaattcagagttcctgtaagcttctcttaagaacaccgagtctctttcacctttcaaagacacgtagaagagatcagagtgcctaataagcattcccctcagttgttgtgagaatctgaattctcacggaaatgagtcaag

SEQ ID NO: 4294 - DNA, 493 bp, Arabidopsis thaliana
tacgttaccgtcacatgcaacaacaggaacaacaacaacatttccacttcacgacggcgcgtggactcgtctccggtcattctctttgggcccatttcgtgtttcctcaactcaatgctgttcctgaaggaaacaatcaaggctctcttgtcattatgaacttagaacccaccgtctcttcctcaactctccgtcacattttccaagtttatggtaaagtttcaatttttaacgagataaacaaataaagttgcaaactttatgctaattagtgttacgaaaatcattgtaggagaagtgaagcaggtgagagagacgccgtgtaagagagaacaaagatttgtggagttttttgacgttagagacgctgcaaaagctctccgtgtaatgaacggaaaagttatctccggtaaaccaatggttatccagtttagtcgtcccggtggtttaaccaagaaactcttcttcgcttcacacttccataaaaacttca

SEQ ID NO: 4295 - DNA, 922 bp, Arabidopsis thaliana
tgaggctaatacatatgtgaaagttcgaataaaatccatcgaaagaagagagagaggtaactggccctagatcttgttcacatgtgtaagcatgcatagacactttgtgcattgttaaacagtttattggactttgtttcttctccttgtttctgaaagttttcttgtaaactcacagtttatctaggaaaatgattttgcccttgattcacgatcttataacttaagcagtttaccaggtctcttgattagggtcctcgttttgcttgtcattatgttctctattaggtttgagttgtggagactggtttcttatatctctttggattgacaaccttatttgatacctttttatgtctggccgtctgagaacacttccaagtttctgttaagttacttgactgctagtctttgtttatgtatttaggatggtatgatgtaatacttaactccttaaatggctgtaaatgggctttcaaggagggagatgttgcagttctttcaactccactgcctgaatcaggtgcgtttggagatcattgatgtctggttgtttctatattgctagcttctgtgcattttgtataatttttctcttctttatgctaagatgaagaccatgaggatgctggacgtgtcgctggtacagttaggagacatataccagttgatacccgtgaccctcgtggagctactctacatttctatgttggaaattctggtggcactggcaggtaggttcatatattgtatgttcattctttatctgttgatactctgtctgagtttttatcctttcttctatttttcacaaactatcagaaattgaaagcaaatatttatagtctctcatctcttctccatgtatttgcatggaacatttattttggcagcaagattgatgatagtcatattttacgga

SEQ ID NO: 4296 - DNA, 945 bp, Arabidopsis thaliana
accctcacttcttcttcttaagaacatcaacaacattaagtccaatacaataagcaatagactgaacggtgaccatcggattaacccctaaagcggtcggaaaaacacttgtgtccgccacaaataacctttcgacctcccaagtctctcctgttggcctcaccgcggattcctccggcctaattcccatcctacaacttcccatttggtgagctgaacatatctgacctgacaaatccttcaacggctttgaactctcttctctcacaaaccgctcaatctctaacgaactcgctgttctaacattcagactcctaccttctgaatgatgcgtcccaatctcctcggctccggctgcggccagaatcttcaagactctttcaagaccgttctttagactctcttcgtcttcatcgtttaagttgtagtcaatgtaggtcttggaatctattgttccggttcctttatctctcagaagcgcaaaaatgtgtgcggttcttgaaaatttgagcattcgggttttgaaatccttgcttgatgtccagggaatgatccctgagaacattcctggatgtagagcaggtgtctggataaccatttcaccataagaactatgcgtttcttcaattacaacgctagacatcgcagtcattattcccccctcgtagctctttttcttcttttccggccacttatcttcctctggaaaccatccccaagccataacaaccggatgtagacaaaggtttctcccaatgttactattcttcaaaccgctacgtttcaacagatgcggcgttctaagcgcaccgcaagccactattgtcactctagactccaccacataaatctcttccccaaacgcaaacgcaactccagttgccttcttcgtcttcccctgttcacagtcgtacatgacttccgtcgcttgacaacgtggaagga

SEQ ID NO: 4297 - DNA, 746 bp, Arabidopsis thaliana
tgaaaatgtgatatgggaaatttcaattgtaatattactattgtagagaaagaagtcagaaattcaaaagaaaaaccaatcgtaatgcccaacttaataaacatgggctttgtttttgaaagaggcccgtatagatattgacctcaaacttagggaaaccctaatataagagcaaaccctagcagcgctatctccctcagcctcatctttcacccactactattcgccgttcgcttttccctcgccgtcgaaatcaacatggtatcgttttctatcatccttttctctaactaatcacctgtattcattttcttctttctcttgtctgaatcgttactttcgttgtcatggttacaggcgccgaagaaggataaggttccgccaccgtcatcgaagccggcgaaatccggaggtggaaagcagaagaagaaggttcgtttccgaatataatttaggtttaattggaatgtgtagagagatctggtttgtagtttctgaaattgtgttgtttaagtgaagcttgtaaatggatttgttttgcgattgatgttagattagtgttggagtttgcattgtctttgtacttaaatcgttgctctctttgtttgatggtaaacaaaaaaacagaagtggagcaagggaaagcaaaaggagaaggtgaacaacatggtgctgtttgatcaagctacttatgacaagcttctcactgaagctcccaagttcaagctcatcacacccttccattc

SEQ ID NO: 4298 - DNA, 546 bp, Arabidopsis thaliana
ctaaagcgtttctatccccagcgttaatccggcttccagcccattttcgaacccagctacgcccatcccataaaaagagatttttggctgtctgttgagaaatcgttgaagcaccgcgaatacggttttcattgcgctcgttgtgcgccagggctttctcaatggaagcgacatcaaagccccagtgctcaggaaatttctgatcttctgcggcaatcaccgccagtcccatccacggcgagatttgatccatactgacccagtcagaatgtgccacgtaacgaaaattgccatgcagccaggcgctgacctgtcgctcgaccattaccgctgagaagggaacaggcgcaacgctaaacaacgcgatgcccccgccccagaaaacggcgaggacaaccattaaccgcaaaagaaaacggcgaacgaaactaaacaccgttaagcggcttttactcattcagccagaaccagcacgcgggaaaccagcttatcaatgccgctcgccgcttctgcaatgttctgcgccacgatatatgctggggtggt

SEQ ID NO: 4299 - DNA, 540 bp, Arabidopsis thaliana
ggcttttagcgacaaaagcagagactatacacttcctgatctaagcctacttgtggcacaaaaaggtcccgcggtgtcgggttctgcaccaccagcaggttggcagaacccgcaagcgcaaagtcaatactcaggttatggcggaaccgatatatgtacccatcatctgatcccaacgtggcttcaccctcaggtcaacctccttactatggatgagatatttgtttactaaaaatttcggattttgctgccaatggggagtatttccatgtttaggttgtttgaggttaaaagtgtgattgttctttcttttttgttgttgacataatttaagtggggagaccaataataaatcgaatatgttgcgcttgctattatactcaaataacaaatgatcaagatgtgaaacgtcctcaaaatgaaacataaacagatttgaaagggtacaatataggttgaaattgttattaattcagaattttaaatttaaaacaaaattgatttgaagaaggaaacaaagacattattatttcttggata

SEQ ID NO: 4300 - DNA, 957 bp, Arabidopsis thaliana columbia
  unsure (1)..(957): unsure at all n locations
cgtgtaatgcaataatttagtttaaacaacaaaatcgtcatactccaaatcttcaaaatctcaattcttccgtttagtttgtcaaaatcaattggaaaatccaaaacaaatcagcgtgataattattccattaagattctcacaacaactgttttctctgctcttgtggatatgaatgtatcaagcctaatttctaaaggtcatcgattgtcatcaaattaagcatatcactaatattgtcatcaacaaaaaaacatacataattaaacatcattgaccagccgtaagtcatctaacatcacacatccctaacaaattgcaaaaacaaactctaattgaccattgttaaatatctaagacctaaggatatttagggagacgtacactgcatactagtcgaccatcgaatgacaaaaccgatctatttgtcccatagatctcgtcatcaacattatacaacttggcacttacattctcacaaacggctgacatgtactgttctccccataaagcagaagttcctggataaaaccctactctcccagaaaacaccatatcaagacccaccacacctcctgtcaccgccacttcatcctccatttcccaagccgcctcttcatcgataacttttgtttcgtttctcttgacaataacctcgttcttctctccgcctttctgccagaacgaatcagctcttgcggtcgacacgagctttccccggtgaaccagccacactgaaggattctcgtacgtgacatggagtttctcgttagggtttttgatagagaacgttgcggaccagaccgggagattgtggttggcgaacgatatatgcattgattgtacgtgtactgtggggggagttggcgtaacaatatgacaaacgtacacctgctacacaagcacccatgatcgtgatggctanngaagagttgaaaagtagtgaccagtgtgaga

SEQ ID NO: 4301 - DNA, 599 bp, Arabidopsis thaliana
agatgaagaattctatagatagatcctgtagagttctattaagtgcctcaggcacttcttgaggatcatgataagtacacctttcatatgaacaagtaaccaggttagaagctacatagacttgacaactgattaaaaaaaaactattaaagcatttaaaccatagtgatgcagaataccatagtttggatgtgatgaacatttcctcacgcttaacaactccaccatcaaacaatttcttcaggactaacccaatctacacaaggaagaagacatgaagttttttccagtcactaaataattcacattgtcaagtaaccacaataatatatagagagaggttagcctctaattgcttaattcaaaacaacacagaacatatcaatagaacaacagtcttaagcaatcacattgtgatacaaaacacaacgcataagcaagaacataactttttactttaagtcccaataaaaatcaagtagcatgacagaagtatcaaaattgaacttaagaacaacactttccttgaatcaattcagcttaacgtacaacaacttatacagagaccagaaccacaatctcagaagatgagtttttgg

SEQ ID NO: 4302 - DNA, 883 bp, Arabidopsis thaliana
tggaccttaaaattttaatttacataaagaaaaactatatgatatatatattaatgatatatgtaagttttatataattcaattaaaaaatatagttctttttattatgtcaaaccagactagtacataatcaaccaaaaaaaataagagtatataatctacaaaatgctaaatatggaagttgacgacaaaattacttaagaaaaacaaaaacaagttgacgaagaaaaaaataaacaataggcaaatgaaaattcagtgacatattctcaacatggtcatatatatttaactttttttcctttaagaaagtttagaaaacagaggtcaattaaagtaattaattaataaattagttaattacctgtgcaacaactcgagtccggtgaagctgaacctgggattcaccagattccacgccaacaatcccgtgcttgtgaccgtgagcatgcacgtgcaacccgagctcgtctccatgttatagttatttactatttagacttctgaaagaaagcatacagtaaaatgtttagacaacactctctttgtctgagcttatcattctctccgcccatcacatacgcttggcccatcctcattagcccataagcccagagaatcgttttctcatggaggcaaaccaactttgtcgatttaaaaacgatttcatctaaacacaaaattttcgattggtcgtcctttaccaggaccctaggtctcgcatctaccatcatgaaccaaagcacaaacccttccaacaaaaccaaagttaaaactctgatggtttacacatgaaagacagcatgacctacacctagggggttttgtgtgtttgtgtgagaagtaagaaggtgagacgtaggggagagaggtgtggagcggg

SEQ ID NO: 4303 - DNA, 982 bp, Arabidopsis thaliana
tgctctagtaatcgccatcgatcaaaccctcgaaatctatgagttgatcaaaatctaggaattgatcaagatctatctcttgatcttccaagtttcctgtaggtttgtcgttactctcaaaaatcgccaagatctgatcatcgaatacaaccatctccgtttcttctttgagacgatcatcatcaggaacgccaaaagttgcagaacttaactgaagatttagggtttcgtgtgaaacaagattcttaatcttgatgtcgttgttaatcttgacgtcctcttgatgatctcttcgataattattcacagattccaattccttcagatctctcaacatcgtagacatcgactcaatcgcttttctcaactcctccgaatcctccgatttagcaagactctcgtcttccaccataactctaaccctagattctctttacgaacaagaccctgatccttgaggaaagcggaaacaacagaatcaacagaggaatggccgaaggagtagaaggagacgtgagagttggaagaacaaggagtcgtcaagatcgcaacctgtgaatcggaggagagaagacataatagctccgcggctttactgtaaagaccggtacgacgtttggagaaacaaacggctcgtgactctttcttctgaatcttctcaatcgaaattcttctctttagtcctcccattctgctttctttgatttcacagagattttgagggacactacctctctctctttatagatagtgtatgtaacaagaaacctagaaacaattgtatatataaaaatgtcggtggttttataggagggatctaggcccgtatcaggcccattgcaagaggaaattcaaaattttgtcttcttttggcccaaatcaatttaataaaatctgaattaggggttttgttttttgatttcatgatataaacgacaaaaaccaaaagtacatatataaccagaactcaagagtcttttat

SEQ ID NO: 4304 - DNA, 1068 bp, Arabidopsis thaliana
gccatgaaatgctgctgggaaattagcctctaccccatcaacaacgggtctctctccgctggacaatatggtaagctttggcatattctcatctagaatcttacgaagctcggagagaaaccgatgccagttgtcatcgttctcttcgttaacaatagcgaatgccaaaggaaacacagctccatctccatcaaatccagtggcaagcagcaacgtccctggatatttgctctttaaaactgtactgtccagtgcaataagaggccggcaagcatttaaaaaaccagagattgatgcttggaaagaaataaacaagtgttgaaagcacccatcaatgggattcacatgaaccacagcgacgctcccaggattagaccttctgatttcatcacagtattggggaagaaggcgatattcttcttcaaatgacccacgaagagtagacccgcgaagagtagccattatgcgctctttccccctccatgcctgcttgtaggacagtgaaataccatgaactcgataaatctcctctagtatctcctttggtttgaaatgaggattttctttcagcttttcagcaacaacatcagcaacccactggactgaagcttgctgatgaccaagatgcgaaatcccaccacaagtatgactcccgtgaatagtccttatcgtaaaagttggagcattagaaactttggcgcagtgaatcctccatgggcaacccttgctgttgcactttgctgtgaagcgagtcttgtcagatttaatcgttcgcatctcaaaacgcagagaaattgctgcatttttaatcgctctcctacaagcataggcatcagaaaattccataccaacgaccatttcatgtccagtaccagcacccgaccatggaccagcattgagagctaggagaaggcatgactgatttctgagaaaactcggtgctttgactcatctccaactctaatttatcatcggtatcttgagactctaccttatggatagcgcccgtggcttcaataacagttgatttatcaatctcagagtcatcattatcaggaaaggagggga

SEQ ID NO: 4305 - DNA, 586 bp, Arabidopsis thaliana
cataatcctatacatcaaaaaacagttttcttatagaagaacctgaaaaacaagatgtgagccattgaagaataagaagaaagcattaccaagaatctgaaggtggagagaggcaagcctctggtcatttctgtccgagtggacggtgcagatgaaacaataaggcagatcaaagactcccattgattcttccccaatgaatcacccgcaaacattatggttttgcccttcattttcaacagaaactgagcaccattgaacctaatccatttgtgaaagaccagaaatcaaacactaaaaccacagaatctctgattttgagcagtcgtaatatcttaaagtagaattctttcaaatgggtttgccaaaagaatacattttgacaacttagctcagtaaaattctgacgaaatcgaacctcattaccaataacgacacaggtatacactattaccagaaaactcaaagatttaaccacgaaaattagaaaactttatgacaaaaaagaaagaagaagaagatgagtatgtgtacatacgtgggtaaattgcaattctgaggttgcatcgatacttgaggtagcaga

SEQ ID NO: 4306 - DNA, 600 bp, Arabidopsis thaliana
catttccagtccggcggtgtaacatcaataaactctttcataactccatcacttgtggtaagcctaaacgataaacattgtccggtcaacacaacaccagtgctccaaatctgtccccaattcttcttcatcgcaatccactgggtccttgttcccttaatttgcatagccctaacagctccagctcctcctacattgtacggtaagatcattaagaaatgaggatttcccttgatttcaaacttgacacctccgattttcgcacaaggaacacgtctaaatttaaccgggacaaccccggctttgtatttagctattttgaggaacattggttgcgagagatcaaagtgtttttgtggcgggttgcaccaattgtcattgggcttggtaaaatctggtggacagaagtttgtagctgtgatcttgatggaacctggcaaacaccattgtggagcgtgttcgacatgatctcgtaacaagcccacaccttgagccgttgttaaatagtgcggtgcttagtgctgcggtctctagaccatatccttgtttgtgtagatcccatatcacaagctcctctatcaaatagaaaagaaagtatgt

SEQ ID NO: 4307 - DNA, 526 bp, Arabidopsis thaliana columbia
  unsure (1)..(526): unsure at all n locations
nnnnnnnnnnnnnnnnnnnnnnctaaagctgcttaagacaagaccgccagcgcaattccgctgctgaagccttgttcgtgctggttgcttccactaccaacaccccgtcgaccagaatagcgtgcacgccttgattagcgcatgcgtcgttaatgtggtccgcgcattcggaagccagacggcaagccgctgcgtgatcctctgctgcttcatagtggaagactagagaacaatgacgctgttcaatccagcttccttccgcgcgctgcctgtaatactcaagcatctgcctcacagcagtcttccaggcgtcggtctggtcttggttcgtaagcttcgaccacgtttccgagtacggctcgcgaataaagcatccattctctgcgatgaggcctagtccagacaccagtcggaagagacgctccagctcctcgggcatccgcgcactcataacatacaccacatttctcggatcctcggtcaggtcggccagcgtcgtgatggcctttggggggtggtgcgatga

SEQ ID NO: 4308 - DNA, 646 bp, Arabidopsis thaliana
ccactgcgtggatcagcaccatataatgtgaaagatggccttgtttatcgtgccacacggctgcctgcgcgggctgatctaagagtgacgaaaagagcttatctttcagcgtgagatcgtgttcatagacaatacgacgaatgctgccttcaatgcccagacgatcggcatgattctgataatagaaaacgaaatcttcgctcagaacatcgtggagaaacggaatggtgaggagatctttgggaagctggctcagagagtcgctgtcgagaaagaggtccggctcattgagatcgatttgcagattgttgtgcaccaccagcggcgacaacgttttttctggcccactgccagcatattgcaacgcccagacgccagcggaaagcagtgctattgcgccaaaacctacaagaccatagaaccgccagcctttcgcctttttttcaccactcattgccacattccttgtgtatagccagccattttttacgggcacagccaaactttaccgtgccctaatacgacaaaagcccagactttgcagcctggacttttcaattcaaacaagggagatagctcccttttggcatgaagaagtaaaattattcttcttctggctcgtcgtcaacgtccacttccggagcga

SEQ ID NO: 4309 - DNA, 488 bp, Arabidopsis thaliana
ccgaaaccaacgaggggtgaatggagatagtgcatcaagctgttcgcaagtgccaacttgatcctctgccccagggatcaatcccagaccatggaaccctaggagagccgccgactccaacgaccggccatgtacgatccatactagatctgagcagtgtggatcatccgtgtcccctctgtggtctcgggagactatgccgaagactagctctgattggatcccggtttttagaagaagatcgaaagtttcttgatgtcctgcttccatggcgaaatctcctgctgagagatttgatggagataatgcgttccatggagctccggattcgagtaacgccgttactatctctgcgtttccgattttagcggcgtgcattaacggcgttaaaccgtcgttatcaaagtgagtaacgtcggcgccggagtaaattaaagtttgaacctttttcaagtcgccgggatttagcagctaaacataactgatct

SEQ ID NO: 4310 - DNA, 1066 bp, Arabidopsis thaliana
attaaagttatcaaatccataatcgaccaacatagaatttataaatttacacaaatcacttaaaatattagattgatacattcttataaaaatcaaatccataaattatttttaataacagtgaatttaaaggtagatttttaaattattattttaataacactagatttcattagaattttcaaaatccataattaaataacatatacttgtaaaatttacgaaagtcactttaaatactagattgaatatacctcttttaaatcaaaaacgatgaatggatggtaaatatacggttcacccatacccattataaaccgtctttttcacaccttccattcaacaagaactaattgttgcgtatttgaccgatcgaagcaagaaggaacgttctgtttattttcttttttgttaaaaaaaaatcagtatttaaatcgtgatttgtagaagaagtattatcataatgcctctacacaaatctgtaagaattgagagagataatttattttaaagaatcccaaagaagcttcaaagactcaaaaaggaaagtaaccaagaaaaagtcaatggagatggactcaactactacgatcaaaccggagaccctatccaccgtgagttcctcacctccggagaaaatccatctccggccaatgactctttccgacgtcgacgatttcatggtttgggccactgactcaaacgtcacacgcttttgcacgtgggagccttacactagccgagaagccgcgatcgcgtacttaaacgacgctcttttgccacacccttggcttagagctatatgcttagataacgaccgtccgattggctcgatctccgtaacgccagtcgatgagatcagaggagagattggttatgtcctcggaagcaagtattgggggaaagggatcgcactgaagcggtgaggcttgtggcgggggagatattcaaggagaagccagagatgcagaggcttgaggcacttgttgacgttgacaatgttggatctcaaaaggttcttgaaaaagttgggtttgtgaaagaaggtgtgatgagggaatttatg

SEQ ID NO: 4311 - DNA, 563 bp, Arabidopsis thaliana
taagtgacaccaaactcgccgcggccgagttctctgtcgagtaagtaacggtcctcgatgttttccttgggaacatcgcttagaactcgcatcggcgccgattttttaccgccggcggcgtctttgcgggcgtgatcgtggccggaatagttggatttcacgtcttctctagcaactgctgcgggagatctgcaacagtttcccatcactgtgtgtagctctgatgaggggtttcagaagtagaaagtaatagaggtgaaagtagatagatctctagctgaatttgaggtatctagggttccacattctacgctttgggaggaatcgtgacaatggaagctatagctagagagaagcgtagatcgaagaagcgtacggtgaagatgagagtagcgagagagagagagagagagagaagagaggtctcttttgagtttttgatatttatttaatttctttattttctgtattttgtaaaactcaatcataatttggtctccttggtttctttttctttttgaaaaatggtctttacttgtttggtaaatttacactttattgga

SEQ ID NO: 4312 - DNA, 557 bp, Arabidopsis thaliana
gctttattttggcattgagctcaccataaatgtcatcaaccttggtgtgcattcctttcatttgcgtggcaagattgaatgctccacttccttgcccttctagaatttttctaagaagagtgtttgtatcatccgcttgaggtggaggattcgatgaactcccttggtgttggttgtggtggtaggcttgaggctttgtttggaagttcccttggggtttaggttgatagttgggttattgtgtgaaaccaggaggttttatgggtgggtacctttgatcttgtgggttctccacattagtgctcctatatgaaaggttgggatgtcctatagttggggttgaatttgttgtacccttgtccactaacatagtttacctcatcttgtccctctacacagccttccatgtgttcttgatacccttggtagacatcactcttggatacaaaatggatcggtttttgatttgcaagaatcatcttatctatcttttcattcaaagctttgatctctttgtggtgtagatcgctcatctcattactttctcttggagtgcg

SEQ ID NO: 4313 - DNA, 524 bp, Arabidopsis thaliana
acggccgccagtgtgctctaaagtccagaaaccaagcccaattttgacacgctgttgttcgagcgactgctcgatcatgttgatttcctcgaccatatagatatggtcggctggcaggttgcggatccaggccagggtctcaatgcccttttcacggttaccgcggaggaagagccaacgaggagattcgcggatcaagagggcgccgataatgagcaggccagcaggaatcaattgcacggcaaaggggatgatccattgtttgtggcttggggcaagggtttcgtccacgccgtactattcttgttagcaaacctggaaaaccagagaaaataaggggaagtacattgatccagaacccaacgacgccaccaatctgccaacccagctcataaaccccaacaaggcgaccccgaatagcgggaggtgccatttctgagatgtagataggacagatgttcgacccggcgccgacgccaatgcccgcaagcactcggccaccatagatcagccctagccctcga

SEQ ID NO: 4314 - DNA, 511 bp, Arabidopsis thaliana
taaataaaacataaatcatttgtaaacagtacattatgtttaatacaaaatatatattttggatatatatataggagtggaaggagggaggagattgtttgtctgtccgtgtcttacaaatattaaaataaaaagtgtcggtgaattctcaatctttgtcttctttcgtcgtctctttaaaactcctccgtccctccttattatgtaaccgtctcgccgtcaaattttcaaaatctctccctccgttcataaacccagatcgaaatttatggttttgtaatttttttaccggcggttatggagacggaagcggcggtgacagcgacggttacggcggcgacgatggggattgggacgaggaagagagatctgaaaccgtataaaggaatacgaatgaggaaatgggggaaatgggtggcggagatacgggaaccgaataagagatcaaggatctggttaggttcttatgcgacgcctgaagcggcggcgagacgttacgacactgctgttt

SEQ ID NO: 4315 - DNA, 1054 bp, Arabidopsis thaliana
tagttttgtatgatatggattaaaatattatattcgggtcgatttaagaagaatcaaaaggttgagggaattattttgaagaaagtggagaagtgaagggtaatgaatttggtgatgatgacaatggagagaaggtgcaaccgtgtgcgtaggtttgtcgccactctttgtcggctctgttctctatctgcttaacaagccctcacatttccctatttccacgttcttctttaggatatggagacggcttcactcacgtgtttggtagggcttccacgcacatgtatccatgttacttcttcccattttcttaaaaatatattttaaaagccatgaaacttttttacttctcgataattgagattttgtactttgtagtttaaaacatcactatgagtatgttgtgttctatttttttcttctgaagactgaagatttgttacatttggaatataaaaattttcttgtgaagactgaagagttttacattgattgaaatataaagttcttgaaggaataaacggttaggtttctaataactaacaatgattattttcaacattcaactgaatttagatgagtttaaaattccctgatcaaaataacaaaaggaggttgatggtactacaaataagttgcacctattttcgtaatcttaagtttgtcgtaagtactatgtcgataacagaaaattatcggcatgaaccaaaattgtaaagagcaacatgaacatcaacgaatttatcaggttcatccgatttttatgtataagtgtaacatcaacattttcattatgaaaagaaaacattaatcaacttttacgtaaaacaaaaggaaaaaaaaaaacagaacacacgactagaataaaactaaaagttaacctctgtacaatggagatctttgttgaaaaatcatcttggagactcttgattgtctgaaaaccttaatcggacttggaaagtaccaccatttcccttactagtcaccggcgtcggtgagaatagaacttctccggcaacggaattcgacttcttcataaccttagcagccttta

SEQ ID NO: 4316 - DNA, 937 bp, Arabidopsis thaliana
cactattcaaagccatttcgataaaacatccatcttcgtcacaactgtttgtaaacatccatttggtggtgtgtcacgtccttccatctgatcaacacatgggtttgtagtcttctggcagacccccgagaatgtaatcaacttgatcttcatggtcaatgattttgccaattaatgccaactgatcaaatcgattgataaagccttgaacgtactcgtcgatggtgcgggtgtctttcttccattgtttgatttggtgttggagctgtttgatatggccacgactcggtttggcataggtaccagcaagagtggcccaaacatcagcagaggtagcggcgcgggacaccgttggttggacggtgagagagagagtgccgatgagagcactgaagatcaattgatcttgtctactccaggcttcatactcaggattcacagaggcaacgtcgttgacggtaatctcacgagctggagcagcttttgtcgcatcaaggtattgagtgagaccgtagccgtgaaggagagcgtggacttggcggctccacattatgtaattggaggccgtaagttttgtcacattcgacatgttcatgtgaacaatggaggtgttgttgaggttgacggtttcagaagaaacattcgacatggttgaagtttgaaaaacagaggaataaaaaaatcaacgggggagaagaagaaagaaaggagagaggcggctgtttttaggttttttatttttaggtatcgatgatgctctgataccatataaagaatatagaattggatgatttgtattgagatgatttacattgtttatatacagactagatgttctagagacttctaattacagaatatatagtttccataagtcgaattgtgattgaccttgattgacccttgatagattcgtcacaactgttctcactacata

SEQ ID NO: 4317 - DNA, 909 bp, Arabidopsis thaliana
ctcgagagaatgctgcacgaatggcgttttaacactagtctcttatacggtgtatcaatacaagtgctacagaaatgttaacaagaatcacattcttttgtaaaatgccaaaccttgagctcaggggaagcagggtgccattcaggaggaccttgttctgtaaggaggcctagtgctaatggagaagcacttatcacacccacacctttgctcttcaagtaaggtagtaaatccagcaacgtcgaatcattaacgccgtaatgacagtatgacaatatcacatcgacagtccctggaggcactcgatcaagaacataagtgaaaatatctaacggaagaccagtgataccaatgaaccgggtcttccctcttgtttcagtttctgaagagcaggaattgtttcactcacaatctggcagcaatgaatgaacacttagtaaaggtttgagacacaaacaacgaaagtgataaacccaagagaaataaagtggtaaacctgatcaagagacccgaactcaatgtcatggcaatgaagtatgtcaacataatcaagctgaagcctctccaagctctcgtcaatactctttcttactctctcagcactgaaatcaaaaccttctttatatctaccacacttagtagccacaatgtagtcacttctagggacttgcaaagcctttagtcccttaccaagcattttctcagacagtgttcctccataataccttcacacacacaataaatgccaaataaaaaagtaaatatgaaaccttccaataaaaattttgactttaacgattaaattagtctcaacattcagagaatcagcaattagtattgaagaatcagtaatctttagaaaatataaaagaagaagaagtgcttacggggaggtgtcgaagaagttga

SEQ ID NO: 4318 - DNA, 1063 bp, Arabidopsis thaliana
acctactagtgcgatcgacaccctatggaacactattttctaagacgattccatacgaaggtgtcgatcgacattgggtccggactgcaccatatgaggtgagaatcccgatgcagcccgaatctgcctacactcctcctgttccttatccaaagaagcgttgttctaagcaggagattcatgctgctaagtgcacaaccatcatggaaaagatcctcacctcacttcctaaggatacttctgagacatcctctgctccactcaacaggtatgtcaagcgccttgttgacaatggaattagctatgaggaagctaaactgctgacaagggatatcagtgccatgatgctacctaaagccaagaaagaaaacacatagagggtggacattgctgagtacatctgcaccatcactctagattagaccactgagaagctccatatctaggtagatttgttcttgattgctctaactccactagcaggttcataaattccttgtgtgatcggggatcaagtatcaactgcatgcctaagtctgttgctaagagattaggcatgactaactacaagccgactaaaatcactctcctttttgcggatcgctccaaacgcatccctgaacgaatccttgaggagttccttttaaggttggtaattgtttaatccctgctgaatttatggtccgggactacaataacgagcccaaggatcctcttatccttggaagagctttcctagctacagctggtgctaggatcgatgtgaagaaaggtaggatctctctcaacatttgtgatttggagatggaatttggcatggatagttcaaagttcactatgcctatcagtagcattgcctccagccatgaaacatctccttagactgcttagagtcccaaaacaaagccacctacaacgctccattaacctaagctcgcaaatgggagttgtagagcaacagtgtccatcgacaccacccctcttctcgatcgataccctcgggtttcagtgatagaggattctacgaactctctcaactcacacccattgcggatctctgtga

SEQ ID NO: 4319 - DNA, 3835 bp, Arabidopsis thaliana
gatgtcataaaaatccatgatagctgttgttttgtttgtactctagtaatgtaaattgtaaagcataaaagtaactaaaatatcttatgcctttcacacgtagagcccaaaacccttccgagctaagtaatctcgtgacttgtgaggcacaaaattgtctcacttgattttctctctaattttagaatagatttttattttctaaaaaactaaaaaacttgataatattatgtggacgagtatatcttataatttatagggttatatccagatttaaatctggattaggaactgtaaaaggcaaaaaaaaaaaaaatacattaaaaacaaaataaatacgtggacaataataaataaaataactctcattagtgatgaatgcccatcatgaagccgtggaagatttccaggattgggagccatgtcgttactccacgtaccatggagagatggaaacaaataatggagtgaacagagactatgttcgtgaggatgtggcagcggataggggcaaacgcaagagagaggacaccatcgaagaagatgaagaacacgagccttctaagatggtgatccgtgaggctggggaaagcagtggttgctccggagagacggttcagccgaatgacgtggggagaggcgcggtgggcccagaaccccctcttcctccatgaggacagccgcttggaactgcagaggactgggcaatgacctcgcagttcgacgtctaaaggagataaagaagaaattctctccagacatcattgttctcatggaaacgaagtaaaggaatgacatcgtcagagatatttgcagcgatgtaggttatgatagggttgtaatggttcctccaaatggtctaagtggtggaattgctttaatgtggaaaagtagtatttctgtattctgttctttatcaatccccaaaccttgtagatacttttgttaatattaatggatttgggttctatttatcttgtgtatatggtcacccaaatcctatccatagacacttggtttgggaaagattagaacgaacagcaacacaaagaacaggtccttggatggctatagggaacttcaatgaaatacgaggcaaccatgagaaaaaaggaggcaacttgaggccagaaagctctttctttgatttcaggaccgtgatacaaacctgtgacttccatgatctcaagtgtacaggagaccctttactcatggctcggaaaacgacacactcatgatgttgcctgctgcttggatcgatccttggtgaataacgaatggttaactcaatttcccgcatcccacatggaattccttgagttaatagaatcagatcatcgaccagtgatcacaacaatcacgagcgattttgagcagaagcataaccagttctgttttgatggaagaatggttgagcgtgatgggttcagtgatactgtcagacgtgggtggaacccggagaatctttcaccaggacgacaatctacgatcacgactcactgcctgcagaagagaaatatctcaatggaagaggcgatatcgatcaaatgcccaagaagatatagcccttctcaaaaacagaattgatagagctcactctgatggcacaacaactcaacacatccgagagctcagattgcagctgtcgaaggcttatgctgctgaagaagaattctggagacttaagagccggaaaacatggctgtcaggtggagaccgtaacacaaagtatttttttgcctctgcaaaaatacgatctgcacgaaacagaatgtactctatcttggacgatgcgaatgtggaacacagaggcagttctaatattggggaagtggcgcaacaattcttcaccaagctctttcggagtgacttaacgacaaataacaatcactactatgttctaaatggcttccaacaacgagtaaccgcagatatgaatgcagacctaacaaagaagattaccgaagaggaggttaaagaagcagtcttctctataggcggaacaatcagcgacaacaaacgtagtcgtaacattatacgactagttggcgacggatttacgactcgcctgcgacaacacgaaaaattgtagtcacatagtcgttgttttacgactatcgtatgcagtcggcaaagtgtcggcaagtgacgactatttgacgattatattattgaagggatattgttgtcgttgcttagtcgctaattaacgactattctaccgtctattttatttagtcgctaatatggcgactacaggccgactaagtcgtctagtcgtcctgtagtcgtagaaacgtcgcaccgtagtcgtataaagtagatggaaaacatgtttcgcattggtaagtaggtacacctaattatttagttgtagtcgtaaattagtcacaaaaattggcctatataataaacgttcacgcaactcttctttcaccaacaaatcaaaacaacaacaacatcaaagagaaaaaaaaaatattagttattttattatataatggcgggaaactataattatggcggtactggcggtttctatcgagattggatgtacaagagatttgatgaagtgacggggaatttgtcagccgaatacgttgcaggagttgagcaattcatgacattcgctaatagtcagccaatagtacagagtggtcgaggtaaatttcattgtccttgtagtgtatgcaagaatgaaaaacacatcatctcgggtagaagagttagtagtcatttgtttagtcatggatttatgcctgattattatgtttggtataagcatggagaagaaatgaatatggatataggaacgagttacacgaataggacgtattttagtgagaatcatgaagaagtgggtaatattgtagaagatccatatgtggatatggtgaacgatgcatttaattttaacgtggggtatgatgataactatcgtcatgatgatagttatcagaatgtggaagaaccggtccgtaaccattcaaataagttctacgacttgttagaaggtgcaaataatcctttgtacgatggttgtcgtgaagggcagtcgcaattatccttagcatctcgactcatgcacaacaaggcggagtataatatgagtgaaaagttggtggactccatttgcgaaatgtttacagattttttaccaaaaggaaaccaggcaaccacttcacattaccagaccgagaagttaatgcgcaatttaggacttccatatcatacgattgatgtttgtcagaacaattgtatgctattttggaaagaagacgaaaaagaagatcaatgtcgattttgtggcgcacaaagatggaagcctaaggacgaccgtcgaagaaccaaagtaccatatagtcgtatgtggtatctacctattggggaccggttgaagagaatgtatcagagccataagacagctgcggcaatgcgatggcatgctgagcaccaatcaaaggagggagaaatgaatcatccttcagatgcagcagagtggagatatttccaagggttacatccccagtttaccgaagaaccccgtaacgtttatctcgggttgtgtactgatgggttcaatccatttggcatgtctcgtaatcattcgttgtggcctgtgatcctaactccttataatttaccctctggtatgtgcatgaatacagagtacttatttcttaccattctgaattctggtccaaatcatcctcgagctagtcttgatgtcttcctccaacctcttattgaggagttaaaagagttgtggtctactggagtcgatgcgtatgatgtttcattgagtcagaattttaatctaaaagcagtactattg

SEQ ID NO: 4320 - DNA, 494 bp, Arabidopsis thaliana
cctagaccttccttcatcacttcaacagacttcaaacttctatcccaaaaggaaaaaactaaataagttgaaaggaatggtcgaaggcatggggagacacctaatacggcagctagactaatccggtggattgataagcaaactcgaaacactctttcctctatcagattattgggggataggagatatgacaaaagactgcaaatgtggtttgcttctagaagttaagagcttccgggattttgttttttattttttcagtgttgtaacaaatttaaattctgtcgcacttgtcgtaacaacgatattttttctttgaatataatttaacattaaattaaaaagaaaaactaaataaattattttgaagttaatatattatgttattatctttggtttgcaataaatagatcgagtcaaggtcgttatatgaccattgtttagttacgacgctacttcatacttggaatctaaggagaaaaaatgtaacatag

SEQ ID NO: 4321 - DNA, 566 bp, Arabidopsis thaliana
ctgttctcttctgtctctgctgattttatactcctttgaaggtatcttatatcattaatgaaagctttctggtgtaatgacacactgcagcacaaagtcattaaaaacacttgaagcttcaaacccgaattcgatcttaaattttggaattctgaaatcaccaacatcaacgcggtattccggaatatgactatccaagaatccaggattagatgttattctctccaaaagattatccagttcacctttcttgtcagggagatagagatacatcgaaaactcgcggttggtatcatcacgtccttgtcgataaggaaggcgtaggactttgaaaccatcataagcctctatgaattgtttctcatagcttctcatgaaaggcacagagactgatttgccattgagaaggtgaaatggtttatctcttgtcatggacttatcgaatgccttttccaagctcccttgaagtacaaggcgtttccatatatccaattagttaggcttgtaacagatcacgaggaagaatttctttgatgagatcattggtgtgacgtgaagccacgtat

SEQ ID NO: 4322 - DNA, 1300 bp, Arabidopsis thaliana
ctgttctcttctgtctctgctgattttatactcctttgaaggtatcttatatcatttttgcgggtacaagtaattatgttcgactgcatataaagttatttgatttgaattgtccggttcgcattaaccaaaccaacttaagctttcagttcttttttcttcccgataaaaagcaaactttcagtttaagaagctgagacatccaaaattcaatagcatcatcagctcatcacgatgcttctctgtttataatcctaatcaattttgcaactgggcgttgggcctcagctccgtaacccaaagtcaaacaattccggtttgtttaccgaattaaaccggtgattaaagtagaaccaacaacatccacacttggttttaaaaaccctcaatttcgtttgtctgctgtcttcttcttcttaaagttggatgtttcggctactctgatgcatttgcatgtattgtcgaactgaaagtctgtgacttttcttctcctctacgatagaaaccagtgacctagcactcccaactctcactcttatcactggacgcattctccaaaattttgatcttcgattaagccattcgtagcgaggtaaatgctcaagttttacctatctcctctgcttccactgattctgtttcttgattcaaagttttctttgtgtgaattcatattttcgtgtgaattcatattttcgtgtgaattgtgaattagggttttctctgttcccgtttctactctctcatcttttggggaaaagttgtcaactttcatgttttacctgtagccgtaataacgtactcttaatctcgtgtacgcaagatggatcgtgtcagcaatctaccagacggggttcgtggtcatatcttgtccttccttcccgccaagcacattgctttgacttcggttctctcaaagagctggctcaatctctggaaacttatccctattctcgacattgatgactctgaatttcttcacccggaagagggtaaagcggaaaggcttgaaattcgacagagcttcgttgatttcgtggacagagttttggctttgcaggatgattctcccattgatagattctctctcaagtgtataactggtattcatccagatcatgtgaatcgttggatatgtaatgtgctgcagcagtggtgtttccgatcttgatcttttcattgattttcctatgaggataccaagaggatgaggatatggtactcaagagatgtcgtcagtaagacattggtcaagctgaaaataagaaatgatcgttgtgtggattggtggtgtgaaagg

SEQ ID NO: 4323 - DNA, 596 bp, Arabidopsis thaliana
tagtaacgtccgccagtgtgctctaaagcggtaatctgagatttttccttcatacttatcgtgcaattgcgaagtcatatcaacttcagcagcttcggtttcttggtttttatcaatatatcctgctgcaaccatattctgcaagacagtatcgcgccgattagtagaatcttctacggaattcaagggattatacagttccggccccttgagcatccctgccagagtcgcagcttgatccagactcacttctgatgcagaaactccaaagtatttcttactcgcatcttctacaccccacacaccatttccaaaataagcgttgttaaggtacatggttagaatttgctccttactatattttttgcttaattctaaggcaaggaaaaattctttcgcttttctctcaacagtttgatcctgcgataaataggcgtttttagccagctgttgggtaatggtagagccaccacctgaacgtccagcagtgacaatagccaagaagaaacggccatagttaatcccgtcatttttatagaaagaacggtcttctgtcgcaataacagcattctgcaagtttttactgatgtcagtca

SEQ ID NO: 4324 - DNA, 1294 bp, Arabidopsis thaliana
caaaaatatacacaatgcaacacacacttcctgagccctcccccaaacttggaagagagtacttaggacaaatccaatcacagaaacaaaaaatgaagaaacaaatcacaatagatgatataatacaatggtgaagtgaggcgcttacctcagtcgaagaatgaacgtagttgctcgtcaatggctgcctgtgattgctcccaggccatagacgaaccaccttgttctctatcagctccagcaggtgggtactcgacctcatcagctctgctgcggccagcaccgcggtcgcgtaaactacgagactgcagaagttgtctgctcctactgctagatcgagtgagtgtggtcctcctcttccttcagattcacgaggctcgaatgatgaatgcctcgcagggacatgcggaatctcctgctctctaggctcgggcctgcgccgacttggctcgggcgcgtcatatctcctcgaaggcatgtcccgagggagatgtccctgcggaatagctgtagtggaagaggagcagctgatcttgtccttcagaaacttgatagccctgaggcacttggcgagtaagttgtcctgtttcttgcaccacttctgcagcttgctgttgttcctgtgagcttcgctcaaactcttgctttccctcgcaggagatatatgctcactgaaatgatacatgctcgtgtcaaactccgcctcatctatatcatccgtctcatcaacatcttctgttgtagctcttcggtatgactgatctcctcagttggcagactgccctcgaaataaagatcttcaagcgcaggcttgaagtcaatgttcctttcctcgagaaccctagtagcgtcaatgtaggggagaagaatgttggcgattctgatcgatgaatgctcgaacctgtagcgatggaagtcaccaaccatgtcatgctccaagaactcacatcggcccaaatgatccaaatccatcattcttggtgctagccctggttccttgagaggtactccacaagcttccacaattggcgtcacaacgccacctacgcatagtgctcctgttactttcttcttgccgtttatcaacgcccacttcctgtatccacacaggtggatcaatagaggcattactggtggtgcgtcgttgagatcgcctctcaagacattctttccctttgtacggcggagaatccctgtaagtgcggaatctatcatttccatgtccgtgttagacacggtgcctgcagactccctagaataaaaaacattgggaaccgagcgctgaaagtagcga

SEQ ID NO: 4325 - DNA, 7787 bp, Arabidopsis thaliana
tgcacctgttttgtgtagtaaacatatgtcactgcaattctaatatgtaccgtgcgttttatatttacctcatgattcgtttaaatatagatgcattctaactgtggcttagttgatatttaggacttacccggttgtaaactttgcaataataatgacccgtttaaaaatattttggattatacaccttagacagattaacatgatcaaaaagtcaatataaaacatgtaatataggtacatatcacgccattttaatgtaatatcgttatttgacaccattatcataacgactaacacattagacataaaacatgtactttttacaaacagaatgtgatttatagatgctacgcgggttaatataaaataacagcatattattttaaaggatgcttcccttctggttacgagatttccacgttgggtgcagcttgtaccatctaacatcgccgacagaattcttttgaacaaaagaaaatgtagcactcttcgcatctattatatatgttgtggattgatacacatggaggatgggccccattccatgtaagcttgtaagctgtaccatggcgcacagcattcgttcaagagctgaaaataaagaatcacccatagctaatacttcggcccaaggtagggcaaacagttgttcagtgaaaaattcacctagctccttctcaccaccacaaatagacaacatagccataacaaacagcgcctcatctaccttgtttacagctttaaaaatgtgtttttttgccatgactaaatctttctcccaacaagcataccttagcccttcaagataatgtgcttccgggttatttgcctccaatgcgtcgtcaaattgttttctgaacagcccacccacccgcatgagtactggattctgacgatactgtctcatttctacccttgcaagcatgtgtaagtaggccgaaggacgttttattattgacggagatgttgatagccaatatgtatatatagtccaatattgttagtgtatatattcactcatttatgtggcgtagttggggggtgaaatgtgtggtgcagaagcacttattgggttctgagaaaatagtcgaagtggcataaggaatcctatgtggaactgttcaactctcggtgcccggttttacctcacgcaattgctaaacatcacatgtggttttctcgaatagcatcttattttgatttatggttggaatgatttcatcttgttggaatccttgacataaaatgtcagttcatgatggctgaacatttttatggactttaatttgccagtaatggtgctatatctattcgttatatttgtttcatatatttcctcatttaaccccttgtctgtggatctgaattttacattacaccacgtattaataattaaacactcgcgtctttacttaatatcatgagtctgtttacaaaagggggaacataaagtttttttctacacaaaagccaaaaaacagaacattatcctttgtccgtagaaggtggtcttctatacggcacttactggaattggggtcccttgattgcattctcaacgtagcttttagttgccaccctaattgccacatctaattgctaatatgtacattataccaagtgacccttccttttacataatatccatatgtgatggacttccccttgcttatataacacaacatataactcatgaagaagacgcgagacacaacaccccctgcagatgatattataaaaattgtatgaacgttgtttctatctatagcatgatacggtataaaataacattgtacctttatatgggcattttgcacgtggcgcgattatggccggcgcctgtgcaacgagaacaacgtgttacttgtcgctggggacactgagatgaagattgagcaattgttaggaatttaaaacactaagggtgttacagtaaattccaaatgtataacgtttaccgtgaattccccccttgaagtaattcttttctttttcggccgtcccgatggacggcgcgtggctggcgggaagaggcggagagaggctattggttcaggtaaagcgaaaacgtcaccaacctcgggtacaggttttatggtacctaggtaagacattctccagctttcaacagaatattccggcgccatcagtccttgtattggaacgccttcagccactgcagccgctattgcgtgggggcaaggcaagtgaagcaaatcaaatgctctacaggagcatgtgcgttccataagcttcacgtggtagacacttgcgccttcctcccttatctcgtaatcgtacctgtcaaggcgatgaaccgcaaatcggactgatttttcaaagttacgatgaacaacttctctcatctttggtggtagaggcgatgcttcggttctagctgcctcacgcctcatagcaaaccaggaaattaatgtggtccgaatgaactctaacaaggaaatgattggtagttcacgggcttctttcaagactgcgttcaaagactccgccacattgctagtcatgacgttgtatctttccccaaggaaataagcgcgtgtccaatggcaaaaaccaacagattccaagtatcgtgcgcaagccggatctagtcttatcacctcattgaaatatgtatgaaattcacagatccggaaagccctcgcagctcttgacacgtggaacagcaagtgtttcttcttatatgaggtcgctatgtttcgttgcagatgaacaatacatgccccgtgcttagcctttgggtagacctgcatgttaacatgtgttatacgtatatagcagggcatattggtagatagcatgtgttctaaaataaataagagccatatgctgtatataacatgtaacatttaaaattatcaattttaaggattacccttcgaagaccggtataaatggaggaatgtctgtctgagacgaaggtcaggttatctccatccggtatagcggtgctcaaaacacggaaaaaccattcccatgcgtcatcgttttcgctatcgaccacgccaaacgctatgggaaaaacctggaaattagcgtcttggccgctggcggttaggaggcatccaccgtatttgcctttcaggtgggcaccgtcaataacaatgactcgtttcatgcaagagaaaccttgaatcgatgcggcgaatgctaagaacatgtacttaaaccggtgattaccctttccatcaacctctgtctttagatcaacaattgaacctggattagcctcgcgcagcacatgtaggtaggctggcaacagagtgaaactattcgcagctgatccttgtgcactatccatcgcaatttctcttgatttccatgccttccaataggaaattctaactgagtaatcggtcaataggatgcgttgaaggtcaatagcccttggcccccgactgttgcccgcatatttagactgaattatgctgcctatgacccgcgttgttgctgctctgtggtaattactcctttcttctacagtgcaagtgtgctcgagattagcacttcgaatttggtaattgtcagaatcctccagcttgacgatgtatacacgccaagggcatgtttcagaaatgcaggttaaagtcattagtttcttgcaggaacgatcacgacggaaatggaaccgtctattaagtgcgtgaactgctaatttgacattgcaatcctgtttatttttgaatacccggccaacaaacagttcatcaccttcgtagaccacatcccgaattgctaattccattccgacgcggcctacacaacaataaagttcgtgtgttatttacactgtacacatgttgtgaatgtagaaagcatgtatttgtatgactaaatagtaacactttgaccaacataatatctatatcccatgatgttcaatattaaagcatgttactctatattttgattagggatatctcagggatatcaacgtaaattgaaaccatgtgttggtttgtaagcatatcattatattacatgatattaaatacaatttgttatttaaactaaacaaatatgatgtggatattaagattgtattcgtacgactaatcaggaattcagcgaaattaaatttttattgcatggtatttatacgaataacatgttactctatatgacggttattattagaacactcttgcaatatgtgttgttcttaaaaacaacatgctatgtaattggtaccttcttccccttgttcgtctagggttggcgctgcatccctgttgaaagatgcgaagttaaggcacatgtcttcaagagcctcatgcagaggtaccgcgagatccaagtgtacacctagaggttccaccaagttagttgcggaaggcccaaaaaaattgcactccttaattgtctcgcccccgggatagtcgttttcgtcgttgtacgcttccccttcactgagagagtcgtaagattcagtggctaaattaattgacggtaaccccagatttttaagtaaatctgcctcaacaacagttgagtcttcttcctgcgtaaatagatgtcttagtactgtaatggtatattcgagtggctgaatttaataaacgcagaatattttacctgatctccatcttcagtcgctgtgtccatactttcagtcgttaacatcggggaagctgcctcaacagctggtctcacagggtgttgttgtacgttggtagaagagtctccaacgttttgaccttctgtttccgttgaacgcatccagcggaggaccgcctcgtcatccataagccttttccacacaacggactcgtagttaggtgatcgttcagcgttgacgtataaaggtgatttgcctttatctgcaaatccgtaacttgaagtctgacttgttccaccatcttcggaaccatcatccaccgtttgcttggagacaaacaaactcaagtcctccaactcaaaacgcatagctagaaacactcccattgtctcctctgaagttatgcttactggcttcgtgcgcccaccaaaggtagtttccatgtccatccaatcaggccattggtaagtcaggtgtagtgggccttcaacgtattcctgtccgtacgcttctctaacaagctggcgcacagatgctaacttctccccttccccaatgctcaacctcctcactgcattattgtgattggatatgaataaccatgttccatcagctccgattgcccaggagccactcaccgtcctgacataacgatcgtcggttatttcggttataaccaccatcggtacctacacattaatagagttgcattaaatagagataaatcaaccatgagttttttaaaaatagcaacaaacccgaccaaaagaacattcattaattgcataccaaaacagaaatgatcgagttcttcgatgttgttggatacgtagtgtgtgctttataggaagaagtagaggtgtgagagatgatatcttgccatctttcttcttttatagaaaaggttaactttgttttttagggctacagtaactaaagatatttctagtaacagttgcttaaccatttgcagccacgcgaatttcaaaacggtatgatttccctcccaacacccgagggaggcgtgaagcgacaattcacgaatgtcaaatcgaagtggtaagcgttctttatttgtattgcatgttatcgtcaaaataaccaggtgatttacttagtctttgctttacacattttcgtgaaccgaggtagtatatcttctgcccccacttgcctattcgtaatcttgacgtcattgaccaacgtgtcaacttaacgacctgccattctgtagcgtatagcataagcacacaaaccttgctttacacaattaaccaatgtcaaatcgaagtgttaagtgttctttatttgtattgcatgttatcgtcaaaataaccaggtgatttacttagtctttgctttacacattttcgtgaaccgaggtagtatatcttctgcccccacttgcctattcgtaatcttgacgtcattgaccaacgtgtcaacttaacgacctgccattctgtagcgtatagcataagcacacaaaccttgctttacacaattaaccaatgtcaaatcgaagtgttaagtgttctttatttgtattgcatgttatcgtcaaaataaccatgtgatttacttagtctttgctttacacatttccgtgaaccgaggtatagattcagtatatcttctgcccccacttgcctattcgtaatcttgacgtcattgaccaacgtgtcaacttatcgacctgccattttgtagcgtatagcataagcacacaaaccttgtgttaaaaagtgctacactaaagaaaagggtttacacatacaacaatatattacgttggaagctgtatatcctctgacgccgcattaaatgcgtctgatacgtatctccatctctcttatctcgcgctttttattgtcacatccgggaatttttctaataattttctcttatgttttctttccaagttgctccgatatgattattgtgattttaaaacatcacatgttgtttccgtagtacttgtgctgtttaccaaatcgtagtacttctgctggtcatagattcaaggtaaaagcccattcaccttgttgaataatcaatccagtacaatactcacccgaaaaagttaccagcccaatatcgtggtatatactccatttcaatactaatttttttgttttttaatgattatttttttaaaaaaaaaatgaaataaatcctttcatagtacatgctgctgcagttgtaaattgcatgtattttatgaaacgttcagtacaaacttagaaagttgtagtaatgaaagctctaaattgagatctacactcataaatagttcatgctttatttagtagtaactgcataagtaatgcatgctttttttttttgatacgttgtaatcattgccctacaatctctagctcccctacatctacaagtctgctgtcgggaatatggttttgccgcccatccgtagaggctatatcggatatttcgcatggtaaaaaaacgttatatacccaacttttctgggagaaggtcattctcttaataaggatgtcaaatttggtcattcagtaaattaacccttaaaaaaatgcaaaataatttgtttatgtgacaaagaaatggattttatctataactatcaagaagaagaaaacactcggctatatatatacgtacaacacataagaaaaacaaaccaatcacttcactctctctaatcaaaaagcttttaacctcagccgttaaatctttctccgatcatgccgaccagaaacatcgccattggtggagtccaagaagaggtctatcaccccaacgcacttagggcggcgctcgctgagtttatctcgactttgatcttcgtcttcgccggctcaggctccggaattgctttcaacaagatcactgacaatggagcaaccactccttccggcctcgtcgccgctgccttagctcatgctttcggtctctttgtcgctgtctctgttggcgctaacatttccggtggccacgttaaccctgccgttaccttcggtgtcttactcggtggtaacatcactctcctccgtggtattctctactggattgctcagcttcttggctccgtcgccgcttgtttcctccttagctttgcaccggtggcgaggtaacgtcacttacacctaattagattttagtagtattttcgattctctgtttctctattttgtggtttggtttaaactagatcaattgaata

SEQ ID NO: 4326 - DNA, 698 bp, Arabidopsis thaliana
aacggccgccagtgtgctctaaagcatgatttggtgaaattccaaagccgacagtatagtctggatgaaagaagataaaagtatatttgtgctttttgcgtgctctgaaatgattacttgtcatttcagagcagttcttttggagggacctcgacctccggggacaggtaagacgtgacaggtaagactttgcttgctaaggcacagtcgctggagaagcaggtgttccattctttggaggtagtgagatgagcgattcaaaatatatgaaattagcaataaaactggcacaaaaaggggctggttacgtcaaccccaatcctatggtcggcgcagttattgtaaaagataatcacatcatcggacaaggttatcatgagttttttggtggcccacatgctgagagaaatgctcttaaaaactgtagagaatcccctgtcggagcgacgctttatgtaacacttgaaccctgttgtcacttcgggaaaacacctccctgtatagatgctataatcgatagtggtattacaagagtagtcattggaagcctagactgtaatcctattgtatctggaaaaggagtaaagatacttgaggaaaataatcttcaagttactgttggaattttagaaaatgagtgtcttacttaataaaagttttagaagtatattccagcatgtccctatgttttatgaata

SEQ ID NO: 4327 - DNA, 6530 bp, Arabidopsis thaliana
caaagaggaaagtacatttattcgctcaagttcacgtactaaaatgcaacacagtgtatattataagactgtttatctctagaaccctttcatttaatatggagctctcattgtactgttgctgtagtttctaagaaaaggatataactcatacctaaagttacagctcgtaccgaaaactctccctcctcgtttaccgtcacaacactgtggaaacttcctcaaaatcccttccaaacactcaaagcactttgtaaatattaagtctttcgtacactgcaccattgcatacaccttctttgtcccaattctcttctcccctgctgcgtacaacaccaattgtttaccatccaagttgtttctatcggaggctttatatgccagcttctccaggagagccgacgtctccttgttgaacaacccccgatcactcatgttgtttgggttggacaaatagaaatcgttctcataatctatcttattgaaggaggcaactgaagatatctttaaaagacattggtcataccatattattgctcccttatttcttggacatctcctacgaagctgtcacatacatatacgtacatatatatatcaagaacaatattgcattgtttaatcagtattttttaactagcctttaatgtctatcagttttgtctcaattcaatcatttatataaagtatcaggatcattgcccacatatttaagatttgacagaaaaaattaaccgacgtgtgtgctcatcgtaatttttacatgtaactatatgactgctaatttataatattgaagtcacaattaccccagagacggcggtgctaatgcaaggggggcacttggaccagtaggagtcgccgcgacactggaacatgacaaagacgttattgggatcctcaccttcttcggtgtagcggaaaccgtcacgaaaatttccaatcgaggtgatggtactgaggactaagttgagatttttctcgaacgcgctcccctgcttatattttccttgagtgttgctgcatttgtggtgcagatacgcattggtaaggttcagagatgaaacactgtgtgtaaggaggagttgtatggctatcatggccaagatatggacagatccaaaaactgaagacattgtttgagatatctgatatttttggtgtgtgtgttttttcattagatgaatcgttaaggagttggaatctttatataggggagactcgagggattgctattgctctaaagtgaagttcatctttttgataaaaaaaattggtaatattacaattactggaagttgtcagtttgaggtcacacacaacaaaattcgattgatcatctcattttctaaaaaaaaaagtttataagacaggagagaggagttgagcgtttagactagtattttgcggcgaagggacaggaggcgatgaaaaagtcaaagttcgaaggtttgtctgatttaaatcacacaataagttctgtctcgacctgaaatgaaggcagtgtgtgagtttataactagtttatgtaattatgcaacgacaccgtacagtttcatctcatatcatgttatatattactctctctgtaagtttgatgttttaagtttcgcacataaattaagaaaaagtaacttttctatttaattttaattactattttaatagtttaataatattactattacctctctcctttcactattggcaacaaacaagattaataatcatatttaatttttacaaaacatcaatcttatggaacaaataaaaaaatccaaaccatcaaataacttggaacagagggagtatttttatgtctagtagtaacgttatgtttgtatgttgctggaaaatttagaaaaaaataaatgctgaaaacactgtatttgatgattgttacatagtttctgttttcattttttggtcacataatataaaattcgttgattattcagtttttagaatattttttgttttgccatattgggatctctttaggcatctgagctccgcttcttccctttggcttagcctcctggaatatcagtctctagcatccgcgatctcgtctcgaacttcagtttgaccaacgattctttcaccagcttggccttcgcactcacctcgtccatccgcgagatcttccccttcagtcggcggtggaacggaattacgattatcaggactcagctcggcaaataaagtacgaacatcgaagtcgccgtccataagatcggtgataccaaaagctttcacctcggcctccaattcctctgcatccgctaccaatcttaacatcatgtcatccgacttcatctccacttcgccaccttcgaccaacgcctcgagagtcttgatattcccagatacttggttgaattcaagaaactttggttctgccgccttcgtatcgtcaatatgagctttaatacgatccaatcgcttctgaacgagctccgccatcttatcaagggccgatctccggacaaattcagcatattcaagtcgacgttctcgaagcctcttcatctccgaaagagcgcgaccagctaactcgtcatatttcctcttcatctccttggcgtcgtcttgagaccttgccaggtcggccagcgcctgagctactttttccttttcaacggccaaagcctcatgggcatctttcgcgttagtagcctctacggaaaggctccgaacacaacgctcgtacaaataagtcaaacgatcccattcggcgatcgcctggacaaagagcgtgtcaagcgaatgcaattcaaagaaaaaattggaatcaaacccagaaggtgagcatacctcgatcgacttcctggccgctccggcgaaaacttcaggagcaaccctccttttggtgatgacacatggccttatcaccatcattcatctccaggctccctcgtcttcgtgaaaccaagtatcatcattgtaagtacgaccagttatgtatcatacatatagtttagtccatgtttgtcgattcgggaaatcaattttctactattttgtttcgcacgtctctttttgtggttcggccaaaattatgagatttactaaaaccttgaggcataagagtttttcttacccttatttcaggatttttttctctcattatgagagagtttgtatgagctgagctatttggtattctatgtgggatgtatatactattagataaattctttacttgaagatttcctcttaataactcaagttcacaaaaaaaaaacaaaaatcacaaagaggaaagtacatttattcgctcaagttcacgtactaaaatgcaacacagtgtatattataagactgtttatctctagaaccctttcatttaatatggagctctcattgtactgttgttgctgttagtttctaagaaaaggatataactcatacctaaagttacagctcgtaccgaaaactctccctcctcgtttaccgtcacaacactgtggaaacttcctcaaaatcccttccaaacactcaaagcactttgtaaatattaagtctttcgtacactgcaccattgcatacaccttctttgtcccaattctcttctcccctgctgcgtacaacaccaattgtttaccatccaagttgtttctatcggaggctttatatgccagcttctccaggagagccgacgtctccttgttgaacaacccccgatcactcatgttgtttgggttggacaaatagaaatcgttctcataatctatcttattgaaggaggcaactgaagatatctttaaaagacattggtcataccatattattgctcccttatttcttggacatctcctacgaagctgtcacatacatatacgtacatatatatcaagaacaatattgcattgtttaatcagtattttttaactagcctttaatgtctatcagttttgtctcaattcaatcatttatataaagtatcaggatcattgcccacatatttaagatttgacagaaaaaattaaccgacgtgtgtgctcatcgtaatttttacatgtaactatatgactgctaatttataatattgaagtcacaattaccccagagacggcggtgctaatgcaaggggggcacttggaccagtaggagtcgccgcgacactggaacatgacaaagacgttattgggatcctcaccttcttcggtgtagcggaaaccgtcacaaaaatttccaatcgaggtgatggtactgaggactaagttgagatttttctcgaacgcgctcccctgcttatattttccttgagtgttgctgcatttgtggtgcagatacgcattggtaaggttcagagatgaaacactgtgtgtaaggaggagttgtatggctatcatggccaagatatggacagatccaaaaactgaagacattgtttgagatatctgatatttttggtgtgtgtgttttttcattagatgaatcgttaaggagttggaatctttatataggggagactcgagggattgctattgctctaaagtgaagttcatcttttttataaaaaaattggtaatattacaattactggaagttgtcagtttgaggtcacacacaacaaattcgattgatcatctcattttctaaaaaaaaaagtttataagacaggagagaggagttgagcgtttagactagtattttgcggcgaagggacaggaggcgatgaaaaagtcaaagttcgaaggtttgtctgatttaaatcacacaataagttctgtctcgacctgaaatgaaggcagtgtgtgagtttataactagtttatgtaattatgcaacgacaccgtactgtttcatctcatatcatgttatatattactctctctgtaagtttgatgttttaagtttcgcacataaattaagaaaaagtaacttttctatttaattttaattactattttaatagtttaataatattactattacctctctcctttcactattggcaacaaacaagattaataatcatatttaatttttacaaaacatcaatcttatggaacaaataaaaaaatccaaaccatcaaataacttggaacagagggagtatttttatgtctagtagtaacgttatgtttgtatgttgctggaaaatttagaaaaaaataaatgctgaaaacactgtatttgatgattgttacatagtttctgttttcattttttggtcacataatataaaattcgttgattattcagtttttagaatattttttgttttgccatattgggatctctttaggcatctgagctccgcttcttccctttggcttagcctcctggaatatcagtctctagcatccgcgatctcgtctcgaacttcagtttgaccaacgattctttcaccagcttggccttcgcactcacctcgtccatccgcgagatcttccccttcagtcggcggtggaacggaattacgattatcaggactcagctcggcaaataaagtacgaacatcgaagtcgccgtccataagatcggtgataccaaaagctttcacctcggcctccaattcctctgtatccgctaccaatcttaacatcgtgtcatccgacttcatctccacttcgccaccttcgaccaacgcctcgagagtcttgatattcccagatacttggttgaattcaagaaactttggttctgccgccttcgtatcgtcaatatgagctttaatacgatccaatcgcttctgaacgagctccgccatcttatcaagggccgatctccggacaaattcagcatattcaagtcgacgttctcgaagcctcttcatctccgaaagagcgcgaccagctaactcgtcatatttcctcttcatctccttggcgtcgtcttgagaccttgccaggtcggccagcgcctgagctactttttccttttcaacggccaaagcctcatgggcatctttcgcgttagtagcgtctacggaaaggctccgaacacaacgctcgtacaaataagtcaaacgatcccattcggcgatcgcctggacaaagagcgtgtcaagcgaatgcaattcaaagaaaaaattggaatcaaacccagaaggtgagcatacctcgatcgacttcctggccgctccggcgaaaactttctcctccttcaagtctaagggcatcgaaggaatacccgagccacgaccaatttcacgaagaagctcagcacaagcgacagaattagaagtaaagggagcagccatatcgtcgtaacgaaagccccatctatggtcgcttacccgcggtcgtttagaagcatccgcacgacccacttcaggagcaaccctccgttgcaccaatacgtgctccgggcgatcatcggaagctgctcttcagaaagagatcagcgatcttcaagtcgcgttggttgctgcgaaggagcacggggagcgggagtgcgacagactgcggtatgatcgagcttctaaggtcgcccgtactacgtagaaagccaagctcgtcttgatagagtaaaggcttatctcaaggagcaagaggacctcgtcgtggcaaaggtgg

SEQ ID NO: 4328 - DNA, 689 bp, Arabidopsis thaliana
cttcagacaaaacctcaagaagcttacaagccaaactcataagcctctcactatactcctccgtcactttcacccaaccttccggcttatctggccaccgtgagtagtctctgtttctcaccgggtacgagaaatacgttacaatctctctccaatcttgcacagcctctccctgtatttatagtataattattatgtctttaacggcaagattaaaacataattacgtatttaacctagaagattgtggtgtggcttttacctggaggtgactagagacgatgaatcctccttttttaccaccggacatgtcgaaacggagcttgtcttccggaggtaaagcaaagaagtcacgagcgagacgagtcatatccgccactaagttagtatcgacgccgtgatcgaccacttggaagatgccccaattctcacaagcctcaacgatctgacggcagatctctcctctttttccatcgacgtcatcgataccggcgagagagatcaccgggatttcgtcgctaaacacattgtaagcgactttgggccgttcatcttcgtccctgacaaatttagagttgagcttagactctccggctagctcagtcaaagttcctggagccattgtaattacgaagaccaaagactaaatttagagagatattgaaagaagagatgtgtaatggatattt

SEQ ID NO: 4329 - DNA, 2667 bp, Arabidopsis thaliana
gatctagcaataatggaatttctattctgtttactgaatcacatgaaattttatccaactccaagatatatggaatgtattaaatacgtatgaagggagactatattcaattggaattttttataagaaatagatccaaatggaacagaattgagaaataccgctggaacttacggagttttgtaaagactagaaaaaaaaagtaatttcattttcacctatgatattacatattccaattcgattgcataccataaaaaatgtattcatcattggatctgttcgagcagataaacatataataaatagaaaactttttttttaaccactttactttttcatgtattttttttcattgttcaaacaaatatttgcagaaaagagatttatttttacctgttttgaatagaataggaagtaggtaagaaaactttttttttatttattaattgttttattattaaaataaaaaagaatgcacagatatatatgtctctttttcttcttttattgtggtacagttctatttgggacagcgcatgctgggctctataaaaaaggaaatgttctcttcaagggaaaaatggaaatataaaaatttattgagaattactcctcaaaagcatctctagagagataaaataccccattatagagctatagttctataacacaacgtaacgtatgttctgattctggggtttacatatactcatcattactgttataatttaaattgaagaagatttctttttaattgaaaaaaactcaatatagattagttagaaatgcatttctaatgattttcttaatattattagaaataaaaaactggagattttaattttcattcaaaaaaggtcatgaatttacagtcaatagttaatggttctggtttgtactagattcgatattttgtgattgaaaatctatatatagatttttttcggaatcgttttggcggcatggccgagtggtaaggcgggggactgcaaatcctttttccccagttcaaatccgggtgccgcctcagcaacaaactttaaataacaaacgtaggaaaagactctttatactttcttttcattattctaagcccctggctcgcgaggttctattctctaccctaaagttttgcctatcagattcaaggaaaacttaaagtagtggagggaaatctgtaaatctttacttgccactactaatttagttccacttactgagtcttcaattagattggatagccggagagagatttaaattaatagttttgaaaaggacctaagatactttggatatatactcatgaaagtctcggaatgctcagacattcaatcaatattagattagattaagaattgcctttcattttacttccaaaaataaaaaacgataaaagaaataaaaagtattcttctttctacatgtgagtcagattccttggatacttcaaaaatgtcggtttgcttgtgtttacatcttgtcgattctactagaaattctataaaaaaaaagaatcactcattataagataagtggatttttggagtagttcatcaatggtgaccaaaaacctctcccttttttttgactctgcaccagtgatttcactattattagtgaacaataatggaatagtttcttcatattcatagaaatagggggcagaattcacatggatatagtaagtctcgcatgggctgctttaatggtagtttttacattttccctctctctcgtagtgtggggaagaagtggactctagaaatacttctaattgcggtaataatcaaactctatcaacctgtatcaattgttttcgttttctagaccgttcggcaattttttttaagattttttttttagaaattggatttatgttttattgactcattttctatttttctatcagggtttacacggttaaccattcatggggtaacccctttcgaaatctgaagaagcttccatcgaattgggattatctgtattaaatggatcaaacaaacaaatgaaattgacaaagtatgtacatacttttcatattctatttcatttatattgacgtttataaagaaaaagagagatataggtggattcctatatattaagatatttcacttgtatctttatacattacaataaccataatggctagtatggtagaaagagatctctttctaccatactagcggaccccttaggatactactactgagtctaatgcgttcctttcatttaagacgagaaattgaaatcttttttttttttttgatagtaaaattttattcaaattaatcattttgactaacggtttttacgtaaattataagcaaaaaagcagtaggaacgagaatgaagagtgcagtagcaataaatgcaagaatatttacttccataatttaatcgtttattattattattttttttttctttggaatatctcgggatttaatcccatagagatgagaaatctttcgcttgtaaacttactcagatgaattagattgcgatgatatcgaatgaaagaaatatcatgaataacaatatcggagctataaaatcgattcatcgtcaagaatttaatagtataacataggaagatcttttatccacaccgattacataatgagatcccgatccaataaacaggaaagttctttatga

SEQ ID NO: 4330 - DNA, 777 bp, Arabidopsis thaliana
taatgtcagagtatctccctcaaactccatcctcgcataaccaagagccgatgtgcttgaaagcccaaattaaagctgagcactctgcttcttcagcggtgaggcggccttgatattttcccataccacagtgtagcaccgtgccatgtgagtctctaattatccagccaagtcctgaatcttgatttccctcccgatgtaaggcgtcataattacatttgagccatcctctattctggtttgcaccacttcgtaatacgagaaactccttgttggtttgtctccctctgctccttgtcgatggacctgttatccagccactcttttgtatctttaatagcttgttccacaatttcacttgtggatctattgactcggttgaataccagatcattctttctcttccagattctccacattaaccagaaaggtaaatagcgagaaaaacggtttatatttttatcagtgtgcatctggaagagaagagtaagcttatcatggacagagatgcctgtgttactcagatgattggtcgggaagcctgccgcacgccataccattgtcacctggggacaagagaaaatggtatggtcatttgtttccagctctgtacagcaccttgaacaataaggatcaacatttatgttccgcctacgaagattctctactattccaatcgcatatgaagcataacgccagatgaaatgttttagctttggtgtgacgtctacttccatatagttgatgatgagaacccggaatgctttgctaatggtg

SEQ ID NO: 4331 - DNA, 619 bp, Arabidopsis thaliana
ggacgctgtagaataaaccccctccttctactgccagtaacattagttgctctattcatctgacgtacattaaaaccctgacaatatccccctcccttcctgctcaccaccgagcaccaaatatagccacagattcagattcaagacacctgaagctaacaaagacaaaaatcaaactacaatagctgaaaattcacagttatagcattgacacatacaacatcttacttgctaaattgactggaaccaccactaagtgaagaaaaaaaagtttagaggatcttaaataaatcacttaaactcaaaagcatggatcaacttcaatcatggaggagatctaaaacgcaaaaaaagagggaaaaaaaacaaaaaacaaaatcttagtagagatagtgtaacgaaacgaaatgagattggatctgtagccgtaaatttcttcagatatagaacactagtgaattgataaagagaagagattatattagaagatctacaaagccattttcgaatcatgagcaaacaactgaacaagagtttaaacatgcataagctacttcaagccaccgaaagaatacgaatctcaattcaaacctcgtcttcttcatcgctactactcttt

SEQ ID NO: 4332 - DNA, 786 bp, Arabidopsis thaliana
ctaaagacgcccagtgtctcggacatatacaaattgccccagtcgttgatcgccgcccggaccacatagaccagcacatagcaaaacgaaagcagccagatatacggattcagcaacacatatttggtgaggatctctttacgcgtcaaccctgccccttcttgttgttgagcaatttccagcgcgtcgtgtcgccattcaccgaccgccggtaaacctaacgcctgctggctatcgcgtaccgccagcagagaaaaatccccacgactatcgccatacaaccagcaatcatcatcccggcacgccagccgtaatgcagcgcaccgctgccatcacaatgggaatgagtgcgccgccgacgttatgcgccgtgttccataatgcccaccaaccgccgcgctcggtacgtgaataccaggccgttaacagacgcgcacacaccggtgaaccccagccctggaaaaaggcgttcagcacccagagcacggcaaacgctcatagcgacgtcgagaagccaaacagaatgttgataatgcccgtggcgataagccctatccccataaaataacgggcatttgagcgatcgctgacaatgccaggagacaaacttcgacacgccataggtaatgtaacacagggtcgctaacaggtcgatatcgctacggctgagcacgccgttagcaaggatttctggtacggcggcgttaaaacttttccgagtgaagtagaacagcgcgtaacccatgcatactggtcagcagaatatgccgacgccagtagcgatac

SEQ ID NO: 4333 - DNA, 1220 bp, Arabidopsis thaliana
tggcttagaaccaatagttcattatctaatggatttttccgttctaatactcgatccgagagttatcagtatttatcaaatctgttcatatctaacggaacgctattggatcgaatgacaaagacattgttgaaaaaaagatggcttttctcggatgaaatgaaaataggattcatgtaatgtaacaggagaagggtttcccattacttagccggaaagatatgtggccatgaaatagggattaagtggaacggaattgactgggtggtagagttgtataaacacctgtttcttccacttagctccatggaacaatatgctactactgaaacatggaagaattgaaatcttagatcaaaacactatgtatggatggtatgaactgcctaaacaagaattcttgaacagcgaacaaccggagctattactcactacatcaaaaaaatttccattaataaaagatggaaatccattggaaaatcaaaaatacgcatgtcggattaaattgttgttgctatctgttccaataacgaatcaactgaataactaaataaaatagatagacctttctcttcgtctcaggtcgatagatcttctcaattggaagatcccctatatggataagacacattccagttgaccgagcctaattctaattgttttgttccgaagtaaagatatccacggagtggttcgccctattcagatattcacgaccaagaagtactggattctctttaggataggtcctgaaaggagaaggaaggctggaatgccgccaggcgtctattattgaattcacccgacccgatagtaccaattttggtaacgtccatccagtgccaaagtcactgaatgggtaagtcaccaatccctaaaacggactatgtaatgtacttgaatctgccgggttacggggggctttttaccagaggtttagattgtatcaatctacccttgtgtgattcctgttgaatcatatactgcggggcgcagggcggacgatttcaaagcggactccccctccccattcattagatagagaagatcgccaatatttcgcgatccgctgccgaacttattccatttcaatattatgccttgaagaggactcgaacctccacgctctttagcacgagattttgagtctcgcgtgtctaccatttcaccaccaaggcatcttcaaagtgaatcgtattccataaatatgatatctatct

SEQ ID NO: 4334 - DNA, 944 bp, Arabidopsis thaliana
acaaacacaaaacccttctttttgtattatatataaatttacaaaagagactctttcctgtctctcaagcgaatttaggcttcggcaaggctgagccaccaaggccgctgctgctgctgccaccgcctcctcctgcgtggactggtccaagcttctggatccagtgtttcagacctttccttgggtccttacagatcttgctcgaagacagattcaggttcccttcacgttccagtgatatcgcaaactgttcaagcactttcactatctgccagaactcgggtctcttatctggtgcaaccgaccaacactgctctatcagagctttcatggctactggacaatctcccgggatagctggcctaatgttctgaaccaaagatcaacatttttcatatctcaaatggttgaatcaactgaacaataaaagacctaaaatatacttgtgccggaagatttttgtctgttaaattctaaggctttaaccgtaaccattagacagttcttgtggcataaactctacggaagattacaataatgaaatagtaaggagacgcacagaatattttaccttatgtacgactgcgaaagcagcttgaataggattcatgtcctcatatgggattgctccagctaccatttcccataaaacgagtccaaagctgtatacatcggccttacgtccatgtggttcccgttttatcatttcaggtgccatccacctatatgttccggggtcatcagcaacatgtcacagtactcctcctcgcacgctatgccaaagtcagcgatcttcaaatggaattcttcgtcgatcaatacattttctggcttaagatcccgatgaattatgcgtcgtgagtgaatatattccatccctctagcaatatctatagcaaactctataagctttttcaaaggaagacacctattctcacgggatc

SEQ ID NO: 4335 - DNA, 677 bp, Arabidopsis thaliana
tagaggattagaggatccccggataataaataaataacagcccgatgatgatcatcatctacctaattagagtttcattgtctctgtattttcaaattctctctcttatgttatgtattccgttggaatggcttctccttggcgaaattcagtttctttatttgaggtttgttgctgtttttagtgttattatttttagcccttcttgaatttctagttacatgttacaatgttgagagagattattattcaataaaattttcagattttctggtttcgagattcttctgctggcttttaaggaactcacattacgcgaaaatgggtattgattcaagacaaaaacgaaaaagtttgaatttttgttggtgggtggattttgaggtttatcggcgtctcctccgactacaatgatgaaaagttcagtgaaggaaattttggagtctcttcgcctgcttgattcaagcgagaggtcttcgtcgcttccctctccgtctactttcagggctccaatgccgttgattcgtcaatctcttccggcgaagtttcgtaatgcaatttcgctggaaagcaaaaccatagagaaagaagacaaggattggagcactgagcagatcacacaatctgcagagaaggagaaactggaaatgaagttgtgaagatagtctgccagatga

SEQ ID NO: 4336 - DNA, 635 bp, Arabidopsis thaliana
tagtaacggccgccagtgtgctctaaagagaaccaaccaaataaccccgttcattagaacgttgcaccagcatctgcgatgccagataaatcacagcaaatccattccccagtatggatgttaattctttttcaatccgcaaatcaacaatatctggcagcggatttccataaatctcaaaagctttcttataggtcaactcagcaactgtttcttcagccttgtcgatgaaaggcgtatacaagtcacccttaacgacttcaacgggttcaaatatttctgccaaggcattggtgttttcaataaccagtttacgagccagttcctctcccaaaaaggcaaattcatccaacatctcattagtcgttcgaaaatgagcctttggaagtggtgctggttgggcatgttcaccatgaccgatagttcggttaatcatcgcaccctgtcccaaactacggacgataatttcacgataaatctcttcttccggttcgatatagtgaacatttcccgtagccaaaacaggcttgccaaggcggtctccaacctctatcaaactcttgataatggtctggagttctccataccttgacctgctctttagcaacaagggcgcatagatagcaggtggatga

SEQ ID NO: 4337 - DNA, 280 bp, Arabidopsis thaliana
gccgatagcgctctcgcagccacattgggacgccaccccaggtccttggccactgccttaacccgggctctcgtggaatcggagacgcccggcttgtcattaagggcgaaggagactgcgccgggggacacaccggcaagcctggcgatgtccttgatcgtcgtcctgtccatgaagtcacggtccttctcgaagcatgaatgccctgtcgggggcctaggggcgtcatcgcccgaggctcattgcctcgaccccgcgcggcatcattttaaggctatct

SEQ ID NO: 4338 - DNA, 7901 bp, Arabidopsis thaliana
gtaacgtccgccagtgtgctctaaagagacattttagcatgaagtgtttaaagtaataaagagaaattgacagaaaagtgctctggagcaccatgtgttttcaattgctactcaagagggtagcctcaaggaaagcattagagcaggttggttttcccttcataggaatgctggaccatgcagccaccactcttggtgctttctgtgtatctgctatggttggaatattgtgcacctacttggaaggagacagatgctactgatggaaacctgaagagtatgtttggcttatctgccctgtttgcatgtttgcctgtcctgctgatgtttatgtgcagttgcatcacacaccaggtacacatagacacatggacactgtcctcacatatatggcacacatgtacccatgtgcaccagcagcccacaccaggcacaaatgtacacatgtgcagcaggatcgtgcagcaggcacccttgaacacatgtacagtggcagctcacacctggcccacatgtaaagtggcatacaccaggcacacacaccaggtacacatgtacacatgtgcagcagcatcacacaccaggcactcatgtacacatgcatcactcacccaccacacatgtaaagtggcatcaaacaataggcacacatgtacagaggcatcacagaccaggcacacatgtatacatgggcagcagcaacacacaccaggcacacttgtacacatgtacatcagcatcacacaccaggtacacatggactcctgtacactgtcatttcacacagggcacacatgtacacataagcagcagcatctcacaccaggcacacttgtacacatttgcaacagcatcacactcaggcacacatgtacacatgtgcagcagtaacacccaccaggcacacatgtacatatgtgcagcagcagcatcacactcaaggcccacatgtacatatacagtggcatcacacacccggaatacaagtaatgtggtattacacaccaggcacacatgtattgtggcatacaatacaaggcacacatgtacagcagcactgtactggctagttttgtgtcaacttgacacaggctagagttttcacagagaaagagcttcagttggggaagtgcccccatgagatccagctgtggggcattttctcaattagtgatcaaggtgggagagccccttatgggtggggccatctctgggctggtagtcttgggttctataagaggacaggctgagcaagccaggggaagcaagccagtaaggaacatccctccatggcctctgcatcagctcctgcttcctgacctgcttgagtcccagccctgacttactttggtgataaacagcaatgtggaaaatgtaagctgaataaaccctttcctcctcagcttgcttcttggtcatgatgtttgtgcaggaatagaaaccctgactaagaaaaacggaaaacaacaggcacacatgtacacagagcagtagcatcacacaccaggcacacatgtatacatttacaacaaaatcacacacccggcacacatatacacatgttctgcagccatcaatataccaggcacacatgtatgcatgtagagcaacaggacacaccaggaacacatgtacacatttgctacagcaacaaacaaaaggcacacatgtacacatgtacagtagaataacacacccagcacacatgtatacatgtacagtagtaccaaacaaaaggtgcacatgtacagtggcatcacacgccaggcaaacatgtacacatgtgcagcagcagcacacaccaggaacacatgtaaacattttcagcagcatcacacaccaggcacacaagtacacatgtagagcagcagcacacaacaggcacacgtacacatgtgctgcatcaccacacatcagagacagatgtacacatgtacagagcaatcacacaccaagcacacatgtacaatggcaacacaaacccagcacacatgcacacatgtgcatcagaatcacatacctggcacatatgtaaagtggcaacacacaccaggcataaatgtacagagtcataacacaccaggcatacatgtaaacatgtgcagcagcatcactcaccaggcacacatgtacacaagtgtaacagtatgacaaaacaggcatgcatgtaaacatgtgcagcagcataacacaccaggaatacatatacacatgtgcagcagcatcatatacaaggcacacatgtacacatgtacagtggcatcacacaccctgcatacatgtaaagtgacatcacacaccaggcacacatgtacacatgtacagcagcagcacactcaggcacacatgtatacatgtgctgcagcagcacacatgaggcatacaggtacacatttgcagcagcatcatacacaaggcacacttgtacacatgtagagtcgcaacaaacactggtcacacatgtaatgtagtttaaaaaacaaggcagacatatccggaggcatcacccaacaggcagacatgaacacatgtgaagcaacattacacaacaggcacacatatacacatgggaagtaacatcacacaccaggcacacatgtatacatatacagcagcatcacacaccaggcacacatgtgcacatgtacagttgcatcccacacctgctacacatgtacacatattctgcaggatcacagaccaggcacacatgtacacatgtagagcagcagcacacacacggcacacatgtacacatttgctgcaggaataaacacaaggcacacatgtacacatgtacagtggcatcacacacctgacacacatgtaaacatgtacagtagcatcaaacacaaggtgcacttgtacagtggcaccacaaaccaggcacacaagtacacatgtagagcagcagcacacacaaagcacacatgtacacatgtgctgcagcaccacacatcaggcacagatgtacacctgtacaatgcaatcacataccaagcacacatatacagtggcagcacacacccggcacacatacacacaagtagagcagaatcacaccttcagcacatatgtaaactggcaacacacaccaggcatacatgtacagggtcataacacaccaggcacacatgtacacatgtgaagcagctacactcaccaggcacatatgtacacaagtgcagcagcatcacaaaacaggcacacatgtaaacatgtgcaacagcatgacacaccagacacacaagtacatatgggcaggagtatcactcaccaggcaaaaatgtacgcatgtgcagcagcctcacatcaggcacacatgtgcacacatgcagcaccatcacacccaaggcacacatgtacagtgtcatcacacacccagcacacatgtacatgtttgcagcagaatcacacaccaggcacacatgtacagtgtcatcacacacccagcacccatataaagaggcattatacaacagtcacacatgtacagaggcatcacagactaagcatacatgtacacatgtgaaggagattcacacaccaagcacacatgtgtagcagcatcacacaccaagcacacatatgtagcagcatcacacaccaagcacacatgtgtagcagcatcacacaccagtcacacaatgcagtggcatcacacaccaggtacacatgtacatatgtataacaaaatcacacactttgcagacatgtatacatgtatagcagcatcatacacacagcacacatgaacacatgtacagcatcatctcatacctggatcaaatgtaacatggtatcacacaccagccaaacaccaggtacacatgaacacatgagcagcagcatcacacaccaggcacacatgtacacattaacagtggaatcacataccaggcacacatgtatagaggcagaacacacccacacccggcacacatgaacacatgtgcagcagcatcacataggaggcccacatgttcacatgtacagtggcatcacacaccctgcatacatgtacagtggcatcacacaccaggcacatatgtatacatgtacagcagcagcacactcaggcacacatgtatacatgtgctgcagcagcacacacaaggcatacatgtacatatgtgcaacagcatcatacacaaggcacacttgtacacatgtagagtcgcaacaaacactggtcacacatgaaatatagtttagaaaacaaggcagacatgtccggcggcatcacccaacaggcagacatgaacacatgtgcagcatcatcacacatagagccacacatgaactcatgtgctgcaccatccatcacacaccaggcacacatgaacacatgaacagtatcatctcacacctggatcacatgtaaagtggtatcacacaccagtcacatatgtacacattatcagtggattcacataccaggcacacatgtatagaggcagaacacacctggcacacatgtacacatgtgcagcagcatcacataggaggcccacatgttcacatgtacagtggcatcacacaccctgcacacatgtacagtggcatcacacaccaggcacatatgtacacacgtacagcagcagcatactcaggcacacatgtatacatgtgctgcagcagcacacacgaggcatacaggtacacatttgcagcagcatcatacacaaggcacacttgtacacatgtagagtcgcaacaaacactggtcacacatgaaatatagtttagaaaacaaggcagacttgtcaagcagcatcacccaacaagcacacatgaacacatgtgaagcagcatcacacaacgggaacacatatacacatgggaagcaacatcactcacccagaacacatgtacacatgtgaaggagcttcacacaccaagcacacatgtgcagcagcatcactcaacaggcacacaatgcagtggcatcatataccaggtacacatgtacacacgtacaacaaaatcacacaccttgcacacacatatacatgtacagcagcatcacaaacatggcacacatgaacacatgtgcagcagcatcatatatagagccacacatgaactcatgtgctgcagcatcacacaccaggcacacaggaacacatgaacagcatcatctcacacctggatcacatgtaaagtggtatcacacaccaggcaaacaccaggtacacatgaacacatgagcagcagcatcacacaccaggcacacatgtacacattatcagtggattcacataccaggcacacatgtagggaggcagaacacacccggcacacatgtacagtggcatcacacaccaggcacatatgtacacatgtacagcagcagcacactcaggcacacatgtatacatgtgctgcaacagcacacatgaggcacacatgtacacatttgcagcagcatcatacacaaggtacacttgtaacatgtagagtcgcatcaaacactggtcacacatgtaatgtagtttaaaaaacaaggcagacatgtcctgcggcatcacctaacatgagtcctgagctacataatgttatagctgattggtcagcctgagctacatagtgttgtagctgaaaggtttatggcaatgagcatttcggcacccagattgtgaatttaaaaggactattcctacttaaaaggaccaggtatccctggagccatggctgataataaaatgttcactgggaacttgtgagcactctgtgaggaacatgcatgagaatactgcctcaagatgtgatgcctacttcagggtttggcagtatagccctacacaactgctgtccagagtctgggttatgcttgcagccctggcctttaccctataaactgtcatattgtgttgtgtgacaaaacttttcctgtggaggcacacatatctactcacctcagggagcccatgacagaccaaactacagatgccaccaaagttatgtttcctgaaccatgagttttattgggaatgtggggaaggaatatagagcagaagtgattcgaagacagctgcattactaaagcccaccccggctcacgaagctgggaatctggaatacactgcactgctcaacaggtgggagagtgcccttccaaggtggctcagttggtctaagcctcttcaaggtagctcggtaggcttctgcttcttccaggtcttgctgatctggtctcagagtcttctttgttgcatggctttggagctggtcctaaagaatctgatgagtttcagggacttcctgaggctcctttagtttatcttctttcttaagaagcttgcctgcaggataaaatgtttcaacttcagaggaaactattacacaacatgtggtcacactattcaagagagaccctcttccctaccaggtgggaaagtgaactttcattcactcatctctttcacggctccatccttcatctgcccccacgcccattaaatactgcttggggtactgaggcagaaggaagggaaattcaatgatgtggctatgctagaaagaagttcaaggtcagcccgggcagcttcttgagccttgtctgaaaaccgaaaacaagagaagggctggaggagcacacgtggcaggccctgagtatggaaaaagaaaagggaaaaaacgctcttggcgccatggctcaaggctgtaatgcctggcctgtagtactccaggaggttaaggcaggagggtgggaagaccaacctagactacatacaaaaagacgggttcaggcgcatcagatgaaagggtttgtgtgtacacgtgttgaagtctcctgagggcatggaggccaagactgaatagagtccatacttttaaggaccagactagggaccaaggtccttcttgaagagcactcagccacgaccggcctgcacctgcagagggcgccgcagacacactgaagcgaagtgagcctccagatgggtgcgagagcaaggccagcaaagtttctgggaaaggcttctcctctaagaactcgagagcttcagacaggaggggatatgaaagttggtagaaagaacagaaaagaaagagacggtttaaaaaaaaaaaaaaaaaaagagtgctgccactgaccccaatcgttcaggtttgaatctgttttcccatctacagagcagattggggggaggggggagggcgtggggggggggtggagcggggtttcggaaagtgctcttacaggattccaacactacttagattcaaactccaagtgccgcctgccctctttgctcctccccagtctgagcatccccgccgctgagcttggagtagcggatgtgagcaacgcagcagtcctgagtccggactccgcgaggccttggcacgaggggaaaacctcggacacccacccggccagagtcccatcggacctgttctcttttccctaaccatctccaccccgagcgccctgtcacctgggcgctccgggggtgcgggcccggcgggcggggcgcggggcggggatgggggtgggggctgatgccccgtggaaggaggctggccacgtgactcccgaggctcagctgggctgccaggcggggagcgccgcttcggcccaggaggaggtggtgggcgcgcagcccgagctgcgcgggactggccgtcggggtcccgggacggcgaaccccggggagcgcccatgccatggagaagctggcggccgggctggcgggctgcgctggagcatgggcgctttcccgctggacctcatcgtcagccgctgccgcctgcccacgctcgcctgcctcggaccaggtacccggtgtctagaggggagacggaggcggaggatgcgaaaagtcggggcttcgctctgttggagctggcaggacttacaggcgcattcagtcactaccctccctgtcctttag

SEQ ID NO: 4339 - DNA, 834 bp, Arabidopsis thaliana
attgtggtcgatctgcaggttttcttgacacataacagcccaatatgaacgtatctaatgacttcatcgcttttacaatcttctttaataaagggatctatgagctcatgcattgttttgttctcccaaagtttccagacctgtaaaatatatatgtttagaactatgattactgttttataagaatcaatcaaactttattagtttagaattactcacatatgtgactaaattgttaactaagccatccatctgatagaagctgctattctttttgccactaatgatctcaagaatcaatactccaaaactatagacgtctgatttcattgagaattggccatgtgtcacatactcaggagacatgtaaccactgcaaaaacacaagtttatttgaagtgaaagggtttactgattgaacttcattaggtccatataatatatacacttacaaggttccaactactcttgcggtattggctacagtttggtccactccaaagatccttgccattccgaaatcagcaattttcgggttcatatccgcatctaagagaatgttactcgctttgaggtcacgatgtatgattttgagccgtgaatcttgatgaagatatagaattcctcgagtaatcccaccgatgatgttgcgtctcactgtccagtccaactgatttctcttgttagggtctgtatgttcatacataatcagttaatcataatcagctatgtacaaaaacaagaaacattagaaaaagtatatttcaagttagaaacaaacagaccaaaaaggaaataatcgagacttttgtttggaacaaatcatagacgagt

SEQ ID NO: 4340 - DNA, 595 bp, Arabidopsis thaliana
tctagtaacgtccgccagtgtgctctaaagatatgactttcaaaaaccgtctaagatcccttacctcgaaacaactggtatgccttctagaattctccttagaaaacgccgtttcaagtgctatcactgttcaaaaatgatggttactgagactcccctggtaaagaaaaatcaccaaatccctcgtatcatcaaccaaaaaattgctcaaaagttaattgaaaaaatttctatgactgatattgcccatcagctggccatttcaacttcaactgtcattcgaaagctcaatgacttccactttgagtgtaattttagaaatctgcctgagattatgtcttgggacgttgaaacagtccggggagtgactgtttcaatcgggagatggagatgagcttcattgcgcaagattttaacaatcttaatattatcactgttcttgaaggcagaacacaagctgtcatccgaaatcactttcttcgctacgatagagccgttcgttgtcaagtgaaaatcattacgatggatatgtttagccttactatgacttggctaaacagcttcgctttcaaatttctaggctcaggctgaaaca

SEQ ID NO: 4341 - DNA, 30043 bp, Arabidopsis thaliana
  unsure (1)..(30043): unsure at all n locations
gcaggcatgcaagcttctcagagaaactttgtctctgaaaaccaggagggagggagaggaagagaagcacattaggagtaagccttagaggggacaattctgcctcaaggacaaatcctcaacttaatactaacagcaaagccatctggtaaagatagatttatttattttatgtatatgagtacactgtagctgtcttcagacacaccagaattgggcattggatcccattacagatggttgtgagccaccatgtggttgctgagaattgaactcaggacctctagaagatcagtcagtgcccttaaccactgagccatcgctgcagcccccagctaaagccattgtttagagacctgttaaattggaaaactttaaacattaatacaagagtagattataatagtgtactaaaagtccccagacgaaaccttagcacatagaaagtaatggctgcatgttaaggcagcgagcccagtgcaggcagaggatgttggttccattgtgttccttcagatgcctaaaattatgtcgtgctatggagtctgcagagcgaatagacaagggagccttggatcatctcagaaaatatctaaccacattttaccttacagagctgacaacgtatgccatgactgtcccatttgtcagacaacaggtttacaaaacagttgaagaaaaagtgaagaagcagactaaaggcctttatcctgcccctttgaaaataattgatgtgagtcctccctcttacaggaagtggtgctcttttctgtgattctgaacagtgtgtgttagctttgtgtgctcgctcacttaattgcttttgaaaaagagtctcactgtgtagctctggccttcaacccaggacctgcactgtagaccaggctgactctcagtgctctgcctgcctcggcatcctggctgctgagactaaagacctgagccactactcccagctgataatcattttttaaagaaggcattcccattgctataattcttaagaagacctaatgatatagaggcagtgtgaaaagacaaagaaagataattaaaactctttaaaatagtttaaaacttagaacttttcagactgggagattcaacaacatataatcaaaactggagaaattagggatttgtagagaccctgtcttaaaataaaataaaagccaggtgtggtagtgcttacactctgggaggcagcctgaggcagatctctgagttctaggcaagcctgttctacatagagaattataggacagtcagagctacatagagagattgtatctcaagcaaccaaaagactggggaatggatcctttacaaagtatcctttgtagagtagaagtcgtgagattactaagcataaaatatcagctggggatgtagctctggtagaacctttgtctggcttgaataaacctagattcagtccccagcattataaaaaaaagaaattgtatgaaacacatctgcattcatacttaatagtctgggctggagaacttaaatacttacggtaagacagatagccattcaagttataaaacagcaaaaaaaaattaatgccaggtagtcagtgctcagaggaagcagtcagtgagatgaggcagaggctcatgggatctgacctgagaggtgagcacagggtaggtggagggagactcaggccaggcaggatgggccaaggaacgagtcaacacacgcttctttgtctgtttctgattgtatgacactctttttctaattcacattcactctttttttaattctaatttactgtagcaagacaggctacagttagtcttaaaaggtcagcaataatgaactaatcaattttactttgtcctgaactttagttattttcatggtagtgggtcaaagaggattaggagagacaaaatagagctatcagccaatatctgataatggaggattgaggtttgaataagactccgaaatacatttaagtaaaagcagtgctgcgtaagaagcttgccaagcggagatgatgagtttagatattacaggaagtcaaggtgaggaatgtagatcacttatcttttaatgaattttgggggttcttttgtttcctatcatatgtataaattatggtggttgggcttggggtctttcctttgtcttttttatttaccaccctatacgggatagtgcctactctggatgtagagttgagttgcatggagttcctggttaatgtgaccaacaaaatcacacacatatcagaagcacagagaagtgagcagaaagtgctggccttagagagaagctggaagaacagcttaaggtgccctttcctggtgggttcaacagcagctgagagacagttggttcagggtctgcccttgcaaagctgggtgtatgacctactgggtatgacacagcctgaaaagactggctgtcttactcagcatcactttacctctagccattctgttgcaacactgaacatgtgcctttgtggttttaggctgtgaaggctggacttgagcaaggcagtgacgctggttatcttgctgaatcgcaggtaaatggtttttctccagtttatttgtagaatactaaagacccaaagctccactgaaagctgaaaatgtttatactatattaaaacactatatataaaacctagtacattttttatttccagtggtcattcttcggattagtttgtgactaagtggtttgataatggagtggtgtctgcagtgcttgagactgcacaatattgaggctgtaatgagaacaggggagcagctactcctttctgagccaatctgtgaatgcccttagtctgcactggggctgattttgttgtgataaaatgcatacattgtgagctggggatataggtcagtgtaaagcgactgcctatagctcatgcatggtcctaggtccaaccccagtaccagagacaaacaggaaagcaagcactgatttacgtgcgcgtgtgtgtgtttactaaggcttagagatgcaacatctttggtgaattagaaaaagagtgtcttgcaatcagaaacagacaaagaagcttgtgttgacaagtcctacacctttcacatttctcaaacgttaatggtgtcccagatttgagggagtagaatgggtaatttaagttttatgcagaaattgaagactttgatagtaggacaatgggttccccaagctaagggagcagtctggctcctcatggtacggatcccactttcctcccactttaaaggtcataactagggacacatacacgtgtgtatgttagaaaaagagaaacatggctcacaaatcagtaatgtcctcaactgcagcatgcagctggccctcccacgcctgcagtcctgtatccaactactgaacaaacacattcgccaaggaggatgttgagatagaggcgggtcaagagagagtgggaaggcaatggggcacatatggttgatgtattatatagatctaagctttaaaattgcattgtcctgaatatatagattcttgttgttatttatcatatatatatatatatatatatacacacatacacatatatatataatatttaccttgtattaggtattatagttaatctagagtcaacttgaaatacagaggatgtgcacgtactgtattattttatgtaaagaacttgagaatttgtgcattatgtctcttctaaggtcctaagaccagtgtttgcatggattccagggagtggctatacttgacattttatgtatgtgtgtgtgtgtgtgtgtgtatttttacatatatgcatgtatatatactttttatataaaccacttatcaaaacctattgaattcatgacctgatagatctttatccataatttgaaatccataggataccaaatagaacatgctatttccagattaaatgtagcattatttcatgctgttaatgtgaataagcaatgttatcagagtctttctttgtaatgctatttgtaaccccataattatgccagtgtgtgctaacagtgttaatagtagctagcaaggagagtccagtcgtttttactagtgttcttgttattccttgtaacagcactatgaactaggcatccattttcccatttaaatagtgaagaaagcttgacagtagggaaaggcaagaccagggtgcaaacccagctgtgtgaaagtgagatcccagcttttatgctgggaaccactaaaccaagggactcatccttgatgctaagacgcttttaaagtggcagtgggaatggtgctggtccacctgctgcagtgggaagaaaactgaagtctctaggaccctgctcaagttctgccttaggcaagatggccctaactaatatctggtcctcctctcagtcctccaccatagccagttattggaggaatggtaaaaatccatctgggcctgagactctcaatcacaggcaaaggttatcactcctctgctgtaagagtctgagagctgtcacattaaaaccttcttcaaggccaggtgtggtagcagaggcaggtagatttctgagttcgaggccagcctggtctatagagtgagttccaggacagccagagatacagagaaaccttgtttgtttgtttgtttgtttgttttaaatttttttaaattaacaaattaaacaaaacaccaaacctccctcaaagcagtggtgagacgtccttcagaggacagtgaagaggacaccagttgcaggtggaagcccagctgcagcacctgtgaactaaggcacggggtgttccctctgctgtgcagagcaagtgacaaacgagtcccattaccaggaccacagagttccacctttccctttttctttttacctttcagaaatttggagagcttgcattgaccaaagaatcgaaggccctgatggggctttataacggccaggtcctgtgcaagaaaaataaatttggagcaccacagaagaacgttcagtaagctgccctgcctaaaagcctgagaatttgctttgcagcaactgtgcagggtcaagaagccagagaactagattagcctcagcctcttctgccctggacagccgagcctttattccagtacattcttgtgttcagatcctctgagtcctccctaggcccttctagcacctttatagagctttcttatctcggaataactccctggcagtctggtttaggtctcacatctcagaccaaagctataactcggctcctgtggtaaatacttgcctggcatacaggaactccgagttcagttggcagtaccacacaacccaggtatggtgatataagaccatataagaccctggggctggaatctttaaacaaaacaaaacaaaaaacagactcttagccctgcactcatgagggtgagttcaaagtcaccctcttcacggtgagtccaaggccagcctcggcttcataagacctgtctcagaagaaaaaagagcacccagaagctactagtaaggagactgaagtactctggataggatggtaaatcttgagagaaagggaaatgacagaaaaatgctaaaatcactatgaaattatcaaacagactagtcttcggacataacctagatttagattaggcttggtttcccacgctttgggcaattgagagttggtttagttctgccttcatggaaaaaccaagtttttgggcctagtgagttttacatttatctttaaaaatcaaaaatgtattgtagatagacatcatgaaaagctcttatacttgtggctggcggttggtttattggctcacagtgtgggtagtgtttcccagctaatcagtgcctgaggtgttcaccagaactgttcgatcctgtccctccaggcagctagccatccttggcgcagggctgatgggggctggcattgcccaggtctctgtggataagggactgaaaactcttcttaaagacaccacagtgacggggctgggccggggacagcagcaagtgttcaaagggtaagtggcctgttggtgccaggaggtggactgtgtggggccgggagtgggtttggttttgtcttgtttttcatcacagggtccttttgcctgaacatagccccacactctatagttttaccaaagtttcctttgattttttttttttgagaaatactaattattctttcaactctttttcttgattatgtcataggacattggcctttgaatgtttccttattactagatattctaaataccatttattccatcctttggtatgatactagtaactgtcaggtttggcaaggtttgcatggagttgcccccgtggaatggattatggaacctgcacagctcttggcagggctgagggagggtgtgtgagaacatgtgccgaccaagtaggtggaggcagtgctggcagaggagagcccctgccagtgagccagatgcccgaggcctgccgaccagctccacatctgcagcagaacacccacatgcaaagtacatggcaaagtaaaggtaaaacaaacgtcttaaaatgaaaaccaaggatggctcacagccccgtctcacacggaggccgccagttaggctgagtggaaatggagtcagctcagccacactgaggctgtttttagcccagtgttctgcacagacatgacggattagctggctgcatcagactgtccttcgtgggactttgtgctgagtgagggcatgtgtgtcctaagtggattatgtggcttgagctcactgtcctccctcagctacggaggagtgtgtgcgctaccactacactactggccaggactggcaggttggtgatattgccagattataatggaaaataaaaaggagggggcagcagcgtatacagcaacactgtcccagcaccaacacctaggcctccccttccagcatctcctgcaatcaccagcacgaagagctgttgccataggatagatagcctcatccctgacttcttctagatactccctttctcatcttaggcctggtgaatgccaatcaccatactgctgtcttaggacatgttttctttcccttctcagaaactgtcactcggcattgagtcagtcactgctgttggcacttagacagcctgttgtagctagctgtaggaaggcagcccatggttttaaagcctttattgaaaaaaaatatttttttatgcattggtattttacctgcatgtatgtctgtgtaagagtgttggattctctggaactagagttatagacagttgtgaactgccaagagtgtgctaggaattgaacccaggtcctttgggagagcaaccagtgctctgaattgctcagtcatttctccagtcccttattggatagttctgtgaacttagctgcgactttagtttttcttttccttaagggagttagtgaatgggttttcaattcagaggaaaattctcttatttattctgaaaagtatggttaagatgaacctaaaagaaatctcgtattccttggcgatgaaatgatccagttataacaagactcctttgtagttctccctggaaaaagacaagttcagtgtgagacttgtgtactgagtgaaagtagattgacagcctgaaaaacaaccttggtctggagatgtcgctcagtgtaagagtgctcactaaggccctgggtttgagacccgagctggggttgttgggtagtggggagagggggacagtgttagagagcagcgtaaagggtgcagttaacactcgctggtctgggacacggtggcaagagccatgctctgtgcttgccagtctcctccttgggtcatgactcacctcttgctggcactcccaactgtcttatgagtaatacagccatgtgcagtcatcttgtggtagaaagcctgtgtgcctggggtccaaggtgacatcagatgctatcaccttcctcattagccgcttagcaccaagtccctttgaactcgacctcttcaaaatgggggtaatgacacacagggtgtcgcagggtgcctaaagccacacagcagctgtcttctgctgttctgttctaagagtgtgttctttctaggctgaacgacaaagtgaagaagaaagctctcacatcatttgaaagggattccatcttcagcaacttgattgggcagctggattacaaaggctttgagaaggccgacatggtgattgaggctgtgtttgaggacctcggtgtaaagcacaaagtgttaaaggaagtggaaagcgtaagtaagggctgttgcacttgaatcccggagggcaccaagcagaggggtcttgtcggaggggagacgcatgccatagagcatgtgtggcagtcagagggtaacttgcaggactcatttctctcctctcaccatgtgggtcccagggatcaaatccaggttgtcaggcttgacagcaagtaagtaagtacctttacccactaagcaattttgaggcctcaaatgtaagtttgtatgtgagtgtacacatgctgtgtatatcagaaagctcaggtatgaatcctgtgggaagaaaattaattaagtaccctatgctcctaagcccagggctcattagccatattggagtggaaatggggaggttaccagccatctaaatagcctcatgggtacacaggtgtcttggggatttcttgttgttggctgtgagccataatcaggtgatttcatgtctcggtagcaaagggaaccaagggagctttctccaggctgttttggatggttatctgtggtggcgctcctttggacctgctcaagtgttctaaaagcccattcttgagatgacagtgaacaaaatacgtacctcatgtgggtgatagaaagaaaggtttagaaaaggagaaatggctgtagtccaagagtgagaaagagcacagctagactagactagggaaatgatactgagctggcaacactggtggctgtctttgcaagctgtggtgaagcaggcaggattactaaggccacctaagtggtgtctcacggccatccataatgggatctgatgccctcttctggtgagcaggtgtacatgcagcctggccacttaatacataaataaagacatctttataaagagagggaaaatccaaggcacgaggaagacctccagcacagcatcctgcccatcctctcgagagacctgaccttttgctgcttttaagaaaactcccaagctgagtctacgaatggttcagtttaaatcagtcgtctcttaccccctatggaactaaacagactgttcctgacattcttcacgggacagtttctaaagatttgtttattttatttttttatttatatgagtatactgcagctgtcttcagacacagactagaagagagcattggatcccattacatatggttgtgagccacaccatgtggttgctgggaactgaactcaggacctctggaagagcagtcagtgctcttaaccactgagccatctctgcagcccgtggaacagtttgtagatgcttccctgtctttctgtctcggtcattagctcacatctcagcgtacacattgctgagaagcatctcttgaacaccacagcgccctaaacaccaagcctttcagggcctattcctcccatggccaaaatgtctccatagcaaggttctctaagagcaaaagaggtagctgcagaactgcagcaaggcccaagaccaacggccatgcttctgttggtaaaaccaagccatggccagccctgatttagagcgtgggaaatagactccttcttcctaggaagaaaggcatgcatgaccaaggagcagcgagagtgttgccagccatcttgggagataagtatttgctctcctagagtagaagataaatatacctcccaggctggccttgaactcactatgtagccaaggataaccttgagtttcagatcctgctgcctcttccgaagtgctgggattactagcatgcagcactgtgcccagtttatgcagtcctggagaaccagcccagggcttcctgcatgtgaggcgagcactctacctactgagctacatctctagcccaagaggccctttccctcacccttgataccatactagcagctaagagagtatgttcactctgagtcacaccacaccgtcagctcacagtccactctggttggttaaaaatcataggatcctcatcacagccaggccctttcctcaaatgcctatactttcttctgcctttttaatcctaacgattcacttttgtctgttataattaacgttttgtactcaacttttcaatgtgttaaatgtgtcttcaaccttgattctaatcttatgtttgcattctgtctgtgccaaatttgtgcagatttaacagacacatcttccatatttttacccgtgtcagaaaacttgaataagttgagattagagccagaagactgcgcatcctgtgttagggacagtgcagacaggcaactaaagctaacagttggtcgtatttgtttgctgcacgcataattacagtggacactgcccttcggtggctcagttaggatgaaggaagtatacactttctgacttaggaagggtgagcgagggtacagaatggtgtaatcttccagacttgagagcacatctaaataccaagaggggtcaacacccatgccccactttgaccgaaacctaattcaactcatccttgtggcatttatgtaaggtaccacgtttacccaagtgctgagatgtggtctccagggcaggacaggccgtcagtagaggatggctcaattaagagagcaaggtcgctgggcagtggtggcgcacacctttaatcccagcacttgggaggcagaggcagaggcaggtggatttctgagtttgaggccagtctggtctacagagtgagttccaggacagccagggctacacagagaaaccctgtcttgaaaagacaaaacaaaacaaaaagagagagcaaggtcaacacaaaagcttttaggtgagtcacagagtctgggtaagtatggattggagaggaggctgggctcgagtatcactgagctgtgcagtggctgtcatctctaggcccacctgacagattcttacatgctttcccctgcaggtgactccagaacactgtatctttgccagcaacacatctgctctcccaatcaatcaaattgctgctgtcagcaaaaggcctgagaaggtaaacccgacagaaaccctcaaacggcagactgcttcagactcactggctgaaattttagtatatgaaccaggaaaagaccagtgtagagtataaagtggatggggtgcttccccaaagtggtcacagaaaactgagcgccactctctacaggtgtaggatggtgactggtgtgcatccctcgtggcggctagttctcaaatgtggactattaaagttacttacattagaaccagatactgagggccaggccctaaaccaggaagcagtgtgctgttcagctgtagtgcagtgtggtgcctgcctaggctgggtaagactccaatccagcctggaaggtcagggctgggggacctacagcctcaccctcaacctctacccaggatctgaaagtactaaacttagaagtactttcactgagtatttgcaatgctgtctagaaagttatctttgcttaagcagattcataaagaatgtagtcatttaaagaggggaaaaaagcctcacttctctggaggatacctgcttcaactgagcagccagagagactagaaataacaacaacaaaatttctaagcagctacagttgctaatactaggcctgtgtctccaaaccacccaagcctgactcttccccctcctatggtgtgtggctgcagaacagtctacctttcctagcacactggtccagggatgtgatgtggggcctgatggaggtgagcccaggggtggcaagagaccatggacccaaccctctgcctagatcagcagttctgcccacaggcctttctctccagtgtttccctccccggcactggtaatgtgctggttatggctccctcacaggtgatcggcatgcactacttctcccccgtggacaagatgcagctcctagaaatcatcaccactgacaaaacctccaaggacacaacggcctctgccgtggccgtggggctcaggcaagggaaggtcatcattgtggtcaaggtaaggtcagaagcagaagcaggctatgaaagttcaaacatgatttcttgagcctccagacttattataactcttctgtggtggggggcaggggaaggggataccagcctccaaaactctgtccactaggttgtctccaaaacggacagtagtggtgactgtcctgctgaagtaggatagcaggagtgtctgggctctggcagatcctcactggtgactccagacctcagagatgacatgaaacccagactgttcgaggtggcttcttctccagtataacattgagcattctgatgagagcttaagtcagctaaagctgtgaatgatgtctgggaaaggaatactggatgtggtcgtgggcagcaaagcaaggctgtaagctcccttcctctcccttggcaggacggacccggcttctacaccaccaggtgtcttgcacccatgatgtctgaagtcatgcgaatcctccaggtgggtactgttctatggaatgtctgaggccttgtcatatctttttctgtcctccaagctaaagatgtccagatgagggacaagttccccaagaatgtactactgcttttctccagaggcccttttgtgtctccctctcacactgaaacaggatgtcctgggactaagactgtgcccaacaggcagagtgttaattctgctggttgctcccccagcattgcaggagccagagcctcccagaatggcctgactaccattgtatcacaccacacacacacacacacacacacacacacacacacagagagtgagtgtgtgtgtgtgtgtgtgtgtgtgtgtgtgtgtgtgtcctggtagccatagcatctacttagtcctgagattcggagtcaccagcgagaaggaactctgtgatcggagtgcctgtgggatagctgcagggtttcccttgtgctttcctggatgaagcgctagttctgcatctggccaggtgatgtccaagaaaagaagtgggctctgcacaaggttgtgcctgcagcttatgcaggcagcccttgtgtgggggacctgggatggctgtgccctgaggcccttgctttacttcccgttcaggaaggagttgaccctaagaagctggacgccttgaccacaggtttcggcttccctgtgggtgctgccacgctggcagacgaagtgggtgtggatgtagcacagcacgtagcagaagatctaggcaaagcctttggggagcgatttggaggtggcagcgtagaactgctgaaacagatggtctccaagggcttcttaggtgagtaactccaggacacaagagttagctgctagttacagagctctgagcaggtgcctgagaatagagagggtagaggggaaagattccagaacacaggtccctagacatagggaatctcctaggctggggaaaggcagtcggtgccgtgtatgccagagaaaccagcatcctcctcctgcacggtcaggagcaagttctatatccaccaggccctgaggtctggctacctgtgtccaacatacagaacatacaattgaggctgcagtgaaatctcctttaggacctgggactttcatttgtacattaaaattgggcgtgggcgtgggcgtggcctttcttatgcagactcagatttccatgcaccagagctttctcctctgcccatcatctgacaagggttaaatggctcagttggctgcatgcaggagcttaggggtgcagtggagtgctagaagctcacagcatccagcagagacagggtttgctgctggggtaaaaggcaatgactaacacagtctctttattctctcaggtcgcaagtctgggaagggcttttacatctatcaggagggctcaaagaataagagtttgaattctgaaatggataatatcttggcaaatctgaggctgcctgccaagcccgaggtgtaagttgatttgagtgactatttgcccgaaaataatgtttatcttagtagctcaaagctccttggccccttttctattctatttatgacccaaagctggcaaaacactgtacagctaaattccctgcacatgagcccagtttcagtatccaggtgagagtgggccaagcctgtggacaccctgcctgctccagcctgtgaaggtgggaggtgggttgtggaggcgcctgtaccctcctcactgttggttacctttgggaatgtgctgctgttgctgatccttcagatgtgacagtcatctctcctgtgccaggccctgtttaggtgctcagttcacattggatagggaagagaaaggactttgatctttgaggatggtgtagtacaccctggccactggcctccctagaactcacccgcaccccacgtgctgtgctctggctcctccctttctttctctagctaagttctccttcctgctcccttctcttcctcagctcctctgatgaagacgtccaataccgtgtgataacaaggttcgtgaacgaggcagtcctgtgcctacaggaagggatcctggccacaccggcagagggagacatcggagctgtctttgggcttggctttcccccttgtctcggaggtcagtgtgcaggccgggaagttgccttcctttatccttgtgcaagttacagtctctttcactaaaaagtctgtctctgctcagggcccttccgctttgtggatctgtatggtgctcagaaggtagtggaccggctacggaagtacgagtctgcctatggaacacagtttaccccatgccagctgctcctcgaccacgctaacaactctagcaagaagttctaccagtgacaggccctcccaccctaccccaccatgcactaacccagacctggcagtgccgcttctcagctgtgctgtccaaattatcaggaagcaggaaaaagaccaaggctagccttgggcttgctcctccatcagagtgccttctgccctggcccgctcttcctcctggtgaagtctgactgtgaattaactgtttgcacttcatgttaagggggagccccactgtgcttcttttgcaagccctgcctgagacccaaatcaacagctaagagtaacccagaacacctgctgcctgtgccttcccagaggccagtggggcctggcagtggtaagggcattttttgcaccaagccaaacacaggataacaataaaatccggactttgtgcctctgccggactggcctgttttcttctgtctacccttgtgtttgagcctccccttcagtaaggaagcctgtgcagtggagcatagacgggctgggagatgtcgggcagctgctttagacagggattgtaatgtcagaaaacagactctgtgcccatgccttatgcttgactgcctgagtgccttggctgggctgcctggtcgggagagtggggacagtagaggtgtggtgtaccaggatgcgaaagatactcctttccccaaccacttcctcactgtgccattgtacacgttcttcttggcatgctcatcctggcttctgagagttatgcaaaggatggatacccacagatcagcccatctcgcttctgtgacctcagtttgtcctacctctgtccctcggtgagagttctcactctgggagaagcagggcctagctatataaatagtgccgggcgcctccctgggtcccactgagtcactaagtggatatggaacctaatttgggtcccatccgggtcactgtgctctgttccatgtggaagtgcttcaagtactcccactgggactggcagacggcgcccacctggctccactgaatacctgcagttcactgctgggaagaccaaccctaaagttggtcatctcaaatgcattttcagatggccagaaggcaaagaactgatcacatgcacaaaggccaagcccaggcgtctacttgcaactgagggtgtctcaggagctggcagagctgcagttacaccagacctcagtggcattgagctttgatttctgggtcttccctgcaagcacacagatgtgggctctgataaaaattactcgagcagcctagtggtggcaggtggatttctgtgagttcaaggaaccctgtgtcaagaaaaagattattgcgagaggatagggttttacaggccacagtgaagactgcccccttgtgtatctacacataccattctagagtccttccctgctttagagacacatccttggtcctcatggcctttcacagaaagaatcagccaacacccagggccctactctttcaccactccagggtctagcctttatttccatattccttgaggtttcattaaacaactgtgagaagacaaatggcacagcctaggtttctgtgtttccgtctgaaaggcacagatgggcagggcttaactattcataaaacacaagaaataaatatctaggtaggccagggaaggcagacaagaaaactgacaccagaggcatgagtgtggctcttgttagaggtgctggagaatgagggtgaggggtaggccagacctctactgtcaaacagatcaccatacttgagtctgaagagtacaaagatctgctctgaaccatgtgaataagtggctgagctcaggagcaagcagcctttctgagccacttgctgtcctgtaccagtgacacaccaaggaggccaccaagagcccattagagccaaagctgatggcaggagactggtaggctggaggtgtctgacttacatctggctcctctgtggaaaacaacaggctatctgtgatgatatcggaacagggactctggtgctggacataggcctgtaactgatccactagggcaaggggtacctcacagacaaaaatcacatccctaactctggaacagctgcaggccaaagcccacagagcatgaaagagaggccactttggggacatggctgaaaatgatgagccatcttcccttgtctctcacctgaacatacagggccgagaagtgtgtgtttgggtgtgtgtgtgagtgtgaaaggctgcagcagggtagagaacagcgttctaccagcgcaaagccacccgatgacatacgcgccacctttactctgctgtggggatggcactaaaagcccctccagggcacctgaagagcagtgcctcctcctcaaaggcgaggcaagctcctgcagggtctggccccaaagggccacggttcccactctttctcccttgaaacactcagtgttccagagcagcctccatcttgacccagattttccctgcgggaagcactgtttctggcagacccaagttaaccccacagggcctctgctcccaaagttgaggctgtgcagcacctggctggctggttcagatcttgggtctccaacctttgatgaattgcatgattttcttgacctgaagcttggtgagatggaagtcgtcagccaagatgtcttcactgagctgcacaaagatgcttccgtcgatgcgttctcgggcaaagaagctcaccacgtcctctgagagcccaatgaagcgcagactacgggagacctcttccagggagagtgcagacaagtctgctggtggctgccaggaggaggcatcccggaccccagcacctgtggctccctcccgggggctgccaggaggcccttccaggcatccttgggtgagaaagagtagggttcctcctgcctcaggcccctgcaaggcagctggtgacagtgaggcagggacctgcctcagcaccaaaccttcgggctcaaaggccttgggctgaccaagtggtgaaaggcaaggtcctgacccaggtgcccccgcagctctgggctcctgacagcgcactagctccagctcaggaggactggcctgccccagctcaaatgggtccaggggctccagagctggctcctgccactcagaggatgacaaggaggaggaaggagcagctgagtaaccttggccttgtgggcctgggcctgggcctggggagtgtgtggggctagaggtagccaggacacccgaggtggatatggacccagaggaggaggccgctggagcacctgaagggtgggcaggcccagagaaggggttgagtgcaccaaagggagcaaaggacttctggggacgagaggacttgaacagaggtgggcagctatggtagttcttaactactggggtgtcagcccccaagagggagggggttcgaccactcaggggctctgataggcctcttgaggcctggctgggctgggtggtggtagaaggcaggggtccaggtggcgggcgactagaggactcgctggctttacagtctccccaggtgcaagggtagcaatagagagagtatgcatccggtgacggggagccactgccactgcgggatcctgccctacaagcggagacagacacacaggatgcactcatagcataaggcaggcagagtgggaagtgacagtcacaggaccccagagcccccggcaggaaactatccctctactgtatagcctgagaccctcttggatcccctaagtccccaggtcatgtcagaacacgaaagagaaatgaaaagccagggaccaaggtagcaactcacccatcctgcaggccagaggaataataggagagactggagctgggcgagtggacaggctgcagcttgggaaagtggggcagcaccggagggctgcctgtgagcttgctgcagctgccgccacccctaggaggcactggaggggcgtgaagcaggcggcactcttccttcacctgcagaggaagaccacgactgccttacttcttacctcacctctcaagcaggggggccgggcctgagaccttgtcccatgcagaatggaggctgtcccgcctagatacccctgtctatttccaacctgttttgtctctcatactcggtccacaacagtcccctattccatcgtaaatttattgtgaatgttagtagattgcggggcgggggcgatagggatatttgttcttcagggaaaagacaagggacctgctactaggatcctgtccttacaaattaagttccccaaagagtgtgttaaaaggtgtgattgagggctggagagatgcctcagcggttaagagcactgactgctcttccgaaggtcctgagttcaaatcccagaaactacatggtggctcacaaccatctgtaatgagatcggatgccctcttctggtgtgtctgaagacagctacagtatacttacatataataatagataaatcagtgtacttacatataataataaataaatcttttttttaaaaaaggtgtgattgatgagggaactgtcctgtgggcaaataagtggggaacggttaaatatcagcacagaacatatcagagcctgtaatgtggttctaactcatcgactccaggggttgctggaaatcactcgcatttcctacatttactgcatttttccatcatgtcgaactttgtggagtttgtgggtacctgcttccagatcaccctcaattctctctgccttgcatgtgtgccctggtcttttcccctctccttctcctttggctctggccattctgtcactccccaggcgcacggagcctccgtggtcctctaaaacctgcccaagttccttcaagaaccttcaaggtgaagcagaactcactcaccgcctcggatttgggagggacaggaggtggtggtgcctctggctcatgccgtgggggccccacgatcccgaaggagatgaggtccggccccgctagcggccgtgcacgggcgtcggcgcggctctcgggggcttggtgcacccacagctcttcgtaagggatctcggcgcagccgcccgctggctcggacacacccgcccaatcggggctcacgtaatcctgatcgctgtcgccgggcgcgggcaaagcgggacccaggcgacccggcggtccaggcgcacggacggccccgggggcggcgcggcgcgggcaggcagaggcgcgcatggcgcggctggcgcagtcgtcggagagctccgcgggcgcctcgcgcacagcagtggagtattcgtccggatcgaagcgctcgcggcagtaggaggcgctgtcgcgcaccaggcgctcgacgcgcgggtccccggccagcagaccctgcggcagagtgaagcgcggcgtgtccgtaagcagcaggaagtgcagcggcgccgggccctcgcggcgcagcgccagccccagcaccaccgtcttggagatgatgctgaccagcttgtagcagtgtccctcccgcaccgggtggaggtcgtaggggttgcgcggcggccggctgggcaccagcacgttcaccggcagccgcacgcgctcgatgatggcgcgcaccgtgtgctcgccctcctgcatctgcagctccagtgggctgcgcgtgctgaatcggccctggcactggaagggcaggctcaggctctcgttggtgcggtggttcatgcagatgagacagggcatcttgcttttgacgggcctggcggcccgccgccaccccctgttgctcccatgctcccggggccgccgattccggccaaggcccctgcacggcccagcttgcgcaggagcgtggtgaagcgcgagcgctccttggtcgtcttggcgcacagaatctccgcctggcccatgagagtgagctcgtcgcctgcgtgcagtgtgaagttgtacacctcgctgtcctcgctgaactcgcctgacaccacctggggaatcccagagacaaggtgaagccctagctagggtcgcaaggaaagtcacacaccagctccaaactcctcgagcgagctttccagtcccttcctcttaagctgtcactgacataagagcgagagcactggactgggactggagggaatctgcgactttaacgttttctttgggtccttagttacctcatatgggtggagagatgtactttgaaagtgctcaatcactgaaaattttattaggccatcttgaccatttgcgtgataacaatacctcacccacccaagactacgtcaggtcgtgacccctccacgggccgttcctgcttcaccacatttcctaggagatgcttctgtccactgagttagtgagcgggctttcctggcatggcctgactgtgccagagggtgcccagaagcagctttccctcctggatcctatgagcaacactctaacctagagaaagggaagcgggggaaggtcctaccccgtgcctttaggactaaccttgacactgaaggtgatggcttccatcacgaagattcggtcagggaagacactggccacctcctccacgctgctgaagtatctcacaggctcccgcacgtcccgagcctgctccaggagcttgaatttgcctgcacgggggacacaggctgctgagggagggcctgcctgctaggggtcaggtctgaattctaggaacatcaggcctgctatcccaaactcatccagtccctctggaattcaggtgggcacaaagcaggtatactaaggtataatgtaaatatcatgtaaattgtctgtctcacctcggcaatgatgagcttaaagataggctaagaactgctctgccttcacacagatggaaaatcggagagttagtaaggactaacagagggtgatggagagaggacacagtctccctagttctgctgtggccctctccgtagttcactcacattcatggcgtccccactgtgatgtaagtcagtaccaaagtcttttcagattagacagttctgtaaacagtctgctctccagaaattcaggccaactggagatggctgagtggttaagagcactgactgctctcccagaggtcctgagttcaaatcccagcaaccacatggtggctcacagccatctgaaatggggtgcgatgccctcttctggtgcatctgaagacagcaggtgacaagtcctgaggcacacctgtgagaaagcagctccaaaggaagagacttacctggcacaatgtgtgagggattgcaaagctgcacctttcaaatgaaagggactttacagaatggacatcagcaggcacagtgtttgttgtacaaatgtgaggcccagagttctctccagcactcacacggaaagcgaggtggggatgggcgaatctgcaatcccagctcaaaggaagaggagacagaaaatcctcagagcaagcagactagccagactagcagaaggaaggaactgcaggttcagaaagagactctgcctcagtatacaaagtggggagcaactaagcagggcacctgatgtcaatcttggggtcttcacaaagtatgcatatacacacgtatacctacacacattgtgtcatacacacttgcaagaacatcacatacccatgcacgtgtgtgcacacataaacaataaaaccaggaaagaaaatggatgaagccctcaggaagagtttgaacaagaaaatgcagtaacggaagctgagctctggcaatattcgggcaagcagtccagtaagaaatcctggagaagagccaggaaatggcacacagtgagcaaacccatggatactcagaggacccttcagaccctaatgacataaggagagaagtcaaggaggaatggactgagggtgacacacatggcctactggtcacagaggggatggcaggctgttccacaggaggaaccaagaggaacatggcagaaacagatcctggaagaccaggaaagagcctcacagggtagtgccccttgtccatgtgggaacgaaagagcaacagattgaagtgcagggtggggcagattagggaagtgggaaaccttttcaccctgtggggaccttcgaccccctaaaagcccacattgctcatagcataagcacacaatgaagagggtccctgtccctccctaagtctaaccagaggcagagggagactgagaccccccctggtgcctgacctgaagaacggcagggcctgaaccaccaacagccagcaccaaagagagaatgggaactaagaagagagaggacagcggaggtgccctggagcaaaccagagagagggtcccggtccagccccaaccttccagatgctagagagaagatgggccacagcccaaggcatcagggagaaaagaaaggggccagagtcaaggcgcaggagtaccgaggacggacgctagcactctctaacccgcttcagtctcctctgtctccatatcacacgtgaacccccaccccttaaccaggagttgccagacgtggagaaatgcctgctgccccctgtggcgagatttggagcccagtcagggttggatcctaggaggatgtggcagggaagatcgatgtaaccatggtatccagcaccgccccctcagccgcccagccgggtcatttctgcggggaggaaggaagggagacctcccgggagacgtgtgttggcctctagaagccttctctgcactgcagcttcctttcctgccgcccccaacaatcggcgttaggggtaaggtctgctaaatgatctggggactgtcgcacattaaaactgtgctgatcaccctttccagtccgagaaacaccctacccagcagctgcctctcaaaaacctgaggtgtctcaggcgagctctcagtaaagaacagcagtagtgagtgactcagtctaagcccagtctgattctgcatcgccgcagttaggtgggaaggagcacaaacttggatgtggctgagtctcagttctgacaccaaacagcatgtgaaatcttttgcttagctggactttgtggttttccatatgtaaaatggaaccatactacgtggctcacattggagttgagcgcagaggcgcacctgacaagggctctgcagggcccaaggccttgcaaggctcggaaaatatccggtggttggggaaggtgtttggaccctcaggccgcactggcccagatttctcaagacaccaagtcaccctgactccctcagcctggagactgcaggcggcagcagtggcagcgcccctactcccacccctcccccgcccgctggccacagccggccggccagtgccattattaattcattgggagggctcagcgtggagcctgcactttgagcctcttcggaggcccagccccctctccactcccacgaagtgaggcccccagcggaagagggagcaggggcccgcaggctctgccggccagctgccaccccactgtcctgtccccacctctcacaatcactaaggaggcattaaattggaggggtaaaagattgggggcttccctcctccattcatagtattctggaaactatgactttggttgtaaagatacaaccaaactggtaacaccgtgagggacttcacaaatggctggagggctttagtccaagaaggtaaagatctctacctgaacaaatgctagattctcaggttggggaatttctagcttgcagcctaggatagaagcctcagggcagccagatagtgggggtagctcctccctgaagtattggaagtatagaggccagccctgccaagggtgttataaagagcttaaacctggggcaaggtttaagccttgactcaaaagagacccaggccagacagagcagtggtaagaaggccagggaaagactgtgacctcctggctccaacagccttgctgcggacaggggcagagagctgtacagtggcagaagcacagaatgggagccttgctcttcagttgttcaagggggccaatcagtgagctgccctgggcttgcatggagacagttctaggatggtactgcatcttggggacaattatgtgctggcctagtgcactaagcagaagccagcagttatgacacctgggctctggtccttgacttctctgagtggccctatgacccacagcaggtcactgtccttccaggtcccttggtttctttaactgaagtgctacactttctattggcagtacacccttccttcaaacaaaatcttacataaaacacagagtcaagcccctcgtggtacggaggagcacaagttcaagacctgcctgggctacagagcaaacctaggcgacctaacaatatcatgtctcaaaataaaggatggctgagatggctcatgaaggtgcttgaagcccagccgggagacctgggtttggtttttttgccccacatggtagaaggtgaaaatctgcaagttatcctctgacttacacacacacacacacacacacacacacacacacatgaatgaataaaaatctaataaaaaatacaatgaaaaggtagcaaagggtctggggatgtaccttagaggggagcacttgtctagcaggaatgagcccttagtgttaacctcagcactacaactaaaaaataatacaaaccacattaaaagcagttagcacattctttagaaatctaacacttcagcattgtttataaagccaatccatggagagagttgaacacaaaactggagaaaaagggtattcagtgctgatgggcagcacaagtcggccttggcaggccttggtcaggaccgcctggtactgagcagagcctagcagaccttctctttgggagttaagtacaattcagggaacagcctcaaaactctccagttaggagtaaagcctgacttctagttgcttaaaatctgtgtacattttgccagctgtgcagttacccacctttagtcccagcacctgagaggcaaacagagctctatgagtttgagtcccaagcctgatctatatggtgtgaccctgtctcttttttaaaagtgggtatttttcatcattacttcaaaatacatttaaaacttaaaatgggcctagcatagggattcatgttttaaaacacagtacttgggagacagagacaaaagcctaaacctgagttcaaagccagccttagctacaagacaagaacttgtctctaaaatataaactaagaatcaaaagtccgtaagcccgaacgccacctcttcagaaacaggtctctacagaggatactgacactcataagccctgactctaagggtgacctccagccttcacccctgtagcatgccctagttcatccctcagcagaggctctccctaatcatcccccctgcacccttgctcccagttcctcctgcttccccatgctcagagatcttaagtcatctggccctagctgggcgcacctgggtactgcagggggatgtcaatcttgggcccaatgacatagtggccctcctccagggtgtgggcagtcactgtagtccactggcggcaggagtggatcagcaggatgtctcgttcactgactccctcagcatactctcctgggagaggaaaggaagagaaggggaagaaggaaagaagagagaaagtcaggagagaaagaaaaaaaaaagattgggtgacattcctgagtgtcccccccccctcacccaacccacccccccttcctcagcaagcccctgcctggggattgtgccctgtgatccctgtactgctccgcaacaccagcggaggcagtgggctgtcagctgtgttgtgagtttggcctgagccccaaagctctgtctctcctatggggacttggtaactacagccaccacagcctcccattcatcattccactggagtgcctgctgtcctggcccaagctgaggctggggactcccagtggatgagtctgggccagccagcttctgccctctagccatgctctggcctcaggagacacgcaggaagcaagttggaggcacagagctgagggtgtgtagggacatggaggaggaggccaccaggctggggtggagtaaaagagtcgttactctctaggaccaggcaaattcacatcagtgggatcctgtcaagtcagtgcccaggccaagcaaggaaaggactagaaagaatttgtcccgtgggtcctggctatgagggctctcacagtcactgttagctccgaatggcatggtttactcctgaatctctcagagaaacacgtttcctctctgcccactgccacagagtcttacattcacaggacctcaaaggataggggaggaaaccccaccccagagaagctatttcttaaagttggggtagcacaggcactggatttaggaaagcagagtgggggagggggaaggagtctagtctgagggaaacagcccaggggcagaggtgcaggggttgggaggggtctgggctcaagaggctccatccccagcaacggtttccaggggagcaggagggggcagcccagcttccaggagactgatggggcgtatcctggatgcagctggtgggcacagtgggggtggggatgtctccttcccagccccctcacgtgcacacgcgcgtgtgggcatacacacacacacacacacacacatcttacaatttttctaccagcccaatgaatgggaaatggtttactctaacagcgggggacttcataaagcatgtctatgtggggtgaacaatgggtggggtatgcagggctttcaggggaagatctcccattctgggtgtgaggatgtatgtgcactaaagtgcaaatatgcacaggggaggtttgttgtttctcctccagctctacaagctctccttggagctaatctaacaagccccaccccccactcctccacagagacacaggccaaagccacacaggtatacacaccaatagccaggggtcaccctcagcaatagttcagctgcacccaacaagacaaatgcttgtcatccaaacagcacaactcagtctcaagatcctaccaggggacccctcctgaatgcataccaacgagaggacttccaaggacacacaatttcaagcatacatttttattctaatggttgcgacagtaataaccacactgtcacagacagctaggccatcccacactattgctcattcattcattcacttaatgaatgaatgtccatactccttggccctccccaaaagccagcagccctgtggaatggggcgcacaggtgtcagggaagcacagagaagtcctagccataaagaagcgctcagaaaagaactcaaagaaaagggtgtcaaagagatgcgtgggaagtgagcaggaagaacctagggcagaatttcctattcacaagcagacacagtccagctgcaagcgcagtcctgggatctcacgctgagcagtgagtgaggtcccaccagagttagactgccaggtattccacctaaaggaccgggacacactgaagtcccactgagcctgcttcggcccgcctggtgctcactgtgcccagttcttgctgttgcgggtctgaggaggggctgccagtccaagaacagcacaggagtcccattagcattcagggaagcgagtgtgccaacgcgggccaaacccctattcttctcacacacaaaacccccagcctggctgccagccccggctcccgcccctcccccaaccaaacagctcccctttcccccaacactacagtcctcttgctctgtgcagccttcaggctctcctatattcggtcccatcatcggaacacccgcacctgctggcgaaataggacgagaggtgggggagggccgggggtcctctgctgagatagggaagggtgtgtgtgtgtgggaggggggtgcctggtggccggcccgctcactcaggcctctccggaggatagtctgcccgttgccaaaagacctcaggatgtcaaaggacggttcaggaaaggtcccaaaaagggactagcggggatggtagggaaagacctatcgtggtccaagagatgcggtacgatgaaggtgagaggctggaagacaaagggatcaagggggtgcggcctgggcaggggccgatcggcgccgggaaagcggggtgcaccgacagagcggcccacagactcagcatcgctactggctccagggggactgaaaactttgttgcaaccctgcggccagttactaaccctgtggggggtcggaggggcccagaagcggctcccagacttgggggctccggttgtgccaggagcagccccagaagacaagcaaagccccccatcaacggggacagggagggtagtgactgaatgcgcctgtaagtcctgccagctccaacagagcgaagccccgacttttcgcatcctccgcctccgtctcccctctagacaccgggtacctggtccgaggcaggcgagcgtgggcaggcggcagcggctgacgatgaggtccagcgggaaagcgcccatgctccagcgcagcccggccagcccggccgccagcttctccatggcatgggcgctccccggggttcgccgtcccgggaccccgacggccagtcccgcgcagctcgggctgcgcactcaccacctcctcctatgccgaagcggcgctccccgcctggcagcccagctgagcctcgggagtcacgtggccagcctccttccacggggcatcatgtccatccccatccccgccccgcgccccgcccgccgggcccgcacccccggagcgcccaggtgacagggcgctcggggtggagatggttagggaaaagagaacaggtccgatgggactctggccgggtgggtgtccgaggttttcccctcgtgccaaggcctcgcggagtccggactcaggactgctgcgttgctcacatccgctactccaagctcagcggcggggatgctcagactggggaggagcaaagagggcaggcggcacttggagtttgaatctaagtagtgttggaatcctgtaagagcactttccgaaaccccgctccaccccccccccacgccctcccccctccccccaatctgctctgtagatgggaaaacagattcaaacctgaacgattggggtcagtggcagcactctttttttttttctttagnnnnnnnnnnnnnnnnnnnnnntcctc

SEQ ID NO: 4342 - DNA, 3187 bp, Arabidopsis thaliana
attcttaatccagttttgtggatgagattctaacatatccaatttatgaagtaattcggctttatgatcttcatagtagctgagtaattcacgatactctttgtgccttcgttcaacacatgataggaatcctaccgcctcatgcctctcctctgaaccttctcaaaactgaagagtcgacgagactcagatattgttgaaaagggcatttcccgttcgattgcttcagcattagaaaaggtcgggacatttttgctaacaaagaaagaagatctggaactctccattatgcggtaaaaggaagaagatttagattcgatggaagaaacgatggcgcttggagaagtatttataaaatcaaaatagaagtgggaaggaactttccctattctaaaaaggaattttcacctttttccttttctagagaaagtggaaattgagataatttccttttagttttgaatgaagcaaaagtaagtcgataataatctaaaaactagagaataaatttaaaaccgccccgcgtgtttcgatatccttgacaaataccatatgaagctgaatcctaccaagtatacgttcagagtaacatctagcttattcttgggatacatagtcactagcaaggaatcgaagcaaacccaaatcagataagtgcaataatcaaactaccgacattctagaataaaagagaagtccataggctgacgggtcgcattgcatctctgaatcgctttatcgcccgatcaacggacaaatgccttctgttctacaagcttttatgcggcaataaggacttctattgggatgggaagtgtgagaccccttccaagaacctaaagcctatctcatgagaggggcgatcttggccacacccgaggtcgaagagacattgtatctctatgtcccggtgtcaagttcggccatgagtggggtattagtaaggaacgatcaaggtaatgaaaaaccaatcttctacaccagcaaagccctgaatgacgccgagacaagatatccaacgctggagaagctagcattggcagttatgacggcagcacgaaagctccggccttacttccagtcgcattccatagtggtttttaccgatcaaccactttggacaatgctgcacagcccaaaccagttcaggcgaattgcgaagtgggcaatcgaactgagcgagtacaatgtggagtatcgctccaggtcgagtctcaaatcacatgtcttagcggatttcatgattgaattgtccccagatgtaatcgatgaggtccttgaagaaaactggatactctatgcaaatggcttctcgtcgctgcagggttctggtctcggaattctactccagtccccaactagagaagtgctcgagcaatcgctctgacttcagttcaaagcatccaacaatgagggagagtacgaggctctcttagcagtacttcgccttgccaagggaatcagagccaaccggataaaagctttcggcgactcgcaacacatagtaagccaatttagcggggaatttgaagcttaaagtggatgaatgtgagcttacctttcgttggtcgaagaatgtccaagaaattcgacaagttcgaatagataaaaataccctggagtgacaactcgtcagcggatgctttagccgcttttgcttcaaacacaaatcttgatctaagacgcacgatccttgtcgagagcataagcaaaccgagcatcaacctcccagttcgacctgcatcattgtcaaacccgtaacaactatggacgtagatgccgagacatccgacaagccggatattaaagtagacccgcagcctactaattggagagatcccatcaaactctacattgctgatggcgaaattccggcagatcggtgggaagctcgtcgcctaaaggcaaaggcgcgaccaaggcgttcctcacatgcgtaaacaaagaggaagccgccataatcatgaaggaaacgcacgacggggacggagggaatcattctggtggacgagctctagcgctcaaaatcaagaaggatggtcactactataacgtccccgaatcgtcctatggtcagacaagccataggcgacccagttacgctataatgaagatgatcgaccacaacttattagagattccaaatgaattcggttccttaaccaaattataatggaccctcttctcactaggaacatcacttaggcttgctgaccctcgtgatattctagtgttgagcgacctagactaggtcttatatcatttaacactcggctgcttttaagaaaacactttatacatagtatatagcttatactttgcaaagagttagcaaaaaatatatctgtatgtcggatccttgttaaaatttacataataacaagtaatttttgcagaggcaacacaaatatcctatttctgacaattcctagtgttcgtctccctgctaaggtcatccctctatggttacctgtaagacaagtagaatcatgagtaatctaacattactcagtgagctgggtctatgcacaaataaatctctaaggttgaatcaactcattaagtaaacctaaccatcagagatcacggaacatgcagcaaacgtattatcatatacttataataataccagaagatgcagccgaactagacacatgaatgaaccttgggcccaacatactgccatccttaccaaaaacgtgcaccacaacatcagcacaaactcccgcatacatgtatacatgttctccacacgtatgctaccacacacacgtacgtgcacacccacaccacacgtacgtacacaactgtgaacacccgagctatagccacaaaggcttataaacggaacatcactctaatgcatcgtcatgcattacccggcatacgctccttgtcttgtgccatcatataagtgaccactcaggttcaagacttactgacacaatcacaacacaaaaaggaaggcatcaacttactctaagcatgatggtatcgagtaaacccctgaataccacttagacacaataacctcacgcaatactaaatataagtagtttaccacaccccaaacaagtatagacaatcaagtaccaagtcacgtatgtatatatacataatatagctaagacttattcacaacctcatagcatatctcacataagtttaacaatctaacaaggcaagt

SEQ ID NO: 4343 - DNA, 596 bp, Arabidopsis thaliana
gactctaccaagatcctgacgagaacgaggaagaaatcgttatctacctccttaagatccttcacaccaacaaccacctccttcttcatcttagagagctttggatcatcgtccggcataatctccgtctcgaaccactcttccttgaacagcctgatgcacatatcactcatttgaaacgcctcgaaatggacatcggcgccaccatcctcattcacctcaagcttcaccaccgccgtgacccactccttcagctcgctctcggcgtgaagctccgccgcctgtagcacctcggcgttggacagagtgtattcagtcttgtcctgcaccacggtctggttaaaaatgaaaccgaccctcctcatccccaagcccatggcgattgcgtccacgcgcttctcttcatcagcatctctcatcagaataagattagcctccgtgccttcatggggcggctcgtaaatgaaatcaacttccacctgtccttcctcggtgacggtgccagacataaagcctgcgcgcttgacggcaaaagctagagactcattgacgtagtgctggaaagcgttggcggctatcgcgatcgaaggagacgg

SEQ ID NO: 4344 - DNA, 12018 bp, Arabidopsis thaliana
ctgtctgtctgcctgtctgtctgcctgcctgtctgtctgtctgtctgtctgtctgtctgtctgtctgtctgtctgtctgcctgtctgcctgtctgcctgcctgcctgtctgcctgtctgtctctctgtctgtctgtctgtctgtctgtctgtctgcctgcctgcctgtctgcctgccttcccttcttcctgtctgtctctctctctgtctgtctgtctgtctgtctgtctgtctgtctgtctgtcttccttcctgtctgtcttccttcctgtctgtctgtcttcctttcttccttcctttcttccttttttcctttcttccttccttcctttctttctctctctctctctcttccttccttcctttctttctttctttctttctttctttcttccttccttccttccttccttccttccttccttcctttctttcttcctttctctctctctctctctctctctctctctctctctctctctttctctttctttctttcttcactccagattttatttccccctcctggtccaccctctgactgttccatacctcctccctacctcctgtctccatgaggacgtccccatcccccaccccaccccccacccaaccagactctaaactccctggggtttccagtctcttgagggttaggtgcatcttctttggcagtccttgtctgtatatgtgttaggggcctcatatcagctggtgtatgctgcctggttgttgattcagtgtttgagagatcttgggggtccaggttaatagagactgctggtcctcctacaggatcaccctcctcagtttcttctagcccttccctaattcaaccacaggggtcagcagcttctgttcattggttgggtgcaaatatctgcgtctgactctttcagctgcttgttgggtcttccggagtgcagtcatgataggtccctttttgagaactcccgatagccccagtaatagaatggctaagatcaaaatgtcaggtgacaacaaatgttggagaggatatggagaaagaggaatactcctccattgctggtgggattacaaactggcaaaaccactctggaaatcaatctgtagtttcctcagaaagttggaaatagatctacctgaagacccagcaatactactcttgggaatatacccaaaagatgccccaccatgccacaggggcatgtgctccactgtgttcatagtggccttgtttgtgagagccagaagctggaaacaacccagatggtcccacaacagaagattggatacagaaaatgtggttcatttacacaatggaatgctactcagctattaagaatgaagacatcctgactttttcaggcaaatggatggaactagaaaatatcatcctgagtgaggtaactcagacccaaaaggatatgcatggtatgtactcactaataagtggatattagacagaaagaggaagaggaggaggaggaagaagagaaggaggaggaggagaagaagaggaagaagaagaagatgaagaagaagaaggaggaggaggaggaggaggacagaattcccaagatacagtccaaagaactaaaaaagctgaaggatccaagtgaggactcctcagtcccacttggaaggaagaagaaagcaatcacaagtgggaaggaagggagggagggacatgggagggaggggacctaatctggtattggatgagggaaaaggattgaagccccgagggccagcgagagagtggaaacaggcaacctcgagaggtaggaggttaggggtaccctccagaatgcaccagagacctgggaggtgagagagtactatctctgggctgagttctaactttttttttttaaaagcaggctgaaaaagccatgataagcaagctaataagcaccacccactccatggcctctgcatcagttcctgcctctaggttcttgtcctgtttgagttctgccctgaattcctccaacaatgagcagtcatgtagaagtataagtcacataaacactttccttctccatttgcttttgatcatgatatttcattacaacaatagtaatcctgattaagacatctgtgcttgccttggtttgtatgccattggctttatatccaagaaatcatggccaaatccaattttatgaaacctttctgtagattttatcataggagtgttattgtttggggtaggaggttcaggcttttaatttttttttttgagttaatttttgcagattgtttgtcaagggataattattctgttttcccagaagcatactttgaagagattgtcatttttcctagtcagtgagtggtcttggaatttctttcaaagatcctttggccatagatgcaacagcttatttataagttttctactttatccttctggtctatatgtctgccttgtgtcagcttgttggagttggattagtgtacacgtatctgttttcatatctacaaagcattccattgagatttccatagactttgttgaatctttagataatcttagagactgaagaattattccaatatgttcaagtgtatgaaactaccagaaaggggttttgacagaaagtatgtggatggaccatgggaaactggggaattgcagcttttctattagcactaaccattgaggcagatactggaaggagcgcaaatgctataggagttggtgtgatgagtacaaatgattcacaaactaagaaactagatgattcacaaactaagaaaagaaaaaataattattaaggtcaacaatgacaaaacaaagaaacatggacatacacttagctgtgataaatactataacaatatttagttaatttaaaagtatagttatggggctatacttttatgcaagtatagcttggtaaaaacactaagcatgaggaccagagcttggattccagcacctataaatagatatattttaaaagccaagtacatgttactataacctcaacatggggttggggaaaatgagagactcattgaggtttgctagtcaccagtcagcctagattcagatttagtaagagaaaggggagtaagaaagaataaggaagagcatggtagagcaggacacctgataccttcacttggtcccacgagcacattcacattcacagacacacacatgcacacatacacacataaacacacagacagacacacagacatacacttggtagagaaaattaattgattaacttaaatacatgtaatttatagttgattgtagtaacaaacacttgtaattctagtactaaggaggatgaggcaggtggatgacaaattcaagcccaatctggccttcaagacctgactcagataaatatttatattttgaagtaatagagaaggacagtgctagaagagctagaatattcatttactcataacatgatctcagaaggctgaactttcacctttctaagtagtccacccctggataataaatgaatagtctcattcataaggaaggaaccccctgacctaatagattttcaaagctctcacttttcaacactggtgcactggcagttaaatttaaatataaaatttagaagagacattcaaatcaaaataatgccttattaataagtaagtattaagcatgcactatatttctaaattttgtattccacaaattcttacacgcgttctcgcgaccggccaggaaagacgcaacaaaccggaatcttctgcggcaaagctttattgcttacatcttcaggagccagagagccagagagcaagagagcaagagagcaagagagcaagagagcaagagagcaagagagcaagagcaagagctctattgcttacatctttaggagccagagcgcaaaagagcaagagcgcaagagtgcaagagtgcaagagagcaagagccagagcaagagagcaagagctctattgcttacatcttcaggagccagagagcaagagagcaagagagcaagagcaagcgctctattgcttacatctttaggagccagagcgcaagagcgcaagagagcaagagagagaatggcgaaaccccgtccctttttaaggagaattatcctccgcctaggacgtgtcactccctgattggctgcagcccatcggcccagttgtcatcacgggaaaggcagaacacatggcgggaaaactgcccctgcacgtgtgcagattatgtttactacttagaacacagctgtcagcgccatcttgtaatggcaaatgtgagggcggctcctcacaacaaataagctatttagataaataaaaccatatgcgttgcagaaatagcagcactgacttggaatcatagtggctggctgacatataaatgcagaaaggctaagaagtaatagtttctggaaacacagctgggaggatgggaaagagaatgggaatattgtgttgctctaagtgtacatatggctaccaggtagtttaatttgaatgtatttggggcagtttcctggtggtgcttgtagagctgtttatctttatagaaatgcatactcttcgactgaatgaaattaccacgtgattgctgtaaatcatcttattttttataattcttgtcagcactccattgatgtgactctagttcatggtaaggcagagtaaagtcgttgggagggtctggggaagcagtttttcaccccattgtgatctgaaaggaaaaggaaggggacagggggcctgtggctcctttgtagatttttagtctttttctaaatgatttatagaaaagacagatatttttgatggattctaagctttagcaatgcttgatagtgaacaggagaacatgcctatcttagctatattttatagttgacaatcaaatcatttaaaataaccgcaactgtacatgtcccaaaaaataaagaccacggccacctagtcctgctaaaattgtggctaatggctggggacatgaaaaatgatactggaagaaaataattttgtggcaagaaacatgtgaattttttttataagtgcacagtatttaaataaaatagacttgcgtattcttatgtgcccttaaaaagtatactgaggacataaattacaaggcaaatagtatataaatagatgttttactgtattatttagggttattgatcaaaaaagtacatatatgcacactgcacacactttttgttctccaaagatttgtcatccacagttggttgagtctatggatacagaaactgtagttggagggtgtgcagatatacacacaccaatggcttagcatatgctgaaaaacagggcttccttcctttcacctcttcatcctcaagctcacatctgtccattcacttttctgagttactctcatacctctagaaataaaagtatagcagcatgtcttgctgaattcaaaagcgtttctattagcttccagatacaacacatgggcagtcacttttttaatactgtttgtcttagttagggttttactattgtaaacagacaccatgatcaaggcaactcttataaggacagcacttaattagggctggcttacagattcagaggttcagtgttttattatcaaagcaggagcatggaaccatccaggcaggcatagaggaagcagacctgagagttctacattttcttttttctttttattaggtattttctcttatttacatttcaaatgctatcacgaaagttccctagaccctccccgccctgccctgctcccctacccactaactcccacttcttggccctggcattcccctgtactggggcatataaagtttgtaagacctaggggcctctcttctcagtgatggcagactaggccatcttctgctacatatgcagctagagacacaagctccgggggtactggttagttcatattgctgttccatctatagggttgaagaccccttcagctccttgggtactttctctagctcttccactgggagtcctgtgttccatcctatagatgactgtgtgtatccacttctgtatttgccaggcaatggcatagcctcatatgagacagctataacagggtcctttcagcaaaatcttgctggcatgtgcaatagtgtctgggtttggtggctgattatgggatggatccacaggtggagtagtctctggatggtccatccttttgtcttagctctaaattttgtctctgtaacttcttccatgggtattttgttccttattctaaggaggaatgaagtaaccacacgttggatacttcttgtgttttgcaaattgtatcttgggtattctaagtttctgggcaaaaatccacttatcagtgagtgaatatcaagtgaattcttatgttattgggttacctctctcaggatggtatcctccagataccatttgcccaagaatttcataaattcattgtttttaatagctgagtagtactccattgtgtaaatataccacattttctgtatccattcctctgttgaaggacatctgggttttttccagcttctggatattataaataaggatgctatgaacatagtggagcataggtacatgtccaggagacgtattgttggattttccagtagtactatgtccaatattctgaggaacctccagactgactaccagagtggttgtacaagcttgcaatcccactagctagcaatggaggagtgttcctctttctccacatcctcgccagcatctgctgtcacctgagtttttgatttagccattctgaggggtgtgaggtagaatctcagggttgctttgatttgcatttccctgatgattaaggatgttgaacatttttttttcaagtgattctcagcccttcggtaatcctcagttgaaaattctttgtttagctctgtaccccatttattaatggggttatttgaattgctggagtctggcttcttgagctctttgtatatattggatattagtcccctatcagatttaggattggtaaaaattctttcccaatctgatggtggcctttttgtcttattgatagtgtctattgccttacagaagctttgcaattttatgaggtcccatttgtccattcttgatcttacagcacaagccattgctgttctgttcaggaatttttcccctgtgaccatatcttcgaggcttttccccactttctcctctataaatttcagtgtctctggttttatgtggaggtctttgatccacttagacttgagctttgtacaaggagataagaatggatcaattcaaattcttctacatgctaactgccagttgagccagcaccatttgttgaaaatgctgtcttttttccactggatggttttagctcccttgtcaaagatcaagtgaccatagtgtgtgggttcatttctgggtcttcaattctattccattgatctacctgtctgtcactgtaccagtacatgagtttttatcacaattgctctgtagtacagcttgaggtcaggcatggtgattccaccaaaggttgtttattgttgagaatagtttttgctatcctaggttttttattactccagatgaatttgcaaatgccctttctaactcagggaagaattgagttggaattttgatggggattgcattgaatctttagattgctttcggcaggatagccattttgactatattaatcctgccaatccatgagcatggaagatctttccatcttctaagatcttcagtttctttcttcagagacttgaagttcttatcatacagatcgttcacttccttagttagagttaccccaaggtattttatattatttgtgacttgtgaagggtgttgtttccctaatttctttctcagcctgtttatcctttgtgtagagaaaggccatttatttgtttgagttaattttatatccagctactgtactgaagctgtttatcaggtttaggagttctctggtggaatttttagggtcacctatatatacactatcatatcatctgcaaatagtgatattttgatttcttcctttccaatttgtatccccttgatctttttttgttgtcaaattgccctggctaggactttaagtactatattgaataggtagggagaaagtgggcagccttgtctagtccctgattttagtgggattgcttcaagtttctctccatttagtttgatgttggctactggttgtggtttgctgtatattgcttatattatgtttaggtaccggccttgaattcctgatctttccaagacttttatcatgaagggatgttggattttgtcaaatgctttctcagcatctaacgagatgatcatgtggtttttgtctttgagtttgtttatatagtggattacattgatggatttccatatattaaaccatccccgcatctctgggatgaagcctacatggtcatgatggatgatcattttcatgtgttcttggattctgtttgcaaggattttattgagtatttttgcattgatattcataagggaaattggtctgaagtactctttctttgttggatctttgtgtggcttaggtatcagagtaattgtggcttcatagaatgaattgggtagagtaccttctgtttctattttatggaatatttagagaagagttggaattaggtcttctttgaaggtctgatagaactctgcactaaacccatctggtcctgggctttttttttttcggttgggagagtattgatgactgtttctatttctttaggggaaatgggactgtttagatcgttaatctgatcctgatttaactttggtacctggtatctgtctaggaagttgtccatttcatccaggttttccagttttgttgagtatagccttttgtagtaggatctgatgatgttttggatttcctcaggttctgttgttgttttttttttttttttttttggcttttttagtttttttcgagacagggtttctctgtgtagccttggcttgagtcctggaactcactctgtagaccaggctggcttcaacctcagaaatccgcctaactctgcctcccaagtgctggaattaaaggagtgagccgccaccaccaccaccactccccacacccccccccccactcaggttctattgctatgtctcctttttcatttttgattttgttaattagaatattgtctctgtgccctctagttagtctggctaagggtttagctatcttgttgattttctcaaagaactagttcctggtttggttgattctttgaatagttctttttgtttccacttggttgatttcagctctgagtttgattattttctgttgtctactcctattcggtgaatttgcttccttttgttctagagcttctagcctgacaaggctgctagtgtatgctccatctagtttctttttggaggcacttagggctatgagttttcctcttaggactgccttcattgtgcctcataagtttgtaagttgtggcttcattttcattaaacactaaaaagtttttaagttctttctttatttcatccttgaccaaggtatcattgagtagagtgttgttcagtttccacgtgaactttggctttctattatttatgctgttattgaagatcagccttagtccatgatctgataggatgcatgggataatttcaatatttttgtatttgttaggcctgttttgtgactgattatatggtcaattttggagaaagtgccatgaggtgctgagaagaatgtatatccttttgttttaggataaaatgctgtgtagatatctattaaatccattagtttcataacttctgttagtgtccatgtgtctctgtttagtttctgtttccaggatctatccattggtgagagtgaggtgttgaagtctcccactattattgtgtgaggtgcaatgtgtgctttgagttttactagtttctttaatgaacgtggctgcccttgcatttggagcatagatattcagaattgagagctcatcttggaagattttacctttgatgagtatgaagtgtccctccttgtctttttgatatctttaggttggaagtcaattttactcaatattagaatggctactctagcttgtttcttcagaccatttgcttggaaaattgttttccagcctttcactctgaggtagtgtctgtctttttccctgaggtaggtttcatgtaagcaggaaaatgttgggtcctgtttgtgtagccagtctgttagtctatgtctttatattggggcattgagtccattgatgttaagagaaattaaagaaaagtaattgctgcttcctgtcatttttcttgttaaatttgggattctgttcttgtggttgtcttcttttaggttgttgaaggattactttcttgggcataatttccgtccttgtgttggtgttttccctttattatcctttgaagggctggattcgtggaaagatattgtgtgaatttggttttatcaaggaatactttggtttctccctctatgataattgagaattttgctgggtatagtagcctgggctggcatttgtgttctcttagtgtctgtataacatctctccaggaacttgtggctttcatagtctctggtgagaagtctgatgtaattctaataggtctgactttatatgttacttgacctctttcccttgctgcttttaatattctatctttatttagtgcatttggtgttttgattattatgcgtcaggaggaatttcctttctggtccagtctatttggagttctgtaggcttcttgtatattcatgggcatctctttctttaggtatgggaagttttcttctataattttgttgaagatttttgctgtccctttaagttgaaaatcttcattctcatctatgcctattatccgtaggtttggtcttctcattgtgtcctggacttcctggatgttttgagttaagatctgtttgcattttgcattttctttgattgttgtgcccatgttccctatggaatattctgcacctgagattctctcttccatctcttgtattctgttgctgatgctcgcatctatggttcctgatttctttcctagggcatctatctctagagttgtctcactttgggctttctttattgtttctacttccctttttaggtcttggatggttttgttcaatcccttcactggtttggttgtgttttcctgtaattctttaagggaattttgtgtttcctctttaatgacttctacctgtttagcagtgttctcctgtatttctttaagtgagttattaatgaccttcttaaagtcctctaccagcatcatgagatatgattttaaatctgagtcttgcttttcgggtgtgttggggtatccaggactggctgaggtgggagtgctgggtactgatgatggtgagccatcttcgtttctgttagtaagattcttacgtttgcctttcgccatctagtaatctctggtgttagttgttatagttgtctccggctggagcttgttcctcctgtgattgtgttagcctgtcagcagtcctgggagtcaagctctctcctgagtctcagtggtcagagtactctgcagacgaggtccaccaaggtctggcgctcagatctgcctcctggatgaagatataagtctggaaacagggactgtcccagaagatgtgttgcctctgtagtctgcgcgctcacctgcacagactgatctccgagggaccagggacaccagatggctccctcacctgctcaggcagtcagagccctcccaggtggccccttctcctctggtggggacggtgcccagatgtctggatccctaaacggggtctgtcccagaagctgtgtcgtcccttctgtagtctgtactctcacgtgtgcagactggtctctgagggacccaggacacaagatcaaaacatgtgaatttttagccctttgatatttcttacctttttccccaatttctttgtctaacatcattctgagttttcataatttgtctttgcctcaa

SEQ ID NO: 4345 - DNA, 529 bp, Arabidopsis thaliana
tgctaaatctcaagaaaattgtgtcgaacaagttgtcgggttcaggaaggtctttgtttggtttagcccggcttgcagttgccgaatctcttcttcccaaaggaaccgtccagcttggcccacctgtctacacaaaaccaaacgaaattgaatcttgacaactcaaagaagtaaaagagagagcaagagaaagaaagcgacttacaagaacagaggagtctctagcagctagagttaaggcgtcacgacaagagacagtgttagggcattcattctctaatgctgccttgatctcgtcaacaacttcaaacccgcgagccgatctgctgttagggttagagttcttctcagtaactatactcccactggtgtctagaagcaacgatccatcacaaccctacacattttcatttaaatagataagattaatgatgattctcagcattagtaattagcttgttgagcaagttctaaaaatgactctctagtacctgaacgaaacaatcgtggaaatggagcctcatgagag

SEQ ID NO: 4346 - DNA, 558 bp, Arabidopsis thaliana
cattaattaattttatctgttcgaatgaaaatgtgtagggttgtgatggatcgttgcttctagacaccagtgggagtatagttactgagaagaactctaacccgaacagcagatcggctcgcgggtttgaagttgttgacgagatcaaggcagcattagagaacgaatgccctaacactgtttcttgtgctgatgccttaactctagccgctagagactcctctgttcttgtaagtcgctttctttctctgtctctctctattgcttctttaagttctcaacatctaatttggttcggtttgtgtgtagactggtggaccaagctggatggttcctttgggaagaagagattcgacaagtgcaagcttgagtggatcaaacaacaacattcctgcacccaacaacactttcaacacaattgtcacgagatttaacaaccaaggtctcgatctcaccgacgttgttgctctctccggtaagcttacttaacacacaaggaagaaatttacttgcttctaaagctaagttgaaccttaataacgggtttacataatttga

SEQ ID NO: 4347 - DNA, 656 bp, Arabidopsis thaliana
gatgtggtgatcttcgacaggttaaacctagctatccctgccgggaaaattgtggcacttgttggaggaagcggatcagggaagagcacggtcatatctttgatagagcggttctacgagcctatttctggagcagtgttgctagacgggaacaatatcagtgagctggatattaagtggttaagaggacagattggtttggttaaccaagaaccagctctgtttgcaacaacgattcgtgagaacattctgtatggcaaagacgacgcaactgctgaggagatcacccgtgccgcaaagctctcggaagccatttctttcatcaacaacctccctgaaggatttgagactcaggtctgtcaataggataccttcgaatacaaaaaacaactgtagaccctagattccactttcgccttagggtaaaagaaacatcaatgtcaaaccctaaaactctgttttttcacttataggttggcgagagagggattcaactatctggcggacagaaacaaaggattgctatatcaagagcaattgtgaagaatcgatcgatactcttactcgacgaagcaacaagtgctttagacgcagagtcggagaagagcgtgcaagaagcgctggatcgagtgatggttgggagacaacggtggtgg

SEQ ID NO: 4348 - DNA, 663 bp, Arabidopsis thaliana
tataggacctgagtttaatcccacaactattgttggagttctaaaccgacctgaggtacccttttcattactttgttaaaactctcatcattagtagtatacccatttcgcaaaatgttgcattttcttaatcattttgtgtgcaggttgtgaagaaagctggagtgatcattaaacctgtcaagtttgaggaagtaaatccgaatgacgaacaccctcgtagccatcagaaacaaaaacccaagaaaaaaggtggtaagtaaaaccaatagaggtcagagcaaagtaaaggaccaatgattttgcattctcaaacttatttagacacaaaactttgatcccaacggtaccatttttctttgtattttttgtcttatttataaaagaaacatttaaaaaggttttatttcatagctcttcaaatccttgttcatcaccatttcttccactaagaaaaattgaaaactttttgtctccgggctttggtatgggccacttaggactgcactaagtattgagcctataaggcctttgtgtaactctgtgaatattatccagctttaaaattgaacactcgacaaagggtaattcagtaattataaggttttcagaacacttggcgttttgtgacaatttacattttaagcaatgggagcaaactac

SEQ ID NO: 4349 - DNA, 530 bp, Arabidopsis thaliana
ttaactaacattcatatttctgataacaaaattaccccaaaatgcctgtgaaagaaagaacttttggtacattgtcacattacctgtatttttttttttaactccaaaagagatcaatcaaaacacaaaagtgactgtgcacaaactcaatgatctctaactatcgacagtagtaaagtttcacagaaaatataaatgaaaacgcgttcttcgattttttaaccaattcaactctacaatcttgagcttatccctcttttcaaggtagggatgtgtgatgttactaatatatagtaagagtatccttcaggccaagtttctagataagtttcttcttgtggaaatacctcttcagatacagtatctgtgaacccacaaccacaacgcaaaccccgagtgacattatactgaaccaagccactcttgagttggttgttcactcacttctcgcatctccgcttccctgcatccaaagttttcgttttatcactatgttcttgtttcccgaagttcaatagataccacttaat

SEQ ID NO: 4350 - DNA, 1052 bp, Arabidopsis thaliana
aaagctgttgctagagagacacgtatggctgcttccttgttgagacttcatttccacgactgtttcgttcaggtttagttaatttcttttacgtttcaacattttatgttgttttaagtttacttgctaaacaaggtaactgtgaaatgtagggttgtgatggctctttgcttctagacagcagtggaagggtagcgactgagaaaaactcaaaccctaacagcaaatcagctcgtgggtttgacgtagttgaccaaatcaaagctgaactggagaaacaatgccctggaactgtttcttgcgctgatgttcttaccctagccgctagagactcctctgttcttgtaagtttcctccacaatctctattttctcgaaccaaaactgaaacatcagctaactcggttggtttttggtttagaccggtggaccaagttgggttgttccattgggaagaagagattcaagaagtgcaagcttgagtcaatcgaacaacaacatccctgcaccaaacaacactttccagaccattctatctaagtttaaccgtcaaggacttgatatcactgaccttgtcgctctctccggtaagctttcgtcactctatcacagtttcttgcttcacacacatggaacacaattaaaaaaaatccattatacattacttgcttctcaagccaccacacttctcaaatgttatctcaggtagtcacacaatcggattctcgagatgcacgagtttcagacagaggttgtacaaccagtccggatacgacagtccagacatgacattggaacaatccttcgctgctaacttgcgccaacggtgtccaaaatccggtggggaccagattctctcggtgctagacatcatcagcgccgcgagcttcgacaacagctacttcaagaacttgatagagaacaaggggttgttgaactcggaccaagttctgttcagcagtaacgagaaatcgagagagcttgtgaagaagtatgcagaagatcaaggagagttttttgagcaatttgcggaatcgatgatcgtgcatcctc

SEQ ID NO: 4351 - DNA, 812 bp, Arabidopsis thaliana
ttttaattaaaatatttaagtgagatagataacccaagattaatggaacgacccgtcggatccaaaagaaagaaacaagcgggttaaattgatatcgtcttcgtctaccgtttctcaaaatcaaaaccccagaaagcagaaacctctcttcttcgtcttctctcgtcaattcagctgcgacaatggatttccaggtcgtgattctagccggcggattctctagttatcttgttcccttagtcgccaaggtccgtctctctctttcactctcatcatcagcataacagtttcgacgaattgctaatttgttgttgttgttcaggaagttcctaaggcgttgcttcccgtagcgaatcgtccggtgttgtcttacgttctggatcttctcgagagtagtaatctcaaggatctgatcgtcgtacgccttttatcttttcaatacaattactgatttccttttgcgagtttctaggttgaatgttttcaatagagctcagattttttcgtttcgcattggtggaacaggttgttgaaggggaagatgctgctttgaaagttggtggatggatttcttctgcttgtgttgatcgtttacatgttgaggtatttactcatctatggcatctgaattctgtaaaactctatgcatgattgaaagaaactagtgtcatattcgttattaatgttctgctggatattttactttaggttgctgctgttgctgagaatgttggaactgctggggcactcagggcaattgcacaccacttaacgtgcaaagacatttttggttagctttcaataaagacgtc

SEQ ID NO: 4352 - DNA, 486 bp, Arabidopsis thaliana
ccttgggtaattctgtaattagctggaaagcaactctactgccaactgtgacgctgtcaaccacagaagcagagtatatggcttcaacagaagctgctaaagagggtatttggctgaaaggattggtcagtgatatccgtttgcatcaagatcaggctacaatgtattgtgacagtttgagtgcgatttctttagccaaagatcatgtccatcatgagcggaccaagcatattgatgtgagatatcattttctgagaaatgagaagaggtttcaagtgaagaaggtagggactgctgataaccctatagatatgttcactaagctggttccttagagcaagtttaaacattgtttagacttgctgaatgtctcaagctgttaatcgccctgaaggcaaacaggcccctaacggggcagcaagtccctggagggacatctggcctctgaataggcataaggctccttatgaagcatttggccccagt

SEQ ID NO: 4353 - DNA, 448 bp, Arabidopsis thaliana
gaggaccaaacatattgatgtgagatatcattttctgagaaatgagaagaggattcaagtgaagaaggtagggactgttgataaccctgcagatatgttcactaagccggttcctcatagcaagtttaaacattgtttagacttgctaaatatctcaagttgttaatcgccctgaagggcgaacaggcccctaacggggcaaacaggtccctgtagggacatctggcctctgaagaggcataaggctcctgatggagcatctggccccagtggggcgttctggctttccatgaagcattctggccctgacgggcgtcttggcttctgatgaagcattctggtcctgacatacgttctggcttctggtgaagcatctggtctctgatgaggcatcaggctccttgtggagcagtctagctcgacagacgatctggcttctgaagaaaca

SEQ ID NO: 4354 - DNA, 1504 bp, Arabidopsis thaliana
aatttttttttttttatcaaaaaatatagaataactattcttattactatccctaacaaaaaaggtgtcatccgatatgaaattgcgaatgtccttggagctaactaaaagatcaacattattggaataactagaagaataactagaacgctcatcccaaccataaaagtttttatccatatcatatataaaacggtcttgacttatagtagtcttttcaccaggagcaaaactatccattgctttacttagctcacctctgtattccaattctcccttagaaaacataaaattgaaccacgatttttccatagagcttctggcctctatttaaatgaaaatacaataacaatagatgaatagtcattcaatgaaaaaattgaaaaatgcaaaatttttttgaatagttcattttctattcagagtaagcaaaacatatcgatgcaattgctaagattattaagtaaagtaattgaaatgaatcaattttaattctaaatgaaaagaaggattttcttatattgtgtaaaattctcataaaaaaaaaagaaatatttgttcttcgcttatgaatataagaatattaagaacttttttagtaaaatctcgtatactaatataaaaaaaaactttttttattccaatacggaatgaaaagaaaaggacaacatgcaggatggggtagaagaagcggggatacttggttcaagccctgacacgaaagaatataacactcctaagaattaagaatccatgtttcgtataggatttcttgtggacacaacactacaataacaaaattgtagttgtgtttaatcttcttttttttattgaagagttttttttctatctaaatttaagtatgtatctatcaaaaaaaatagtatatacaacagataacctcggctcaatcttttttagtaaaaaaaagattgagccgagtgcaattaaactaataaaacaaacgtgaattactaaatctaattcatctactcttggccatctaatttatcgatggttgggaagttaaatgtgatctctttccatacttcacaagcagcagctagttcaggactccatttgcaagcttcacggataatttcattaccctcgactgcaagatcacgtccctcattacgagcttgtacacatgcttccagagctactcggttggctacggcacccggtgcatttccccaagggtggcctaaagttcctccaccgaattgtagtacagaatcatctccaaagatctcggtcaaagcaggcatatgccaaacgtgaataccccctgaagccacaggcagaacaccaggtagtgagacccaatcttgagtgaaaaagataccgcggcttcgatctttttcaacataatcatcgcgcagtaaatcaacaaagcccaaagttgactccctgtctccttcaagtttacctactactgtacccgcgtgaatatgatctccaccagatagacgtaaagctttagctagtacacggaagtgca

SEQ ID NO: 4355 - DNA, 1020 bp, Arabidopsis thaliana
gtggatactaacgtgtcatctagtcatcacaagcggttagtcgccaaggagggtgatctgactgctgaagggacatcaggcctctgagaggcatcaagctccaggtggagcagcaggtccctcaagggatgtcaggcctctgagaggcatcaggctcctgacggagcagcaggtccctaaagggacgtcaggcatcaggcttttgccggagcagcaggtccctcgagggacgtcaagcctcttagaggcatcaggctcctgacaaagcagcaggtcccttgagcgacaacaggcctctgagaggtattaaacccctgatggggtagcaggtctcaagcgagacatcagtcttttttaaaagaggcataagacccctgatggtggagacatttccgtacaagacatcaggtctctaaaagtgaatctggctctttattgagcatctttcccattggagcattctagcctgtgaacaggcatgtggctcaggatggagaaatctggcttgtgacaaagaatctggtctccaaaagacattatggctgtttgagaagcagcagactcctgactggagcaatctggcctttgagaggcattctggttgctgaagcaaaaggctcatgaatggagcaagaagcagcacgctcttcatatatggagctgaaaagcaactctgcaggcaactgtgccgctgtcaacaacagaagcagagtacatggctttgacagacgttcctaaagagggtatttggctgaaaggattggtcagtgatacgggtttgcattaagattaggctacagtgtactgtgacagtttgagtgcgatttgtttagccaaggatcaggtccatcatgagaggaccaagcatattgatgtgagatatcattttctgagaaatgagaagaggattcaagtgaagaaggtagtgactgctgataaccctacagatatgttcactaagccggtttcctcagaacaagtttaaacattgtttagacttgctgaatatctcaagctgtt

SEQ ID NO: 4356 - DNA, 582 bp, Arabidopsis thaliana
gtaaaatgacatgcaaattttcttgtccaggtgggatcttggggacatagaaaagctaccaagttatgtaaaaatcgtctttcgaggtgtatttgaaactttagaagagattgaacaagaaatgaggccacagggaaggtcacgcattgtgcaagtagcggtagatgaggtgagtcctccacactggggtagcaataactatagtcaagtttgtatctttacgaaaaactgagtgctttgcatatagatcaagaagttggggaaagcatacttggctatctcgaaatgggcacgcgcaagtcacgtgccaacctttgaggagtacatggagtttggtatgcagacgtcaatggatcattttgcagcctatagctttatcgcgatggaagattgtgatgagaatcaaacgtgcgagtggtacaaatccagacctaaaatgatggaagctctgaatggtgtgtttcgtattaagaacgacataaacacctttgaggtaattgatacatacaaaagcatgacaataagcgatcacatcatcacccggttttgtctacacattaacgtactaagtgtatggatgag

SEQ ID NO: 4357 - DNA, 1140 bp, Arabidopsis thaliana
tcgaaaaagtagcgtggtataaaagaaaataacatacaatttaaaaagaaaacataacgacggaaattctaagaaagaatcaaaatcgaataaaataaaatgacaaatcttctgcaaattaagggaaagatgatctatcaatataaataacgtttggcagcctagatttatcgaaaaaaagatcgggtggttgtgatggtggaagatgtagtggttgtggtggtggaagaaagaaagatgagatgattctaagtgttctgtatcattttggaaaatagcatgtaatatatataaaatacaaaaatggataaaaatgtaattgcaattgaagaaagagagtgtactctgacaccatggttattttgttgattcttttataatccatagtcatctagtgcatattctctttttttttttttttacattcaaactccatatattactttacagatgtttgacaaaaaaaaaatcacggataagaactcttttctagagagagccaatcgggtaccgtcgaacttacatgggaaaacagaacccgcgaactcttgcacattttgctagatgatcggcggaagtattaccattacgaggaatatacttaatactaaacatagagaataaatctctataatacacaaaatcctttatctttgtagaaaaagtaggtcactcatcggtgttagaagtcatctctaaaagaaccgagcaatccgtcaaaataaggatactagtcatcgtgatcactagagagcacttcatgtacacaaaagagtctccaattcagcatgcaaaggggaaagactcctacgtgatccctttagtcttatatgcaacaatcttcctccacatgaaataagccaaccatgtccactcctcgcctccatccaagccaagacccgtcaataaagcatatcagtctatccgctggaattggtgtcacttgcactatagggttcctcttgaattgcaatgtccaaggtttcttgaggtgatcactcaaattatcaaaaaccttttgatttcgcgctttccaaatataccacataatcatgaaaatattcttaggctctcctcatctgcaccacctctttacccgccaatacaaataatctagattattataaagtgaaggtgagg

SEQ ID NO: 4358 - DNA, 887 bp, Arabidopsis thaliana
tgccattaaggaacttccttcaacaatcggagacctccaaaagcttatctcgctgaaactgaaagactgcaagaatctgttgagtctccctgactctataggaaacctaaaagctattcaagaaataatactctctggttgttcaagccttgagagtttcccagaagttaaccaaaacttgaaacacttaaagactttactactagacggaacagccataaagaagattcctgacattttgcatcacctatctcctgatcaaggcctgacatcttcccaatcaaactgccatttgtgtgaatggccgcgtggaatctacggattatcgtcagtgcgacgtttatctctgagcagtaatgagttcagaatcttgccgaggagtattggttatctctaccatctaaactggcttgacttgaagcactgcaagaatcttgtctctgttccaatgcttccaccaaatcttcaatggttagacgcacacggctgcatttcattggaaacgatttccatcctttcagatcctcttctggcggaaacagagcatttgcactccacatttatcttcactaactgtaccaaactttataaagttgaggagaatagcatcgaatcctaccctcggaagaaaatccagttgatgtcaaacgcactagctcgctatgaaaaggtattccccttcattcacaacatctttccttgcattttctcttgttgacaccaacctttttcagggattagctctcgatgttctgatcggaatctgctttcccggatggcaagtgcccgggtggttcaatcatcgaacggttggattagagttgaagcaaaacctgccgcgacattggaacgcaggcgggcttgccggtatagctctttgtgctgtg

SEQ ID NO: 4359 - DNA, 1104 bp, Arabidopsis thaliana
caaaactctttgagagggtagctccttctacgtattgtgtacgtgcttcctatagaaaagatgcaggtgatgctgagactatatttgctgaagcgagagagagaatacgtgcattcaagagcggcatcactgatgtagaagatgttgatgacgctgagagagatgaagactctgaaagcgatgtcggagaagacccagaggttgatgtgaaccttaaaaaggaagatcccaatcctctgaaggtagaaaacttaattggagtcgaaccattgttggaaaatgggaaactggataccgtgcccatgaaaactgaactgggactgcctcttactccctctctccccgaggaaatgaaagatgagaaaagagatgacactttagcggaccaatctctagaggatgcggtagcaaacggtgaagatagtgcttgttttgacgagagcaaacttggggaacagtgggttcaaggacttgtagaaggagattactcgaatcttagcagcgaggaacgtttaaacgcacttgttgctctgattggtattgccaccgaaggaaacacaatccgaatcgcccttgaggtatatatgattcttatcctaaaaataatcttgacttacattctctttagttttttaccataatcagattctgtgtgttgtgtgcaggaacggttggaggtagcaagtgcattaaagaaacagatgtggggtgaagtgcaactcgacaaacgctggaaagaagagtctttgattcgagcaaattacctctcatacccaacagcaaagccggggcttaatatcgcaacccctgcatctggaaatcaagaaagttcatcagcggatgtgactccaatctcctcacaggacccggtgagtcttccacagatcgatgtgaataacgtgattgctggaccaagcttgcaattgcaagaaaatgtacctggagtggagaatttgcagtatcagcagcaacaggggtacacagcggaccgggaaaggctgcgtgcacagttaaaagcgtatgttgggtataagctgaagagctatatgtatataggtcgcttccgctaggtcaagatcgaagacgcaatcgctattggcggtt

SEQ ID NO: 4360 - DNA, 930 bp, Arabidopsis thaliana
tcaaaaagtcatatttgtaacatataaaaccaaatctaaactagatcctagcactaacagaacgaagaaaaggcgggcttaagttgttcataccctccttgtttataacttatgagctccgctgcttgaatcactcacacgaacagagcatgattccactgaagctgtaagctgctatacaagcattaattagttctctagaaaaagagatctaatccaagttctattagaatcgaaagcaaattcagtgttaccttttcccaagacttatggacagtcttcaaactggagttgtatggtaattgtttttccttgatctgagagagtttatctcaagaatagaacactcaacctgctgagcctctagcttttgtgatagcttaagattttggaactgaagaactgcagtatcaagctgtatcaaacgaaaacaaactccttaagagagagaatcccaattccaaaatagaccaaattcgagacaaaagacattcagtatatgaatctctaatagctggaaagctatgattgattggataagtaagagaatagatgtaaagggcatgcacaagggggagatgaagaagaaagaaaccttgtcctcggaggagggccaaaagaaaggctgtttctttacggcggctgcagcttcagaaggtgatatggagctaaagtgacgccttttacggtcaggctcgcctgtgctcgccattgaaaaaccctagaatcgccaattaacaggattaagccttgtctcacatcaccatcagattgagtttgaggaagctcgaatacaaatcccccaaacccaatgagaaaaccctaaacgatccaaagctacgtgattgctttaaccgaggtaattccaattgctccgcagctctccttcggaataaaaaaaaacaaacaaaaagaaaccctaatctcaca

SEQ ID NO: 4361 - DNA, 683 bp, Arabidopsis thaliana
gttctttcttatttggcaccatcaagattctatttacaatattttttttcaagtggcaaaacaaaaacaaattacaatttttataaattaattcgagttaaacgaaaattacttccaggttccattaatgtatctaaaaatatttaagtaaaattttaattacaataacatccatttattttatataaaaattttaaaaaacgttttaatagaatcctttaataatttcccaaaaacagatcctgtccagctcttctgcaccaaagtacatgcttagactcaaagtacgattttagggagaaaagaatttgaatactggaatagatacatgtttgttccaaataatttgagtaactttaaagcatatgttatacacatacacattttctagaatattagcctctcatttctctccttatataagccaaatagtccccgcttcttctcattcatcaaatcctcaaacaacttcaagaacaaagagtgcttttcgaggcccaaaacacattaccataaaatggcattctcgaagggactcatttttgcgatgatatttgcggttttagcgatagttaagccctcagaagcttgctcttgatgctcattactatgatcaatcgtgccctgctgcctgaaaaatcatacttgaaactgttaggaatgctactttgtatgatccaaag

SEQ ID NO: 4362 - DNA, 1539 bp, Arabidopsis thaliana
agagaagaactctcgctgtcttcgtcgaggcactatcctggtccaaatttcagccatggcaggacaatccggcagaatgagtaaagtagtctccactccactcttacacacctcacaaatattagaaacacaaatgtgtctcctatacctctcctcgttggtcatgagcgcttgattactcactaaccacaagaaacctctcactctttctggtacaagcaccttccaaatacgattgaagaagtttgacatgttcaaccttggtaaatcattcaagcttaacattgcatatgcagatccgacagtaaactgcccatcttgtgtttctcccaaggccaatctgtcacgtgcacccgttacaagatccaacaccacagccgagagttcaaggattcttttcagcgtgacataagggcttatcttagaaaaatcccagcctcgcccagcgctccacaagtccttagctaacatcgtttcaaaacctgcgggcatctcaccattactttcatcccatagtaacccgccatgtaaccacttatcctcccaaaaacaaatctcggtcccatcacccggaacccaactcaagctatgcagtataacctcgatgaagcccacaacaatactcatccaagttggagaccaagtattctttttaattaaccaacgaccatcactaacctcaccaaccttgtacttgcacctcaacactcgtgcccaaagagcagactgatcctgtaacaatctccaaccgacttttgcaataagagatttattcatgtgcttcgctgatcggatacccaaaccaccttcactcttaggagaacaaaccttcttccaagctactagatgttgcttctttttctcttgcgtactgccccaaaggaaagatctagatatcttatccaactgcgagattgtcgattgaggtaacaaaatcgaactcattgcgtgaactggtaaggaggataaaactgctttggtgagcgtcacgcgccctgtaaaactcagcgttttctctttccagcccgatagcttagttgaggctctttccaaaatctctccaaatgtggttttattgatccgtctatgaagaaccggcatacccaagtacttccccaaatcctttgtagacttaatcccactttcatcactgattgaattgcctagaacacgagacacattattcaagaaaaaaatctttgacttctcgagacttactttctgacccgaagcggtacaaaaggtctccaacacccctctgattgcccgcacttgggcgaccgatgcttctgaaaaaagtatgagatcatccgcaaaacagatatgggacagcttcggtccaccacgagacaaattaaacggcttccacctcttcttctcaatggattccttaatcagatgacaaagtcgttccatacacaagacagagatagggagataagggatccccttgtctcagtccccttaacggtctgaaagagttagtcttctccccattccataaaagactcattgatggcccagacacacacttcatta

SEQ ID NO: 4363 - DNA, 597 bp, Arabidopsis thaliana
ccaatttgttgttgcatccatcatcattaacgatttcacatcaaaagtcctaaattcttaaagtcttaaagcaattgcattagggccataaacacttttccttaaaatctttaagctattttatacaaataattccgtcgttttttgtttcgattaaaaaaattctgtttacagtcaacgacggaaggaattaagactactactgcgacaatatcgaaatagtagtctcttccctaaccaatttacaattaagcaaagtattaaatgaaaaccaaaaacattacaacactactccaaggcttgtgatggccacaattgcttccacgtagaaatctcttcctccgtacccaatttctttactccgccgtagaaactgttttcttcatttcccgtctcacggtggtctttcctctttatcaccgttcttctccacggtgattccggtctgaattgtctgaactccatcaccacattctctgccattgccaataatatcccattaaacattttattttccttaattaacgaatcgactgtttctgaccaaaaaataaaaacactaattaaattgttaccgtcagagtcgcaacgacaatt

SEQ ID NO: 4364 - DNA, 613 bp, Arabidopsis thaliana columbia
cggagcagtttcagtaccgtggaaaccgatgccaaggagaacagcaaagtctactttgcaatgagaggtctggctaacaacaacagctaaccttttgaaagcttggtttcttcctacgtaactaatccggttttgtgatattcttgcagtgatagaactatttgaggaaactgaaggacgtaaacctggggaatgttcgctgtctgatctcccaagagttttgaaactcaaaaaggaactatgtgaaggaaatgtaagtttctttaacctttatttgtaagctctacaataataacgacaaataacaaactttgtcactcactttgaatccgaatgttgcaacagtcggtcagcgagaatcatattccagatatcctcttggagagactcgtatctaataacacagaattcccaccggcttgtgccatcattggagggattctaggacaggtacagttctctatctcgcttctctaggactttgttagttatctagattaagcacttagcagagtaatgtgactcaaaaaagttgtatttgtacgtacaggaggtgataaaagttatatcaggcaaaggagagctgttgaagaactcttctactttgatgcgg

SEQ ID NO: 4365 - DNA, 274 bp, Arabidopsis thaliana columbia
taaaaaaaaaaaaaaaataaaaaaaaaacagcaaacacaaaaatataaaactaaaaaaaatcaaaaaaaaaaaatgtcctgatgagcatacacctatacaatgaccggaactacaattacaaccatcaggaacgcaacaatggttaaaaacactatgactcaaatcatgtgtatggtcctatgtgccattgcaacgatagtcgtgttcgcactgctcgtgaccaccattatccacgcctttatcctccgagatctttttcccaatgacctcgcc

SEQ ID NO: 4366 - DNA, 585 bp, Arabidopsis thaliana columbia
ttcttaaaaactttggtattgttttctacaataaaactacctgtacttggctgtaggggtgacatcaagttcagatactggtggtgctgtcacacttgaaggcaaagtcgaaggcaccggttgaaccaaatctttctcttcttctggaaaaaggatatttacaagttccatagatcaaaaccttaggtgaattacataacaaaatattttgcaccatggcaaacaatacaatcactctaggcatgtaaacataatcaaccagaaaacaagaaaaaaacacaaaaaacatacctgtgattagaaaattgcattcatctatcaacttcttaaatttggattcactcggcgtgatagaggcacccttttcaagagctgttttagcagtccgatactcttcaagcttcatacaggcagttctacaaatacaaaaaccaaaccatgaacaatggaagtaatagcttgacagatatatccacatttgcagaccatataaactggtagtaaacaatctaaggactaaggaatcagagaaaattaacgtctactacaacttatatacgacttaaaaatgttcataggaggaaa

SEQ ID NO: 4367 - DNA, 533 bp, Arabidopsis thaliana
taaaaagttaaataaatatgataaaaaagtcataattttaaactttaatcaaatcttctaagttctaattatgtatattgttaaatatgaaatatccggtataagaattggattaaatataacttatccaacaaaatttttatgaacaaaattgtttaacgggatagatatcatttttatcaaaaaaacacttttacttacctgccaaatagtaagtacaaaaatacttcatttaaagcccaatattttgcaataacacacttttgcactagacccccatatgaagcccatattaaagtattctagaccataagggcccattaggtttttactttctgctatataaaagctcaatctagggtttatgtctctgatagattttacaccaccgaagccgaaaaaatgccggcgcggaagaggactcccaaggttaaccgtaaccctgacctaatcaggggagttggaaaatattcgaggtctcagatgtaccacaagagaggtttgtgggctatcaaggccaagaacggtggcgt

SEQ ID NO: 4368 - DNA, 1061 bp, Arabidopsis thaliana
gatggtaaaaatcagtgaatgagcttcgcttcaaatgatttataggagacaagttcatgagaacagatagagaataactcaccagtcacaagaagcaaaccagaggcaagctgcttaaggaagacaactctctttcccttgaacctaccagcaaggataatcaacactgtacctggagtaatgctagctctgcaatacagatataagaagatcggatcatgttggaaacatatataagatctattgaagacgttaccgagcatagacattaaatttggtatacaaatgataatcaaattcgcttttttcccggatactatcaacctgagacaagcttaatcatactaataacagtaatgtataagaacactagatgtattcacagacattatgaaccttttgaaattcaagtttaacatccactaacaatcttcacaaaccaatgcatttcaactattcttcaaatatcctagagacaaatgatttcacaatgcaaaatttggacacttttccagcagatattcaaatcttatacaaacccacttagcaaacgagccaaagaaatcaaccaaacacatggaagataattgcatcgataccagtgtcagactaagtacctgagcttggttggttttgccgtgcgcctgttggggagaggtttcttaacatcttcagctggatagaacttcggtggcttctccaccggagcatcaaccttagatttagcgtcgtgacgtgggaaaacgcctccatttttggccttgatagcccacaaacctctcttatggtacatctgggatctcgagtatttaccaacacccctgatcagatcagggtttctgttgaccttcggggtcctctgtttcgccggcatggttctctctgtcgtaatgaatcaaggaaaaattttccggctgagagtggatagaggagagagttgaggctgaggataggtgaatttgaagacactgaaaccctaattaaattttagggctttcttgggctcatgggctttacaattatatcggccttttaatgtggaccgtacatgcataatagga

SEQ ID NO: 4369 - DNA, 1417 bp, Arabidopsis thaliana
  unsure (1)..(1417): unsure at all n locations
tttcacctttgtgttttccttattatgccaaattagttacaaacatacaatcacatcaaaatttattttgactaatatggttagtccataatatacgtaacaaatcatataaatacgaaactttctctattaaaattatttaacttttgcctctcttttctcctcgtgaaggaaaattctttagtcattttttctctcctcgagaattacgcaaacacaacaaaaacccagacattgaaaagtaaaaaacaaaaacagagaaagtgggagatagaagatgacggcatcaggaggaggatcaacggcggcgacggggaggatgccgacgtggaaggaaagagagaacaacaagaagagagaaagaagaagaagagcaatagcagctaaaatcttcaccggacttagatctcaaggcaattataaacttcctaaacactgtgacaacaatgaagtcctcaaagctctttgtcttgaagctggttggatcgttcatgaagatggcaccacttatcgaaaggtttcaactttaacttcagattcatccaaattttgattctttttaaacaattttcagacattgaattgacttttttttccgtcagggttctcgaccaacagaaacaacagtgccgtgatcgtcaatccaacttagtccacaatcatcggcctttcaaagcccaattccttcgtatcaagctagcccttcatcgtcatcttacccaagtccgacccggtttgacccgaatcaatcctcgacttatctcattccctatctccaaaacctagcttcgtctggaaacctcgctcctctacgaatttccaatagtgcccctgttacaccgccgatttcttcacctagaagatcaaatccgagacttccgagatggcaaagcagtaatttcccagtctcagctccgtcaagcccaacacggcgtctccatcactacacatcgattccagaatgcgatgaatcggatgtttcgacggttgattcttgtcgatggggaaatttccaatcggttaacgtttctcagacatgtcctccgtcgccgacatttaacctggtcggaaaaagcgttagtccagtcggagtagatgtgtcggtgaagccgtgggaaggtgagaagattcacgatgttggtatcgatgacttggagctgacgctaggtcacaacaccaaaggacgcggctaggttaatatcgtggtttaactatttagtcgggtccggtacgagattggttccggttaaatcgtagctaatagattggtctttgtcttcatgactattttgtacagtcattatcatttatcaatgcttcatttcacaaaatctagtatttttttttttatatgtaatggtggataatganaaatgcaagtgtgtgaaagtgagagtaacactccccatgtgatgat

SEQ ID NO: 4370 - DNA, 540 bp, Arabidopsis thaliana columbia
  unsure (1)..(540): unsure at all n locations
gacatttcgtgcaaaaccatgcgagactcctggaatctgtggttcctgttgaggacacttaccatggcgtcacaagtatctttgtcaagcgagattccgagagaggtcatgactttaaccaaatcaaatgcccagttgatttctccatttgcacaacacttggagattagcatgttgaacgtatacctgtcaacttcaacacctcggcatatgaatgctttcaagattttaagaccaatctccaacatgttggattcacaaattccgagaacaagagaatggcatgtgagcttgtcaggtaaaatgccgttcagtatgatggatctatacagcagaaagcttgtggatacatctttcctctttgaatatccatgcaagagaatattgtaggtagtcagattaggacccccattttggtccccatttcgggaagtaggtcatttgtcttctctatttccccatccttgagtaacgtctatcattgcatttgttgtgcaatatcaggggtatggcaaggttaccatttgncccgaaaataaa

SEQ ID NO: 4371 - DNA, 725 bp, Arabidopsis thaliana
  unsure (1)..(725): unsure at all n locations
tatctctactttaataggtctataacgtttgataatctaaaacccaagatattttggaacatatttctattttaataccattttccactaatacttttcaataacagtagttgtttccataaataacgtctccactaattgaataaaatgaaatatttaacgaattattaattgcgataattagatacgaatcaaaaagattccaccggcttcgttggaaactttaagatatttccgattttaccccatataaagggaagatccaacggttattcttacatctctcaatacgcagccaaatacactctctctgaaacctctcctcttttagggtttaatatcaacgcctccaaaatttccgtgcttttgttttcgtagataacgaacaatggctgatgagattgtgccgccggcgactcaattagccgccgtatccttagaaaacgatggatctacggtgcaaagagctcaattctctaaccgggttttgattcgaacgattttggatcgacctgacggcggagctggactcgccggtcaaacggttcgaatcggtggttgggtaaaatccggaagagatcaagggaaaagaacgttttctttccttgcggttaacgatggatcttgtccagcgaatcttcaggttatggtggatcngtctctctatgatgtctctaacttggttgctacgggaacttgtgtgactgttgatggagttttgaagg

SEQ ID NO: 4372 - DNA, 869 bp, Arabidopsis thaliana
tcaaggcctagtcccagctctttgagctgagccaagggaagattacatagacttccaaggcaaacgtagagcactgaaccagtttcttgagagtcaagccattgaagacattggtcttgaccaatagaagccttatctcctcttttagctttgtctaaccctaacctattgcacaaggaaacaggtccaacgcaccaaacttttccagcccttgctttcctatattctcttgcataatcaacctctaactcttcaaaagtgttcacaataacaccataagagtcattatcagcttcaataatcttggccgtactctctttcatatttccttcaacaggttgcaacacagagacctgaggtttcgtgaactcaactttgtcaggcaagccgggcaaatcaaaatactcgtcgtttgattctatcattttcaagatcccgctttctcgaaccacttgtatagacatgaggctgaaacaagaaaacccatggaagataagtttggggatcttgaatttcttggcaagtcttgaagtgaaaggaaggctcatgtctccaatgatgcagcttggccgcggctgaaccatctcttccatagctttctcaacttgctcctcaagtgagttggcagcatcaaagaacttcaccatatcgcccattgaagccaacatatctaaactctcgcacccttctggcaaacccgtttgttgagacagaaacttaacttcaacgatgttgatagtcgcaaacaaagaggaaaatgagagtgaagtcttgatcttggctacattttgagtagttgtgatgatgcagacagtcacgccttgcgcctgggacaagagcctagagatgtcgccaatgggatcatatgg

SEQ ID NO: 4373 - DNA, 751 bp, Arabidopsis thaliana
atgtccatcaggtaatatacaacctctactagtataacattttgtatcagtttccgtctattccaagatgacaaattacaggattgattgaaacaaattgtaggaaataccatatggtctggagcaccgtctagtggactggaaagagctgcgtgacgggtctcttagaattgaacagcatctcatcactcctaaacttagccaacgcaagattcttgtaggcaagggcggttgcaagatcgggtaagagcatacaagatcgttcataattcattcttttgactaatcaatgactcaaggatgatcttatgttgatgctaattttgcaggaggataggaattgaggccaatgaagaactcaggagaataatgaaccgcaaagttcatctcattctccaggttaagctcaagtgaaaccattctcccaagggttatgtttttgagtttgatggatttaggattggattgtacgcaattagaaatctgtctgtatatgttgttgacatgttgtcaaagattagacatttgacattagaaatataaacttactacatacagacagtaataagataaaagaaacagaattttgagaaaacaacaagcagtcttaacgtcagaagtggaaacacaagtagtctctttatcttaaagtctaaaaactaacagactccaggaaatggaagtgttaactgatcaagaagactaaccaccggtgtagtaagcactgggtcataagcaaaaccctgcaaga

SEQ ID NO: 4374 - DNA, 599 bp, Arabidopsis thaliana
gcaaacgtggtcgccccagcaaatgcgcttgtgaatctaaaccctaagtttttcacattcggaagaggagccttcttgaccgcagttctcggaatcgtgtttcagccatggagattgcttaaatcgagcgagagctttgtgtacacatggctcatagggtactcagcgcttcttggtccaatcggaggcataattcttgtcgattattacctgatcaagaagatgaaactgaacattggagatttgtactctttgagtccctccggcgaatattatttctctaaggggtataatgtcgcagcggtcgtcgctttggtcgccggaataatcccagtcgtgcctggttttctacacaagatcagtgctttgtcgaagatctcaaatgggttcgtcgttgtttacgacaatgctttgtttttcagcttcatcatcgcaggatttgtctattggatcataatgtctcgtctgggaaggaaacagagctcgttgtcttcttcttcacatccgcttttgtaaatctttgcatttaattggtttcgtaagtaactaaatataagtcacacagatgtaaaattagacagaagacaaaagaaaagaat

SEQ ID NO: 4375 - DNA, 595 bp, Arabidopsis thaliana columbia
  unsure (1)..(595): unsure at all n locations
tnnnnnnnnnnnnnnnnnnnnnnnttaaagagcgggtaacggtctgctcatcagaaaggtcagcttccgtcaacgtcggctgatagataagctctttcagcattgctttcggataacgacgctccatacgattgatcattttctgcgtcgcgttgtactcagataccagtttctctaacgcttcgccagccaatgccggtgcactggcgttggtgtgcagcgttgcgccgtccagcgcgatagagatctggtactgatccatcgcttcgtcgtctttaatgtactgttcctgcttgcctttcttcactttgtacagcggcggctgagcgatatagacgtgaccgcgttcaacgatttccggcatctgacgatagaagaaggtcaacagcagcgtacgaatgtgcgagccgtcgacgtccgcatcggtcatgatgatgatgctgtgataacgcagtttgtccgggttgtactcgtcacgaccgataccacagccaagcgcggtgataagcgtcgccacttcctgagaagagagcatcttatcgaagcgcgctttctcgacgttgaggattttaccttcactttagagcnnnnnnnn

SEQ ID NO: 4376 - DNA, 605 bp, Arabidopsis thaliana columbia
taatagctattgtcagagagtccgaggagttttgtcccgtaaatcttgtcttcaccgggatcaaacaaactggaagaatcatcatcgtagtatatgatccgccatggatacagaggccgtttcacgcatgttttccaaacgaaataccaatctgagcaaacgagttttgcttggtggtagtcaatagagttcaagctttcaatgatttttcgcaaaaggtcaagacaaagcttggaccagtcgtgatgatgagatacttttggtcagttttcttctctcatcaaatcgttacgcgcatccaccttgatgatctttaggtaaataaagatcaatattttcatggtcttttgcaaagatcgcgcgggacaaattaaagtttggaccaaccgtgattatcaaacacttttggtcttttctcttctctcatcgacatatccatgtctgcgcctacttgccctatacgctaaagtaactaaggttttgttttagggattagaacgaacgcctattaagtttaactatttttatacatttacatataagtaaggttcctcaaactcataccgtaaaaaactgacaagtggtgtttgattcatttgacatat

SEQ ID NO: 4377 - DNA, 1463 bp, Arabidopsis thaliana
ttttttttttgtttcaatcatccaccaagatatccggcgatgaatcttcctataaaataccaataattgatacatgcaaaatcttaatttctaaaagtgtatcattataacaaactaacaatacattgaggcggaaataattttagaaaatcatatcaaacttttaaaggaaatgaatgattacacacattcactcatgcacagatacacacacgtaaaaacgttaattgcaaattaaataattgagcaactttgaaattaaagcaactttgatttcatgatttggtttcacaccatacctttctcttgctttcttgcaccaaagctgttcaacagtaacctcacccttcttcttcaaaaacttcaatcatgttccattctcgttctctctctctaaatctctcccatgggttatctctcttgcaacggcgaatccgccgtcgcaatctgcgatacttataactggaatcctcgtcgacgatctaaagtaccggagaaacgtcatcctcctaagcttcgggttttcaactacgacgaactcgccgtcgctactaacggcttctccgccaataacttcctcggaaaaggaagtcacggcagagtttacaaagcagttctcgacgacggaaagcttctcgccgccgtcaagagaacaacaatcaccactaccgttggtaataacaataacaacgtgagtcaggtagacaatgagatcgagattctttcacgggttcgtcaccgttggatggtcaacttaatcggttactgcgttgaccaccggaggaaaacaaagctgttagtcgtcgagtacatgcctaacggtacgcttcacgatcagttacattctcgtagttcgttagattcacggttaagtagttggaatcggagaattaaacacgcgcttcagatcgcgattgctgtccacgctcttcacaccgcagagactcaagtgatccaccgtgacattaaatcgtgtaacgttttaatagacggtgacggtaacgctaggttagctgatttcggattagcattgatcggaaacgttgacgatgagcgtttgaaatatactccgccggcgggtacgttgggatatttagatccgtcgtacttagcaccggcggacttgacggctaagagcgatgttttcagctttgggatattgttgttggagattattagtggtagagaagccattgatttgaattatagtccgtcgtgtatcgttgattgggcggtgcgcttatcaaacgcggcgattacgacgcgatttgtgatttgaagattaagaaccgtccttattaccgccgtgattcggaagttggccgttatggcggctaggtgtgttagatcgacggcgaagaacggtccagatatgttagaggttgttgagtgtttgaaaacggtgagcgagttactccggcgtggaataactgcggcggaggagtgaagagagacggaaaatg

SEQ ID NO: 4378 - DNA, 572 bp, Arabidopsis thaliana
tggtaaacctctcttcttttaccttgtcgcaggagttgaggtcctattcaagatccatcaagcaagaaatactgaaggtacaagagaactatacagaccagttcagccaactaggtgagaatgatctaagtgatgcttttgtagtcatgacaaacctttcatgaccttgcaatttttgtagtgtttataaattaaaatctgtctcttcaggaaagaaactgattgaacttagcaatgctgctgaaaactatcacgctgtactaactgaaaaccggaagcttttcaacgagcttcaggagctaaaaggtactgaggatcatgttcagtatttgttcagatgtgtattttcaaaacttatgcagcccataaattctatagttatgacttgcaggaaacatcagagtgttttgccgggtgaggcctttccttcctgcacagggtcagcaaacacagtggtcgagtatgtcggtgaagatggagaattagtagttccaatccaactagacccgggaaagacggtcttcgccagtttaagttaacaaggtgtatagtcaactgcttcacaaggtgtg

SEQ ID NO: 4379 - DNA, 483 bp, Arabidopsis thaliana columbia
ggtttaaagacataagaagcagtttccaaagttgtgatctttttccttattcataccgtctctagcaattgggtattcttcggattcaagcatacgtgcaacttggctcatcctcggtcttttctcagacattggatcaacacatctcaaagcagtcaatagtgtgctttacaaagcacttgtagatgattttatttcaaggtttggatcaaccacttctacagaacgtctttattggaccatcatcttcagccactccaccaaatgtacctacaaaatgacaaagacggaatgtcagaagactctcttgaggcagcagagtttatgtgtttgtgcaggttcttacgaaattttttacctcgggtggtggacgagcatagtctaccggatatctaccagttatagcttccaagagtacaaccccgaagctgtagacatcgcttttcacattcagaagaccggaattcgcatactctggagcta

SEQ ID NO: 4380 - DNA, 820 bp, Arabidopsis thaliana
caaacaaatctatatatgaaaatctaagtaattgagcttattattacagctgtttaaagaatgtcctcgcacgagagcgactgatccacacatcacacatgtactcatggtataaactatatcgtctctttgtcgtctctctacgtcaactaataagccacactcgaattaagtcgctggctcttgttggtgaatctgcatcgttggatcagaatctaccaaacaaagacaaaagttttacccgttggattggatctctcttgccaactttaagttcctagatttctaccaatgaaatgatggcttcaggtccaagttaggttaaaatccaagaagaaacctttgtcttcactctcaagtgaatggctgagggtctctaccttgagttcccaggagaataaaggtactcttctatctctcattttttttttctcatagcaccttataatttcaaggtttatactttatccgtgtgatcagaaggtagtttgagacccaagttaggtcagaacccaagaagccatctcaaatttcaggctagacttaggtcaataccgaagaagatagtttacattaacctttctagtcattttgattttggcataactttacgaaaattatctttatatattatatatcatggtttacaagaaattatttatgtgttttctacatttacttcttataaataattgccttcttaattatatagatacactattaggtacacctctacacgtaacaccaggctcagaactcggaaccaacaactcataaggcaaaacaccagccccacacctatttctacggtcaggatcag

SEQ ID NO: 4381 - DNA, 567 bp, Arabidopsis thaliana columbia
taaaaacagttcaactgtgtggctagagatgcagagaagctaactttagtcatcagcaaagattatccaaaaaacatcttaacataaaacatatgaatagccatgagattgtttgctgttacttagacccaaaaaaagatgcaatagatactaactaattagccgttccaaaagaagataaacctgaaagtcataaaggttccaacacaaaaccaaaaagaaaaacataggcaaatgcatctctaaatagataaagactaaacatatttagccatcaaagatctcgcttcatgcacaacgtcaatcttctcccacatcgttttgagctcatcagcttgcacggacttcaccttttcttctatcctcttcctcttcttcatcggtaccaacctccaattcttcttccatgtctcttcatcaacccccaaatccaattccttaaacgcaccaccaacaaacgacctctcgaaccaatcactttcttcatcaacttaagcttcttcctctttggcttcacaagagtagcgactcattctcagtctccaactcttaatctgaattttgatg

SEQ ID NO: 4382 - DNA, 520 bp, Arabidopsis thaliana columbia
ttgatgacccgtcattagttccttcttcgcgttcaatgtaaatctccaacctcgagtcttcttctcttgtctcagattggttcaagatcctaagactagtgctgctattacccaacacagagaggtcgtcttcaatattgactctgtttctacacaaaggacacgtagcgtgctgctcaagccactggtcaatacaaccaatatgaaaagcgtgtctgcatttaggcaaaagcctaagaatctcaacatcttcgaatttagacaaacaaacagaacattcaagcccttgtttcaatcctttcaaagcagagaatctgaaaaagggaagagattcgattgctttcttgtcaagaccagagaatcttgaagaccgattgaaaagtccttgccagagacgatcatgtcgtattctttctccatcactgtcggtctctgatcggaggtcattgtggaagcatttcgcgtagacgaggagaacaaaggtgagagtgaagacgatggagaaactccggtgatgata

SEQ ID NO: 4383 - DNA, 411 bp, Arabidopsis thaliana columbia
caaaatcactcgactgtggattcctctttaagcccatttaggggtccatttaagaaaagttctatttctggaaaaaaaaagtaataataccgttgaagttaaaaagggtaaaaaataatttactgacgcaggtagacgataagtacatgtactcggtggaaaacaaagacaacgaagtacacggttggatatcgtcggaccaacgtatcggtttctggatgatcacgcccagcgacgagttccatgcatgtgggccgatcaaacaagatctcacttctcatgtgggccccaccactctttcggtgagtacatacattctttttcaaaaaaagaaaacaaaaaaccaatttctagttttaattgtaaaatgttactaaaaatttacaatatcagaaatgtgatgtatggttt

SEQ ID NO: 4384 - DNA, 761 bp, Arabidopsis thaliana
taatcacatctgtttcatctccaaagcaatgaagttgacctgaatctttagagacaccacaaacagagttcctcccagaagctaaaacctcgaattcttcattattggagaaattcaaaaggtttgattttggtccccaacaaaccaagtctccatctttagtaacaccacaagaaaacccatctccagaaacaatcttacgaaacatgagactatctatataaggattatgaaaagaagaattccaaagaagaccagaagtgaaattagtgttatcactatactcccaacaatgaacaggaccataatcaggacctgagtaatacaatccactaatagcacaaacatgattgttaccagaagcaatctgtaagtaagaattatactgaaaagctcgaggaacgagattctcagaaggatcttcaaggttccaacaaaacgcacgcgaagtgttcgacgtaatggcgcagagaaaaccttcaccaccggaaagagaagtcattggaggagaataaccggagatttcacctgggggtcggtttaatgatcggttagtgtttcctctatcccaacagatgacttcttgcttcccacttgcgtcaatggcgcagaagaatccgttttcgccgaaagctgctgcgattgtgcctgttgagccatacgcagaaactgtaatgatgagtgatgaaatggtgatgatgacgaagatgtgagaattgggttcattttggtgttgagctgatgaatgtttggggagatga

SEQ ID NO: 4385 - DNA, 486 bp, Arabidopsis thaliana
ggtttcattactcccgatgatggcggcgaagagctttttgttcatcaatcctcaattgtctccgatggattccgtagcttgactcttggtgaatcggttgaatacgaaatcgcgcttggaagcgacggaaagactaaggccattgaagttactgctcccggcggcggttcacttaataagaaggaaaacagctcccgtggatccggaggtaattgttttaattgcggtgaggttggtcatatggctaaggattgtgacggtggaagtggtgggaaaagctttggaggtggtggtggtcgtagatctggcggcgaaggtgaatgttacatgtgtggtgatgtgggacacttcgctagggattgtaggcaaagcggtggtggaaacagcggcggaggaggaggaggtggtcgtccgtgttacagttgcggtgaggttggtcatttggcaaaggattgtcgtggtggtctggtggaacagatacggagg

SEQ ID NO: 4386 - DNA, 882 bp, Arabidopsis thaliana
  unsure (1)..(882): unsure at all n locations
gtgctctaaagcatacgttgcaggaagtatccctgctgaccgtcagccttaacccaggtgccttcgaggcgcaaatccactacgtcagccgcccggtaaccaaaggtcaacgcttgcagccaggcggtgccgtcataaaggtcgttgacgctgcgatcgtcaactttatctcgggtaccgtagaactggtagctggtggttaacgggctaccggcngatatcaaatttgtagctggctttggcaaaatattgatcgatatactcttccgcctgaccaaatgccgcttccagtacgaagttatttttgaagtcgtatttcgccccaaaggagtgcagataatcaactttggtggttttatcgttctgataaaactcatccatttccagatgccacggcgctttgtattcgttggtccacatgtaggagaaactcaacgcaccagcatcgccgtaatcaaaattcgccccggcttccgccccctgataagtacctggcataaagctccagtgcggcgctaacagcgtttgaccagttggctgaatgtaacctgccctcgcccaaaccggaccgtatttaaatttggccgcagctttatacaggcttataccgcttttgtcgccggaccagtcttcgtcataggctttattactttttgaaaacgcgatttcgttcgggtgggagctgtcgccgttttccgccatttcaatcgccgtaaacgcagcaatatcaaggccgaacatatcagcagcataaccggactgaaaatcgaggttggcattccaggtggagtgagaaaggttggttttgtatttgtcgccgtcggtaacatctttacggtcgcgttcaccttgccagtaatagataccgccggttaaggttga

SEQ ID NO: 4387 - DNA, 427 bp, Arabidopsis thaliana columbia
aactacgggatagtcctccgcagcataatcagagtaacagaaataaacaagactaggtgtatcaaatgaaaaagtgcctaaatgaccgtcggaatctattgttagggtcttgaggcttgcatttgagatggtgacatccgaatctaaccagtttacatcaaccaggactaattcctcaagcgcaggcaaagcaagaagtagagtctcagacttatcaacattataccacacagagtcaagaacgcgagtcttaagccttggtaagaaaatgctcccagctaaccaactaatatcaattccacaacctaattccagcttaactagtgtcttgctggcgaaaccttttggagaccaacgatagctatcttccatagtcatacctaaaatgactcctagatcaagctctgaaacaccacggattagcaca

SEQ ID NO: 4388 - DNA, 838 bp, Arabidopsis thaliana columbia
tgctcgattccggaatttgtcttcaatgaataaacttgtggaagttcctgagcatttaacctcaggatattgtagcaagccacagcaaaataataagattcttgttgatacgcgggtgactgtgagcaaaaagaagccaaccaagtctgagaaatcacaaaccaaacagaaaaatcttcttccgaatctttgccgttttccaccttcatttactggtaatgaatagatacagaactatatttctttgtttttttgaatctgttaaatgcagactatttcttgataatgatgatgtttgattcctgcaggtctttctccagatgaactttggaaacgacgtaactcgatcgaaacaatcagtgagctattgcgtctattagacatcaacagggagcattctgaaactgctctcgttccttacacaatgaatagccagattgtactctttggtggtggcgctggagcaattgtgcctgtaactcctgttaaaaaaccacgcccacgaccaaaggttgatctagacgatgagacagacagagtgtggaaactgctattggagaatattaatagcgaaggtgttgacggatcagacgagcagaaggcgaaatggtgggaggaagaacgtaatgtgtttcgaggacgagctgactcatttattgcaaggatgcaccttgtacaaggttatacacacacttgtccttttatgtgtttctgttctaacacatggtttcaattagtatgtctcagctactgcttcttgttatggtctttggtttctaacaggggatcgacgttttacgccttggaagggatcagtcgtggattctgttgttggagt

SEQ ID NO: 4389 - DNA, 537 bp, Arabidopsis thaliana columbia
gtcaacatagctgagattgctgtgatcaggtaattgtaaatgtattcaaaacttcgaagtggtacacaactacaaaaccagaaacgctcacaagttttaggcaaagtcagagagatcaatgagaaaagcaagaaatcaagaaaatcacctatcagagagtaaaacaaattgctggttagaagtgtctctaagagcattagctaacaaccgtctctctgcgtcaaccattgatatccttccccacaccacctgcagatgaaaattaatacacatttttctttcatgtaaatggatggtaaaacacaataagatcttcaaaaattggcatcagggaaggagacaaacctcatcactacgaatttcgcggttgagaaagtaacgactgtagtgaactggcctttcctttgatgcatgtatataaacagagaatttccttcatggccctgttgaggagtgcaaaattctgaaaacatcagccgaggaatgaagttcaagaacaaactttcaagttctataaggaaaactgacacaatgtct

SEQ ID NO: 4390 - DNA, 545 bp, Arabidopsis thaliana columbia
cgattcgttgattctattatctctatcgtattctccacggtttgatttcttatagtttggatttgatctgttttctcagggagataatttgaagatggtgtctgacgctagcaagaagaaggcagctcagaagaaagctgctgccgccgctaaaagaggtggtaaagctgctgctccatccaaatccgccgctacttcttccaacggtgttgatagcttgtcaagcggtgtcgatgctcttcaaatttctgatcggacttgtaccggagttctctgttctcatcctcaatctagagatatccgagtaagtcctcttatctagatttcgtgattcgatttggaaatttagattcgtgtcctttgatctgtgaatatatgtttggataatccttgtttgattgctcatactttgtatcctctgtttaaaatatgttgcagatagaatctctgtctgtgacgtttcatggttatgaccttattgttgattcaatgttggagcttaactatggaaggcgttatggtcccttgggttgaatggttgtgga

SEQ ID NO: 4391 - DNA, 407 bp, Arabidopsis thaliana columbia
tcatcacaaggaaaatcaatttatagttaagaaatttacctttaatttctacatccttgagagctttcctccacaccccgttaataatgttagccattctaagcgtttcgtttatcacctgttgtgtgattacaaaaacaaaaataaattagctagtatattgtaactaatccctttcaataactagctagtatatatatatataaaaatatatatatataaagcaattggtaggtttaaattacataactacgacttacattttgagtaaaagagagagacatataatcggtccacttgtattcttctcccaattccaatttacgcctcttcatctccatattctcctcctgtagataaataaatatagaaataataatatgagaaaacaaaaaaaaaatctctac

SEQ ID NO: 4392 - DNA, 350 bp, Arabidopsis thaliana columbia
gctgagtcctcaagaggtttggggattactttgattcctagtttcaccgcttctgaagtctttcctaaaccacttgatgagcttccttcaaaaccgatggatcgcaaagaagaggttgaagagatgagttgtgtgacaaagaggtttgtgtgtgatgcttcgaagatcatgaaacttagagccatagcttcaagaaaccttgtgaagaatccaacacgtgttgaagccgtcacagctctgttttggagatgcgttactaaggtttcgagattgagttctctaacaccaagagcttcagtgctgcagattctagtgaacctaagagggaaggtagattctttgtgtggaaa

SEQ ID NO: 4393 - DNA, 965 bp, Arabidopsis thaliana
acttaccattgctcagagtgcaaataccatgttcacgtgggatgtgcgtttgtccccgagaacgtgaagcgtgaagatcacgaacacccactcactctactttacaacacaccatgcaaaggtcgtaaggacggtgtggtgttcatatgtgatgtttgcgaagtagatgtgtcggagaatctttgggtgtattactgcaaagaatgtgactatgggacacatgttcattcatgcacgacaaatgaagacaatgggccaaaaaaaggaggagaagaagaaggagaatcaagctcattatcgacttcaaggataaagtcattaatggaggctgaaaaagagatgagagagatggcgataatacatcaactacagttagatgctcttgacgcagcaggtagttatgtcggttcatgggaccaaggagaaaagattattggtaaatgatgaatcttgggaggaccatcaaactttgtttgaattatattcttttgttttcattctgatatcgttctttctttgtatggtttgcaaattattatttttcatgtggcttgttgtaatgttatgaaataaaaatagttatatattttgctgtttgatttatattcaccgattctgattgatgcttatatattactttgtttccatcgcttctaaatgtcaaatgataatattctaagatcatagcaattgagatcacatgcttaaacaacaaacaacgacatttttttcacgaatccagtcttactattagaggaataacgaatcaagaaaaggttgttaagagagaaaaagaaaacaaattcattctcattcatcttaattgggaccggaaagattacattggaacctcttatatagtaagagatactctaaaactgagataagtaaacaccacaaaacaaaattaagagattagggtgtgtttgggatttgcactgagcttggaacataagagcacacaa

SEQ ID NO: 4394 - DNA, 481 bp, Arabidopsis thaliana columbia
tcatcttgagcaacaggatcatgttcagccattctagcaaccaatgtagctaccttaatctgaactctaacagaagaatcaccaagaacctgaacaataatcggaacaccaagttcattaacaatagacctaaccttatcttcatcacaagccaacaaccctaacgcagtagccgccgcgatttgcccctccgccgatgaactctcctttaaaagccttaacaacggagaaacaccaccttcatcaacaataatcttcttattccgatcattatctccggcaagagaaccaagctgattcgccgcatcaatcttatcaaccaatttccccatctgtatcgacgcaaccaaagaccaaacccaaggcaaaatcggatcattcgtagcaatcggaggaagcgaaatcacgattccaccaccaaaacttccatctccgtcggaatcaaacacactcagaatccatttcacatcaccattagaag

SEQ ID NO: 4395 - DNA, 611 bp, Arabidopsis thaliana columbia
ttatattaaagtcttcatatttgaaagaaaagctaaaatgtttattcacatttagtttcttgatttgtaaacctgatctatagctgctacaacatctgcagcaaaacctccaaaactcttatacaatgccttgtaaacagaaatactgaaaacaaagttcaaaaacataaaagtttaagttagttttgtatagatttcgacattgatctaagtcttattattttacttacaatgcacgaggagcgattccactagcgtatccaaagttatggttagaaactatcactggaactccgtggttacccgctgcaaccgaagctgtgtgtctgcatatatatccaaagcaacaatctataagcttcaaactctgtttttatatgatacattcaacagttacacttacgttccatgtccatctccatcgaaaggagaagcgtaatcttcagatgagttaaagattcctctggttacagcggattgcgcgaaatgccgtgctccaataagcttcttattgcaagatcctgatggaaaatccggtgtacttcacaacacctgagaaatgcttagggattggatatgacgcttagagtcattgcattgaactaggatga

SEQ ID NO: 4396 - DNA, 581 bp, Arabidopsis thaliana columbia
cgcctctaaggtcctaagcttgtgggaagagagttgagtagatgaagaaccaaattttctagtttacttcaggcacagagtacttcactatcgtcctctagcttctgtctgtattgagccaatctctgcaaccacaaagaaacactcagaatcattgaaatttgaaacagagaaatctaaaaagatgaagaagagagaaatgatgcataaccttggtataagcataaacaccagcttctgttggaccaaccgggcttccccgcttcatgaatttgccttctttgaatatgtagagaagaggtatacctgtcgatagctctagacttatcacctaagaaccaaaaccatcaagacaatttcagttattcatcagaaaaattgcataaccagtaatcaagaatggatatgtaactagtctttttatcatacctcctggcaagtcaatttgtcaagatacataatgatagaccgcagcgagttcccgtgagcagctatcattacgttctttccagctgcaagcttcggttcgatctgcaatttgacatccgacattactagacacactaaggagaaaagttagc

SEQ ID NO: 4397 - DNA, 625 bp, Arabidopsis thaliana columbia
  unsure (1)..(625): unsure at all n locations
tcgtacgtcaacttcaaacaaagaaatacttccaacattgctatcatgtgcctcactaccatttggaacatcagcttcttggataccattttgaacttcaacacactcaagtgctgatctggcaagtgagagagcatacgatgtatgcagctgcgggtcagtgtagtctctttcctcaatcaaccattggaagtacctggccagtatataaggtcagcaagaaaaaagttttagaattttcccaacttcgctacaacaaactctggtggactttcctcttactagtaaggttttactaaaattcaactgggtgaaatttatttatacggttagtaactatacctctgtatgatttcaacctttttgggatcaatagcttggatcacttgctctgcaataagattaagaaacacagacccttacatcaatcaagactttaagtatttaatcgaccattatacacataatatcatatgccattcaataacccaaaggcgaagaaaaaaaattgaactatgtaagtttttttcagcaattctggaacagatgcctatattaatcttaatcttaactatattgatgancacacactagagacatgagaatatatgcacggataagatta

SEQ ID NO: 4398 - DNA, 616 bp, Arabidopsis thaliana columbia
tcgtcgattagttaacttagacagtcatctattttaactgcagagccaggacagattaaacgaaagtcacgacggcccaagacagagagctgaagctttagccgccttgtcatccgcattcaactcttcttcgtcatcaactaaatcgcctccaccaccaaggccagtggggacgagtcaggcttcacagagagcagcagcagtggctgctctttctcaagttcttgttgcggaaaataagaaatcacctgatacctctcctacaagaagatccactagctccaacccagcagatgacatccctctgagtaagtctttctccttgattccacgttctgaaacttcgataacacaattgactataaatatcttcatccacagcggaagagaaagatgaagaagaggcttcagaggtagctggtcttgaagccaaggaagaagaggaagtttcacctgcagcagatgaaacagaagcaaagcaggaaacagaagagcaaggtgattctgaaatacaaccaagtggagcaactttcacctatgaacagctgagagctaaatctgagaacccagtgactggaatcgatttcaaacgcagagaggtgaattagttagatag

SEQ ID NO: 4399 - DNA, 569 bp, Arabidopsis thaliana columbia
gtgaatcccaatctcataaacggaagaaacgtgtctgtagggtgatcaaagctctcccagaaacttctccctgtgactggatcaaacagaacaaggttgcctaaatcagagagtgtagcaactaaagttggttccaacatactatctgaaacatttgttgaccagataagctctgtttcattgtcagatgcatagacagagagattgcctctgttgctgaactttaccatcccagaggtgtcattaataggatggtctctgtttgcaacccaaacaatagtctgttgagagatttgagcataccaaatcccaacataccggagctctgaatccccaagactgaagaatccaaacgcgaatctcttccctgcggagagtataacctcaccatctctcaaggactgtcttctcataattgtatccacagagatacaaaattggaagaggaagaaaaagaagataacgaagacaaccttcatatttgtgtttgtttcagagcaaggatttagtgaaaatgtataaatgctgtgtaagtattgaaaaccaagtggatcagtcgattactgtga

SEQ ID NO: 4400 - DNA, 557 bp, Arabidopsis thaliana columbia
acagtttatgagcagaaatacatagatcttgctggatccttggaaggcttgcatcctaaagtcccaatctacaaaatcaatgaagggaacgaaccatgcttcttcaccacttacttttcttgggatgccactaaagctatcgtaagtgacttagtgttgaagagggatttagataatataactagataactctgaatgttacctcatggatttcctttactgtttctctttcttttctccttgaatttacctttcttctgttttaaacattgggatataggtacaaggaaattcattccagaaaaaggcatcgttgttatttggcactcaccacagttgtggaggtaatacaaatttgctttttcagttcggttaggacttgggacaatgaaagaaaacgctcttattactttccggctacttcatgatatttgtcccttttctgctgcaggataagtctaacggtgggaccaaggactaaggcaaagggctgaagcactagctgccttaaattcggcatttaaccttctagtaacaggcctgcctattcggtaaat

SEQ ID NO: 4401 - DNA, 477 bp, Arabidopsis thaliana
agcaccagaaagcgtcggcttcatcttcaagtaggattatcatgggggaacatatgtcgttcattcctatacaaaatggatgattaattcctattcttttacatgttctcctgtattgaagattcagtattaagaccaaggtggacttaccctgaacatagccaatatcaggatttaaccatgtatagatggaaagaatatcccatagtcttgcttgattactttcactctcataaaagcagagataccgatccgttctaacaacatcgagacctgcaacaaaattgttatcttattagcagttctttaagagcacttaacatatttctgaattctgacacttgtacagaatgctagagaagataaacttattgagtagttaacaataccgatttgactcaacacaagcatccactggagcacacgcttgtctgttatagcggttttcacaacccattcttgattgtctactgagga

SEQ ID NO: 4402 - DNA, 1425 bp, Arabidopsis thaliana
gccagtgtgccatgagacggatgcactttcagacattgatgcacaccagatcctattcctcctcctccgtctccatgatggtcattgctattgtggttagagtaaaacgtgagagcagtcctaccaccaaaacccggtgaagaccggcaagccgtgaagaagatttcataagccgtctcacgaatatcatctcgatcaagccccttcaagcttcccaaatggccaaagaaggtcggtattaggacaaagcacgacggaacctcccatggtagagggagtaaccgagaaggactctctccggtgatgatgggtcatggcggaggaggggagagggtggaaaggaacactttacgggattttatgaaattagattgctccatgagagaggaaagaggaaaggacaagacatatctcttgtgttattataagacaaacgtaaaaataaaactggagaaactgaggaggtggaggaggaaggcgacaagttggaaaaaggtaatctacagcaaaaaaaatctgtattgagagaatcatagaggatgcgagtaaaattaggaatactcacaaataaaaataacactagaattagctaatttcctatttcgagtaaattttgtccatccaaatctcatctgtaaaatcttttatatatatgtactagattgttgccagcacaatataccagtttttgtatatatttctttaatgtagatgctactcaatgtctcaatctacatttttacctatacgaagagaaatacgctttagacttttagttatcgtatatagaaaagaaaaaagacataatggtaatctcttttcttctgtcggtccaaaatggttacgaaatctaatgtattgaaagaaaatatatattacaaactcaagaggtttcactgagcgagtgtttaaaacataattaactgggggaaaacaactactagctacaatgtattgctttactcacatgtcagaagtgttagattagccgcaggatttgcaaaaactggaatgcagtagagaagataacttattaccgtaagagagagaaaatgatttagagacgggccggtttggattagaaacgtcatgtttgaacagccaccaaacagaccagtttagtcaggttttgtctgacaaaagacaatattttaaagttcttgggactgttaagtttccgccaacacgaccttcatgtaacaacgcaatctcaaagtgatttattgcagctcttgctctaccaaacacttttcttagatcacattgaacactgagcaaatcatcttcccctaaacagaggagatgcaaaagcaagaatctgtgaatggaatattcaacaaaaatgaatgaaccaaaagggagatgaataatgataatctggaggatgtatcgttaaacacaaacactagaggataacagagaaag

SEQ ID NO: 4403 - DNA, 405 bp, Arabidopsis thaliana
ctcagcatcaaacaatccctcaaatgttcccaagatcaaaaaagaatcatcttcgtcgtccgtgaaattctcccaaacaaagaaatcctccagccatgaaatccatgatcgcaattcatgagtcacaccaatgaaggtgggaaatccctcaagacacattgcgattgacaaaaatccccaacttttgaaaccctaatcttcttgcgttcgattcgatccgagcacactaacgcaccatttgataagaatgaaagtgtaatccttggtatttcttatctttgaatccaattacaatgatacaaaccctaaatcgataagcttggagttacagttctacaatcttatctcccaagaacagagcacataaagctctaatcctctttacacatcaatgatcacgcagga

SEQ ID NO: 4404 - DNA, 1017 bp, Arabidopsis thaliana
gataacttttactcgcctccataagtaccgcagtgccactgttcggatcaacagctccaaaagtccaagcgtctctatggttcccaagaatcacatatctaaccaatccattcatatacaatccctagttagttactacaatcagaagtctattgccactcactattgaaaatgtacctatcaggctcttcttctccttcaatcactccaataacattctcaatcttggcaataacagtttccccctgaaaccaagacccaacaaaactcaaatccaagtaagtaacacacatctcaaacagaaactcactcactcacaatgtagctgaggttcaagaccccaggtccaggccccactggataaacatctccatcagaaacatctccaacaattgtcttcagaatcacttcagcatcagcagctgagacaggcaacgacggtataagcggaacatcaccgctcaattcaaccgcctcgtcggataatctctcacacccatcaacacttgcccatccaggagtcgttggatcacctaacccattataaacagtaccaacttgaaacccactcggtggcatccatttactcgccggaaaccactcatctccaccgtaatctctcttgtttgtatatatcacaacaccgacagctcctgcctcgtaagcgttgttcacaatgtctactttgtatatctgaccgtacctcgcgattacaacggctccagagacattcacacccatatctttcttgagtctcacgaaatcttccactcgtccatagtttgcataaaccactagacttacctgacttagggtatccatgaaaagtatgtaagtgcggatggcagctggagaatgtgtgttgattgcagagccatcaacaatataacggttaagtattaggatgagagagggagatgaatggaaaactgcatttaaaactaaacatgggttatatgagtggctagtcatgccatttggattactaatgcacctagtacattcatgaggttgatg

SEQ ID NO: 4405 - DNA, 1138 bp, Arabidopsis thaliana
atcattcttgcgtagcggactaaaacgtttaggtctggagtcacgtattcgcgccgcttgccacccgagatttctcttccggcggtaggacaaggtgcggtgggtattgaatgccgccttgatgattcacgcactcgcgagctgcttgccgcgctgaatcaccacgaaactgcactgcggttaccgcagaacgcgccatgaatacccgtctcgaaggcggatgtcaggtgccaattggtagctacgccgagcttattgatggcgaaatctggctgcgtgcgctggtcggcgcgccggacggttcgcagattattcgcggtgaacgccgcggtgcgccgcaagatgccgaacaaatggggatttcgctggcagaagagctactgaataacggcgcgcgcgagatcctcgctgaagtctataacggagacgccccggcatgagtatccttgtcacccgcccgtctcccgctggagaagagttagtgagccgtctgcgcacactggggcaggtggcctggcattttccgctgattgagttttctccgggtcaacaattaccgcaacttgctgatcaactggcagcgctgggggagagcgatctgttgtttgccctctcgcaacacgcggttgcttttgcccaatcacagctgcatcagcaagatcgtaaatggccccgactacctgattatttcgccattggacgcaccaccgcactggcactacataccgtaagtggacagaagattctctacccgcaggatcgggaaatcagcgaagtcttgctacaattacctgaattacaaaatattgcgggcaaacgtgcgctgatattacgtggcaatggtggtcgtgagctaattggggataccctgacggcgcgcggtgctgaggtcactttttgtgaatgttatcaacgatgcgcaatccattacgatggtgcagaagaagcgatgcgctggcaagcccgcgaggtgacgatggtcgttgttaccagcggtgaaatgttgcagcaactctggtcgctgatcccacaatggtatcgtgagcactggttactacactgtcgactattggtcgtcagtgagcgtttggcgaaactcgcccgggaactgggctggcaagacattaaggtcgccgat

SEQ ID NO: 4406 - DNA, 1130 bp, Arabidopsis thaliana
gccagtgtgctctaaagatcccccactcttccggtttgaaggtcagggcttccatctccagatcctgtttggctttggtcagctcaaacggcgagaattcggtagcgcgcgccggataatctttacgcagcgggtgacctttccaggtttgcggcatcatgatgcgtcgcaggttcgggtgaccgtcgaaagtaatgccaaacagatcccaggtttcacgctcataccagttagcgttcgggaacagtttggtgaaggtcggtacgtgcaggtcgttttctgccagcgccaccttcagcatgatgtcgcggttacgatcgatagaaatcagatggtagaaaacggaaaaatccgcggcaggtaacccttcgcggtgtgtgcgcagacgttcgtccatgccgtgtaagtcaaacagcatgacgtaaggtttcggcagtttctttaagaaatcgccaacttccagtaattgttcacgcttgatccacacaacgggaaccccggtgcgagtcgcctgaacagtaaaggcatccggcccaaaacggttgcgcagttcgccaatcaccggatcatcaagatgatcgcgggtctgccaggcgggttcttgcgcggttaagtcggtcatattgttcaccattgcaaatggtccgtggtgactgtcggcgcagtaagcttcgcgaaatagatttaggaataagcgaagaaaaatccctttgccgacaggcgcaaattaaatctcgtcaggtgtacgcaggttagttacggcaatgcgttcaccgcgcttgcgttcgcgctctgattgcatattggcgcgataaacgccctgatcgccaaccacccaggagagcggacgacgttctttgccgatagattcctgcaacagcatcagtgcctgcatgtacgcttcaggacgcggcgggcagcccgggatatacacatcaaccgggatgaatttatcgacgccctgcacaacggaataaatatcgtacataccaccagagttggcacaggcacccattgagataacccattttggttccagcatctggtcatacagacgctgaataaccggtgccattttggtaaagcaggttcctgcaaccacctttacagcacactggcgcacgttacta

SEQ ID NO: 4407 - DNA, 1679 bp, Arabidopsis thaliana
agagcgcttatggagctcaggaaacagtatggatctcaaggggaaccattgaaaagctggacctcaagatggaagagctgaagccgagtaagataaagagcccatcaggcccaaaactgtactcgacacgcgcgtcgagtatgtcggccgagttcacacgtgcgaggtcaacacaattcaaattcgaatttgaattcaaatttactcggccccaccaatcaaatcttgctccccaaagcccatcagagattcttctgcaaatagtgaaagcatgtccccttgaccaaatgaagggtgaagatctaaggtgtttggagggctaggatcaaatcttcttgtctataaaaccacactcaacaagctaagtcacttacactctctctttgctcaaaaatttcaaattttacttcttctctccaaacatttcaagattttactctcacttctctctagaattcccagaaacttagccataatttcttgttttctctccatacaaaccttttcaaaacctctcctacagcctttgttcagttttaaacattaatttctcttctacttttgacctactttgggttattttgtggtgactatctgaagtaaatcatcccaagatcatggatcccgaagaatcaagaaggagagcctctgctcgagctgtggcgagagggtttgctatgataaatgagaagggtccgtcatggaatcaggaagctgtgagtcctggttttactcggttgacaggccgagtacagtggccgagtgtagccccagagccttctgtgggtcgtactgcgggtgccagagaggaaattgtaagaggcaagaaggtctgggagtccgagccagctgcaatagaggaagagcctgtgctagagaaggaagcatgtgggaaagatgtggaaattgctgaggaggtcccaatagttcctgcaaggagaagaagtaacaacccaagaaggaagaaggagcctacaattgaagaacactaccagtacctcatggagttgagctttgaggggacaagatatccccataggcataccatgcaagctttggggatctgtagagatgttgactacctcatggagatggccaagctggggacattcttctcctacaagtgtgaggataccaaactgagagctgccagttcctagccactttgaagctccatttctatgcagaggagagggagagagagatacataagggagttggctatatcacattcatggtgtttgggattcactactccctccctattaggcagttggatgctgtattcaagttccccaccaagtatgggatccgccaaaacttcagcaaggacgagctccatgatctatggttgacaatcgccggtccactcccctacaagtcatctagggccaagagttcattgataaggagcccggtgcttaggtatctccacctttggattgcaagtgccttcttcccaaagaagacaaccgaccatgttaatcagggagagctgaagatgcttgatctcaccttatgtttcattttggggcaaacaaggaagaatatagtgatggaaggggatagggctgatacatccctttcggtggtgttgactgatcacttgataggtttcagagagtatgccacgatatcaccaatccggctatggaggaagcttatgtgctggaggagtg

SEQ ID NO: 4408 - DNA, 1481 bp, Arabidopsis thaliana columbia
cagttgatcagatatgcagtatcttcagaaacacgggagagattcatgtgaagtctgatcgggatgaaactttgtggagttattcatgataatactggctacataataaacagtgggattacgtttctaacggttagtctttgacttatgcgcatatttccgaggcagatttatatagaataaatcgtaacgagttttattgtgtgatggcgcaaacgagctcggttggagctgaagctttgcaggagctttcataactcatgtattgaggtcctggtcgaaggagattcaagatagagcttaacagcatgtggtcgcaattcacataataagcctgtctaactgtgacacacggagaagtgtgttgtcatatttcactagactaaggtgagggtggtatttgcgaaacatattatcattgtcttttgttatgcttcttgacgcatgatatgtaggcttagatctgattgcgtaggataagattatgtgatgatatgatttgatgattattgattgatatttatggtgatgatgtctgactatgatatattatgtatgagaatgttaagtataagtatgtatatatgatgattatgtatgtttgtatgaaagactggggagaatcgagctatgggccgtggtctccctagtgatgtggacagtgatcgaccgacggattaacaactggtcaagaacggctaacgagcccggaatgcatgggagtgtttaagccacgagggccagcctccacttatgaggttctacggggatgactggacctaacgatgtgtatgtttatataatatatatatatatataagatgattattataaatgtggtattagaagttaaagcatgttaggttgattgcgtgtgtctaagtttatatgttatgatgatggctgtatagctttagaaagtgttctatgtttcagtgggcagagttaattcccctcactgagtattctttactcaccccctttttccctttttcctcaggttagtacgcgtgaagagttgtgtgcatttttttgttcgtgtgtgaagttcaaagaaaacgtttttggtaagatcagatgaaaacatgccgtcttggtctatatggcggggcgggtgttacagagcgcttgttctttcttttgatgattgttcaggaaaccggagtagaccacccatacctctttcctgccctgttgacattcctcacttccttggtaaaccgcacacaccaactgtttatacgccaccttggatgatgcgaggttctactaggaagtatttacttcctccatctgatccacctgatctccaaactccaccaaagttaagctattaactctaaacaagcgattagtgggaggcaaccactggtttgatttatcttttccctttctttcttttttatttagttttgatttatttttctcaccttcttcgaatttgaatgcacttgggacaatgtcgtttaagtctgggggag

SEQ ID NO: 4409 - DNA, 957 bp, Arabidopsis thaliana
ttaatggactaacactcggtagtcacaactcgatgatattagacatagaaactactttgagtgttaataagagaggcaatatagccacgaaaatgttgaagaagttgagaagaacctaattatctcttaaagatccctaccattggacatgataattttaaaagcttcaatgaagatcattaactttagaattttcaaaatttaaaattagaaaattggtaagagcccctcatgacctcttaccattgcggattgtgatacgttcatgagaagttggcacgtgtgagaactaaagtgagagattggagtcacgtgtgaagaagcttataaatagtaagagagagtagagagaaaaggatcctgcgtgatcattgatgtgtaaagaggattagagctttatgtgctctgttcttgggagataagattgaagaactgtaactccaagcttaccgatttagggtttgtttcattgtaattgggattttaaggataagaaagagagattcatagtttcattcttatcaaactgttatagccaagattcagaatgttattggagtgattgagggagaagaagagcctgataggtacatgttcaatagtgagtggcaatagacttctgattgtagtaactaactagggattgtatatgaatggattggttagatatgtgattcttcgaaaccatagagacacttggactttcagagctgttgatccgaacagtggcactgcggtacttatggaggcgagtaaaagttatctgcaacatgtatttggtgaaagttttcaatgttttcattgcaatgagagatttttgaaacaattgtagattgcacaaagactagataagctgcagaaaagaggatggaagcctcgaaggacgattattctgtgtaattgggatgctgaggagtatggcttggtctctagtttatctgaaatatcttattggga

SEQ ID NO: 4410 - DNA, 1313 bp, Arabidopsis thaliana
caaaatatcttacaatataatctctattataataggtaatcatgagttttagtcttgtcaaaactatttagcattaaaaacttctgagcccaacgaattttaaattttttttattccaatctcaagtgtcaacttcgccgaaacccagaaatcatttaatgcatttctcgtcgatgaacagcgtacgtacgaacccggttcttttggattccaacgacgcggtccgtacgtacaaaccgggttcagtttcgtcaggtcgtcaggggcattttggtcagtttttggcttaatggctaatagctgaaaggccctgcccactttgtcaaaatctgaaattaaaagtggatcaatggctactgtgtgcaatttaccctataaacaatgataggttaggtcatctcttcacaactcattatatcgttcaacaacaacacaactctctctctctttgattcagcctcttcaatatctcataacctttttcttcttcgcctctcagcttttgttcatctttcttccttcctttttgttttgtgtataccaacgaatcatggccacagcaagaatgaagaagatcttcagcttcgtgattgtgatatttacacttctcttcggttgttgttcggccaccgtctacaaagtgggagactccgatggatggactgccaaggaccacctctattaccattggaccgaggataaagagatccacgtgggagattctttgatcttcgaatacgatcacaacctcaatgacgtcacacaagtctccggtggtttggaatacgaattctgcgactcttcttttcctaaagccgtctacaacacaggacatgatgtcgtaaccttcacggaaccagggtcttactacttcatcacctcaaaccatactcaatgtacatcgggacagaggcttggcgtttttgtcgtccatgacccgtcgagtccgagtcctctaccactaccgagcaagattattccttctagacatgtctacaaggttggtgactccaaaagttggggcgtttacgacagtgatttctattacaactggagtaaagagaaacagttccacgttggagaccgtctccttttcgaatacaacaatgaagtcaactatgtctactagatcagcggtgaccttgaattctaatactgtgacccgaattctccaatagccgtgcacaagacacgccacgatctcatcaagctcaccaaaccatgaatccattattcattagctcaaagccaggtgggattaagctccaagtcgtggtcggaccaacactcaatgttctaaagttgtcaccttt

SEQ ID NO: 4411 - DNA, 967 bp, Arabidopsis thaliana
ccccccactcatccacttaatactcacacttgtggcttcttcttccatggctttatcttttgtttcttcaactaagttctccaagatgcaatatggcatatggcacagtgatccttcacgcaacgagtcagtgtgagatgctgtgaaatcgcaaacgaggctccacgaccaaaatcgaagctccaagtaggatcaccgatcatcatcgtcgaagctcccaaagttataaaaacggccgcttcaatgccttgccttagggccaactctggcttggtcaagcctggcgatgttggaaggtcttcttcttcttcttctattttatacagattttaagacaaaactcagactaatcatctaaacagtgttttcttgccaattaaattagcttaattttacttctcttctttcttatcctattgtttttgcagaatcgtgtcgagaaaaccaaaggacttgtgggcagttagactctccattggaacatatcttttagatggtaaatatttcaaagctttagagcttgacgaaggagatagtgattgagaatttgagatcatgtctctaaaattgtataagcaacagaaaaatacgaattattattttaacattttgccattttaagttttggcgcaacaatcttattaatgaaccgaaattaccgaatcgaaaaccgttaatttggtttagtgatcaacccgaatccaaacgggtacaacgggtcgtaatgcgggtcaccaacgttcatcggcaactgatccactgtcttaaaccacgtccgagccaatttcccggtgaatccataatctccgaacaaaacatcagccactccttgaccttccgttcccggaagccacgccgccactagagcatcgatgttcgaaatctgcatcaccaccggacgtcccgatacaaccaccaccacacatttcaccgatgcgcacacgttcccgatcgtgctcggacctgg

SEQ ID NO: 4412 - DNA, 1487 bp, Arabidopsis thaliana
  unsure (1)..(1487): unsure at all n locations
atcgagctgtggagataccaactgactttgtagtcctggagatgggtgaagagcccaaggaccctttgattctagggagacctttcttagcaactgtaggagctatgattgatgtcaagaaagggaagattgatctaaaccttggcaaagactttaggatgacctttgatgtcaaggacgcgatgaagaagcctaccatagaagggcaactcttttggatcgaagaaatagatcagttagctgatgaattactggaagagctggcagaagaagatcatcttaacagtgctttaaccaaaagtggtgaagatgggtttctgcatttgtaaacattgggataccagaagctgttagactcccataaagcgatggaagaatcagaaccctttgaggaattgaatggaccagcaacggaggtaatggtaatgagcgaagaagggtcaacacgagttcaacctgcactctcgaggacatactcgaccagccactcgaccttgtctgccaacgaatctggggagccgatcattccaacttcaaatgactggtctgaactcaaggcaccgaaggttgatctcaaaccacttcctaaaggtctaaggtacgcattccttggtccaaactctacttaccatgtgatcattaatgctgagttaaatgatgatgaagtgaacctgctattatctgagcttagaaagtataggagagcaattggttattcattatccgacattaagggaatttcacctagtttatgcaaccataggatccaccttgaaaacgaatcctattctagcattgaaccacagaggaggttaaatcccaatttgaaagaagtagtgaaaaaagaaattttgaaacttcttgatgctggtgtcatctaccctatctctgatagtacttgggtttctccagtgcattgcgtccctaaaaagggtggaatgactgttgtcaaaaatgaaaaggatgaactgatccctactagaactgtaactggtcatagaatgtgcattgactataggaagctaaatgttgcatctaggaaagatcattttcctttaccattcattgatcaaatgcttgaacgcttagctaatcacccatactattgctttcttgatggatatagtggtttctttcaaataccaattcaccctaatgatcaagagaaaactactttcacatgtccttatggaacttttgcttataaaagaatgtcattcggtttatgcaatgctcctgcaacatttcagaggtgtatgacctctatattttcaaattaactcgaggagatggtggaggtcttcaaggacgattttttggtctatggcccctctttttcctcatgtttgttgagtcttggcaggttattgagcaggtgtgaggagacgaatcttgntctcaattggganaagtgtcatttcatggtgaaggaangcatagtgttgggcacaagatatcagaaaagggtatagaggtttgacaaggga

SEQ ID NO: 4413 - DNA, 1258 bp, Arabidopsis thaliana
ctcaaattccagttgatcagaaagcaatatgcattaagaacaactaatccagaagtgatctatcagtcaaactcaaccacctagcatactgagaactctaaactactctaacccatcctcagaaacctattcactactaagaaatcattttagagaacataaacgttgaacataatgaaaacatgataacaacagtgtaatagcaaaatgataacaggatgaacaacagtaaacgaaatcaaaaacaaaagctgaatactgaatagattaagagaaatccggattacaaaatgtcaagaacacagtgtctgcggaataaaacttagataaacgaaaatgtaaagtacatgctacttatagcgaaatatttccgaaaccctaatactcaaaacgacgcagtattgggacggattaaaaacggtacttgacccaggtggtcgagtgagtggtggagtgataagctggagtcttcttttcttccttgttctcgagtgtctggttgagtgcgcaatggagaagactctgaagctggccatcgagtatgtagtcgagtgatggtgatggtgatactcgacttcctcgacttcctggtagagtggtgtgatcgagtgatggtcaggtgtggaggtgatgatactcgaccaggtggtcaagtgaagtgatcaagtgactctcatggtggtactcggccaggtggtcgagtggtgaggtgaattgatgaagtcttcttctcgaccaaggggtcgagtggtctcttgagatcttgaagctcctactcgacctcggggtcgagtggtttgacatgatcaggtcctcttcttccagttagctcgtcaacagctccaaatcacctaaaatcaacacaaatatgcaacatgcatgcaaacctatcctaaacatgtaaagtgatgacaaatgatgagaaatggtataaaacagtgatgatatgatgttaaagtgatgacaaatggatgctcaaaacatgcaaaatacacacttatcaacgttcctaaactaatgaatgttaaacggattggtagatttcaaagcatctgtaggtcgagtataagagtgggattgaactataataaggcatggctaacgtttttgagtagaattcgatcatatcgcatcctagaactgccaacttggacattgatgttttggttctgaatacccaccttcaaacctctctttcagcttatttctacttgtttgcttgagggcaagcaaagactaagtttggaggagttgatat

SEQ ID NO: 4414 - DNA, 518 bp, Arabidopsis thaliana columbia
tgtaaaataaatggaaattcgatccaatacataccattaaaaggatgctgacccacaagagtgaagtaagcggatttcggctcaaagtcatgtttattcaataaagtcatatcactgatcgttttgcatagaataggccatgcatgttgtagtcaccaagagtcacggcacgagcattcgcaactattagacgtggaacattgttaccatgtgggccaacgactctgtttaccttgtatgccaccaatgttgtgttgtgggtgtcgtttgccaccaatgttgtgttgatagacaccaacggtcgtttgccaccaatgttgtgttgatagacaccaacggtgtgttgttcgacaacgagatttccagtttatctgtcttgtggttgctggtcaacaccaaaattgtctcaaggataagaacccgttgttatcaagttgttgtcctgctttatcgtagacactaccatcatcatccctcaaaaatcctttatcctatatacaaacaaaacctatatatcg

SEQ ID NO: 4415 - DNA, 593 bp, Arabidopsis thaliana columbia
cgcttcccaaggcttgcacatacacatgtctgcatcctcttcaaaacatttgtttgtgtctttgaagcggtatctctcgtcccaacattgatttgtatctctgtaatgaagtccctgaagtataatcaaggaaatagcttttcagaatttacatgtgtttggaaataatgtagcagctgatgaaggaaaatgatatgtgctggtactttgaaaatgatagtttctagatttggacaattctcgagtatattcgacaatgattcccatcctacatcctcgttagtctcgatagttaagtaagtcaggttgttgaaaagcggtattgttttgcagcagaaattaagtacctgcaacaaaagtcaaatcaactagatcatcactcaattgcaatcattaattcaatatacatgatggaactaaacatggttcgaaaataggcctcagtgactggtttgattcttgcaaattaccaaactgaaacaaaggaatctgaggtcgaggttgtttgccttggtttacttcagagcaataaaaatatgttgataaagatggtactgatgtgcaacatcaagtgtgtcgaatgataagtaaag

SEQ ID NO: 4416 - DNA, 552 bp, Arabidopsis thaliana columbia
gtcaaagatcacactgaagaaatctccttggaaggttccagacgttttcaacttcccattcggagagatcgtccctatgtttgctggagaaacccttcaatggcaaccgttgaaataatgtggtgatttgaagttgtcaaattttttctcccaaataagtgaactcgtgtaccttttggattgaattttcttacggctgagttatgccctgcattttttgaggaataaaagcaagatactgaccaataatgtttattttgtgtttgaatctgtctattttctctatattgaatctaaatgacagtataattctcaatcagtgtgggtctgattcctagtcctcccgacgaagatgttccattctcgtaaaggctaggcagaaatgctgttgggtgaagtgtagatggactcattggccaaggtatgcgttcctccatattcactgatccgcctagattcggttcttctgtagatgggtccatgtaagagactttcgcgttagtttcatcttcagttatcatgtctgtagatgtttgcattttccagcagaat

SEQ ID NO: 4417 - DNA, 592 bp, Arabidopsis thaliana columbia
cgaagaaatgctaagctggtaagagccttagcatcgttcttggttacttgtgaaatagataacttctgacacactttgaacaagtttggtcctattgtgattacaaaaatatctggtcttgatcaaaaagtaatgtaccctgtgtaggtaccgtgaacacgttgtgtggggtgacaaagacgtgaagacgaaactccttaggaagggtattctgactcgcatctattcaccaatggtaagaacatactctgcaattcattatacaaaattccaaacacaagtcctggaatgttgagttcttgcaagtcaattgtaaaatattatatacatttgtggtaaaatgcaggttgttatacaagcattgaaagaatctggtgtcttcagctcggttgtctcatcagcttctacaaatctgtcaaagaaaaagttcttatcatcaattcacaaaagcaactcatccaggtctactgcatctgagtcccttccatcaaaggaaagcaagtctgagggcatctctgcaaggcaccttcttgaggctgaatcagcgatcctcctttatcgcacctgggatggacaagctagatttttacag

SEQ ID NO: 4418 - DNA, 556 bp, Arabidopsis thaliana columbia
ttaaatgtctcttgatatgtttgtagatatatcgcgcccgcgaggatggttccgtggtattccgaaacgggaaagtggtttttgctgatgctatagttcattgcactggttacaagtatcatttcccgtttcttaaaaccagtggttatgtgactgtcgaggataaccgtgttggacctctctacaaacatgttttcccacccgcacttgcgcctgggatctcctttattggtttacctttcatggttagtattacgacatgttagatacatatggcagttttaagagattaagaatgttaggataatcttgaaatacatggttaatattaattggtatatatacatgaagtaaaaaaaaaaagagaattagaatgtgctattgaatctccaattcgcaaaaatcaaagatcaagttattatttcaaaatgcaaaactacttaatccggcaacattattgaattttatggtggtatatattttttttgatatgccttgatattgtaatgtctgaaatctccggatactcaaataacgactttgatttttgttgttg

SEQ ID NO: 4419 - DNA, 650 bp, Arabidopsis thaliana columbia
aggggttcaaaaagccgttgatatgagtacgcaacgatcttgtgagtcatagatcaaaaacggaccagacaggatcaacattggtgtttcatgtttgtataaaatgaaaaataaaagagatctttaattagtctctaacattgaaacatgaagaggccttttcagattgtattattagtaccaataccaaaggtttcaataaaggtcaaacaaacagagcaaaccgaatttgctctaaccacagaacccaaaagattataaaaagaagaaaaagaaagaaaggccccaaatcacaaactccggcagtgtcaaccggtacaattgcttaatacacactgtagagaaaagacaagcttggaacttccaaaaaacccaatcagaagcaacttcaagagttacggatcatcctttcaagggttccagaggagtgtagtctctgcaatcatggaagtaacaacgtaagggtccatgtttgaagctggcctcctatcctcaaagtatccgttccttctttctcggtgtcacgtctactcggatcgatgcccacggttcgcaacacctttttaaagaagattcaacacaaagatgagaaaatgttatcaacattttcaaatagacaatgttctaaactttcccaaagaaagtgtgat

SEQ ID NO: 4420 - DNA, 513 bp, Arabidopsis thaliana columbia
accgagtttcagacgctgatgtgacacgtgcacgaaatcaggtaaacgcccaactgttctttctctctttcccaagattcagctttaagctagttacaaatgtgatctgtttaaagttttttttttcttttcctcctgtttcttcgaactccttacttatttgtagatagattttaaatgccaactgattttaaatttctctgcagctgaaatcatcattgttacttcacatggatggaaccagcccaattgctgaagatattggtcgtcaggtatgcgatgaatcatttaagcatcttaatttagaacttataagtttataaatgcattggtcaaagataacaaaccttgactttccttatagttggtgtttatcttcaaaatcattctaataaaacgcctggatttttgttctaaatgcagctgctgacctatgggcgtagaatccaaccgctgaactctttgctaggatcgatgctgttgatccagcacggtaaacgtgttgcaacaaat

SEQ ID NO: 4421 - DNA, 606 bp, Arabidopsis thaliana columbia
acacaatattttcgatattcgcatttaacacacaatactatttttgtcttcacttagagaaggaaaaaaaagaaagaacaaatttagaaacttgagtatagggagagagttgtttacccagatggaggaggaaaagagaaagagacgcacattagataaataccattctgtctccgtcaaatcctccggtgacaatgcggtgcatgctcttgcttctgacgttgactctccggctaaaagtgtctcataaagctccctgagctgttggctcctctctaacgccgcctcttctgccgtcacctccgctggttgagttgtcttcctcgtctttattgcaccgttgtagtatccattcccccacaccaagaccctaaacaatgatactttcatataagtagttcaaaaatcttaataaattttgtaaaaccttcaaaaaaaaaaaaaattatttcaagatcgaattgtaacactacgacaagccaacaattagccgaattcatttaaacatatagtttacataatatatacggatatagatattatggttgtattgtgagagatgaatgaactatagagataagaaactaaccgttgttgaggacaaaa

SEQ ID NO: 4422 - DNA, 503 bp, Arabidopsis thaliana columbia
tcattcagccatctctcgctgtaccttctcggcaaagagcttcgaagcaaccatattatccataaaatactctctataaggatgattcttcgggacaagtctcctaaacttctcaaactgtttctccgcctcattctccttcttcaacactgtgtatataatcccttgacatagatacggcctgaaatctctcggctcttccttcacaagctcctcatacaacttcaatgcttcattatgcttcccttcaataacccgaatttgcgccactagtagcttaaaatctctcaagtccttacgattcttctccttcttgcacctaaccattgcctcctcaattctcttctccacagcattcaaatcatcaccagaatcagaataagccataactaaaccgtgataagcctcgacacgaagcggatctttgactagaatctcttcaaaaccagttttagcagactctaaatctccactgtaactaaagatattagctttcaacattg

SEQ ID NO: 4423 - DNA, 448 bp, Arabidopsis thaliana columbia
gggctgccgcagatggcgcgttttatggccttggtgtgcatacgatggaccagattatttctctgttcggtcgcccggatcacgtcgcttatgacatccgcagcctgcgtaataaagccaatcctgacgacacctttgaagcgcaactgttttatggcgacctgaaagccatcgtcaaaaccagccatctggtgaaaatcgattatccgaaatttatcgttcacggtaagaaaggttcgtttattaaatacggtatcgaccagcaggaaaccagcctgaaggctaatattatgccgggcgaaccgggattcgcagcggatgattcggtcggtgtgctggagtatgtcaatgacgaaggcgtgacggtcagagaagagatgaagccggagatgggcgattacgggcgcgtttatgatgcgttgtataaaccatcaccacggtgcgcaaa

SEQ ID NO: 4424 - DNA, 577 bp, Arabidopsis thaliana columbia
ccacaattgccttaaaaagattccaggtttgggctccattatcttcccttttgcttttagttagtctcctcgctttttcttaatcttctgacatcgatggtctaattaatgtgaaactatgtgcagggtgggagattcggtaaactgaacaaaagaattagttttcctgagacatttgatctaggcccttacatgagcggtggaggagaaggatcagatgtatacaaactctacgctgtgattgttcatctagatatgttgaatgcttcattttttggccattacatatgctatgtcaaggacttccgtggaaactggtatagaatagacgattctgaggtaagaatcatcttctgccaccgttttggttgactattatggatgttgacataaaccggatgtggttacgagaaaacaagaattttcagagatcttcttctgatcccgtctaaaaatactcgcaggtggaaaaggttgaactagaagatgtcctttctcaacgagcatacatgctcctctacagcaggtagagcctttcatttttcttgacaagaagaatatatatcctattgcagag

SEQ ID NO: 4425 - DNA, 482 bp, Arabidopsis thaliana columbia
atccccatgctcaacatgaaaatgatgctgataaaaagttaagcaagtacctcctcaggggtcagtggacacttcccgatagcccgtctttcgttgtaaataagccttttatctgcaaaattttctttacggtacttcctaagtatcttctgttcctcagggttaaatatgtcaaagcacctgcggaaaatagacaatgaaccactgttcccatgtgtgctgatgtatagaagatataaagacaaccaatttcttcgctgtcacttcaacaagaacaagattctagaaaaccagctttgatatatagattaattaaatagaaatgaccctatagctgatggttgaagaaagaaattgttgcaaaagagcatccccgcaaatgccaacatatccatttcaaaccgaagatggatcgacatgaagtggccatgtgaccggagttttatcacaatagattcactcagcttcatgatgtgtggctt

SEQ ID NO: 4426 - DNA, 438 bp, Arabidopsis thaliana columbia
aaaggtatagaaaataagaccaagtatttgtgaaaatctgatgcaatttcgactgagaaacttacgacaatacgtatagtgatagaaacagcatatatctgcaaaatggaggttaacccaaaaaattcaatataagcattcaatttaaactttatcaggtaatagccaatgaggcagaagcatttatgtaccgtgtaatttttcattctctggaaaattgcacggctagtcaagacagcactgatgataacactaagtccaggttctgttaagacaatatcagaagcaccccgagcagcatcagtggcatcatccacagcaattccaatatcagctttcttcaaggcaggtgcgtcattcactccatcaccagtcataccacatatgtgttttcgggattgtaatctcttcacaatctcatacttatgctctaaaaat

SEQ ID NO: 4427 - DNA, 530 bp, Arabidopsis thaliana
gattctttgaggtaaggaatcacattaaaccctttatctctgagtacaaaatatccaatctgattgatttcgttgacgaggcagagaaaacataacttcatgtagttgggaagttcttcaagacgattcacatcccatctgcatgatatatcgattcactgaagaaataagcaaatagatatagagtgaaatagtttgatattattttgcaaggtattaatagtaacttttcaactatggtcgtgaatagttggagctcctcaagtgtcccataaatatcgtatatatcgtcgatagttgtaatgagcatgaaaacctttgtaagcatttgtcggtgatatgcaaactcgggctcatacattactccaacactcgagaaataaccctccgttattcgatctctaacgaaatcgaggtgttttgttaatcccgtcttgctccaccaactgtctcatacatataaaaagatgaactatgtagacagaattacattttgaaattatctatagaaattttaagatataatgatt

SEQ ID NO: 4428 - DNA, 592 bp, Arabidopsis thaliana columbia
catgtttgaaaccaaagacaatgtcaaattctacctgtgacctataacaaatctcataatgattcccttctctgtctctaatcttttcaattcatcccctgcaaaaaggttgaacaaagcaaaacgctttttcaacacttttgtcacatatgctatggaaaaagaagagctggtttgtccttattgaacctttaggaagccaagttcctcttatggagtctcttcgttttctgctactgaaagcagtcatgattcccatcacaaagaacatccgaggccgaatcttcgattggtctgctactgtttttgcaacagctggagatccatctctaccatcagatcttgctgctcgagctgtagctagttctacctcaagagaagaaattgtcttgtctaatgtcctgtagataaaatgcataatcaatacatgtactgtgtactacaaagccatctttaatatcaaaacaaatggcacttcacttgataacatcatgagtatgcgaaactcgagatagaatgtctccttcctgaataaaagaagcatgccaaactcagattaactgcaataaattggaacgaatcaggtgatgta

SEQ ID NO: 4429 - DNA, 1019 bp, Arabidopsis thaliana
tccgcaattatggtttcttctgttggtttattgggttcaaatcaatcctgaattacctcatttaacactcctgtttaagtttaatctgttgcgatttcctttaattgttcaactttatgggaatttttgagtttattgagtaaagtgttgagcgttagctgagatatgtttgtggtgaatgtagatatggagatggtcctgatgggcgtgagatgtgacctaagcgtcaaagaatgattgatcaaggtcctccaggaccattctatggacctcatcctagttctggctttatgtataacccttatggatttgttgctcctcctccacctcctccttttcctgcggttcgactccgtggtttaccctttgattgcgcagagcttgaatgtagtagagttttttcatggtttggatgtggttgatgtcttgtttgttcacaggaacaataaggttactggagaagccttttgcgttttgggttatccccttcaggttgattttgctcttcagaagaatagacagaacatgggaaggagatatgtagaagtttttaggagtacaaaacaggagtactataaggctattgctaacgaggttgcggaatctcgtgtccatggtatggctagtggtggtggtggaggtttaggtggtggcaatggaagtggaggtggaggtggaggtggtggcggtggaggtcgaataagtggtggaagttcacctcgcagacacgtgcagagggctagatcgagtgatgatgggaaagaggatattgaacatacaggtatcttgagacttagaggattaccgttctcagcaggaaaggaagacatacttgacttcttcaaagatttcgagctgtctgaagactttgttcatgttactgttaatggtgaagggagcccactggggaagcttttgtggagtttaggaatgcagaagattcacgagctgcaatggttaaggataggaagacgcttggcagccgttacatagaattgtttccttcatcggttgaggag

SEQ ID NO: 4430 - DNA, 685 bp, Arabidopsis thaliana
tatacaaataataattttagtacatgctattttctgcaaaattactgttctcaattttgctaattatcacatcaatggtaaaatattttcactcatttcatattcacagctacactgtcttatgaaatcagatagaaacaaaaaaaaattctattccaaatcaaagtttattatgagaatcaatagaaaattaaagaatacagagaaccaacaaaaaatcttgagtacgaaaaaattatttgcagaagagacctcttttgtacaaaatcactactttggtcacaagacaaaacataaaaataggcactgagagaccagaatctgtgcatcatcaacatcatcatcatcatcatcatccatcatcagccacgcccagcgtttccatgccgttggtttctgaagtaactgagcaacgcctgtgcctgacaagttacaagattttctccaaataaagaactcttcaaaacaatcaaagtcatgagtgtggctacttaaattaagaggaacatgatatattagttataaagtttgtaccttttctctagctctaggagtaccagactgtgagagagcgacgagtggaggaacggcgccttcttgaagaaccatgttgcagaaccgaccactggttggttgaaagttgaagaagagttgctgctgggttttctttccctcgagctgaacc

SEQ ID NO: 4431 - DNA, 323 bp, Arabidopsis thaliana
gtgagttttgaaaactaactgctgttgaagttgtgtctaagaccaagtggtaaagttttcagttgcatacatacacattttaatgtttgataactaatgattgactatactcggttacatgtttaatgattcaggttcattctcggttctctaccaatacatttcccagctgggatcgtgctcagccgatgcgtcgttttgggcacaatggggagattaatacactcaggggaaacgtgaactggtatgttgtcagagatagcttacattagagctttcatgtcatttaagtaacctgtttggtgccttagcatttgtgcgat

SEQ ID NO: 4432 - DNA, 874 bp, Arabidopsis thaliana
cttaataaatttgcaaacagttcaatttaatatcccaaaacctcttataaatattctgcaaaacctaccaaactaagaacaccaagtacgacaaaaagcaaataatagaaaacaaagagcaatggtttcctcagtttccctatttgcttctcttacaccgtacttagtctcagcattacttctattccttctgctcgagcaactcttttaccgtctcaagaaacgtaacctccctggccctctctttgtctttccgataattggaaatgttgttgcacttattcgcgacccaacttccttctgggacaagcaatccgcgatggcggacacgtccgttggcctctccgtcaactaccttattggaaaattcatcatatacattaaagacgcagagctctccaataaagtcttctccaacattcgtcccgatgctttccaacttgttggacatccattcggaaagaagctcttcggtgatcatagccttatctttatgtttggcgagaatcacaaatccgttcgtcgtcaagtcgctcctaacttcacccgcaagccactctctgcttattcttccctccagcaaatagttatcctccgtcatttacggcagtgggaggaaagtttttctagtggatctcgtccggtttcgatgagacaactcatccgtgaactcaacctcgagacttcccaaacagtttttgttggaccatatctcgacaaagaagtcaagaaaacgatttgtgatgattacagtttgttaactcttggaacaatggcgatcccgatcgacctccctggcttcacgttcggggaggctcgtcaggcggtatcgaggctagtgaacacagcaacctttagagcacactggctcctc

SEQ ID NO: 4433 - DNA, 1423 bp, Arabidopsis thaliana
ggaattagtggttcagacatttcatcgaacaccttttgggcgcgaaaatgtctacgctcaaattccagttgatcagaaagcaataggcattaagaacaactaatccagaagggatctatcaatcaatactcaatcacctagcatactgagaattctacactactctaacccatcctcagaaacctattcactactcagacatcataacagaaagcataaacgttgaacaaattgaaaacatgataacaacaatgtaacagcaggatgataacagaatgaacaacagtaaacgaaatcaagtacaaaaactgaatactgaatagataaagagaaatccggattacaaaaagtctagaacacaaggtctgcggaaataaaactaggtaagaaacttcttcctgcgaaaatgagaagtacatgctacttatagccaaatatcccgaaaccctaatactcaaaacgacgaagtatttggacgggttaagaactgtactcgaccaacgtggtcgagtgagagctcgagtgaatagctggaatcttcttttcttccttgtgctcgagtgtctggttgagtgcggaatgaagaaggctctgaagcttgtcatcgagtatgcagtcgagtggtgtgatggagttactcgacctctaggtagagtgaggaggtcgagtgaagtgatcgagtgaccgtctggtgatggagatgatggcactcgacctcggggtcgagtggtgaggtgaagtggtgatgtgctctactcgacctggttgtcgagtggtctcttgagatcttgaagctcctactcgacctcttggtcgagtggtttgtcatgatcaggtctacttcttccagatagctcgtcaacagctccaaatcacctgaaatcaacgcaaatatgcaacatgcatgcaaaactatcctaaacatgcaaagtgatgacaaatgatgtgaaatggtataaaacagtgatgatatgatgctaaagtgatgacaaatggatgctcaaaacatgcaaaatacacacttatcaatattcttcaagtcttcaacctcgttttgcagttcttcaagtctcgagtctctagcctgaacgaaaaccacctttaccccatggatcgctaggacagggatacatcaggagtcttgattttgaccaatgaaggggactttacagacgagatgattcaccctcgtaatgagattgacaaggtttatgtcgcgcgtgttaaaggagaggccaataaggacaatctacgcccctagacaagaggacaagagattgaaggtaagaaaaccaagccagcagtttatgaaaactcaaagaggacacagtcaaaaatagcacagaggtgcagttgaccatccatgaagggcgtaaccatcaggttaaaaagatgtttgaaacagtaggacacaagtagataa

SEQ ID NO: 4434 - DNA, 644 bp, Arabidopsis thaliana
gtaacgtccgccagtgtgctgtaaagtgctgagtattcgctttccggcagcggttccacgcgtttgtctgaaacccgcaacagcagcggcaaacggaaatggctacccgagaaggcaatcatgtttttctgctggtcgatggtgaactctttcatctctttagggaatttccacaggcggatgatatctggcttccacgccaatgttttctctttgatattgaggaagatttccgacatcgactgcccggataaactgctacgaccaagtccgagatagttatcgccaccgagaatgtccagcaccgtcgcgccgttatccatcgtgttacgcttcactgccagcgtctcttgctgcggcttgtcgccacgaatgacaaaaaacaggttattgcgatcctgcttattgaggtatttcacgccgtgttgttcatcgctaaatggtcagaagagacgacgatgacggtatctttaaaccacggtgacgctttgattttgttgataaacgtcgcgatgttctcctggctgcaacttaccgcgctgaatgactgattcggtttacgtcaaaatcatattttttgcggttacaggtacgagagataaaccatccgggtgatgggtacgactgtcagggtaacagtgaga

SEQ ID NO: 4435 - DNA, 1151 bp, Arabidopsis thaliana
cgactctatccccaaaccgacaaagggctgaatctcagcctttgggaccagaacagctcccttcttggtaagaatctctcttctttgttctcaacgtctcttaaactctgtcgctttcatgtttttttcctaattcctcttctctatttctttctctcacagttcctacgtcctccatggcttcaagtggtgtgttacctcgtttcttcagtgttttcctttcccagtacagctcctcctgttaggggtcaaaagcccaaaataagttccaaaccaaggagtattaaggcgaagggtagtttcgtcaaatccctcgatgaatgccctacacgcgcagaaggctataaatacggaatagcatgtcttgtcaaagggggaggccgcgagacacttagagacaaagagcagctcgtcagctcacccgtctgaagtatctcgccagccggcccgtctaaagcagctcgtcagctcacccgtctgaagcatctcgtcagccggtccgtctcaagtagctcatcagctcacccgtctcaagcagctcgtcagctcacccatccgaagtatctcgccagccggcccgtctcaagtagcttataagctcgcccgtctcaagcagctcgtcagctcacccgtccgaagtacctcgtttgcccatccatcttgagtagctcgtttactcgtccgtccgaagtgtctcgccgacttgcccgcccaaagtaactaacctactcgcacgtctcgagaagccattcaactcgtcacttatccgccggatcatccctaaaactgcctaactcgacatacgaccttcctccagtaatggcctagctcgtttatcgcgatatgaactacgtgtggcttgatccctttctaagggtacgtaggcagccttttgcagtttatcttttattggacttgatatgttggatactagtttttttgccgaaacaatttcttaaattttttccatacgagtttcttgtttaatggtgctcaagtcaaacctccagcaccaacctgtagtaaatgcagttatcgatggagatgatatcatttacagagactacgtggatatcagtatcgctgttggtaccctccactctagttattctaaacctttcagataactacaacttccatcatattaagat

SEQ ID NO: 4436 - DNA, 1610 bp, Arabidopsis thaliana
aagtctgcgcctctgcctccattctctgagtgatcaattggtcgagtagttgcttcttcctctcctattattatgctcagatgtctggttgagtagggaatgaggaggatcagaagacgctttgaatgatcaacaagtcttgtagagtgggttgcccttgatcgagtaaactggtcgagtagagtctgctgccttctctgtaactgcctggatcgagtaaactggtcgagtagatctgctgcctcctctatagctgcctggatcgagtaaactggtcgagtagaatctaatgcctcctctgtagctgtctggatcgagtaaactggtcgagcagaatgctctgctgctgctggtttgatagagtagagggtcgagtagattccttgtaagctccttctgcaccttaaaacacaccaaaacatgcaatatgtatgcaagatgatcctaaatgcctaagtgtgcaaaataagctaaatgtggtgcaaaatgatatgaaacaatgagtgaacactaagctaaatgatgataaatacatgagtaaaatgagtaaaatacagtgttatcatttatcttcctagaccaatattttctcatggtcaactatatgttgccttatcaagagtcacttctaaaagaggtttgaaagttcttattgtggacaaaaaaggaaaacctcagagtcaaacaatgaatgtggttttcaaagagatctttcagaacctaaggagttaggatcgttttagcttcattccttctgttgttgttaagatgattctagtgttgtttaaaacaacaatgttctctattttcattttacaataatttgtttcttacatattttaatattctttcaataatagttcagaatgcaatataatagttgaattagttaggtttctagttaggtttcttatcatattcattgtaatactttagaatccaacagctaaagtcaattagtgtaagtaagcaaattttatttctagacaaatccttaaccattaacgacagaaagaagaacgcttagttccattacaactaagatatagagaaacaacaactttaaattgtgtctacaatggaacttagatatgtgaaactaaccttattgatatagtaaatcatttgtgtgtcgtccattagcgaaatgtaactctactgggttcaatcattatctcttctcttcagatctcttgtaccagattcagaacagaaaccaattcatcaactcaattgttttatacaactcatatatgaaatcataaaaaaacaatttctcacaaaattgactttaggagattatgtgtaataattacagatgctaaatcaaaacttattgaatcagttcattggtttaactctgtcctagaagagtagaaacaaataagaaacataccaagaatgaatcttctagcacgacaaaatcaagatattggtccagagtttcaaggtcgtcaggtgcaaaatctcgctaaagcgattgaagataaccagtctacatcaaacaagtaaattgaataggactaaaccacagagatttagagagaacaactcatagaaatgccaatttggttttacccaataacgttggcaaatttgtcagaaattag

SEQ ID NO: 4437 - DNA, 1137 bp, Arabidopsis thaliana
  unsure (1)..(1137): unsure at all n locations
attgatgaggcatggctaacgtttttaagtagaattcgatcttgcagcttagaactttcaacttggacattgatttcatctggtctatctggtgttttggctctgagtccccgcttccaaacctcacttccagcttgttcttgattgtttgcttgagggcaagcaaagactaagtttgggggagttgataagtgtgtattttgcatgttttgagcatccatttgtcatcattttagcatcatatcatcactgttttataccatttcacatcatttgtcatcactttgcatgtttaggatagttttgcatgcatgttgcatatttgcgttgatttcaggtgatttggagctgttgacgagctatctggaagaagcggacctgatcatgacaaaccactcgaccaagaggtcgagtaggagcttcaagatctcaagagaccactcgacccccaggtcgagcagaggacatcaccacttcacttcaccactcgaccacgaggtcgagtgccctcatctccatcaccagaccatcactcgatcacttcactcgaccatgaggtcgagtgccttcaccttcactgccagaccactactcgacctcgtcactcaacctagaggtcgagtatcgccatcacaacacttgactgcatactcgatgacaagcttcagagccttcttcattccgcactcaaccagacactcgagcacaaggaagaaaagaagactccagctattcactcgacctctcactcgaccacctgggtcgagtacagttcttaacccgtccaaatacttcgtcgttttgagtattagggtttcgggatattttgctataagtagcatgtacttctcattttcgcagacaagaagttttttacctagttttatttccgcagaccttgtgttctagactttttgtaatccggatttctcttcagtattcagcttttgttcttgattttgtttactgttgttcattctgttatcatcctgctgttacactgttgttagcatgttttcaacttgttcaatgtttatgccttctgttatgatgtttgaggagtgaataggtttctgaggatgggttagagtagtgtagaattctcagtatgctagatgattgagntatgattgatag

SEQ ID NO: 4438 - DNA, 779 bp, Arabidopsis thaliana
atctaaatgaaaattacatgacttttctaaagattttaaaactcgcaaaaatggagtgacaaataaacagatttgaaaaatggtttcatgtacctatataaaaccaataatcaataagttggtttctattaaatttttataatttgcaaaacatggagtgataaatgaataaatttgaaaaatggttccatatcttcgacgtatatacgaccaataatcaacaatttggccagatcttcaaaatcttacaaaaaccgtctacttaatctataattcatgcaaacaaaaggtatggttgtccattaattattgtccaaatgttatagtccaaacgttacagtccatgtgttcatcttctttccaatagatgacctcaagtactgaatttcaaacaaatggggcaaatagttcttgaactttatcacagaattatgaaaaagatctccaaacacttgtaagctttttgtatcaaaactaaagagataaatgtatcccaatcaaacaatatatgtgaattctgtttgattgtcacctccccgagaaacatagcagacaataaaactgagttctaaaacaacaagccaagttctaaaatctttgtcaattttccactgttatcaccttcctcagcactttaaggaactgcagtagcggcggttgtgaaacgattcgtgtctaaggagtgagagattgacgaaggaacaccggaccaagcacggagaggtgaatcagatgaagtgagacgcaaagatcgacgagataaagaaggagtagagaca

SEQ ID NO: 4439 - DNA, 589 bp, Arabidopsis thaliana
agctgtgcaagaaggccacacatcatagacctacccctgactaagtataacgataccaatgtcgggcgtatcccatactgctgcagaaatggaactattctgccacggtccatggatccagagaagtctaaatcggtttttcaaatagaagtttacaaaatgcctcctgatctcaacatctcctctataacacctccccagagctggcagattaaaggtaaccttaacccggattacaaatgtggccctcctcttcgtgtcagctcaagccagttccctgatacaagcggtttgccttcaaacaagagtgcatttgctagctggcaagtcgtctgcaacatcactcaaccaactcctcctaaatgctgcgtctcattctcttcttatttcaatgactcagtaatcccgtgtaagacctgcgcttgtggaggttgctctagcgacagagtggcgcgtacttgcagcacaacttctccagctcttcctcttccatatcaggctcttctaattccatttgacaacgaaccaaacttaccaacgcttgggcagtgttaaaaaccggaaagtccggacccattacttgtggaga

SEQ ID NO: 4440 - DNA, 825 bp, Arabidopsis thaliana columbia
ctagtctaaaataatacaaagaattcgcaaaggtctcatgtctaacgataaaaatctagattagaatatctaactagaataattagaggtgtcagacgggccggcccgcgcccatctagcccgccccgcagtgggctttcttttttgggccgcggcgggttggcccgtttaggaccacggataaaattatcagtgtccaagcccggcccgcaaagccaagcggatatacgggtcggcccgcgggcatttctctgctacgcatcaaggattcttgagctgtggcattgtctgtacaaggcaatatctcgtccagagccgtattgcttgatggtctctcaacccattcgctcattgccacacatgtgtctgcagtacaaatcgaagaaactgtaggagaagaaatgataacaagatcactaaagtcaatacattagttgatagttgagaaacatgtagtcaaagatgaaaacattaccgagaccaagaaaagtcaccacaagcatgacgattgaaactacgataagcgccactctcctgcgagtatagaaatgactattatacatttgtttttcaaaatccaaagattctacaatcaatctaaagatagttttgaataagaatgtatgggttacgcaaattacatgggttacgagaattacatgggttacgcagcggagtttgttacacagaatccaggaaatgtcttatgtgattggagttactagtcgatttctcagtgatagtagctacagaaaaatccagtttcgctccgatctgatcaatttcagtttgtacatttgcaggtaaaagaacctgagaagggtt

SEQ ID NO: 4441 - DNA, 1487 bp, Arabidopsis thaliana
gattcaagaccaaaattcattagatctttgacttcactatcaaaagctttgagaatcaagaagtggcttggttagcggatttatagccaaatatgacaagatgctttgtgtatcgttgagcataagaactagaaccgcaaccggcttccagaagctaaagtaggattttggttataaagtttggggactatggttttgggtttaggtttaagggtttaggggtaagagtctagggtttagggttttaggttttgggtttaggttttagggttttggatttttagtttagggtgtaggatttatgtttagggtttaaggttttaggtttagtgttgaggagcaaatatactttaaaaagtaagcacaatctttgtaagcgttttggaatcaaatatctcaagatgataggtggatgattgagttttagggctaaaactataacaatatggagctttaggttgcgagaatgggactcttgattaagagggttgagagtgagaaatgaacataaggaagagatagtattgcggaaatagaagagagattgtgagaaaagagattttctctatttcttgattaaaaacatacatacgatacaagctatatatggacattaggtaagtaaagatctcctaagaatatgctaaacacgtcgcactctatacaagaccacatcgtgtagacaaatcactatcgtactaaagaaagagacatgacctaacgtttggtttgctttaaacacatgtgatcttcttttgacgtgggcgcttaagcttcaacggctacatgaggagtcttctaggtcttctagaagagcttaaggtgaagaagagtttatgtgggcttctctcattgtgatgttgtacggatgggcttctcttcgtccgtacggtcgtctaggttaacttgcggaaggggtttccttcattaggttcaataataggatgagcatgtgcatattcttttggattctaaattgattttcctggaagttggcttgactgtttctgagcggaagtagatgcaaaaactccctccaggtatgtgactttggaattcagtgtctccaccttgacatttagatcattgtagctacagtccaccttccatggagccagatgcttgtccttggagtagatgttgtagcatttgtttcatatcagcgttgggagcagcaggacctttgtgttgctgaggtgcaaacccaggtggtgtttgctgctggtagttcccccgaaattgctgcattggatcgaaaccttggttgtagggaacaaaaggtttgtactgaccttgttgttgatgatgtggaggatacacctgaatctgtagattagcaacattggtgctgcggtaggagaggtttgggttattagtcttgaagttgttgtccctttgtagcaccttgattgttgatgtatttaacttcttctaactggtcccctccccatcttggacttgatactgctcgtcatcaacaaggaagt

SEQ ID NO: 4442 - DNA, 1704 bp, Arabidopsis thaliana
taaaagtggattatgattttgattttgctcctaatttttatctgtttcagtaacaactacagctactaaattcatctgttaaataagttggtgaaagagacaaagcgttaccgacgagagtgatgaagaaaattaaatgtttaatataaatgggcctataatgttggtcttaaagcccatacaacgaattctgggctttagccggataataagcatacgaaaaatttgcacaattttatgagtcttttgcttgctcatgtagaacagtgaagtccatggaaccatgaatgatgatgaacgtaaacaagccacaattctataattcagattgtttgtttgcgtttagatttgtttcgaacgcatcaattgtgattgagacaatcgaagtatgatagtttcgctatcttatgcaatgccattgccaggccaaagctcgtcatgtgtatcttctgatcaactactttctcgcttatagaacaatttcaagctaaaccattcacacttctccccagtcacttatttatcattggtagttgaagcaacctaagatctttaatcaaaacatcttagtgactcgcttctacgttcggaaaatctacactacaactgcaacacatgtacgctaaaaatgagcaattgatactctcaccaaatctaattcaaagaacagttcatgtcaagaaactgtcaaacagaaccacaaaaggatgtatatggcataaacgtttcgagatttccaatagtaagagatcttagaacatcatcttcaattacttaaaccacatcaataacaacttcctctaaagttatcaaaaacctttacaatgtctcagctatttcaccacaaacacttataagatatcacattaagctactcagtaatggcaccggaaagttcaacaatctatcaatattcgaaagcaaggaatcaaaagataacgagaagcgaaaacagagtatagattaagaaacaggcgtacgaaatcaatccacggtgctcttctcctccatcagcaagagacaccaccagattagaacaagctctagtagcccacaacacgaaagccgcaccgagcacaaaccgaacgggaccagcaccttgtggcacaaacaaggacaccgcggacaaaatcacaacgggaagcagagagtaaccaactaaactcgtacaagtatgaagattaagattcccatttctaccagcaagcatattgaagacaatgtacaagaagatagaagaaacaacaacccaaccaagtataacaccaaactgtatcttcccagcgagcaattgaaataagcaaagcgcaaggtataagaagatcggaccagagagatctgaatctttgtgaacagtctgattgattcgaaaaggattgagaatcgatctagttttcttccagatttgatctggatggataccgagttcgtcgagtaaaggctcctcatcctcaaacgaagcagagactcctctaccgaaagatgcagatgaagcgattgttccgtcgaatggtcccgccggcattgaaacggcggcggatccgatttcaaatggaatgaaagggattgaagatgaagcggaggattgacgtggtggttggtaaggagctgtgggaactcggcgttgctgaacatttgcggtggccggagatgatccactggtggggaaaactaaccggtggaattggaaaatccttcgtcatc

SEQ ID NO: 4443 - DNA, 488 bp, Arabidopsis thaliana columbia
tagcataccactatggacaaaatacgcttcgcaaacatgtctcggtttcaacaggatcctgcaaatatgagcaaccacaaatcagaaaccattaccaccgcgttgtttagccactgttttaacgtttaacatactgcatacctcaacggagcatgaaacaaacatgctgccaacaacgttagatgaggccgggtctaacaggtcaaatgacttgcaagtagagtcaggttcctatatcacattatacaaaagagaagtaaaataaacatgtaaacaaacaagtttctcgtcgattaatcattcaagatatctaatccatgcacctactattatcagctaaactgtggctgaatctcctcaaacaatggaagataagtgatagaaaaaactagctgatacttattagtcgagctagaggaataacggataaacaacttaaacagctttcatatgaaaaaacaaactttagttactgacctgtactacga

SEQ ID NO: 4444 - DNA, 584 bp, Arabidopsis thaliana columbia
tgtcaaatatattgaacataatcaatctcacaacaaggcttcatagaaaaatactctttaaagtacctgatgagtgtgttcactttcttggtctggatgtcatacatcttcttaacagcatccttaatcttcttcttgtcagcacgaatgtcaacaatgaaaacaagagtgttgttgtcttcaatcttcttcatcgcagattcagtggtgagtgggtacttaaggatttggtagtgatccaacttgttccttggagtagcgctgatttttgggtacttaccagttctaggcttggtaagagtctttggcctgtggaaggtgaccttggtcctaatctttttgtccttcttcttgaaggcttgaccagacttcacagcctttgccgccttcaaggccttggctgtaggatcagccttcttggtagtatcaactgcaaattacatacaacagagagtttaagcatcatataatactttgatacaaatctgacttcaatacatgaatactcagaaacacgtctacagacaaaattcatttggatactacattaatctcacttagttgaagctaatcaggaagatatt

SEQ ID NO: 4445 - DNA, 465 bp, Arabidopsis thaliana
  unsure (1)..(465): unsure at all n locations
nnnnnnnnnnnnnnnnnnnnnnnnnnctaaaggatattttgatatcttctcatacgatactgccatccctggtcagagtgcagaacaggatgctcgtgaggattaagctttttgaatgcctgatcgagcatattctcaaccatgttcatcactggtctttccgaaaggctgtaagaaataacttcgttgttgaagagatctattactggagacaaatacagcttgcgcccattgactgcaaattcagtaacatcggtaacccacttctcgtttggccgcgtagcgttgaaatctctttggagaacattaggggcggtttgccctacctctcctctgtaagagcggtatcgcttgaccttaatcgctgctttaagtgagagggttccatcaggcgctgaacagctttatggttaatctgtttcccttctcgatgaagagacagcgttaccctacggtatccgtatc

SEQ ID NO: 4446 - DNA, 546 bp, Arabidopsis thaliana columbia
agttcaagcgatgatcaccattgtcctgaaaccaaatccctgacgccaactcaatcaacaaaggtagaagataagggtcattcggttcctgatgcttcaaatgcagaaactgcagaatcatcaaacacgtcagttcagaagataaatcctgtttcagtgggagatgctatgtggcctgttagctgtttctctgtggcacctaccttggacacatataagacagaagtggtccctacggttaggcttcctaggccaagaagtccgcttgtcgatgctgttgcagctcatgacagacgcaaggtacaaaatttcatcttgtctgcaataccatgcctttgctaagattatgtctctaatcacttgttctgatgatttgccagatgaagaaagtctctgagatggtccatccaccaatcaaatcaaagcaagatgacaaagattcgttgcttgcacaaatacgaaacaaggtagcacatgttgatcatgtaaaatcccagatggtcctgtgaacagaattttgtatttggaattttatgagttgtgttt

SEQ ID NO: 4447 - DNA, 572 bp, Arabidopsis thaliana columbia
caatgaggagaaatcgatccattgctcaatgtgagcctgaaaagtaaacacatgcacatagacatgaatcaatgatagtaaacaagagataaacacaaaggtacgataattttaaaaggaaaggccattggataaacaggagcttacgtattcaataagggaggatccattcaaagagttgtcaccattcatacggctcactgaagggggataacaaaacaatcatcatatcccattaataccaagttatagataggtgcatcaaagagaaacagaaggcaatgacgttataccatatcgggcaatggcattgctctcaaatatgggaccttcaggagtctcaagcacaggaacctagtgggatcataatctcttattagctaggaatttacagcagacatcaatcaaaacttctcgaaagagattccatacctttccaatagggttcatcttaaggaactcaggtgacttgttagtgctcccatctgagagtctgcggactcctcgatcttcacacccgcatactctgcagcaataagtgcttattggccctttgtatccttgtatgtgtg

SEQ ID NO: 4448 - DNA, 590 bp, Arabidopsis thaliana columbia
gttatatgttgccaacacactttccactgttgaatggatgtgtatccctaagtctctgctgccccgtgatcccgtgatgtcaagtagtttacccagcagtgaccatctatcaaaccagaaatgatgtggatgctccactataggcttctactttattcagtgaagccgctggctctctgtattttattgatgtggaaaactcaccttattcgcctcagatatcgatgttaaccccaaacctccctcttcttttatgagctttatgatatgtgagatcgtaaactcttccacttctctagcggttaatggaataaacatatcaatatatgcattaccgtagtatcatcgtccaaaggtgatccacaacgttgaggattttcctactgataaacccaaaacagtgagtgaccccagctcgatccaaatgggaattcaggaccctcatcgtcaccaccaattataatcaagacataaaccaaaccatctgtgaaacagatgataatctctagcatcatcaagtgtgttagggtcatgaatctctctgcacctcacttgttcttgtttcactgctaggctttgtggcaaaaaaa

SEQ ID NO: 4449 - DNA, 360 bp, Arabidopsis thaliana
tgttttgagaaaaacaaaaagaaatatcatctcatcttatttttcatttttttcaagaatttaaagtagcaataccatttctcttacagaagggtctcttgctttattggtatattctcatgagtacatgttttaaggaaatatcaggaactagtgtttgtctcagagcttggaaggaggtttgtaccatccccatggttcatcagagatatactgagtcacctgcttcacactcaagtagttctcaagtcccctgcgacgaagaaaatatgtttcaattcaaattttgttggtaatctattacggtttaagttactatggacacaattccatctagttggagagtgtctttttctaatg

SEQ ID NO: 4450 - DNA, 660 bp, Arabidopsis thaliana
  unsure (1)..(660): unsure at all n locations
catatcactctgtgccaaagagtctcgccctctacaccacataggaggattcaaaaaaattacagctatgctcctttatgccctcctttatgccctgctgggtctcaatcctttcaccaaaatcatcaatcaagaaatttattgtattaatcgatttacgcatgtcagccatcttatgaaagtaagcagtattattatcaccctcatataaccaagagatacttgacttctggcagaaaaaactctcctcagccttagcaagaatttgccattttctggtggcctccaactcaagtgtagcatgaacaacagaagggttggtaagagtaatcctttgacggtggagcacaatagcatgggcctcagagacccttttctcaatatcagagtagttctctctactaaaacaacaaatagggagcttaaggtgcttaagctttttggagaccctgtacatcgcagaaccagagacattgcaagagtaccaattctcacgaatcagctgcaagaaatccgggttatgtaagaaatagttgaagaaccgaaaaggtcgctttgctttcaagaccgctggatctaacaccacctcacaagagctgtggtcagagaaatctggctcaccgaagttcgcgtacggacntgggaagagagtgtccaatg

SEQ ID NO: 4451 - DNA, 715 bp, Arabidopsis thaliana
caacaagtctcacatgtgctctaacttcagcctaatgagcatagcttcaagcataacgtagacaaggacatcaaaccaacaaccacacttgaaactcataacaattgagacttgactattacttacagccatatatattcttaaattctcaccttgatcttcgaccaagctccttgtagagaaggaaaccagagaactcagcagtacaagaccgctcaaggaactcaacgaagatctgtcggagaggtccttgcaatttgtctgcagcttctttaaactccttgttcctcacgaaatgtgtctggttgtaatcggtcttgaactcttgaagcagagcctcgaactctgcttcgttaaggttcttgttgatctccgtgttgaaaagctgttccatttcctcgaagtccgtcgtgtagaacctcggagtaagaagcgactcttgaatctctttcttcgttcccttcttggacttcgaggtggcggtggttggaggaggcggtgaggaagaggctgacattctgatcacggtggagaaacgtcggccggagaggaatttgctcgggtttgagagctttggggaagagaacttggagatgggttcactaacgccatttcagccgccattgactgtgagttgcagaagcaaagagtgagatagagagcaaaagcagctagaggaagaagatgaggctgtgtggtgatttatatttgtgaa

SEQ ID NO: 4452 - DNA, 591 bp, Arabidopsis thaliana
tgacctttcaagctcttccttgattttgagatcataagtaggctctgggggttgcactgcagatagagatgatgtttccacaattggatcaggatgaggaggtccgatcgaaagttttgggggacgcttcacaaagaaacaaattagtatcatcaaaaacattgaacagacagaaaaagatgatctcaagatgaggcactcacataatccataaacgtttctccagccgttccaccttcatcttcttctctctccacttcaatagcttcctcattgacttcttcgggaggaggcggaggcgggactgtgggagcagcaggagtaggaggattagaatgagattgagaagcagttaaagaccgattaagcttggagacatcaacagcgagctcgacatggcactgaggacacgagaaccgagtgagtccatgaggcacattgaggatagcctgacagttagcgcaaggcaattgcatcttcgtcggatcgattccatgtgccggaaccggaggcctaggtagattaagaggcttaagctgctgttgaatcggtggcggaacagtctgaattggctgtggtggttgttgtgga

SEQ ID NO: 4453 - DNA, 317 bp, Arabidopsis thaliana
tctaaagcgtcgtcaatctcctgataatcttttacaggtttcaggcgatggtagtgttttgccatcagtgcgacaaatgcttcgggggcattttcgctgacatatgcactttgcagaccgcaggcgacaaaattgagttgcttatctgttagcaactcgccaataacaatccgcgattcatgtcgggtcagttcgccgtggaacaactgcttgccatgttcgtaaaccagtgcgccgttttccgcgataaaagagatctcatcctttagctcaggaaagaatgctataagctggtaatactgattaccgctggcaac

SEQ ID NO: 4454 - DNA, 1145 bp, Arabidopsis thaliana
tgattttcgcactaccagaccttacattggtcgattattgttatgtggtgttcaagaacattcagcgcaaactttgttaccaactttagtccatgacatcacaacctgcaagcaatgaatatctcttactaatgcaacatatcctcccatatataatcccatgccatggatggtagctgaactgcatacatcgaacgcatctgatggtaacccaagactcgaaaccaacttctgtatttcataataactctcagccgatatattatccggtggcaaatattccttaattaattctgcccatgaatccatgcaattttcactttagttattatcagctttaatagtcatcatcctagatgccaaagataacttagaaagtccttgtctacatccctcgtagattggttgatttgcagcatctaacatatcgtaaaagtgttgtgcatctacgttgagttcttcactaatattttcaggaaatgcagcaatagttttatgaaatgcattcgtaaccatatcatgaaatctattttcctggttatgcccataaacaattttatcaggtacttgctgaccataattcgcatcattattaaaattactaggttgctcgacatcataatttgtattactagttcctgtgctatctctacaatcctcttcatgacgtaaccatacatagtagttttgcataaatcctctattataaagatgcttcttcactacattaaattccaaatatttcccattgagacacttacgacatggacagaatattgtaccgttctcacgagcaaattttttttgtttgtaagtaaatgttgtgatttgacttatgattcttacatattacgttggttatttatagatgccaaaaaaaaactattgcaagggaattgcaaggcagcttgcgagggatttgctagaaactgatctttatttgcgagggaagcccacctaccaaccagatcagtaagattatttaaaacgtgctcacctaacccgtatagactcgcaattctgtcgcaaatattgttacagaataacaatgcgtcgcaagtgcatcgcaatatgcgaggaatttgcattacctgcaactccctcgcaaatttgcgacgcttttgcgaggaatcctgctttccatg

SEQ ID NO: 4455 - DNA, 1393 bp, Arabidopsis thaliana
cagcacctgtaccaaagttgtcatctggacactctgatggcttatccgtatgtagcatatgaagaagagacaattaaattcctctctacgctgcaagtggagctttatcaaggtatgacttctgatgagttggattgtgaaggattgggattcttgagattctttgtgtatggtcatgggtataggttatcaatcaagcgcttggaaggattgtttggtttccccagtggaacgagaactaagcccaagtatgatagagaagagttgaaagatttatggatcaccattggcagctctgcaccgctgaactcttctaggtcaaagagcaatcagatacgtagccctgtcatcaggtacttccagcgttctatagccaatgtactctactcacgagagatcacagtgactgttactaattctgatatggagatgatcgctatggctctcaagggaactcttcgccaaactaagaacgtcatgtctctccaaggtgaaatcaatgacacacctctctctgtacttcttctgatccatctgtgtgcatacaagaactaggttgtcagcaataaccacaagagagcacgaggcgctctgtgtataagtggtgttgtgacaccgattctgatagcttgcggagtcacaatcacatctgatggactcgagacacgggcaatggatatcgagcatctacgtcactgcaaattcctggagttcgcaatggttggcgacttgcaccggttcaggtttgagcactctacaaataagagagctagcatacttctccctagccctgaggttacacggataatagagggagataacattgattttcggcctgagattggacgcctctactgtgagaacgctccgccattggatgaggatgatcttatagaagaagctgctgaggatgggatggatgaagacagagcagtagaattcgacactagcatgtatcactttggtgaacatgtacctccagcgagggagcgcaagagcttgagtgaagctcataggaacaacagtaatctgcagaagtggtgcaagaagcaggacaagctactcgccaagtgcttaaagactatcaagtttcggacagataagctgagctgttcctcctccactacaactattccacaaggacagcctcctctagagatgccatcgaggagattggatgagcctatattttaattaaaactgaaccatgcctagattgctctactctaccacactgtcatgatctgataccattccctatcaatttgaacctgaatttgatctttaattatcatgtcagcatcaaatttgaactcatggttaccctaaaatacttggattttcttattcattttgatcactcttgttaatccacgtagctgactctccttat

SEQ ID NO: 4456 - DNA, 840 bp, Arabidopsis thaliana
caaaagtgaagtccaaagggtagaagaatagaataacatactttttgccaatgtactcagagagcttcacctgaaaccatgattcataggtcgattactatcagaacattgctctactgcattgaccttagcttatgacacttaactaactaacatgttaaataaggtttgaatggaatgaaagtacctttatgaactcttgatcaaaaactgcctcagcttcaaaatcaggcgccttattaccgaccagtggtaaatcatcctgcattcataaaacatataaacactagtcagtcatcgatcatcgaattgtttaaccacacaaaatgttctttaactggtgttcactatctatgcagggctcaaaagatttctgtgtatgagccaaatgtgaatcatattaattaatttcagatcatttcctcccatccctaattaaacccgaaagaagggtaacaaaaatgtcgctcaattcaaatcgcagaactctaaaaagtttaaagtttagtcttttatccaatgatctcaaaacccttaagagataagaagcaggaaaatagtacggatcccattataacaagctaacgaattcatacaacaatcatagtgaatgagaagatggagcaaatacaagaaatttatggcattgcgagtcaacttacagcctgagccttgacggcgaagttccggcgtgaggcggacgcgttggtggtgagggaacgagactggagaacccggacagagagaagaggatgatgctgaggaagagggtatgatctggggaaagagacggtggagataaaagagaagacttggagggaagaagaccctagaggaaga

SEQ ID NO: 4457 - DNA, 674 bp, Arabidopsis thaliana
tgatcatatacattgcggatttagagaagacgtggttagtatttgtttagtctgcctgctttgcagaatctcggatccagggccagtctgattcacagagatcaaggggagagtttccatcctcatctttagcggctgtgtttgcgttctgtttaaccagaaactcggcgatagcttctctgtcgcatacaacagcataatgcaaaggggtttggccttcgttgtcctgttcaacacaagaaccaaaaacacataaataaagaagttgctaactttgcagataatgactgggtaggaatttctctttcgtcaccttagcattcacatcggcgttcttatcgaccagaactttggcgatgttgaggtggccacggtctatagcccagtgcaatggtgtgcgaccttcactgtctgcagtttatgggaaaattagaatgcagatccaacatcacgagaatgaacttccaagaaacggaatatacaagcagagactaaccccttgcatttacaggaatgccgctttcaatgcttttcagtaaattctcgacttctccttctctagcaaatccgtgtatggcatcaatcttcctgagagataaaacaaaagttcaatgagcagaggattagtgtttcattcagatagacaggaagaaacgaacagctcaaagttccat

SEQ ID NO: 4458 - DNA, 1254 bp, Arabidopsis thaliana columbia
ctcctcaaattaaaactgttgtgttgcgaatactcgtccataggttatgcctcgttatctaaatgatggattagaggttcatcatcattcactccttccatcacctgaagtataggggttctcgactggtgggcaaaactcaatgttgccaccatctctgatcaaagtggaagcgggatttgggaggagaaaaatagattgctctgcctcaaggtgatcgaacttatatttctataagccattcttcttctgcgaccaaaaactcttggaattgataaggtgctgcatatcaattcatcttggaggaatcagctttgaatacataggtacattgcatgctctcaaaattagggtcacaactcctcccataaccattcttcctggtttcttaagtcccttagcccatcctctgtagctcagcagatgttctattaggtagaatgagacttaaacgtctgtcgaatctccagctagaactgtaccatatgatgctaacccaagctgctcttgcaacgccgtctccattaattctagctctccattgacaaaggtcccatttctctctcttgcaaatagtgcactggctaaagacctatgaaaatatctaaccaccggactctttatttcgttgctctttgtcctagaggacgaaaacccatgtttagacccaagcgtggcccagaatgactgaagctctctcttatcaaaataatgactcgtgccttttccgcttggatatccatacatcagctcgagatgctcgattggaagccgatactctacgtcatacacacagaactccaagtatcccaaacttccgtctggcctgatttcatcgtcctctgactctccatataagaacaattccacggatgaaagaaactgggtggtctcttcctcatacccctccattggccgaaacatgtgaatattcaggctgcattgcttaaacatgtagtctacatcatcatagatgccgagtctctccatggttacaggatcagggtatcgagttcctaaaaactcgttgcgcttcagtagcttgtagtattcgttttgagttgcggacttctctgattccaaatcatcaccacctccattctcagtttgatcagcttccaggtgaagccatttcttcctctgagtcttcatctaccagttccaaccttctcttcactggcttcgttcctcgagtgatatcttccttgttcctcgagaactcctttgcagaggccttactcgacttcgggatag

SEQ ID NO: 4459 - DNA, 572 bp, Arabidopsis thaliana
tcaggctgggatctctgaatcaagggtcaaaacccgattctccaacttgatgttgaatgccttttccgtacaagcattaggtgaagttgtgccagctctgttcttgtcgtgacttggtgaagcttctggagtttctgtctttgtctcagaagaccgttgcttccaaacttgagttgtgggcttcttgggcctgcattgggcttttatttgcttctttgctgagtttgatgaaacgacaaagttttgtcgaggcttcacttgaatggtgttgatagtccccctcaaacttggtgtgggcggaagagtaacaccgagtttgcctcgcaaatgtatgaacgcttcataaggaagtgacttcgtgaagatatctgcaatttgctcagagccaggaatatgtttcaccaccaaagctttcagagccactcgttccctgacaaaatgaaaatcaatgtcaaagtgctttgttctggcatggaatgctggattagcagtgagataaacggcagacaaattgtcacagaacagctccggtgtgtcgggaagaggtattctaagctcgcggagaagtgtgc

SEQ ID NO: 4460 - DNA, 1105 bp, Arabidopsis thaliana
tctcgcggaagtcgtattggcaaggaatgaggaaggatgtgatcaagtacatcattcgtgccagatttgtcaggagaataagtattcaacactatctctagcgggtttactatgttccttacccattcctcagcagatatggacacaattaagaaggatttcatagaaggacttcccctctcgaatggttactcggtgatactggtggtgatagaccgtctcagcaagtatggacactttataccattgaagcacccattcagctctaagacagttgctgaagttttcatcaaggagatagtaaggttgcacggatttcccgagaacatcgtgtcagacagggacaaagtcttcttgagtaacttctggactgaattgttcaagtcacaaggaaccattcttcacaggagcactgcctatcaccctcaaaccgatgggcagacagaagtcgtgaaccgctgtttagagacttatctgcgttgttttgctggcaggaaaccgaaatcttggctgcagtggcttcattgggctgagtactggtataacacttcttatcacaccactacgggaactacacccttccttgcagtttatgggagagaaccaccaaaaatactgaggtatggagatatttcaacggttaatggtcaagtcgaggaactcatcagagaccgtgatagcttgctgcaagaactgagggaaaatatggagttagctcagagaagaatgcagaagtcagccaatgataagtgtgtattttgcatgttttgagcatccatttgtcatcagtttagcatcatatcatcactgttttataccatttctcatcatttgtcatcactttgcatgtttaggatagatttgcatgcatgttgcatatttgcgttgatttcaggtgatttggagctgttgacgagctgtctggaagaagcgggcctgatcatgtcaaaccactcgaccccgaggtcgagtaggagcttcaagatctcaacagatcactcgaccccctggttgagtagaggacatcactacttcaccacatcactctaccccgaggtcgagtgtcttcatcccatcacctgaccatcactcggtctcatcactc

SEQ ID NO: 4461 - DNA, 1046 bp, Arabidopsis thaliana
gatcgacactcaggggtgtgtcgatcgacactcatctcgtcacctacaaaaacaacaggagaaacaagctttcgaggaattctaggtttgttatctagtgaagcagtcttcgaataatctaaagaattaatcaaagataaagcaggagaaaagagagaagagaacttatcacataggtccttaggtggtgtgggttgaagagaatgtgcagaatcctctgtctgtgaaatccgagggtgtcgatcgacaggggtagtggtgtcgatcgacacagttgctttgcaactgtcattggcgagctgaacgtgttgtgtgtggctctgtggtgtgtgtggctctgtggtgggattctgatcagtcgaggaggtgtgtctgtgctggaacaatgcaactgataggtttagtaagctctgaaccatccatgccaaactccatctccgaatcacaaaccttgagagagattctccctctcttcacatcaaacctagtatcagctatagctagaaatgctattccaaggataacaggatccttgggttccttctcatagtccaggaccacaaaatcagtagggataacagagttaccaaccttaacaggaacatcttcaaggattccttcagggattcgcttggaacgatccgcgaagagaagagtgatgcgagtaggcctgtagtgagtcatgcctagtctctcagcaacagacttaggcatgaggttgatgctagatcccagatcacacaaagagcggctgaatctgcttatggagatagagcaatcaaaaacaaagctacctggatctggaagcttctaagtggtctgatcaggagtaatggtgcggatgtactcagctatgtctactctgtgtgccttctccttcttggcgttagacagcatgattgcactgatgtctctggtaagcagcttagcttcatctgagctaattccattgtcaacaagtcgcttgacatacctattgagtgaggcggaagatgtctctgaagcatccttaggaagaggatggagcatcttctccattatggttg

SEQ ID NO: 4462 - DNA, 976 bp, Arabidopsis thaliana
ctcatacttttgtaacatacaggttatgcgggaccctagtggtactagcaaaggatcaggatttgttgccttctctgctgccagtgaagcttcaagagtggtaatttaaataatcctgtgtcaagacaatattaaatttgttttgagcctctattttctttcttgattcaatttcttttggggtcttctgcagctgaatgaaatgaatggtaaaatggttggtggcaaaccgttgtatgttgctcttgcacagaggaaagaagataggagggctaagctgcaggtagtacttcccaccatagataaacaacccctacgtacacttatgtttgctatgtctcaagtccttatgtttctttttcaggcacagttttctcaaatgagacctgcttttatccccggtgtgggtcctcgaatgccaatatttacaggtggtgctccaggtcttggacaacagattttttacggtcaaggacctccaccaatcatccctcaccaggtaccattttgttctaactgaccactatgtaactctgcttgaatatgggactctttcaatcaataagcactcacttggttctacttaaatctgtgatatagcctggatttggatatcagcctcagctggttcctggaatgaggccggccttttttggtggaccgatgatgcagccaggtcagcaaggtccacgaccaggtggcagacggtcaggtgatggacccatgcgccatcagcatcagcagccaatgccttacatgcagccacaggttagtttataaaaaaaggagaatatgtcttaaatcccagatcaagatgaatctataagtctttgctttcttctctcctctagatgatgccaagaggacgagggtaccggtacccttctggtggtagaaacatgcctgacggtccaatgccaggaggaatggttccagttgcttatgacatgaatgtaatgccgtatagtcagcctat

SEQ ID NO: 4463 - DNA, 267 bp, Arabidopsis thaliana columbia
ggttaaaccattaaccggtggttgaaccggtttggatcgaggttctcacaagccgcattagcgcatgctacacgtattgtgtattcacatttatccaaacatggatagatacgtaccctcatacgatctgttaggatgcacgctagacaaaactatgcttttcattcgagaactctattgatctcgagttttagatgatcgtcatagagaaaagtggagtataattccatcagctatcgactcgcacggctcaagatctaactcagg

SEQ ID NO: 4464 - DNA, 1339 bp, Arabidopsis thaliana
gttttctttgtccgtcatgtacgctcgtgttatagcgaaacggaaggatctcaagtgagcctttggtcgctcgttccgtcttactccgggaaacggattctcccgacgtctcgaatgcgaaaacgagagatcctatccgtgaacggggtatgcctagtttcttcgatcactctatctatgtcgggagcatcgctcactgctggatgcattcgtgaatgcatttgagccatgttcgcatttgtttgagctgggtaattgcggaatgtttctatatccacgacgttacgcggattgaccggtgctcgaggatcagtcggaccgttacggaggtcgcttcctggtatccggggagtggttggtggattagcgatagaggtctgttgttgcgttgagttcccgggaacgcggtaactggacgcggttgtttggtttctcgtccacgtgtacctagggggcgagtagcctagcggtagcaaaggttagagcggtagccttgggaaggcaggcgttgtgcgtgtctcattccctgttgttgggttttcgacgagagtgttcgcaggtgccagtaaaaaggcgacctgccggttgataggaggtgagacttctatcgaggcaaagtctagacgagtccttggagtaggatctgtcagggagacggtacctgtcagatctatggggatctgggcaggaatcccagtttcgcggggggggggggggatttccttacccgcagtatcgccctgtacctcatgtgccattcgagtggagtcgcgtctctgctgacccaccattgcggcgaggttgcgatgcgcaatttcttggtttttgcttatgttgatcaggttcatgatcattgtgtggaactcggccagttcgctggcaggtcgcggagtagagatttgtaattgagattatgagaaaggagggctagaagtatgtgtgtgaatgtaaagctggattgaatgtgttttacaagtcgtccttgctcccttatataggtagctccgtcaggtccgggatctgcggagattctcctggatattcggcacgtcttttccgagatatcaggtctgctccgcgaatatctcctcgttagttcctaggttgttattcgcttatctcccttcattaggtgaccgtgcttatcaggcccaagtacccattcgcgtatgtgggctcatcagctgcgtaggtcctctacttggtgggcttggtgggctttgtgggctttctttggtattttcgaaagtggattcctggaggggaatccagctcaacaaaagatctcgagaaaggttatgctgagaagatcgggctcatggagatggaaatcggggga

SEQ ID NO: 4465 - DNA, 1219 bp, Arabidopsis thaliana
ctctaaagcttaggctttgtttttgtttatttaagttaggtagattcctttacttagtaaacgtgtgaatcaatgtctcttgtgtggattccttgagacaaaggttcgtgatcttatcacaaaggctttcacacttttgagtggcgatcatcaatccaccatcaaaaccctgatttgatctcacacgagagaagcgaccgctagcgtgtcagatttccaccttcgaccatctttccttcacaagagagaagcgatcgccagcttgtgaagccaccatatctatccccgtgtgagactcaccccgagtcttgcattggagaaggttagtgccggttcgcaggagacatgattttttcaatgggtctcttcttggttggttatatttgaatctgggaatggtgaatgatgaggtcgggtattcatgggcaaccttgttctccattgtggtttggtggagttggaagtggcggtgtggctacgtttttggcgagattggtaaatgtagagatagagttcagtttgttaaggacttcgcttctcaagtaagtcaagctcacaaactgaatcgctatacgggcagatcgaatactcaaatggagagaatggtggcctggaaatgaccgaaagaagattggatgaagcttaacactgatggcgcttcacggggaaatccgggattggctacagtaggaggagttgtgcgtgatggtcaaggtcgttggtgcggtgggttcgccttgaatattggtgtctgttacgggctttatattgcttgggagaggcggtttaggcgagtggagttggaggttgattcagagttggtggtgggttttttaacgagggggattagtgatactcatcctttatcgttcctggtgcgattgtgccatggcttcttatcaagagactggttagtccatgttactcatgtttatagagaagctaaccgtcttgcggacgggttagcgaactatgcattttctttccctttatggtttcatttgttagatgttgctccaccctttgtggcgtcatttgtagaggatgatgactgagaaactgcgtttccaaagcatatccgaatttgatttttgttttttagtttcttaataaattgtggggagagcttttctccccgtgacctaccaaaaaaaaaaagatcataggaacaaagtaaagatatgtctctcaagtgtattttacccaagaacgtgagatc

SEQ ID NO: 4466 - DNA, 524 bp, Arabidopsis thaliana columbia
caacaatgcaaagaaattgaagaagtcggtctaggaatcaatcacctggtctgaatattcaacaccactggctccatatgacttagctattgcctcaattttgtctttgataccaatgtccaatgggtagagaaacctgaggggctgtgtaatgttttgacaagctttttcaaccgcgataccaagatccacctataacatttacaagaacaattcatctatcaataagatgagattgcaaacaaaattgcatataatcacatagtgttggtctcgaatagagaagattaccgctcctttaccactatgagcatggtgggagcagaccacagcatcaaaagcaccggcatccattgaaaatttcctaactgcatttagttctgcttcggtatctgttgcgaacatattcacagcaacaattacattcacaccgtaggcctttgtgtttgagatgtgctttgccagattcacacagccagcttcaactaaggaaacattctcgcttacataagcacgatcaagag

SEQ ID NO: 4467 - DNA, 677 bp, Arabidopsis thaliana
cttgaagttctaagccgattcaacctaactctcttcaaattttcgagtttttctaaagtcttcctcagaggagaagagagacgaggatgaagtggctgagtggtcgaaatggtacaagatttagtaatacaatcatcatacaaacaaactattacatagttaaaagaatcattttctaaattgtcttcatcacaaaaaaatgtaggaacaaaccaaatcttagtaatgagaaaaaggaaaagaatgagagctatttgtacatgtaaatgtgggaaaccaaatcttggtcatctctccaccattggtgtatcccatgagcgtccttgtaatcttcggatatggttttgtttactataagattagcagatgggatgacatgaaccggctcttctacttcaactgcattgctcactcccatcgcatccatcaacaaacctcccaaggaatgctgcatcgccatccgctccacaattccggctccatacccaatctgttccatatttccccggtgctcgaaaaacccgatatactccgaacatagatggtcccctggatttacatgtatgttagggagccacgaagataatgcctctagtggatcttcagtcaagttttgtagttgcagttgctgttgttgcggctgctgtgtttgtttaagagttctagagagagcgagt

SEQ ID NO: 4468 - DNA, 826 bp, Arabidopsis thaliana
tggattttctttttttgatatatttggggaaaaaaacaaaagagtagaggttttagagaggtttgttggattgttttgctctcaaaatttctttctcttcttcaaatgttcattggaagaccaataccttatcttctactatcttcaccttccttccatggcttccgctgcggcggcttctccttctctctccttaaacccaacctctcatttccaacaccaaacttctctcgtcacctggcttaaacctcctccctcctccgccctcttccgccgcaaaacccttcctttcttcgaacgccactcacttccgatttcagcttcttcttcttcttcttcttcctcttctacttccctctccgttcacgagaaacccatttcgaattcggttcacttccacggcaatctcatcgagagcttcgagaatcaggactcttcatacgctggaaccattaaaggagcaagcttgattgaggagcttgagaatcctgtcgaaaggaatggactttctggtcggagaagactgtttatgcaagacccaccatggatctctgctttgtttctcaagggtttgagtaaaatggttgatcagactttgaaaatcgagcggaaagatatcgataagaggaaatttgattccttgaggagacgacaagtgaaggaagagactgaagcgtgggagaggatggttgatgagtacagagatttggagaaggagatgtgtgagaagaatctagctccgaatttgccttatgtgaacatatgttcttgggatggtttcacctttgaaagatgtgattgagagagagcagaagttgcagaaggg

SEQ ID NO: 4469 - DNA, 589 bp, Arabidopsis thaliana columbia
agagccttatttttgacctctttaaactttgatacaagaatgaacattggtttattgtgacttaacaggtttggaggctttggaacaacgaatcattcttggaacttgtagacccggccatgggggagagttatgataaagatgaagtcatcagatgcatccatataagcttattgtgcgttcaagaaaatcctgcagatcgtccaacaatgtccacagtgtttcagatgctcactaatacttttcttactctgcccgtgcctcaattacctggatttgttttcagggtcagatccgagccaaacccattagccgagagacttgagcctggtccgtctactaccatgtcgtttgcttgttccattgatgatgcatcgatcacgagtgttgatcttcgttgagattagaggttaatgataatatgcatagcttttcataagccaaaaatctaatggtcactttcattataaactcttcctgtcttgtttcccacttaaaaagacaaaagcagttgacttatagtagtagtcaacctctgtttcacgtacagagagaagaagaaaatattcataataattaggagatcatg

SEQ ID NO: 4470 - DNA, 1470 bp, Arabidopsis thaliana
tgagacttggcaacattacttgttgtccaaggaattcatcattcataccgatcacgagactctcaagcatcttaagggtcatacttcgcttaagaggagacatgccaagtggttggagtttgtagagatcttcccatatgtgattaagtacaagaaaggaaaggagaacgtggtagctgacgctttgtctaggagacatgcccttatagctactatggaggctaaagtgatgggttttgagcatatcaagagttgtacaaagacaatcctgagttaggagaatgctaccgagagcatggtaaaggactttacaaggcattctacttgcaagatgggtttctattcaaagacaagcggttgtgcatcccttacggttcagtgcgagagttgatacttagtaaatcgcatggtggaggtttgatgggacactttggtgtagaaaagactttggccatggtaattgagcatttcttttggccccacctcaagaaagatgttgagaggttttgtgcccgttgcattgtttgccacaaagccaaatcaaggtcacatcctcatggtctctatttaccattacctattcctaacgccccttgggtagatgtttctatggactttgttttaggattgtcaaagattaaacacaaggattcaatctttgttgttgtggaccggttctctaagatggcacacttcatcccgtgtgacaagaccaatgacgcgactcaaaccgcagagttgttcttcaaggaagtggtacgcctccatgggattccaaggaccatcgtttctgatcgtgacaccaagttcttgagtcacttttggaggactatttggagaaagttaggtaccaagcttctattctcaacaacttgtcatcctcaaacggatggacaaacggaagtggtaatccgaactctctcaactttacttagagctactcttggtaaaaatatgagcacatggcttgattacattccttttatcgaatttgcttataatcgtgatgttcactccggtacaaaactatctccttttgagatagtctatggaattaaccccttgtctccattggatttagtacctttgcctgagaaataacagttttgccaagatggtttgagacgtggagaaatcatcaagaagatacatgataaggcgaaatcaaacttagaaaagaaggccgccgaaaacaaacgtaaagctgatcggagaaggaaggaaatgttatttgaaccaggagactgggtttggctacatatgcgacctgagaggtttcctacacagagagcatccaagctagcaccaagaggcgacggtcccttcaagatcctcgaaaagatcaacgataatgcctatcgtttagagctgccaattgaggtaaaaatttctcacacttttaatgttgctgacttgtctacttatgatccaggagattcagttttgaggacaaaaccttttgaagaggga

SEQ ID NO: 4471 - DNA, 575 bp, Arabidopsis thaliana columbia
gcttttgatgtctgaactatcagagctaggattcgggtgaaatgctgattgtcttgaagatgacccgccacctagcttcaatgaaagagactgatcggattctccatgtttgttggactctgcaaggctgagcttagacataccaagaagctcgtcaacattgataggagctttcgagtgcacagcagttggtctgagaatttcatgagtttcctctttcttgggtggttcaggaacataaccagcaggccatattgggaatggaaacgggtaatatggtgaaaagtaggtcggatatagtatggggaatgagccaggtagttgcggctgcggttgcagttgtgattgcagttgtgtggtttcttctagtctggaagaagaagaagcagcagcggcagttgcggttggttccccggtggtagagtttgtggagtccattgattcacattcttcgatttccaagattgacggtgcgtgaagtgagctaggagcaagtgtctgatgaatagagtcagcaccttgcatttcagtttcccaggaatattatctcctctggttcttcaaaccatgggaat

SEQ ID NO: 4472 - DNA, 522 bp, Arabidopsis thaliana columbia
ggatccccgtgtactcaatactagatgaattctgggaaaacgatcagaatgaagtgagaagtgtatattgtgttatgtggttgctttacttttccattttactaaaaaaaattcttggaattgagcagtcaatgttgatgatgccatggacgatattgtacgtcagttcaaaggtgtctcagatggccttatgcgcaaggttgtaggatatccacttgatgaacatgatcatgctcctacccgccacctctcctggagtgtaaatgaaataagcactcagctctctagggaaagcgcaactgaatctatgcacagcagcatttctgatactgaagacatcgacaaacttggagagaacactcaaggggaaggtagatttgattcagaagccaatgggtggcactcagataatgaattggactctaagtatgttccacgagagtggttagacgtcttggagagcctgagagttcgcctcagagaaggaaaatgattttaaggcagaatctcaagttagggggt

SEQ ID NO: 4473 - DNA, 547 bp, Arabidopsis thaliana columbia
cttctgcattaaaatggcttggatttgtaacagcggtttgggttcaatccatctccggcaacaactacactttttcaaactactccggtgctcttaagtctctcatgaatctcaaccagctcgagctcaacaacctctctgtcgctaaagacgtcggaaaagcctttgggatcctggctggccttgcctctgaccgtcttcccactccggtcatcctccttattggttgctttgaaggtcttcttggttatggtgtacaatggctcgttgttagccgcaccatccaaccaatcccttattggcaggtactaaccataatctttctctttttctttctacaactcacacatggatagtcatagtacaactaaccactagtcaacaataaattgaatactgtatgttgtttttttcgaattttcagatgtgtatattcctctgtatgggagggaacagcacaacgtggatgaacacggcggttctagtgacttgcatacgcaattttcgacgaaaccgtggtccggtctccgcgatattgaaaggatat

SEQ ID NO: 4474 - DNA, 588 bp, Arabidopsis thaliana columbia
cgaggatgacctatgtaactccactagcccaagactcacttgtagcttattgtaatcataatatataaacatatgggtaaaccaaactaagtaagattcatcatatcttatgtattcaaaaagattagacagtttttcgaatcagcaactacataaaaatcaaacacacacaaaaagttagtgaatccagcacgtgattaagcgaccgacgttactaatacctttttaatattggataatgctttctcatcgcacaattaaaaaggataaacaagatcgagcgtgtggacgtaagcgagcattttaaaaacaacaaattccataattgcacgaattagaagacaaaacataataatgtaaaaaagcttcttactggtttagaagcatagaatcaatataaatatggaccacccgcacgttcgtttgcatcacaactctaaagtgttgtcactcaacaaaaaggcaatggaggagtcgaagaaatacaaaagtatggtgaagcagacgatgaataagaagaagaaaaacaacaacaagaaggggcacggatctggatcacgatctgggttacccaaatgaaggtgagga

SEQ ID NO: 4475 - DNA, 585 bp, Arabidopsis thaliana columbia
tttgttccatgccccactcactacacagtagttgctgttatacggtgcttggtgatgtcccgggtgatctttccgtgagacaagcagtcccatgtcctgcaacgccatcacgagaggtggaagcttgctcttggttccatgagcccaagcatggaattgttggcttaacaaaatgcaaaatgcaaatgtgctcacaaagctatgaaacagaggattgttaattgcaaggtttagtggtagaactataaaagttatggctcgagcgatagtgtatgaattgttggcgaattgacgttttgtgattgtccagggatacttgtgatgaccctgagacgcttcaagttgggctccaactataggtgttgatgcaccaccatagttatcaatggcccagtggtaaacaccggagcctagatcagcaaacacgtaccctgcataacacgctaaagctggttggagcaaagatgagaacaaccctccaatgatagatttagcgaaagaggcaaatatggttgtactcccgctgcaaccataaccgatgagtcatgtcgattgcagagtcgggtcgttgtcttggaagaggag

SEQ ID NO: 4476 - DNA, 379 bp, Arabidopsis thaliana columbia
cgtctgaatcgcgatatacatgccatattacatatcgctttactccatgcaagaccggtctaagtctgggagcactaatgcagtctgaacagcaacaacccttcaagtcgacaacacattctgcacagcatctgaacaaaagatagaggtaagtttagggaaaacaatggaaataccagtcattgtcaatcaaaatcaaacttttgtgagtcatacattatttgtaactaatgtctatgttgtgttaatagacataagaagatgcaacagaagcgataatgcaactcactagaaaagccgattgcagtcaaggttagcacagttccgatgtcttagttcctgaacttggggattcaaagatagcatcttgcaaaacttg

SEQ ID NO: 4477 - DNA, 571 bp, Arabidopsis thaliana columbia
tgagagagttttcttctttggtctcatgatttctgagtttcacagaaaaactcaataagaactgggagcagcaagctagacaaaggaaaatgaactatgaaaatcccagaatcattgatgtccaaaaccacaggtaacatatatatgaacacaatcacacacacacacacacacacatatgtgacttattttagtagaatctcatgttggtgattcttgagaacagcatcttcgtagctacatggaacgttgctggacgctctcctcctgaagatttaaacctcgacgaatggcttcattcttcagctcctgcagatatatacgttctcgggtgtgtttccattttacatcttcttttcaagaatgtctctttttgttcttacttatcttgtgtgttcttttaggttccaagagattgttcctcttaatgctggtaatgttcttggagctgaagacaatggtcctgctaagaaatggcattcactcatcaggaaaacgctcaataaccttcccggagcaagcagtgcatgccatactccatcgcctattcctgccccattgcagagattga

SEQ ID NO: 4478 - DNA, 1062 bp, Arabidopsis thaliana columbia
gtagtgttcctagtagagacgcttctcataggtttagttctcatcagttctcaggaatggttagacaaagagcttatatatttgatggtgatggtaaatactataacaaagaatgggatcttgctgaaggaacagggaaagagttttgttggtatcatgttgaattacctaaaggaaatcagaagctttctcaatctgctcagcatttgattgatgctttatgcccaccattgaagcttcaggacattcttgctcttgctagtaatggacccttttgtgggcatgttgatggagcgcttgtctttagagttaattctcctggtcctgcttctagtagtaatacgtttaagattgctgcgaggattactgagaactctgtgatcactgtttctttaggacgagttcctaggttaggtttctcgcctatgggtcaatcgcttctctcggaagttcctagtgtgattgaggagcatgttcttgagttcttgttgaaaatgaaccattctgaggaagctgataaccctgtgccaacttctgtttcgaatcttgttgtgcatattattgacacacatgttgatcgacttcaagatgttgttactgaacttgagatcgaattggatggggtggagctagaaatggatagaggttagctagcactctcttcttcaaaagctctatatttgtcactaaaaccttaaatgactcggatttaaacatgcatttgccattgttttgtgcaccatttgattatttcttttcaagtctatgaacatttgcagctttatttcagaaggttttgtatagttgtattaatggctttatatgtatcatcattattgacaataggtggatttgctatgaagaaaaagatgttggatgatagaaggttcccgaaattgcatctcaacttgcagcgtctatcgcaggtagagctatcactactaagccttaagctttcttcagaacattgttgttcgtgatttcatatctttgcagcaacatttttgttcttttaagaacatcctggtttgtgatttaaaagactctggcttcattttgtgt

SEQ ID NO: 4479 - DNA, 598 bp, Arabidopsis thaliana columbia
tgaccagtaaagtgagattatgcataccaattccataagatgccagtcccaacttttacctcaggatcatctagaactctgagtggactaatgtctgtactcaagaggtctcttacagactcattatagatctccatggctgagaacttcagaatgaattctctttcattgtgctgcaaaaaacaaataatttttttaaaaggcgacagttactgaatgaattggaaataatgcggtaagattactatgaagactctgatattgttaactttaccttctcaatgtaatcatatatatcagccaaggcataatccgtaataccaatcatagtgtatgtctttccactgcttgtttgcccatatgcaaagacactagctgaaaacagttgaaatttgtatcaaacatgagccacagaggataaaaaactaaaaagcagtaggagacatgccttaccatgaaccccactgacaacagagagagcacttccttcgccccttgatcatacaggtatcacatgccaagtttggctcacggtataaaagttatggagtcataaagttttaccaaaaaaaaaaaggttaaacataaaagagggatg

SEQ ID NO: 4480 - DNA, 587 bp, Arabidopsis thaliana
gtagccttattctccaagtttgcaataaacccaacaccacatgctcccctttccgatattatatcttccaaataagccacctgcgacgatgcaaaacaaaattaaaaccccgcaaaataaaaacaaacgtccataactaaacctcttgcaaatgaaaatttttaagtatacccaatatatacacaccagaactaaaagtgcaaaagtcaaaacctagatcaacagcagataaagatgcaagcttttatctgattgcagagaaccacgattacctgaggtttcagatcagaaaaggaagacgatgcatcaccagcggctcggtcagaattaaggatcgctttcaccgaaaacggagacctcagcgaggacttgagcagtggactgtagccgcgaaagcaggagagttcgttacgccgtttggttcctttagaaatacagtaggatctgacgaagtcaacagagaagatagtcttagtagagcttaatttcgcggaagagagaagccgggaaacggaagatgaagctccggtagctccgggagactgtagagcgatggaatgaagctcctgagaagaacgccgagagag

SEQ ID NO: 4481 - DNA, 941 bp, Arabidopsis thaliana
cctccaaatagggtgagaggaaccgagatgcagaaccagagagccaagagctcaaaatacaaagagattgggatggctccagtgctgttgctgctccagagaaggaagttcaacactgtgagtataacaaaagcaatacccgggaagaagcatgcaatggaccaggaaagtgatctccatccttctgaagtccccttgacagttctccagagccgaacaccagcgtacccagcaacaatacccaagaaaagatagagaataatcatcccggttagtagcattcctcttgaggcaggcgacatgaatccaagtgcagcgaaaacaatagtgacaacagccattcctgtaattcgaaccccatctcccaccataatgcatagaagctttgacatttctggttctctgaacacatctccgacaacaagtttccatccagagagctcctcattcatctgtgcctgtgcttccttgtccagttcctcatactttgtcaaatcccttctcactgtcctcaggaatatgacgaaaactataccggccagaaagaagatcaccataagcgagttcaaaatagagaaccaatgaacacgagcaccttccattttcaaataggcatcccatctggatggccatcttgtctcactcttaacaaattccacttcataagtgaaggttattctttcatgttctttaatgatctgagctttgtcaagctccaatggacagttaactgaaggaacagggtcatacatgtgaagcttcgtcattttttcagcatcatacttaacactgcagggaacaacctcaaatccaacaatctcataccccaatgccttcttcttatcagcttcagagatcacacccataccttcttcaccagtaccaatcacctccatgacattgccttcatactcatgaaccaaaaccttaaacttgaggtg

SEQ ID NO: 4482 - DNA, 600 bp, Arabidopsis thaliana
  unsure (1)..(600): unsure at all n locations
gtacgagctcatcaaaattaacaaactcatttttgaatacccaaaaaaaaacctagctagctcgaatttttttaaatatataataacatcaacaatgtctggtgtgtgggtattcaacaaaaacggagtcatgaggctggtggagaatccttacaaccaatccgccggagattcgtcggaatcgtcctcttccggtggtaccagcagcagaggatgaggaggaaaattctcgtccatcttccaagcagcgaggttgtgtcttcgtacggatcacttgagaagatcttgaagaatcttgggtgggagaggtactacagtggagacaataccgatcatctgctccagttccacaagagaacttcgatcgatctcatctctctccctcgtgacttctccaagtttaactctattcacatgtatgatatcgtcgtcaagaaccctaacgtcttccatgtccgtgacatgtagtagtcaatcatccaaaacaatggttcaatatcattctccgatcatcgccgctggtgatatatctatgatgtatatatatatgcaggtttttattttgtcgttgggtgtttttgtntttggtttattttgttt

SEQ ID NO: 4483 - DNA, 583 bp, Arabidopsis thaliana
tatcatcttggaggtccaatctttctttgcttcaagtattttgcctgcaaacattaatctaacacatatcagacttatcccaaagattgcaagccctcagaaaatggtggattacagacctattgcattgtgtactgtgttctacaagatcatatcaaagctactatcaaaaagactacaaccggttcttcaagatatagtgtctgagaatcaatcagcatttgtgccaaagagagcgatcacaaacaatgttttgataacacatgaggtactacactatctgaaaacatcaggggcaaaaagaagatgttttatggcagtaaaaacggatatgagcaaagcttatgatcgaatcgaatgggatttcatcaagcatgtaatggaaaagatggggtttcaccaaaatgggttgaatggattatgtaatgcatcacctcgatttcctactctttcttactaaatggtgcacccaaggatcagtcaaccacaaagaggcataagacaaggggaccactgtcgccctatatctttatcttatgcaatgaggttttcctagtttatgtcagaaggcacacagaatggg

SEQ ID NO: 4484 - DNA, 655 bp, Arabidopsis thaliana
gtggggattaggttgacgaagaagctgaagattggcaaggctgggattacggaagggattgtgaatgggattcacgagagatggaggacgacggaggttgtgaagattttctgcgaagatatttccagaatgaacatgaaacggacccatgacgtcttggaggtttgtttgcctctctacttttgatttcatgatagggatttgatagtaacatttgactctcaatgaaagatctatgaacatgtcaacaaatggcacagacggaaattcatacttgtcctggttgattttacagacaaaaactggaggcttagtcatttggaggtctggaagcaaaatattgttgtatagaggggtaaattatcagtacccttattttgtatctgatcgggatttggcacatgaagctgcttcaggagcatcatctatggatcaaggagtggttgatagtagagagaaacagagtattgcagaatcttctgccccgagtattactaataaaatggttaaaccgatgttgacgcaaggcgttggttctccggataaggttaggtttcaattacccggggaagtacagcttgtagaagaagcagaccgtttgttggaaggattgggtccaagatttactgactggtgggcatatgatccccttccc

SEQ ID NO: 4485 - DNA, 1090 bp, Arabidopsis thaliana
atctataataaagaagaggcatcccggccgggaaaaaatctgtaccttacccaatgcaacaaaaacattcagatttcattctcctatacatctttctctcacatattaataattaataataattaatattaattagctaatgatatatgagtcatcaaattttaatattttgtttctcattgcacctcttttcagaatatcaacatacatagaacttctatatatatatatataaacatataaagttagcaaaagatgtgatatagtcattttccaaccacagccagtattcaaatctagcaaaactaaaaacgattaattataggattgaatattcttgtcttaaaatatatatgaattagacaaaaataaataaaatttaaattcaattaaggagaatacactcaaagatattgatttaaatttaattgtcaggaatatttttcttaaaacagtataagaaaattcgaggtgtaaaaataatagataaagtactgtgaataaacctttgagtcattgaagcgaaatcattatctagtttacttgtttctatctaatttttttttttttttttgataaacatgcatggattcttaccaaaccaaaacgtattgattacttaccaaatgacccaaactacgtacgtgaaccagaagttgtagcatatattatgtgcctataaatatgaaccctaaagcccccaaaactacatatcaaaacaacgaaatctcaccaagtcctaataatttttaggaaaatgaaagcttcgatttaccttgtaaccgttttcatacttctacttctgcttctaccaacggcgatccctcacgactattccgatgctcttagaaagtcaatcctctttttcgaaggtcaacgctctggtcgtcttccaaaacaacaaaggatggcgtggcgtagaaactctgcactcaacgacggaaaaaacctcaaaaccgacctcgttggtggttactacgacgccggggacaacgttaagtttcattttccgatggcttttacggccacgatgcttgcttggagttctgttgacttcggacgctatatgtctcagcatgatttcagacat

SEQ ID NO: 4486 - DNA, 594 bp, Arabidopsis thaliana
ggttctcttccggtgaaattagcaaccttctcgatcaaatgataatcctcaagaagaaccggacctgcccattacgaataacacatgttaaaaataatcacatcacgcttcacgaacaagatctcagcttagactctatatctcagttttatctctttcataaatccaacaagttccgattcttattgatagactcttgaaattcagggttacgatacctctttctccgatggtgagggaagagatgttgttggagactggagcaccaccgtttgtggtgtagaatggggcgttgtacgcgcttgaaggacgatactgcaatcaccattatacgatcgattatcaacaaaatccaggaagaaatttggtcaacaatcaaacggaatcgacaagaacaatccacaaaattttactaccaactgattgatttgataaaaagccctaattttttgtcgtaaccgaaacatatcaaaacccgtttcctgatcggatccgggtggtccatccgacacgagtagtcttccgccattatttgcaaaaaggctttagatttgatgacgcaacagtaacatgtcggagagtagggttgtagat

SEQ ID NO: 4487 - DNA, 894 bp, Arabidopsis thaliana columbia
cacaacattgtcgatctgctcactaagcctctcacagcgcttcggttcaattatctactgtccaagatgggactgcatcacttgtactctccatcttgagggggagtatcaaatatgtattggtacaatgacccgatttaccggtttatctatttttgtcttggttttgtagattgtcaatgaagcatatttctaatctaaggaaaattttgttagatctaaaaagaatgaatggaatggtgagagagaaaaccgagattcattattttaaattcacgatgttttattagtttatttttgtcatcgatgatctctattattttttattacagctttagactttagttggacttaagcatataattaaattttaattgattatttttgttagactaaaatgacgatcgaatattaccattaattagtattaatcgaatttagtcaaaattttaattgtttattattcgttagacttcatattttgttaaccatggtatgattatttttatttttattttataaaaactataatatctctataaatattaattaaatacatttaataaactttattcaattgagtcgtggttgaacctggttgacccaatgatccgatgaccccgaaggtagtctattcatcgtcagggtttaaaaacatttatttctgctgtaaattctcctaaataatttttttaaacgttgactattaaatagttgcatatctactttacatatatatatatatatatatatatatatatatatcacgcatatgtttgattcgtttaataacaagttttcttgatgtttttactatccatttaatacataagttcactctttttccagtgcgaatcttactatatgacgctcttttttttgtcaacaagatct

SEQ ID NO: 4488 - DNA, 463 bp, Arabidopsis thaliana
taacaaccttctttcattagccaatctccggctaccacgtgtcatctctagacttttcaactatcccacttgacttctcacacgtgcacctccacacgtttcgttctataatggacctcgatacttaatgtacaaagaaaacccttactgatctctatgtataaatacttgtgatatgtgaatcaataaacgcaacctcttcccaaatatatcacggtatcagagcagagtcattaaaccctaatcccccccgctgccatcattgtcttccctgccacatttccccctactttcgctttgtcgttgcaagtccctttcatcatcacaatgtccggagctatcgtctcttcatgcatctgataatcttggtgctttaatttcttctgttatcttaaaggaagataattactctgaatgggctactgagctcatgaattctctcaagccaagcaaaaacttgggt

SEQ ID NO: 4489 - DNA, 662 bp, Arabidopsis thaliana
tgcatgctgcagagacgatcccccttgccggtgacgaaaccttacaagttatgcgtgaaattcacgaaggcgctggtgggaaccattcaggaggtcgtgctttggcacttcgcatacgcaaacatgcccattattggcccaccatactctctgattgcagtaagtttgtcgccaaatgcaaaaagtgtcaaaggcacgcgcctattattcacgcaccgacggaactgttgcatactattgcgcctccttacccattcatgcgttgggcgatggacatcgtcggacctcttcatgcgtcccgccaaaagaaataccttctcgtcatgatcgactatttcaccaagtgggccgaggcggaatcatatgcccggatccaatcgaaagacgtccagaattttttttggaagaacattatttgccgccacgggcttccgtacgaaattattaccgataatggctctcagttcacttcacttcaattcgagggtttctgtgcaaaatggagaatccggctgagtacgtctacacctcgatacccgcaaggcaacggacaggctgaggccacaaacaaaactatcatttatggactaaagaagcgccttgaagaaaataagggtgcatgggcagacgaactcgacagtgtcttgtggtcaaccgtactt

SEQ ID NO: 4490 - DNA, 1637 bp, Arabidopsis thaliana columbia
tagtggaattagagtataaagcagtttgggaagataagatcttgaactttgatatcaaatcagccggagaaaggagactaattcagttaaataagctagatgatatatgaaatcatgcctatgataattccaagctctacaacgaacgcaccaaggcctataatgacaagaagatcatatctcgatcttttgaaacaaatgaccagatacttctttctaactctcgtatgactttatttcctggtaaatgtcttctcattggacaggtccctacaaacttcattcggttcaaccatatggaaccattgttcttaatggagaaaatggcgcaaagtttcctgtgaatggacgaagagtcaagcattattgggctgaaaccgagcttccaaagatgcatccaatgtatcttcaggatccacctattgattagaccgctgcaaagtcaagctaatgactttaaataagcgattagtgggaggcaacctacttgtgagttatatatagtttaatttatattggataattaacctttatttgtttttcaattcagaaaaaatcatttttgggtttcttgatgtggaccaagcacgatggtgtcggtcgacaccatacttctagaagtaagttgcgttaaaacaaaacattttcttcttcttcttcattcatttctaaaaagcgaattcaccattttctctctagaatctttgattcttcaccattttctttgatttgagagcctaaattcaatagatttgtactctctatctattccaagcatcactttcacatatctgcaacatggtaggggagcaaaagaggcaaaagagaagcggcgaaggaggttcttcttcctcctcacagacacggcgacgctctaccactgtcggccatgcaccaccatcgtctgcccagtctcatgcaggctcccagggactggtttctcatttccctcggccgaaatttaaaggaaagcagattcattctagacgggtttgggacgacgatatcaaccgagaattaacaaaggtgactatatcaatcgccctttttctcagagttgagatgattatgatactctttccgagatatctgtgatgtttttgggtttgataaggatgcttcatatgtctcgatccctggacattttagcgatgcttagatgttttgggcctagtttggcaatggaagctatgattctaaggattatgtgcattcagagatttgtcatcctgtcttgcgatacttggctaggctcattagtaacactttcttgtgtaagatggagcctggtaagatgaggctatatgagctacttatgctttattatgctgttggagattctttttttgagagtctacagatggaggccagtgacagagatgtcaactttggaaccgtctttgcgcatcacttggtatctccaaagactaagctttttagtggaacatggaaaaagattaagcggattggtagcattcttactcctatttccgagcatttcaacattagcattgatggagtaaggattgtgactaagaaggtgaaacatgataaggcatatctgaagagagctcactggttgaaagggcagtctgatttggtgtttccgatatggtccagggaaccatatgattcag

SEQ ID NO: 4491 - DNA, 1576 bp, Arabidopsis thaliana
tagaaacagcgtggaggtagagtaaaaattttaaaattttactctacagagcaacaggggatcgagcatgtcagtgtaaagaaattcaagaatttgaaaaaagttctgttgcaatcagagaccatgagatcgagtagtttggtcgagtattagtgatgattttaaaaacccaaaattttgaaatcatatttatactcgaccaacagaagctacaaagacttacagagagtttatcaagtttacagaggattacagaaggttctaagacattcctagtcaacagagaacagtgcttcaggacaaacagacagagtgtggcccaccacctctcacctttgttcccacatgcgtttttagagataacgaaatcccaagactacttctccaccactcgatctcaccctatcctttcccaccgacatcatctcttttcctctccattcactcgacctcgcagacacattctccgtcacgtctctcactcgaccaaacatcactcgacatctctctcaccgcctctctttcactcgatcgaaacgcctctcctctctattctccgcctactctaccgccggaccttcaccgtctcaacgtcgcctcctcttcactcgacctcgccgtcccaacttcaccatccctcaccacttcgtcaactttctcactcgaccaaaattcagctttcatcgctcacgccactgccttctccctctcttccactcaacgacgggaccggtttcatcatctctcaccgctctcgcctcctcttcactcgaccgcacgagcacctcaacctctactccgatttctttttctcacctctccatactcaaccgctactcgacctcatctccgttccctctcttttactcgaccgccggaccggcttcaccatctctcaactatccaccgttcactcgacctcgccattcattgcgcctccgtttatctcttcactcgaccgctcctcaaaccgccactgtcttctctccattcgccgttcactcgaccacgcatttaccgtctctcattcgtcttcactctaccgctaaactcgaaaccataatttcactgtactcgaccgtaatactcgaccgtgtacttgaccggtttagtgtttgcatttatttggactaacatattgacgtttggctttgagttacattctttttcaggaaatcaatatgagtaactacagtggcgaatcctccatggatgcggattacaacatcgatgaagctgaatcttggtcaactggaccagagagagagcgacaagcttatgagagcttcagagcggagacccaacgctcagtaacttgacgcaatgagaggagagctgagattgctagaggaaagagagcaatgaccagcagatatgagttgatcgacgatgatattgacgtcgagtatgagcctgagtcatggcatagagagacgaagctgttgaacaggcctaatgaagtcccagtggaggagtacatcagacttttcgagctgaacgacttctggggaacgaagtacccctattatcagactttagcccagctggggctaccggcgattcccttggttcacgt

SEQ ID NO: 4492 - DNA, 613 bp, Arabidopsis thaliana
catttgaagtaacttcacgagttgctgctatctcaaacttcctatgaatgttgacttgttgtcacgaagttacaataacgaacaaaaaaaataaaaaagctcagaaggaaggagcagagaatgaacagagttcttacatcctcgaattttcgaccgaaagcttttttaatggaagtcacacaattggttgcaaaataagtaagccatgtatcgcgacttccgttatgcacaatgaaatatttggtaagaggttgtgtttattgattcacatatcacaagtatttatacatagagattagtaagggtttcctttgtacattaagtattgaggtccattacagcccattaccctccccccccccgttaagttagcggggaggatgtcgaacgccgaacttggacaatagcctatcgaacgctggtcgtggtagagctttagtaagaatgtctacagcttgttccttggtagaaatatgttatgtggtgatgagcttatcttgaacggcatcacggacttgatggtaacataattcaatatgctttgtgcgttcatgaaatacggggatttgaagctatgtgtatagccgctttactatcacagaatagttgaatg

SEQ ID NO: 4493 - DNA, 1918 bp, Arabidopsis thaliana
  unsure (1)..(1918): unsure at all n locations
tcaagatgtgatcagaagtcactaagtcaagccaagcaataacaggttttggtgtgttctagcagtcctaagtgatcatgcagaaaacagaaaatcaaacagaaagtataacacagatactcgactgcacagtctgtttccaaacaactgggtggtcgagtatgaggtcgagtaacaagaaagaactgcagaaattaaacgacagttaacaagatacagtaaacaacagtaaagtaaacatagaattcaatcagataaagaattcccgaggatggggtaattgagtagtttcgttttctcagtttacaagtgattgacatgctcaataaattaaccctcgacaacaagttcattaaccaaatctaagtgccaccgcaacagagaccctcaagttaacctagtcctagactcaatcaccattgacgagagctaacctaacagacattacgaatcaacaagttaaagccaaaacgctccctgcaaccaataccttggtacagggtcacgaatctctggaattagtggttcagacatttcatcaaacaccttttgggcgcagaaatgtctgggctcaaattccacttaatcagaaagcaataggcattaagaataactaatccagaagggatctatcaaccaatactcaatcacctagcatactcagaattctacactactattacccatcctcagaaacctattcactactcagcatcataacagaaagcataaacgttgaacaagttgaaaacatgataacaacagtgtaacagcaggatgataacagaatgaacaacagtaaacgaaatcaagaacaaaagctgaatactgaatactgaatagataaagagaaatctggattacaaaaaggtctagaacacaaggtctgcggaataaaactagataaaaacatgtctgcgaaaatgtgaagtacatgctacttatagccaaatattccgaaaccctaattcttaaaatgacgcagtattgggacggattaagaactgtactcgacccatgtggtcgagtgggtggtcgagtgaatagctggagtcttcttttcttccttgtgctcgagtgtctggttgagtgcggaatgaagaaggctctgaagcttgtcatcgagtatgcagtcgagtggtggtgatggtgatactcgacttccaggtagagtgaagaggtcgagtagtgttctggcaatgaaggtgaagacactcggccttggggtcgagtgatgtgatcgagtgattgtcaggtgatgggatgaagacactcgacctcggggntcgagtgatgtggtgaagtagtgatgtcctctactcgaccagggggtcgagtgatctgttgagatcttgaagcttctactcgacctcggggtcgagtggtttgacatgatcaggcccgcttcttccagttgctcgtcaacactccaaatcacctgaaatcaacgcaaatatgcaacatgcatgcaaatctatcctaaatatgtaaagtgatgacaaataatgagaaattgtataaaacagtgatgatttgatgctaatgtgatgacaaatggatgctcgaaacatgcaaaataagaaaaccaaatttctaagctcttgactagatgtgtatgatgcattgtttagttttcttgactaatacataatgattgagcttatgaattcggtttgtggtttattttgacaccacttttctctttttgaaggaatgggaaaatcgaatgaagtcgcgggaacctctagaccacgtcgaagtacttccgctccaggactaaaagaggatctaacaagcgacctgtaacgggcgaatgggatgccatgaccccaatgcttactgctatgaacacattaagattttgcaatccgggttgcaaacattctgttctatcgcacttggtttcttgaagatgtta

SEQ ID NO: 4494 - DNA, 1190 bp, Arabidopsis thaliana
ataagcatggagaagaaatgaatatggatttaggaacgagttacacgaataggacgtattttagtgagaatcatgaagaagtgggtaatattgtagaagatccatatgtggatatggtgaacgatgcatttaattttaacgtggggtatgatgataactatcgtcatgatgatagttatcagaatgtggaagaaccggtccgtaaccattcaaataagttctacgacttgttagaaggtgcaaataatcctttgtacgatggttgtcgtgaaaggcagtcgcaattatccttagcatctcgactcatgcacaacaaggcggagtataatatgaatgaaaagtttgtggactccgtttgcgaaacgtttacagattttttaccagaagaaaaccaggcaaccacttcacattaccagaccgagaagttaatgcgcaatttaggacttccatatcatacgattgatgtttgtcagaacaattgtatgctattttggaaagaagaagaaaaagaagatcaatgtcgattttgtggcgcgaaaagatggaagcctaaggacgaccgtcgaagaaccaaagtaccatatagttgtatgtggtatctacctattggggaccggttgaagagaatgtatcagagccataagacagctgcggcaatgcgatggcatgctgagcaccaatcaaaggagggagaaatgaatcatccttcagatgcggcagagtggagatatttccaagagttacatacctggtttgctaaagaaccccgtaacgtttatctcgggttgtgtattgatggctttaatccatttggcatatctcgtaatcattcattgtggcctgtgatcctaacttcatataatttacctcctggtatgtgcatgaatacaaagtacttatttcttaccattctgaattctggaccaaatcatcctcgagctagtcttgatgtcttcctccaacctcttattgaggagctaaaagagttgtggtgtactggagtcgatacgtacgatgtttcattaagtcagaattttaatctaaaagcagtactactgtgggcgataagcgactttccggcgtatagcatgttatcgggatggactactcatggtaaattgtcttgtccagtttgcatggaaagtacaaagtctttttatctacccaatggacggaagacatgctggttt

SEQ ID NO: 4495 - DNA, 964 bp, Arabidopsis thaliana
gcaattgttccaagactcccgtttttggggtcaatggctgtagcgtagacggtgtaaacaagcccgaatgtcatcacgatctcgaaaacgaaagcgttcaacactcctactccagcagagagaccaaaagccggcacagcctaaaattttcaaaaggttaattagttacttgacaaagaagttaggtccaaaaagagatctaataaagggctaaagggtagtttgacataccaagccaccggtggcgaatttaaggatgaggcaagcgacgacggagccgagaagctgagcaatccagtagaggataccacggaggagagtgatgttaccaccaatgaaagcaccgaaagtgacggcagggttaacgtgtccaccagagatgttggcaccaactgagacagcgacgaagagtccaaaggcatgagccactgcagcagctacgagaccagaaggagtggtggctccgttttcagtgagcttgttgaaagccatgccagagcctgaaccggcgacgacaaagatcaaagttgaaatgaactcagccaacgccgcctttaaggcatcgggacgggtggcttcatctggacggccaatggcgatgtttctgatcggcatgatcggacggctgagatttaagcttcaagatgctagaagagtgggagatggatttgatgattttttctggtctactatgtgctcttacttatatctgaggtggcgccattttggtgaccggttaccggatgatatattattaatatttggtggagaaattatttgattggagcggttagagatttaaataattttgaaaacaggctaaacaagtacatcgctataattccagcgaagcggaaccgaccaatctacgtggcggataatgacttgtcatgtttgtacatgtatagagcttttgtccctttttcatattctctctctcgaatgatcgatagttctagaggaa

SEQ ID NO: 4496 - DNA, 1193 bp, Arabidopsis thaliana
ctaaaatcgagcaggtcaatgtcgtggccaatcccgagcaggcggcccccgcggcgaacctgaaaggatccaaaagagaccgacgcaatcgcgaacaacacgacgatgagccagaagctgctcgaggaaggatcttcacaattttaggagattcggctttctgtcaagacacgacggcatcgatcaaaccttatcagaggaaggccgactcaaatcgtaccaactccgcgacctgtgctcggattagatgacgaagtgacctttcacgaaagcgataccaacggcttggaccgtccgcacaacgatcctttagtcattacactaaccattggtgatttcaacgtcgaacgagttctgatcgacacgggaaacacacttgacataatttttcttacaagtctgcgagaaatgaaggtcgacatgacgcaaattgtaccaactccgcgatatgtgctcggattctctggggaaaccactatgactctcgggaccatcaaattaccattccgagccaaaggggtaacaaaaatcgtcgatttccctgttaccgaccagccgaccgtttataacgtaattatcgccacaccatggttaaatcatttccgagtcgtcgcttcgacatatcatctctgcctgaaatttcccacgagtaacggcgtgaaaaccatatggggaaattagaaaatgctcgaatctgcttcatggcagcacacaagctcaggaacccgtcactgagtcaacggccgacgcaaatcataagaaagctaagcttggcctagctgaagagaaagtaatttccgagcaattatagcagctaaagatcgaggaggctcgagaatccacaagaccaatccccaatccgataatctctatctgccttgatgacgaaaaacccgagcggtgcgtggaaatctgaggagacctaggagaagaattaacagctgaattcagagaaaaagtcaatacattcgcctggtccccggaagatctgccaggagtaagtgttgatatcgtatcacacgagctcaacatcgacccgacgttcaaacttgttaagcagaagaggagaaaattgggtcgggagcgagcagaagccgtgaaagccgaagtagagaaattactgaggatcgggtccatcaccgaggcaaaatatctcgattgactcgcgaactcagtcgtagggagtcgacctg

SEQ ID NO: 4497 - DNA, 1488 bp, Arabidopsis thaliana
cttaacttccctatctacatgtaaatattcagagacatccatttcattaccaaatttttaaaggtttttttattattaaaaactaagctatataaaatgaaatcacatgtattagtcgatattctctattctttattatccaattcactaaatgtccatattttttattcaaaaccaacaaacttctaaccttacatgcacttttacattacgatttttttagcagaaatttggcaattgcataagttttataaaggaatatgggaaaaagatgtttgtttacatgggtgataggttctaattccattttttaaatctcagctgatatgaaaataatttgctcacaataattaaattttcaacatataactgatagaggtatctttcaatattgaagcatgtaagtcgaactaattttacaaatagatctattttaatcaaacgattggatacgatctgatggttaactatatttagatagaaaacagaaatatttgattttcatctacttgtactttttctgcgacattcttgcgagtccctggtgtaacataagcagtataaatgaaaaacctaattagcatccaatactcaataaatatttatatgttttacacttacgcattacattacaaaagaaaaacaattaatatcctaaatagcaatctcaaagtcatccaccgtaacaacttgttcaaattggatttgtacaacttgtcctgttatgaccagtgcctttgcacctcgagcaccggttctgctgcgtccttccagtcttaggtttctacatttaccatgtacaaaccacattatgcattaggttttaacaatcaagtagaaagtactactttagctaacaaatttccttaccttgtattctcctgttgatggaattctggctacctttggcctccctgatggtctccttgtatatggtggcaacatcgatcggtgttcaagctcttctggtatttcgtcgtctcttccaatagcttcagggaatactgcttcccggtaactcgaaacccatgcgtgggacatgaaacagtcatcaactaaagccttgtacgaaattttaaaactattcgcagccaccaaagcatgagtgcaagggatcttgagtttaacatacctcttgcaagtacattgcttcttctcaagatcaacaacatttcttccacctaacatgccatttatctcgtatctcgagttggtgatcctcccaaccttgctcccattagttgttaacatggtttttgttatttgcttgtcaacttccggaggaacgggacctttatgttcgagagacttcttccgacgcgcattaaatcatctagttaacatagacctgataaatcttatcaactccacaatatgtgacgatcgacctttgtttaacgccttgtttaacgtctccgctaaattgctagtcatcagattgaaacactgtcccctgaaataatgccttatccaattagccaggggatc

SEQ ID NO: 4498 - DNA, 782 bp, Arabidopsis thaliana
atcatcacttaatacctttgcaataaatacaaccataacttacccaaccatatcttcaatgatgcttatttaagtgttggaatttcattttgttaaaacaccttactcctaaatataacaaacccaaatattcatgatgatttgcttgcgaagatagccaagaaaatggctgacaaatgttggtggtacctcggacctatgttgaaatccggtcctcgtggaagagacattgtctaccgtccggatgtcctcaaggatgcaaacattttcagcatgtgcgacgatcccgatgacttctacgcggtaggccacgatccaaatgacatcaactccgaaggtcgctatagacccttcttcaaacggtgcttacaagctggtaaccccacggctatttaccatgaaggactgcgtctcgttacacatgagtctgacattcagggagctatcctacacttagagcgaatctccccaaggaacgccgctgcaacccttgcatgcgcaattctttacatatgtgctggtaatgctcacatgggtggtgtctaccttcggctcttcggaagcaaccattatgctttggaatcggaggaggcacgtgacatttgtgaggaggtgctagaagatataaagaaatatggtaatactttaaaatacacatacgctaacagtttttcgtacccggaatgtggtgacttaagcactcctgaatgcgcagagatgtgttacatgagatcgagactcttcaataatctttgcaaccaatgttacatctggttgtgtgc

SEQ ID NO: 4499 - DNA, 494 bp, Arabidopsis thaliana columbia
tatagccttataggcttttagcatagttgggcttgggcttttgacccaactaggatttagtgatctgcaccgtaagagcaaagcctttttttttttttttttttcgccataagagcaaagctatatacagtatcggagattaaaattttcttactattagttaaactgactcttaaagcaaaagctctagtgatctgcacacaacgcgttgttttagtttcaaatagggaaacatcacgctgttttgttcgaattcgttttgtcgccgtcggtaatggcgaaaaattacacagtcgccgatgtcgtaaatatcgacagtgacagtgacagtgacgacgacaacggaggagtaataggaatggttccgagcttggcatctctaatagagaatcagaaagtttcgatcgctgatgctgcgacggtggctcctcgagaaaccctagagtgccgaagtttctggaaagccggcgaaaactttgtgatccttcaagtgt

SEQ ID NO: 4500 - DNA, 572 bp, Arabidopsis thaliana columbia
gaagatgaggacactcctgaagaaaaccctgaatctgagcctgcaaattctctggcggtgaagttctctaaatcaataaactttactagtcctgcaaatctttctaacctcccagtgacgataacggcgactcacgacgctgaggatggttgggttgataaccaccatttgatgtcggaggcccttaatctggactggacggtggaggatgacgaagcgtaccacgctcttgaaccttccctccctggagatactgaagatttcgatgttgaaaatgatgatcttctaggagaagatctttaggaaagcatacctttagatgcgaacgtgcaatctgagactgaatctctaccggagctcaagtcaatttgaactcgcctacgatggtgaagaagctgtccgagtccgtagcgactcaaaattttggctgtttgatggatcaaggcccatccaactctaagtccaaaaagaaagatttaaaaaaggaagagatgggccaaaacctggaagtgcagcccaatccagctctcttgcttaatcaaaacaacagggggcgttctcctacaagagga

SEQ ID NO: 4501 - DNA, 604 bp, Arabidopsis thaliana columbia
gttgctttttttctgaaatcagaaactttcggatctctcgacttctgggaacccaagactgatcgatggaatcttacttacaaagtttgataccattgacgacaaggtacagtaaaatgatagttggagttagtgttggtttgaatcatataaatgaatgttaacgagactgtttgggatctgtttgtaggtcggagcagcgttgtctatggtttacatatcgggatcaccggttatgttcgtgggttgtggccagtcttacactgacctgaagaagcttaatgtcaaagccatagtcaagacacttctcaagtgatctcctcttcatcatcatcatcatcactatcatcattaccatctactatcaacaatcaatgtcttatccatcatgctgttgtttttggttttttatttgaagacggtttctctttggaagtgttgtgttttctttaaaactcaaaagactggagtcgcaaaaaataccatcccatgactttatatgatgcaacgtaacttttgttttaaattaaagattaataatcatgtgaaatagtgtcatcttttattttgttatttaaataattataccagatgaagattgaat

SEQ ID NO: 4502 - DNA, 544 bp, Arabidopsis thaliana columbia
agagaattttattcttgttatatcattcgtatatgttacatatatattctcgattatcattctcttctaagtgcacttgggatatcatccatgatctcatcgaaggtatcatggtcaagtttaatttggtttcctcaaggtgtcctggaatactctttaattgtttggttagccatcaaagacatgtttataaccgagacaaaagatacgacgctcgggcaggtactgtactcaaatgacccggaataaagctggactgagccggaccaatcagttttggtatcactttcttcatacgcattaccatcgactttgaaataatcttaaacaagacattacaaaggcttatcggacggaattgtgtaataagctctggtttttccacttagcaattaacaccaacagagaatcatttgtttcttttggcaagatacccgtcgtgaagaaatccaaaacaaaacgattcactgatgtcccacaacatcccaattttgttggtaaagacgggttggaaacgtcagacaaggtgctttaacttcccatg

SEQ ID NO: 4503 - DNA, 624 bp, Arabidopsis thaliana columbia
gaccaatatctcagttatgatcttctcttgtgcagagaacagtacaactgtttttagctgggaagataggctcggtatcgcggttgatgtcgcgcaaggttagcatttgaaactctctcctgtattggactgaaacaatttctatttggagttctgtttataaaacatgttctgttattgcgactgaattataggacttgagtatttgcatactggttgcaagccgccgatcattcatagaaacgtcaagtgtacaaatgtattcttagatgaaagtttcaatgcgaagttaggcggttttggcctttcgagagcgtttgatgcagccgagggaagtcatttgaatacagctattgctgggactcctggatatgttgaccccgagtaagctcaaaacttcgtaaaataataaatgttcttcctttttttggttttcttcaaatgaagattgatctgtcattgcaggtattcacatcaaacatgttaacagagaagagtgatgtgtacagtttcggtgtagttctattagagatcgttactgcgaaacccgctatcataaagaatgaggaaaggatgcatataagtcaatgggttgagcattgctttcagagaaatattgtagag

SEQ ID NO: 4504 - DNA, 568 bp, Arabidopsis thaliana columbia
cactgttatagaactctgtatgagagtaaatatgtaaataaggaacagaggcaacgagctgacaacaaatgatgatttgattctttgcgttggaaatcccaattcatgaagaagaggtgcatcaatgcttaacccacagtgctggattataatctggtataaatactggagcaggatataaatttctgtgtacattagcatgatgacccagaagatgtgagtagggccagtgtgaacgcagagggcgtataggaacagtgctgctagatagaccatggaaagaagactgaaattccagagaaacgcaataatgaagcagcaatagcaaacaatatcgttattggactgcatcctagaccatatatgacgaaagatccttcctatctgaaaactagtgccatcactactcctgtcagattgtagagatgttgaccgttcgaaaggtgtgtgttttcttttctgactttccatttcatcatacacctcatcatcaacagaagactgctcatttgtatctgaattttccggcgagatgtttaagaaatcacaaggttatttactgcctgat

SEQ ID NO: 4505 - DNA, 537 bp, Arabidopsis thaliana columbia
tcgacgtcaaggtcaaggtaaaaagtgacgtagtgatcgtgtattactccaattacattttcagacagaagcgtgccgtgaagctcttcttcattaccgtctttatctttctccacttggtttttgttttgatatgttgtccctttcaccattagtattccacttagcccgacctgtcattattacgtacattagttagtgacaaaaaaagtgaaatatttattattccacggaatcgtatatatatggaatcttttataatttggaaactgatataaagtagaaaaataccttagcttttataagcccatcagtttggaactcgtaatcaatgatgtaatcatagttacctaccgaagctgccattcgtaccactagcgtcacttttggtctcacttcccttatctactaaatccaaattataatttacattaaaactcaaaaattttaagatttacttttcaaacccataaacatttttctatgtaaataatacccataagaaaaaaagactgaccggtataccggtgatggggc

SEQ ID NO: 4506 - DNA, 1045 bp, Arabidopsis thaliana
tatgacaagaaagaaaacaccttatggaaagggtttcttcaagaacctatatgagttgttctttgccagaattccacaacacatgatcaacttcagagtctgggctccagaggaacctgacgaggaggttggatccattgcatctgagctagaccgaacttttggacaccgaggagataaatatgatatggaaatggaaattggcggttgtaaaaacagtaaggtcagtttacaactccatacactggagtatgacaacaacaacagcagcgaagaaactgtcaagaagaaaggtgtaagcgaagaaaccgccgcgttttacatcccggggattcaagaacccgcgaatataacaagaaactcgagcattgatgtgagatcgaggtaggacaaccaaaaaaccccttggataagaacatagatctgttacagaatctttgcgcctgtgaacaatgcttgctgacttgtgtaaactatactctctttgtttctaaagcgattcactttttgtcttcaacgagtaaactttttcgactcagacaaaaaaaagatagcagaaagaatcaagtgtagtcattgtggcgtgagtttcttgcgttacagggttattcaaaacagtatcttcattgtccttcacccatctttggtttcctgagtacgtgaaataatataacggagccgagacaaaatcaatgttacatttaggctaagacagcacagaaactatcgaactctgttaacgtttatacacaatgtcattgatgaggaacaaaagctctcacctttacaatagaatagtagagaatcactctcaagataacaataataatgaagctcaaggaccagagcattatcagcgaagggagtcacacagaatctaatccaatccagagatcctgtaccagaagagaacaaggtcccagacttttcagacttggcaaaaccgaagcatacatctcatcgtgaggcttccagtctcggacaggttaagcagacagagagcacctgaaagaatgttcagaagaaatcggatgtttatatcaga

SEQ ID NO: 4507 - DNA, 538 bp, Arabidopsis thaliana
cagagctgaattatgtgacaatttacatgtgccggtgggtctcagctctcagttactctttagaaaccgtaacctgtacatatatttcttaacgcatcaaattattttacaggtgagaatcgctgttgtggggaaatatacaggcctctctgatgcttatctctctgtcttaaaggtagatattactcattacctctcagtggatagtgtctggataacaaaatgatttccttgcctcggttctcacatttggataacttgtttaggctctcttacatgcttctgtggcttgtcgcaaaaagctcgtagttgattgggttccagcttgtgatctcgaaaaagaaactgagaaagaggtactgtgactgtcttttgattacacaactatgtttttacttattcacagatcttaatgcagagtcattttttgttttgtttcgtataagcagaatccagatgcgtataaagctgcttggaagttgctaaaggtttgaaacgtttgccattttacaactttaatcatgagaagccttgtgtt

SEQ ID NO: 4508 - DNA, 578 bp, Arabidopsis thaliana columbia
tgtcaagtacctcgcgaactgcagtaccaacaaagtcacctttatcatcatccaacattccagcaggtaattccagaacaatcttcccagtaggaacccgaaccttccaaaacaacccgtataatgttgatctttgttaaaaaatagaacaacacgaacataaatagagatacctgttccagtgagaaccgcataagtctcaccatctgactccaagagaataagcacagctacagctggtcctcgtgcaaatacaatacctggaacctaatgacgttttagcttacatatggcaagcaaaactaacatatacaatgaccacaacgagcgagatgattctaattttgaagatgattagataccttttgaccagtttccttgtcgaaaatatccgctttgaatttgagaaatccaattcttttgccaaacatatcaactccctaaaaatcataaactaatcaagaaagctccaagattctatatatgttctgatcactgatcataatcatcatcagataattcattaggatcaagagtatctcaatgtgcttttatatatatatacctggataagacct

SEQ ID NO: 4509 - DNA, 523 bp, Arabidopsis thaliana
cttctctaacaatgtctacgaccaaagcattatcgcttcttgtgtttatactcttcgtgtcccttgttcattcatcggatcaatgtcctatcaactctatctaccaattcggtgactccatctccgacactggaaacttaatccgcaacggccctgttggagccagatcttctcacgccgctaattatccatacggtcaaacatactttcaccaagccaccggtcgtctatctaacggactgctaatgatcgattacttggcacgcaggcttcatctcccactcctaaacccttacctcaacgggaacacaacgtctttgttaacttcggagtttccggaagcacagcactcaacagctctttcttctccgagagaaatctccacgttccggcaacaaacactcctctctccatgcagcttgcttggttcaagggtcatctacgttccacgtgtcacggctcttcttcggattgcttgaagcactctcttgtcatggtcggtgagataggaggcaacgactac

SEQ ID NO: 4510 - DNA, 1226 bp, Arabidopsis thaliana
tgagcttggacatatagaggtgcataatgtcataatgcatgtatacgtcttttcaaggaaggcaaaaccagtgcaacaacactcatggtgcctttgaaattgatatttaataatgagccaccatagactaatttagcctaaggcatcatatatggtaaagccatattgaacaactatatatcaatgattgtatatcttagtttatgtggtttgttatagtaatttagaacatgatgacggagcctgagatgaatttgaacaggtaagagtgtcagggttgatgacaaatgcaccatacatgttgaacgtagactgcgacatgtatgtcaatgaagcagaattcattgtttgattacagaatcaacaattggcgcgccaggtaggggaatataaacaaattttctctacgctcctttaatcaaagcaagcatggttcaaatcatcatcgaccccgtcattcctccagtcaacgatgatggcacggagtcaagtctcctcaatggaggagatccaccatctactgtggaagtagcggccaaagcgaccgcgaatcaaccggcacacggggcgacccctatagacccaccatctttctccttggaggacctcaaagccatcctcacaaccgtgacgaaagatctttctgaatcggtcatggagactaatcgccgactcgacgagctggctaaaggaatctcccaacgtccgagctccgaagtgaccctgccgagaatcatccatccgcgcgggcttagcttcgacctcacggatgcacaatccaataggatgaaacccaggttcccaggatcactccatcctatcaaccaagaaggcagaccgcctatgcctccgttgacgtcgccgggtcatgtctccagatccgcaaccttagatcacgatggaaagttagatgatatctatttgaaactccgagaaatcggatcccaagtccatagagccagcagtttggccccagaaatcgaccgaatgatcgaagaaacccagaagactcctttcacggatatcgggttacacgtacgagaatccctcaagtgaagcttaggattccaatctacaagggtggaagcgatcctaaacaatacatgacatccttcatgacaacagtcgccaaagctcactttttggacgaaatccgagatatcggctgctgcagctcttcgtcgagggcctcttcggaaacgctttaacctggtttccagattaga

SEQ ID NO: 4511 - DNA, 548 bp, Arabidopsis thaliana
cgatcccctgtaccaagcgtcaaattaaactgtaaaatactctttgacatgtgttttcaattttataatttaactgttctatttttaattttaacaaatattaataaacccacacgtagcgtgggttcaagacctaatattatctaaaagagtgaaagatctaaaaatctgacaaatcctaacaaaaggcgagaatgaagcaaaacaaaaacgaaaataaaaatctaaacaccaatcttctccttaactctctccggtttagtttctccggtaagctcctcaagcgatatccccttaggctccagaattgcaaatttcgtgatcagcaagccagcaaaatgtataacgtcttactcatacctaaagccttaaccaaagcagcaaacccgaaagaaccgaccattgcaccggctttacctgacgccgcggagataccgtgacaagtcgacctaatcctcgccggaaaaatctcagccgggacaatgaacgtagttgcattaggtccaaaattggaaaagaaaaaggtgaaagagtagaaaatacaaaac

SEQ ID NO: 4512 - DNA, 1185 bp, Arabidopsis thaliana columbia
agacaaaagttttaactcaataaacgactatctaagttagaatgacacaactgactcataagaagagaaaagatgaagttagtaactgactcccctagacatagataacactgtccccaaagttattaagctagaggaatcgaaagaaaaataatcacaagttaaaagttagagaaacgtgagttgccacctgagagtggtgtcgatcgattctaggttggtgtcgatcgacactcaggtcatttttgcatcgctttgcgaattcagctaatcgttgtagagctttggttagtgttttcacatggatcctccagttagactgttaaatcactaaaacacagatcaatagttccaatacaaataacaaatagtctgaaaataaagcaaaaacaaaatcagaaaacaaagcaagatagggaggatggctagtcctcatgctccgagccgggaggtggggtgcgggagagcgacgacagtgacgagtggaagcaacacaaccgcgacgagagagtgtagctatggcgttccagacgctcttgaagctgtcgacgatgtactgatgaaagacctattgctctatcgggataggaggaggagaaggcagctcatatggtagacctaaagaagaagatccaactctcggacccctagtagggtcaatgaactcatcctcagtctgtgtaggtgcggatcctgaagctgaacctctatgtttcatggtgcgtggcgcggaatgcagaagggaaggatcgggatgaaaaccaagctcctcatgctctcctgtaattctgtaagcgcatggcaaggtaactgaatcatatggtgccatgtatcatctctgaagcaccaaagtaagttgcctttcagccagtgagagttcttcagataagtctcatccatagtgaatatcgttgtgttgacctcctctccctcaaagttgatgtgaaagtgctgaaatataggagtgagaaaactgcaaactctctcatatttcttctctttacctgtaaagggcttggtcttgagagagaccaagtgatgagcaaacacagagccaaagttgacattgcggtcaacctcctcaaatcccaagctatctggaagaaatcatgaacagcatgataaagtaacaacaacacataaagtctcatcttgcaaggttccatcttgcacaagagtgtgctg

SEQ ID NO: 4513 - DNA, 935 bp, Arabidopsis thaliana columbia
cattcaattactacgtaaaagacaacttgtgcttatacactaaatatgagcttctagagaagtaggcctcctttctgagtgatgttgtatgtttgctgtgtagcggaggatgagtttgacatcgattgtggcggtggagtctccttcatcgagcaacgctccctctagaaaaaccattgatcttggccatggaagcgacctcatttacattcagaggtttcttccatttcaacaatcttggactttcttcgattatctcgacaagcatattccttggaccaggcctactattcgtgtctttggtcgatcttgcctccaggtttccccacttcctctttctctgtcatttgtttttgtatacatatgatccattgaagctttattgtgtctcctcgcgggttacattgagtattgtgcaatgtgaggaacaaagattgccagggccatttccatgcttggattcaacttgtatctcagaaatctaagtcacaatcatgtgaagtcctgtataacttgtgtttgtggccttctaatacatatgcatttgccacctgtagccgagagatacttgttatgttgcaagtagcggattgactgcgttggtgtacagtggatatcgacctacctcctattcgtgggatgatttcccacctctcaaggagattctggatgctgtaagattgaaaacaactatgctatgtccctgtgttctagtggttgtttgaactaaaacgtttctatttcgtcttgtcagatttacaaggtgcttcctggaagcagattcaacagcttgctcttaaatagatacaaaggtgccagtgattatgtggcttggcatgcagatgatgaaaagatttatggtccaactccagaaattgcttcagtcatcgtttggatgtgaccgtgattttgtgttgaagaaaagaaagatgaag

SEQ ID NO: 4514 - DNA, 1397 bp, Arabidopsis thaliana
atcggtgagattgcatccatgggcgacccttgagtgtgttcggatgcacttatccttgtgcttcctcgaacacttttcttgatccatcccatccgatgatcggtctgtccgacccgatccgtccgacgatcggtctaccagattcgattcgtctctaagacgaacggtctaccctctccatcctctacactccatcgaaccgttggaccgggaggtagcatgcgcatcagttcggtcgagttatactcgccgagccgcaccccctttccgaccaacaacttcgggatgtgttgggacacttttaagaatgttttgtggtgtatggatgatgtgtgagatgccttgggcgtcctcccttatatagggggcgaatagatgcttcccgaagcatcacatccgttccttgcacccttccgaaaggtcacatccgttccttgcacccttccgaaaggtcacatccgttccttgaacccttccgaaaggtcacatccgttccttgcatcctttgggcgttgcaaatgttcattggtacccgctcgactttacaccttttggccgagacacctcttcacccgtgagctaccacagtccatcagctcgagtgtcagctgaccggaccacccagctgggtcagtactcgatcagctcaccgagctcagtcgagctgtcggtcagctcacctagctgagctagctagtcttccagctggtttagctcacctagcttagctagctagttcatccagcttgtccagctcacctagctggttcaacttgaactttctcgttcttcctactaagtattttggtccgttcctcgaccatgatctagttttctcctaaaataaaccggcctctttatgaaagcgggacgcggtcgttacagacctagttacgctacagtgaaaatgatcgatcacaacttagtagagtttccagttgaatctggttctttaacgaaattataatcgaccctcctcccactaggaacaccactttggcttgctaatcttcatgatattctagtgttgagcgacccggagtaggtcttatatcatttaagaaaacactttatgcatagtatatagcttatacttggcaaagagttacccaaaaatatatcattttatcggatccttgttaaaatttacataataataagtaattttgcaaaagcaacgtaaagcatcctatttccggcatttcctagtgttcgtctcccgctatggtcatcctactatggttacctgtaagacaagtagactcatgagtaatctaagatgtactcagtgagctgggtctatgcacaaataaatctctagggtttaatcaacttaataggtaaagttatccatcagagatcacagagtacgtaataaacgtattatcatatactta

SEQ ID NO: 4515 - DNA, 1158 bp, Arabidopsis thaliana
tagtaacggccgccagtgagttaaggttttaagattcaaggacacaaagaaaaactaagagataaaagcttggtcctttggacaaatcccaaagtgacctatttatattaaagtctcaaaaaccctagattcactagaagacaagacacgtgaggcggtttggatggatgctcgatcttggggatcgagtaaagagggtgctgcaaaatttgcgcctttgcctccatgctctgagtgatcaattggtcaagcagatgcttcttcctttcttatctgtatgctcagatgtctggttgagtggggaatgaggaggatccgaaaacgctttgatagatcagcaagtcttgtagagtaggtcgcccttggtcgagtaagagggtcgagtagaggatcgagtaggagggtcgagtaatgtctgctccctcctctttggctgtctagatcgagtaaaggggtcgagtgaattgctcttttgcttcctgctggtttgatagagtagagggtcgagtagaattccttgtaagctccttctgcacctgaaaacacaccaaaacatgcaatatgtatgcaagatgatcctaaatgcctaagtgtgcaaaataagctaaatgtgatgcaaaatgatatgaaacaatgagtaatcactaagataaatgatgataaatacaagcctaaaatgagtaaaatatagtgttatcagcgctctttgacggatatctcctgccaacatcacattattcgaaaattgtcaaagagcacgccgagatgtccgaaaacctaacttcgtttcttaattatccttggggttgtttgacttttgagatgacgatgaagtccatcaaagagagagaaatagaacagctcacaaccacatctttagcagttcaaggtctattgtacgtccttcagcttgttgttcttcaagccgctcctgctattcaagaaggtcctgtatcggaagagacgggtaggtctgagtctgatgaagtgactgttgaactaaaccccatcagattgttccgtttaaactcggtaacgccaaagatcttgacgctaaatgtcaggtgataaactattgaataccggatactatttaatgttttgtgttactgtgttattacgcagacccgtgttgatcccatcatccgtcccgatgtc

SEQ ID NO: 4516 - DNA, 1328 bp, Arabidopsis thaliana
tcctcctgttcatgatatccctagaggttcacctgttgatgtaaatcctcgtgtgaataatccgataccattaccggtctctcgtatagcgggacgagtcacaagctcttcgggaggttcgccagctagctctgagtctgtggtctctgtgttgcataataaccctgaatcatcatctggctcagcttctgtatcaccagtttctggtcatagacaaaatgggaatcaggttcgtagaccggttgtgaaattcaaacctgtcgatgatcatgatcgaattgaaggtagagaagctgcagaggaggaggataacaatgtggaggcagagacagagagggagaggaaggttcatgagtgtactgcaagtacgaagagacggaagaagaagaagaaaagtgagtgttatcgatgcggaaaagcgaaatgggaaaataaggagacttgcattgtgtgtgatgaaaagtattgtggaaactgtgtgcttagagcaatgggttcgatgcctgaaggaagaaagtgtgtgagttgcatcggtcaagctattgacgaatcgaaacggtctaaattagggaagcattctcggggtaatgtcgcggttgcttagtccattggaagttaaacagataatgaaggcggaaaaggagtgtactgctaatcagctgagacctgagcagctgattgtgaatggttatccattaaagcctgaggaaatggctgacttgctcaactgtcttctaccgcctcagaagttgaaacccggtagatattggtacgacaaagaatctggtctatggggcaaggtaatgtactactatatatgtaacggttttggtacttgtttcaggttgaaattgctttgtttgttgtttattggctattgttgttgtaaacaggaaggagagaaaccagatagagtcattagctcgaacttgaacttcaccgggaagctgtccccggacgcgagcaatgggaacacggaagtttatattaacggtagggagatcacaaagcttgagttgaggattttaaaggtaacgtttgatattgtcttgttttaagtatcacatgtcaagaaacaatcgaatataataaaccttgcttgtgtgtatatatctcagctagcaaatgtacagtgtccacgtgatactcatttttgggtatatgacgatggacgttatgaggaagaagggcagaataatatccgaggaaacatttgggagaaggtaaaatataataactcttcatcagatccttatcaagtgttgctgttttaagaaatatccgagttttttcggtttggtttaccaggcatctacgaggttcatgtg

SEQ ID NO: 4517 - DNA, 829 bp, Arabidopsis thaliana columbia
ccaaattctttttgtttccctaattgctcaagaagtaatatcttcgtcattctgtttttattcaaggtacatagaaagattgatcctagactacatcaaattgggtgtagtcagtgatatagcttccccgaagttagcggttttcgaaatctttttgaagcggtttcatatgatcgacccagaagattttggtactacgacgtgacgagtggttttcagaagaacacatcttctacacgtgtctttaggctaaattatacgtgcaaatatttttgctaacttcattatgatttagttatttgaccgttaatttccgcttgtattcctctttgagcttgaccattctgttttttatctgcttttggtttttaaatgaaatcgtttggtccgtccacaaaaaaaaaacagtacctatcctctaagcccggcccatcccggcccatcccggcccatcccggcccatcccggcccataccggcccatattttagtaattatggttcctatcttcgtcttcttcgttcagaaatgggaagcgagaaccatagatttacgtcaagatagctttttttctatcaagaatcgcaaagctatttcgcgtaacattacaatcgtcgttcagaagaaacgaattgggtttgacaaagcttcgatattcagggagatttctgggttaatttgtgaaagaatcagagaaatttagagttttttttttgggggtaaatttgagatgaaccacacgaagattgggtttatgaacgatggacagtagaatgtgtttgtggtgtaattttgatgatggtaaaagatgttgattgtgataatgtggt

SEQ ID NO: 4518 - DNA, 1148 bp, Arabidopsis thaliana columbia
  unsure (1)..(1148): unsure at all n locations
tcactgtatatagatctgaatgaaactctcaagaacaatggatgaatagcttatatctctcacaatagggttggcaaagaacttgataaaagacttgataaaagaaacttaggtctaaaaacaatatatatagaccctaaagacgtcaagggactaataatgcaaataaggaaatcttctggggcaaacttgagcttctgtaaactcgaaagcgtctaggtttttgctgggccgaaactgctgtcgatcgacaccaagagtgtgtcgatcgacactcctcgctgattcctgaaccaaaatcgtccttagcttccttttccttagcttttgctccagataatgtctacttatctccattgttgtcccactgcatagaatacctgaaaagacactagaaagactcgagaaataacataaagactcaaaatcctatacctaaaacatagataaaatcggtgaaaatcgggttatatcaactcccctagacttagcttttgcttgccctcaagcaaaacacaaaagctgaacccgtggaagaggttttgaaaacaaaggaactcccaacattctctagcctattgccatgatctttcaaactaagtccatatgcctaacaagtctaatcaaatcctaaccaacatatacttctctgcaagcttacacaacattctagattccatacctaagttccacaactatatccaccatgctttcatcgctgggtctcatcaaacaagccagcattcaagatccttctagactcattcatgtactataccatgataaattgaccattcttttatatattttttctttttcggtgttctttctctaccccagacttattctttttagagattaaagaaaggggaactcgcatactggatcgacatcctcagcatttttccaacctttgtaattgatcattccaaataatgtataataatggggtcatagaaaacattcctacccctatacactatctgaaagtcatctcaatctctcattatcttttcgtttttataaggtgagaggaacatattcttgtttacacattggcncaatacaggtacgacaaggagcaagatgtatgatactatcgttgaagagtaaaggagacagtggattgtcagcttagtggtgagtgg

SEQ ID NO: 4519 - DNA, 1329 bp, Arabidopsis thaliana
  unsure (1)..(1329): unsure at all n locations
gtcatctctagatccctcctatttagaaaccaaacattgttgaaaatataattttatatatgccgtaatcttgtaagttaattttaacatcatgcaaatattaaatgagttaaaattaataaatgaaaataattgaaaaggtaaatcctataagctaagctatttttctcaaaatgttctattttcacttatgattacatgagttaaagacaaatttgttaattttccttttgttgaataaatgttaattgtttataaatatatagacatataaattagtatatgtaaatttgtttactttttaagattttctatttttttagagaattaaaaagttaaattttgaatgacacatgtaaacatctgatcgtttgacttgacacgtggcacaatcctatgagttagcaactttgaagaaccatactttatataataagattactagtccaaaagatagcattacctcttcattcctcgcgtgtaagacgatttggctaaacctatgaaaccctaaagtctaccacatacatacataggaataggataatgatgtccattactctttttatagtttattctctttgtataccttcaccactgatgtatatatatacacatgtatatagctcatcattcttcatctcctaagacattcacaaaaaatgtcattacctaattcactcttctatacatttttcttgatcttattctcaacgattcgaattgctcaaagcatatatttaagtccatcaccggctccaaatccggcttacaatgataacgacaatattgcgccaaccgtcttcgacgtgacttcatttggagccatcggganttgctcgaccgacgacacgtcagcattcaaaatggcatgggacgctgcatgtatgagtacagggcctaagtcagccctgcttcttgtcccttacactttctgtttcttggttaagccaaccaccttcaatggtccttgcagaacaaatcttgtactacaagtaagctaatttcataatcatactttaatgttctgtatatagtttttcatgtacggaaattttcttccttatagatcgacgggttcattgtatcgcccgatggaccgaggtcatggccatcgaactaccagaggcagtggatgatgttttacagagttaatggattatcaattcaaggctctggtgttatcaacggccgtggtcagaaatggtggaatcttccttgcaaaccacacaagggccttaacggaacgactcaaaccggtccttgtgacagtccagtagtaagccatcgctcagaatccactttttcttgttatgaaaaattagtgaa

SEQ ID NO: 4520 - DNA, 572 bp, Arabidopsis thaliana columbia
ggtgcacaattgtcctaggagagtggtggagaggacagtggcgcctgtgaccgtggaggttccagtgaatgtttccggtgggacgccgcaggatgacggttttacggtggttcgaagaacagggccgtaagggaggagcaccggaaaatagtggggtggcaacagctggtcggttgagcacaaatttggaaaggaatctgcgtgatatttctgggcgggcgaatatggaaagcattgatacctctaacagttttgggaatttggaggaagtgattgaggggagtgtaagggaagttgctgcatcagtggatgcgaataaagaaaatatgatgaatggtaattatgctaaaaaagggaagagtgttgcacaagggaaggcttgggcgccagtggatttaatgaataaaattagggccggaaaaaaagataaaacggctggaggcaaggtaggagaggctaatgggccaaagcccagaaatggtaactccaacaggcctgtgcgtgggttagtttttgcccgacaaggaaggaaattgagttatctggctcggggaaaaggctgagagtggatg

SEQ ID NO: 4521 - DNA, 603 bp, Arabidopsis thaliana columbia
tacaaatatgatgggaaaataaaaattattaatcaaaacttagttatatacttatatatgtaactctgagaacttgttgttacatggctgtcgagttcagcttctcacttcctagtacagtaaactaaaaaaaagacgtctctgttttgtgtctgctgaagattttgattgatattgtttgtgcggattttggcaaaaccataactatgcagtggacccagcttctcttcccaccggcgtggaagtgactcacgtcaatctcaacgacggaagttgcgccggtctctcttttccggcaatgcatgtcatgtctcttcagtatcaccctgaggcttctcctggacctcatgactccgacaacggtattaaaccattctttcttttccgttttgtctggtacctatcaaaacgtaaacgctactaaaacgctatgcattaatttttgcctaatcttttcatatatgcagcatttggagattttgtggagcttatgaaaagatttaaacgaagcacttgatctcggctaaatcagtgatctagcgaaggagttttgtttaggtggattgaagttggagttgcgaattttcttgtcgtgtgagaaat

SEQ ID NO: 4522 - DNA, 439 bp, Arabidopsis thaliana columbia
tagctggagcttgtgcatatggctctatggctaccggtttcttcgccggacacattgctgcggctctgccttccatctacaaagacggctccggctgcggacttgcttccaggtcagatgcaagaacccgacgctttgcagcagcaaaggaaccacggtgattgtcacagacttgaacaagaccaaccaaagcgatcttgtccttagcagcagaggctttagggccatggctaagcctgatgttggcgccgacagagatcttctcaaacaaggcattgtcgatattgaatacaggaggttcgattcccgaaccatctatggtatgctagcttctctcaatttccttcaagtagctagtagtaataagaactactgaatattgctacagagttccttgcgattacggtaacaagaagatgaacgtgagagttgaagaatc

SEQ ID NO: 4523 - DNA, 567 bp, Arabidopsis thaliana columbia
tagctttgccagactcatactcttgaatcacttgtggcttctcattgatgatctacacaaaaagaaacaaacactttgtcatgaaccgagttacaaaatagggtaataataagggacatatagagagaaggataatatacttgagcaagttgggactgggttagcttcttgtctgtcctggcttgcataatggctttctttagctcagtaggcacacgttcatctgaattcacaattgcataattcaaaacatgaagcttcagcatccaatacacatcaatcaataaaaagttcctctcactataaccatcaaagactcacaggcagaaagatagacagactctactcatataagaacagttttccaatacgttgaacactttgaaacaagaaatgaacacattagcctagatacagagcctgacactaccatattctagacactagggaaatcaattcaccattaataaaccagatgattaaagataagacttacgagtaaggttctcagtgtcatcatcaagcatttttgtgttcagagatgtgccgcttgatgcgccttgttgg

SEQ ID NO: 4524 - DNA, 570 bp, Arabidopsis thaliana columbia
aacgataccgtgacatagacatcgtcgtttaggttgatgagaactccattaaccaaagctttgtcaaagtggcatttagcttgctttattatctcttcatcttcttttttgccactgtaaaacaaaatcagcaaacagaagctaagcaacaaaatcataaaagagacaaaccccgtaaagttataccccttatttgcaggttttttggtcggagcttggagctttgttttcttggattggtagcgatgaggccatcgaatcgtcgactccacaacagacattggtttgccagcgaacgacagatctgactctggctcagcgcgtttcttttgtttgtttctcgctgccattttcgcagagaagacgagcaagtaaaagatgaagcgttgcagagacgaggtctatatgtactagtcgtgactagtggagcaaatatattaatgttaaatttcaggaaataaaatcaattccaaattatggagaaaataaaaaaagcgttgtggagtgtacaaacaattaatgagaaactttaggaaataaatcatttttcgaattatggagaaataaaga

SEQ ID NO: 4525 - DNA, 410 bp, Arabidopsis thaliana columbia
taaacatgtgatctgtccagcattcctcccaataccgcaacatcccgcgttcgtcactctaaaccctgaaaacaaaaaacgtttccgacaaatcagataacaatttcggtttcgttcatacttaaaagaaaaccacacttgtgtttgtgtgtatatataccaaatctggcaggatttgtgatcatgtcctggaaaatgccattaggcattgaggtggatgaacttggaaccaggttgatggtggtgagccggtccacacagagatcttagcgctgttgttgaaaatctggtttgctgagatgatgcggtctacgcaagtcccaccgtcgggacatgctgcgagcgcgttaggactacaaaccaaagtgctccaattccactcagtgcaaattttcgagccccatagttgt

SEQ ID NO: 4526 - DNA, 841 bp, Arabidopsis thaliana
gtaagatctttgggaaacggcgttcctgagatctgctgaactccggctaactggtataggccgggaaaatcggtttgatccattttggaagcttgtgtgggagctagagtgggagagatacataggaactgtgtgtggctgcattgaggtggatggtaaagaagggtctactctgatggatattggtagctcatgagatgactgcaatggggttgtggaggatgatgataagagaaacgatgacgtcggggtcatgctaggagtccgagaaagaaagggtgtgtgctctgatgggggcttgtcggtactgatgcttcttgcatcgcgtttgcaaaccgggcaaaaggatttcctctggccaagccacaagtctacacaagcaacatgaaattctgccaagacaacaagaagaaccaattaagaatggttatgcatgaatttttttttacttcgaactgagtcaaagtacttactgtgatggcaaggtaggatccttagcttgtcccctttctcataattctcaaggcatatgcagcacaatatagatgtagttgcttcatcacaaataccgttaaatatggtagtaggcatacgtattatcatgcttttgggcatacgatgaaagtcattgccattaagagccagaatacgccgacgcctaactcgatgcctacggacaaagaagcaagtagcgagcacagccgacatggcgaggagagatatgaaagaaatagccatgattgaccatgctgaagtctcgaaacttggcatgaccacacttcaaaatcggtacgacccgcatactctttaagtactccccagttgctttggagacaaacgt

SEQ ID NO: 4527 - DNA, 511 bp, Arabidopsis thaliana columbia
aattaacaagaatccaattgttccacacaatcaacaaaccacagaaaaaacacaggaaacttgccttccaatatggcagaagatcagtagaacgaagctcagcttctttaagagcagtgtaaacagcttcaatgacaggactatcagtagtcaaagaatcgaaattgtagttaaaaagagacaacccaatgacatcaagtgtcatctgagagaacttcgcttccatattcacagcacttccgtcttctgcataaggctgcaacttctcaacaagcctctctgcacatttgcagaatactctctccacaatcacagacaaatacctcctgtgaagcgatggaaccaccgctctacgcctcgcctatgtaaaaaatcagacttcagctaagcccaatagagaagattggaatctaaaccctaaaattagagttacttatcatacaagacagtcacacattacttccacaattccaaaaacttcaaaattgagataggaggagatgaaattact

SEQ ID NO: 4528 - DNA, 210 bp, Arabidopsis thaliana columbia
ccgtggtggccggcgtcctcatcatcgtggtcgtgttcttgccgctgctgaccttgcaggatctggaaggcaagttctttgtgcctgtcgcgatgaccatcgtcttcgcgctcttcggctcgctggtgctgtcgctcacggtcattccagtggtcgcgtcatttctgatcaagcaggtttcgcatgaggacccctgggtggtgcgaaact

SEQ ID NO: 4529 - DNA, 523 bp, Arabidopsis thaliana columbia
  unsure (1)..(523): unsure at all n locations
nnnnnnnnnnnnnnnnnnnnnnctaaagatgacccagtttgattacattgatgaatataaaaaacagggaatagtgggactagcgatgtcgacagtggtaacgtcatggtccataaaaatgacaggagcagttttcgtctcaacattcagccccgtcagcctcgtcgccgctacgttattcgatttcctcatcttacactctcctttataccttggcaggtttcattctcaaatcaactctatatagtatataacacactaaggtcgatacaagcatgcatgcactgatacgtttatattaaaaatgcagcatacttggatcagtagtgactataactggcctctacgtttttctttggggaaggaagaatgagacagatcagtctgtttcgaagactttgaacagttcccagttttctcagaataatgataacgaagaccatacaatagcaaatcatcaggatactaattctgccgtttgacatatatatatatcatatttatagaggtagctagatatttg

SEQ ID NO: 4530 - DNA, 535 bp, Arabidopsis thaliana columbia
cgagcaggaggcaatgaaagtccaaccaccgagtaagattcctatagtgtagactatgagtggaggcaacaaggactttactatagccgttttgttcacccaacgtcccttgaaaagcactagtgtcgcgagattcaccacgttccatccgcctgactttatagatagacggttcaggttgttggctacaaaggaatgacagttgcatgtgagtatgttatatgagtgatgttggtactcttgcgtgctttttctcagtgcatcatcccatgttggctctttctcatgactatcttcttcttgctcatatctcctctcaccattgaacataccagaactggaagaacgagatgactcctgattcaaatccaaggccaatatgaataaattgttactttgtatcaaggttgaaaatgaaagccggcatcttgcaaacgttaccatttctttgttgatttgaatatatcgagaaacagctccaaatgcaaaattatcaacacagacaaaattaggtcatgcaaagtcgaggatgaca

SEQ ID NO: 4531 - DNA, 538 bp, Arabidopsis thaliana columbia
atttttataaacacataataacagtttgaaaaaattacttacctaaataaaggtaatattctcgtaatttactaaaataattcatacaaaatataaaaacaattacaaaactcttcttttttgggctctttacatcttatttatactttgaaaattacgatatccatttagagaaaaatataacatgcacgtcacaaatttatttattttttgaaaaaaattacacacaaagaaaacgacaacttcgttccttgttaattgttatgatctctccgaccaaacccaagcagcttctccctcttaaatacctcttccttcttctaagatctctggaccattctgtactttccctcaaacccaaaacacattttgttttttgtttcccatctaaaatgcgtatgagttgtaacggatgtcgagttctacgaaaaggctgcagtgaaaactgtagcataagaccttgtcttcaatggatcaaatccgctgaatctcaagccaacgccaccggtcttcctcgccaagttttatggccgtgcgg

SEQ ID NO: 4532 - DNA, 607 bp, Arabidopsis thaliana
tccgacgtggaatcacaccgttaagttctccgtcaacgagagagaagccaacgaaggcctattaactataacggtcaagctatttagctactggctagaaggtgataatgacctgtatttgggagaagtcaacgtctcggttcaggatcttcttgcctcaaatccgattccacccgtttactaacggtaacatcaacaaaatgaagtcaatgacttgccctatcaaggccaccgaaaaaagtaccaacacaacggtgagcctttcataccggtttaaacctgtaccggttgaggaattttaccctccgtcaccggattctttgccatcgattggtaaacccgtttaccgagacctggatccagcaaaattaagtcagcctcttgtattttctcctcggtttcaagccaccacgacgaaactgatcctagagctcgtgatcaaattcgccaagaacatcgaagatgtcaacgccttctcgtccatggacgtatacgcttcggttgcgattcttaaggacagaaaagttaagaataggataacacaccggtggcttttccgcttatacaaaccaaagtggaacaaatgatgaattttctaatgatgaga

SEQ ID NO: 4533 - DNA, 550 bp, Arabidopsis thaliana
tttgtttctacggattcatgttgagataaaccgtaaacgagttcatagttacctttggtatctatgaatcggtgaatcccaatctttagccattgtttcagagttgttgccattatagtctaccattgcggcctttttatatatcattcatgttagcattagggttataatttctaaaaattgatcacctctttaacttgtgcctagaatgttaggcagacccagccaaaaaattaagtgggtgaaaaaacgttacactggttaacataattattgggcttcgtggcttctctctcgttgacggagaacttaacggtgtgtgattccaagtcggattagaacctccgttatatatcaatgggagttttggccgcttgttgctgttgagttgtgttgtctttgattgaaacgacggcgtatacgtccattttgtccgtgacatattcgatatggttgacgtcactagctgatacaattttgagctcaagagttgggttcccacggctctttgaactgtgatgaagatattcgagagatctagtattgtttg

SEQ ID NO: 4534 - DNA, 595 bp, Arabidopsis thaliana columbia
taatccactcagttcttgaaactcaaagaaaagagtggggagaatttcttgatgagttgagcaaagatgggaagaagacaatgacggaattagatggtatgatctgctcacaacttggaactctgagggacaacatgcgccacaatgttgacgagatatggcaagagctccgagatgagttgagatctaaagtcgacgaggatatcaaagcttcgagacaagatctaaacaaagatgttaaatctgtggccgatcaactccgcgagacctaccttgccgtccaagaaaccatcaaagaagccaagacccaccgaaacctaccttatcaaccaaaacaatagacgggtgataagaggcgaggacgttgagggatttacgagctgagggagcaagtgcaacaactggcgtttgaggcggagattaccgcagaggagctctcaagtgcgacggtggagttggtggaggcagggatcgagcaatgggaggaggacaacttcgactatattactaccctccgtcacatgtatctcgatcatatctagtttatttattagactctattgtgtctactttcttgcagtttttattttgttga

SEQ ID NO: 4535 - DNA, 124 bp, Arabidopsis thaliana
caccaaggtgcgctaccgcggcttggcgaagaacgcggcgcaggtgctgacattgttcgcgttgtcgaacctgtggatggcgcgacgacgcttgttgctgccggcggggtaaatccgcctggtg

SEQ ID NO: 4536 - DNA, 534 bp, Arabidopsis thaliana
tgagtctggtaagcacaaaaacgtggggagccttggtaactagtcacagccattacttcttctacctcctcttagcaatttctatcttatatgctaccatttatcaaacattctaacgcttacccagttcatgaatggtggcctcaactgtcagataagtttctcgcatcctttccagttggaagtccagctgcccgatatcttgatgatcgttgctaccgtcaaccgtagcagacaataacaaagatgttaacagagaaacacgccagaagtctttaatatctctaagtagaaaccctgtaatagttgtaaaacacaacattttagttacatacatatggtcagatataatatggtcattataccacaagtgttataatactccgtcgtctagaaattaccaatgacactgactaactaatatttactagtgattctttttttatctgctcaagttttaaaagtgggagtaatcaatactacaaaggctatagaagagaacctgtgagtattcttatttttgaagttgctggg

SEQ ID NO: 4537 - DNA, 856 bp, Arabidopsis thaliana
tcacatcattaggtccacatgctgctacggaaggaggaagaggaaagaaatctgaagcaacaaatgtgtcgggtgcagcaagtaccaagtagcgaaccatctcaattagagcagatagagtataagctcttcgagagttatcaacaagatcagatccaccaggagcaggttcctgaatgaaacggacagcaatagctacaagactctgtacatatgtctgagagagaacaatactctctaaaacaccatacacaatggggagtagcagctgcaaaatttcaaagatctccttttcctgcagtaaagcaaaatggaaattcacaaagctgaagaaatgaaaattcatcttgaataagtcaattaatctaacagcatacctgtaagagcttgagaacccaatcaacaatgagattaggaaaaagaagcccttcagcatggtgccactgtagaagacgcaccatataccaccatttaaaatgtagagatgtttcctcgccgtaaaggcttgttgatgctggactattcttttgcattgatcctgtataaagcatctgtggtgacctatctctagtttgctgagcaggaaatgagctattccgtgacaaaagttcatccaagaggtattgcaaatattcaataacatcttttgtccattgctcacaccgagaagcttgtgtcttgtcaggtgttcctgaagaaatagcagcaggactaggtcgcacctgcaaattataagcaaaacttgatatcctccaacacctagagaaatcaattagagataccaatttattgcccaacaatgtacctgattgagataagtcacttttataaccaagtagctctcaatagtgggaca

SEQ ID NO: 4538 - DNA, 433 bp, Arabidopsis thaliana
aatataatcgaaaagtattccattatattgattttcaatttcaattaaatcgaattgtattccattaaattatgagaagttacctttgagacgcaactattaatatcaaatatattaaaagttataacggtttggtaaaataaattaaagaaaattcaaattcaaagtaaacatatacaaaacacttattcaaagtcacatacatatataaaaactccttatataactttttataaatgttcaaagaggtattggatggaggaacaaagacgcaataagttgtaagagcttttgatcaggatgcccaaatccatcggcttctttgtaaaacaaatccattacacgcgcaatgttgacgggtcgcaccagaatctgtcgtggcatagctttggacgtcatgaactcctcaatcattatcttataactctctctt

SEQ ID NO: 4539 - DNA, 521 bp, Arabidopsis thaliana
gctttaacttcatgtggatccttcaacaccagcagctccatgtgactggcgtggcgttggctgtactaaccaccgtgtcactgagatccgtcttcctcgtctccaactctccggacgaatctccgatcgtatctccggtctacgcatgctacggaagctcagtctccggtctaactctttcaacggtactatccctacttcactcgcttactgcacgcgcctactctccgtctttcttcagtacaactcactctccggtaaactacctccggcgatgaggaatctcacctcgcttgaggtctttaacgtcgctggaaaccgtctctccggtgagatccccgttggtttaccatcgagtctccagttccttgacatttcgtcgaacaccttctctggtcagataccgagtggactcgctaacttgactcagcttcagcttcttaatctctcgtataatcagttaaccggcgagattccggcgagtctaggtaactccaaagtcttcagtacttatggcttga

SEQ ID NO: 4540 - DNA, 468 bp, Arabidopsis thaliana
taattttagcatatacagtacacaaattacttttcatgtttacttctttaggtttatatagtaagcaatacttacgacggtttacaatccgttgctcagttatggtacgagttgaaattcttgaagggatttttgtgtggcttcttgaggaggatccatactctggtactgcatagtttgttgcctgataatagtataaatgctaagaagtttagagtatttaatcacttggccttgtcttcgatttctcagaccaaaaatggtgaatcaataggattgagtagcaatcatgtatgtattgtctagtttcggacatggaaagagaaacaagaaagtggaccaactacgagatatgtcattcatatttaagagtagttagagtctacaagactagacctttaaagaaaggaatctgatatgtatatcttatagaaaacagtacaaacctatgtaaccagaaaccctaac

SEQ ID NO: 4541 - DNA, 598 bp, Arabidopsis thaliana
tgatctgcgccgccgaggataagcattacgtgaaagtcaccggtactcctcatggctgggatgttttattctacattttccagtttattcgtgttgttcttctcttcactgtgattgtgttgattggaactggctggtccttcttgaagccattcttacaagagaaagagaagaatgtgttgatggttgttgttccacttcaggttctcgctaacattgcttccattgtgattggagagactggaccttttatcaaagattgggttacttggaatcagatattcttgcttgtagatatagtttgctgttgtgcgatcttattccctattgtttggtcgatacgttcgctaagagagacttcgaaaaccgatgggaaagcggctaggaacttggcgaaattgactctgtttagacaattctacattgttgtcatcgggtatttgtactttacgaggattgtagtgtttgcgctgaagacaatcgcagcttataagtatcggtgggtgagcaatcagctgaggagatgcaagtctggcgtttacatgttgatgtctatatgtcaggctgtcgagagaatgagtatgcgttatagatgaga

SEQ ID NO: 4542 - DNA, 1962 bp, Arabidopsis thaliana
  unsure (1)..(1962): unsure at all n locations
gccagtcacaatttacttttgaacacgttaggacataccgctccttatcagactttttaataacatacccaaaactgttagcaaatgtacctttgtccaccacttcctacaatgctgccctgcttggaaattcttgtcgcaaagtcaaaccgataccgtcttcccattctttcttaaactggctagattctacaacaggcggtggctcaacgtattcatcacccctatcatcatcatccctatcatcacgtgatccaatctcaggatcttgagtatcaacaacctccactattgcctcattttgttatgttccttgtccctccaattcgcccatcacgatggttgcattatctctcatttcatcatcatttgaacccaaatcagcatagttcttaccaatagaacttttattgacgaccttcctcgggcaattccagtggagtgatgacctcaacagtcaaaggatatctactaaccatttcacctgaagatatatagacaccgacatcctcatcatcattaatgtgtatctcttgagttggtcccaacatcactgcattgtacttgatttgcaatttaacctaactttcatctaatccaagcttcgagcaaatcctaccttctaacatgcagagagttattttccctcctggtgtattcatcatcaagttgtacgctcgatctttccatctaaaatatatgatcaccttctccaccattgtatcctacaacaacaatacaaaaactctgtcagatatactagttatactacagttctgggtaacacaagtataactagtcatactacacatatctgtataatacatgtataattaataatactacatcaaaatgggtaatactattgtaccaaagaaatactacatgtacatggttaatactagtgcaactgtgtcatactagtgaataatgtgcagttctactcagttctaccagatgtatttcctgacaagaactcaaatcgaatggttacaggttcaaaactacaattcactatgattcaattgttgtaatccatttcttactcatttacagatctattcaacccaggcagtatgcataaacttccaatgtgcataccaaacacaatttgcttaatctcaaatctaattgacaaaatcttttagttctaatcttcaattttaagctctattcagctcgagaaacatacattttctttctatgtcgacgaagctcgccggagataaggatatgtgatgtaaatcgaattccggcacgagagcgatgggtgagctcgagcttcagaggagagagagagaggagaagagagagagttttgggttttccgttttttttttggtttcaatttttttttctaaaatttaattttaaaatgaatattagagaaataaggaggaggggtaaattggtctatacacatctcattaaaagagaaagtgatatacagatactaagaggagttgagagatttgttgtttgcagaaagggagttatgagatcatttctccgtggacgaggagagacaagaggacgtctgtaatngcactatcgtggaggaggagagacacgaggcggtctcaatggaggaggagagagacgaggacgtcttagtggaaaaacccgtggaggagaagaggagcaaacacgaggacataaatgtatttggttcaaatattaaatataaaataaacttttatatgtataaatctatgaataagtatatgtaatttcgggtaagcggatactctttcgggtatcgggttcagatcgtgttttaccctatacccacgggtacgacaatctaagacccaatagggtaaatagctaatacccatacccacctcgaactgttttttttcgggtcgatttcggttcgggttttcgggtatgggttttttgcccaggcctacccgtgatgagccgcggtatacacgttccgtattccctttatgaggcttg

SEQ ID NO: 4543 - DNA, 915 bp, Arabidopsis thaliana
ataaacccttggaagaggcgacttgggatttctttttgatcttcagacaaagttttcagactttgttgcttgaaaccttgtggtcaaggttctgctaaaggagggagatgtgatgaagaaccccacacgtgtggttgtcacgtggaaatcaagtggaataaagatgggatcagaagtcgacacgtggcgtgtgaaggctggccgattcaagtttgccgtttgaccaactatatgagccgactctgcttttctctttcattatcgaaaaatcatttgtaaaacattgaatcttaaaatctttgcaagctaggtttctctcatcttgagagctagggattgtcatttgggtgtttcatgaacattgatttgactgactggtgacggagtttgttaattggaagtatttttcagttaatcggaggaatccatagtttctctgtattatccacacggccatcaaatccatctccatcaccgtttgaagatgaagtctttgttagagaaaatgacattgcatcgcggctacctgagctgaagaagctcttggttgtgttgagagagaagagagttaaaggctgcaaaggcggtgattgtggacccggagatgtgtatcttctggggacaggacaaggagatcctgagcttttgacttttaaaactgtaagagttattcaaagtgtcgatctttttctttaggacaggcttgtctccaatgacgtcttggagttggttgtgacgtaaaagaatcctaagtactttgactagaacaagaccacaactccaataaacacactttattagaacaatcttcacactaatcaatcacagataagtttggacagagttacgcaacatcaactacctgatttgctcctgtcagatcctaaagctacccagttcacaaacacaacaaca

SEQ ID NO: 4544 - DNA, 522 bp, Arabidopsis thaliana
atcagtggtgattttaacgacatcatctgcaattctgaaaagactggaggcccggaccgctctaaggggtctttcactgacctgcattcctttatgtcttcatgcgatctttatgacttaaaacatacaggaaacttcttatcttggagagggaaaagacattctcactatgttcgatgtagactggatagagcaatggcaaatagtgattggataattgattatccttcaggccgcagtgaatacctaaggtttgaaggatctgatcatcgccctctggttacctcttttgatcttgtgcaaggaaaacaaaccatattcagatatgatagaagtcttaaatataatcctgaagtcacaaagctggtcctagatacctggaaagcaaaaccgcatgcgaagattgaccatcgtattcatctctgcagaactgcaattatcaagtggagcaaagaccatcatatcaacaaccaaaaagagattacttctctaagggaacaattggagaatgcaatgaatgat

SEQ ID NO: 4545 - DNA, 1170 bp, Arabidopsis thaliana
gtttattccgcagacacagtgttcttgaccttttgtaatccggatttctctaatctattcagtattcagcatttgctttttatttcgtttactgttgttcatcctattatcatcttgctatgactatgttgttatcatgttttcattctattcaacgtttaggttctctacaatgatgtctgagtagagaataggtttctgaggatgtgttagagtagtgtagaattctcagtatgctaggtggttgagtttgattgatagatcccttctggattagttgtttttaatgcctattgctttctgatcaactggagtttgagcccagacatttccgcgcccaaaaggtgttcgatgaaatgtctgaaccactaattccagagattcgtggccatataccaaggtattggttgcagggagcgttttggctttaacttgttgattcgtaatgcttgttaggttaactctcgtcaatggtgattgagtctgggactaggttaacttgagggtctctgttgcggtgacccttagatttggttaatgaacttgttgtctagggataattattgagcatgtcaatcacctgtaaattgaggaaacaaaactactcaattacccatcctcgggaattctttatctgattgaatttattgtttactctactattgttactgcatcttgtcatctgttgcttagtttctgcaattctttcttgttactcgacatgatactcgaccacccagttgtctggcaacaaactgtgcagtcgagtatccctgtttcgtttactgcctgttactcgaccaagtcactcgaccacacccaatgttctgcaatgagctgtgttggtcgagtgttttattatttctgttttctgcatgttcacttaggacagctagaacacaccaaaacctgttattgcttggcttgacttagtgacttctgatcacatcttgattgttagcatcacacccatttggattgacaacctaaaatactacaacgacatgattggtgttttaggataattgattaaaaacctattatcaaaagttcgtgacctctttaactatatcacgtccgactatgtcccaacattatttgtagaatctagcagttagtctatctggccctggagcattgcatcacctattaaactcactgcattgtaga

SEQ ID NO: 4546 - DNA, 1453 bp, Arabidopsis thaliana
cactcagaaaacttctccaaaatcgcatctatcatcggtaacagatggtacttccttacttctgaaaacacagcgttcattgactctgcggagttgctagtatctatgttgtacttgtctccctgaaaatagcacctagcccatttctcaatcccaattgcccgatccagataggtggctactttaggatgctgtctcctgaattatgcatacctaatgttgaactcagtcgcagtataaatatgagctaattccataaatttggccatacctgcttctttgtcacctgccagcattttcttaatgttttgagacaaatgccatacacaatgtccatgtgatgccttcgggaacacatccgcgactcccttgatgatgcttccatgtctgtcgcttatgaaaaccaattccgggtcatccggtataatggaattcaactttctgaaaaaccagttccaactagcatgattctcgctatcaattacaccaaacgcaatggggtaatgatgatgattaggatcctgagctgttgcaataactaacatccctccatatatggttttcagaaaagttgcatcgatcactataactttcctcattgccttaaacccttcaatgcttgcgcccaaagcgatgaataggaacttaaacctgtcatctgcatccaattccacttctgttattgtcccatgattcacagaccttaaaatgtgcagataagcaaacaataacttgtagctagtttcagggctcccactcacatcactaacatgttttttttttcctcttaaagttgtggagtatgaacaatccaaaccaagtcttcctttaacaatactcattatttgtttaggtttcggagtattaagaagacccggatagtcctcatgcaacacatctgctactaatcgcggtgtgcctttttgtttttcatatctagttgcctccggacaccgagagcatttatgtatttgtgtgtgtttcttcacacactaaaaatctgtgctcagaagtttttgtaactcttaaataccaatcacaacccaatgatgcttgactgcattctaacataagacggcccgggtcagatttaatagttttcacaccaaacacttcctcttttgaagctctattaatcaaatcccatactgcctccttagaacgaaattcttgacctactaaatcaccaataccatcttcccattatttgacaacggcagccacactttcttgtaccggacgtgcaagatgaacatattcttccctaacataatcattatcagaatcttcattaacctcacactctatcatcagcggttcaataacagtttcagtaactccattctctagcatcataggttcactaactgtctcacgctgttcctctagttcaataataggttcattactactcagaattcctgtatttcatccgcaaccattacaacatgac

SEQ ID NO: 4547 - DNA, 1053 bp, Arabidopsis thaliana
tgagatattaaataatccattttaatataatgtacttacacagagggtcctttaaagatattgctgaattcctttacttttgaagggtcaaccatgtccagggggttgtatgagacatttccagccctgataacaacctctgtctgttgagttggtacatcgggcaccaagactgtttttgccttaaaaccatcaggatgggcatcatcctgttcatagacaagttgcttcttcactttttttgggacctttggggatgcttttttttcttcttttgcttcgacagcagcaacattgtctgattcatcctgttaacaaatatgattgtcaacaacagttttatacgtttttctatgtttaaaataggtacatacattatttttaggaatagcggtcttttctgcttcatctgaccctgggttaggatcctcagttcctacagacccctcaacaataccgtgctcttccatgactacctgtgcaagttaacgtacacaagtctatataatgtacacatataatcctatgtatgctatttcgaaaataggaattgaaacacacaaattgttacctccacatcagtagctgcagccaaatcaccaacggctttagtatccaactcccgtatgacctgcataatataaattttatacatttgaacagtaaatagtacattttatttgttgcaagaattagcttacattgttaactacttgaaatggtgacgggggatcactgtgggtcttctcaggtatttcaacttccatccctgtcactaatttggattctcctgccgcctcaacctgtagaatttatcatcggaaagaaactttttagtaatgtatgaaacaatatatatgtacacagaatatagtgacaaaaatgtacgtacacttgtgccaggtacgtgagctgtatctccatcagaaggctcataagtgtcttctgactcgctgccattagcttcagtcgatgcactggcatctcttgcttcttcctgaaacaaaaataatttgcaaagtcttatgggcgtacacatatggaacaagtgac

SEQ ID NO: 4548 - DNA, 1571 bp, Arabidopsis thaliana
taacaacttaattaaaaacgctctcaaaacagatggtcattcacaaacacaaccgcttactaagctcaatcaccaactcaaaataatatccatacaaacacaaccggttactaagctcaatcacaaactcaaaatgatatctataaaaacacaaccggttactaagctcaatcaccaactcaaaatgatatctaaaaaaggtgaaaagatagagattaccagagagtctcgaccccagggataggcttttcagacagaagtggaagctgttgtcgacctggaagggctagtaaagaatccaacagatcttgatagtcgacattagggtcttcttcttcgggggaattagggtcttcttcttcttccttgtcttcttccccatcttcttcccaatcttctaccccatcttcctcttcatgattattagtgttttgttgctccgtttgacgaggctgttgttgaagacccgaagattgatgttgccgagcaggagccttttgttgacaagtaggaggctgttgttgactcgtaggagcctgacgttgacgagtaggaggcagattgcgatgaacgggaggcggttgttgagaaccagagagcaagggctgacgagaattagtcggggttagtgtcgtttggggtggcgtcgtctgtggtacagtagccggtggatattgtgaaggacggctcctatgggattgtgtcgccgaattagggttcgacgagtgagaagaggctctgtgaccactcgaacctaacactggatttttaccctggaagacttggacttcagttgacgattcgcggcctcgacctctacctctacctctatctctacctctacttgattttcccttaccactagcagccataacgaatgaagaaaccctagatctagaaatggtgaaattagaaagcgaaggggttggattgaaacagagaagagaatctaaatctagaaaccctagatctacacaatacaaacaagacatcgagttgaagaagaggagagaggtgagaccctttaaccgcagaactgtaaagagattgacagagaagaagaagaaacgataaacacaagacatcgagactttataaatcattgattaaaaaaagagtctatatttagtcgcaaaaccgttgcacactaaattgtttgggggaaatattgagcgcctaaacacttagacaaaaaattggagaaaatgattgaaattaaaaacagtcgcaacttagttgcactactagtcggtctttaatcacaaacaggtcagcaattagtcacaaaataagtcgaatataggttaaacgtagcttattggtcgcaaaacggcgactgtgttgtgactctacattattaaattcagtaattccattgagtttgatccataaattattgagaagcaatgatttagtagtatagattacatacataagtgttaggtttgtaaatgttttgctttcttagcttattttataattgtttgaaaaagattatttgtatgttaaagaacatgtaacacttgatataaattagggatttttgaatatttagtttgtaaacattggaa

SEQ ID NO: 4549 - DNA, 848 bp, Arabidopsis thaliana
gaaagtcccagaatcttcggaagataagggcaatctccttcaacaagataaagataaagagaaatcttcagagaatatcgcgagaggtgatattctcgaactctataaaaagcaccttagaggacaaacaaagaggacatacactaaaacgctctcaacttcaggctatcaaaaacgctctgactttgaaggcagaaacacttattttcatattctagcacacttgtacgatcaaatcattactttctcactaatacaatcaagaacaccgtccgcggtaattgagaattctgttgttctttgagaatctcacaaagatccgttctttgaagaaacccttaaaataaattctattgtgcgagttttgactctcacaatttggcgctagaaggaggggacttgacatttctcttactcccggaacacaaaaccaaccacccaattcacaatggtcaacaatcaaatccccggtaacacagttgatgtagaggggaacccaatccctccaatccagacagacgttcctgaagccgctactcctgtgaccctagcggaactaagaagtatgatggctcaacttcagcagaaggtgaacgatcaagaacaggcaaatcgatccttggcacaacaactcgaagcagctacttcccaaggacagatcaggactactcgtttcggcgcgaggcatcttcaggatcgacgagcagcaacagatctcaaccccacacggctcgtgttccacacgcctggcaatactacaaggcccgtccgcagaaccgcaccggaaatcggaagagaccgaaccgagccagcgattttgggatatcgagaaacgaatcaaacagaaa

SEQ ID NO: 4550 - DNA, 630 bp, Arabidopsis thaliana columbia
gggaatagagttttttattttttattttgcaatcatagagttttaccatagacgaacgccttttattcgtcgtggcgaacgaaaccctaatcatcacttctccacttttgttcgtcatcctcttcaaaatttcttcaatttgattctgcaatttcctttatctctctctggattaagtttcaatttcttcttagcccgccatggatgctcagcgagctctgttggacgaactaatgggcgcaggtgagaataatcgagtaccaaaatctattttcaatttaatcctcgaaattgagctctccaaagctttaatttctgtatccatgttaagaattgagcgaatttttgttgaaattgctctcgattttgtttgcagctcgtaatctgacagacgaagagagaagagggttcaaggaggttaagtgggacgatagagaagtatgtgcattctatatggttcgattttgtcctcatgacctctttgttaacacgaaaagcgatcttggttagtccactatttgtactacttgcttttttgtatgatgcttgctttagcttacttaacttcattgttgtttcaggagcagccgagaatcatgatcagagttgaagaaaggtacgctttatgag

SEQ ID NO: 4551 - DNA, 1298 bp, Arabidopsis thaliana
tagagcaggaaatattgtcaatctagaatctgcaattttttttttgaatcgaaaaatgtttcccaattgtttgtagctaagcacagacgtttgtggttttagtagtttgtacaaatactcgttaatctaatcgttatctcttgaactagtttcttgccaatgaacagggtcgacatctcaggaaccatcttctcagtgggatttaaaccttccaaatagactcttcgccaccgatcattatccgaggggaaggctgaacgtatactctagaccggatattctatcctttatcaagaaggtttttgatgggacagaggaattagattttatacttcagtcttgctttggtcctttattccatttgccagttagtagggttgcgactccgggtaaggtcattcatgccttgttatgtagacagttgcttactaagaaaaagtatgagttttggacagtttttggtggacacccaatgagattttcactactagaatttgcttccgtgactggcttaccttgtggggagtttcctgacgagtatgaccctgaagattctcctgtttatgatgatggcaagaagagctactggaatgagttaattggtccagacaagacggttacattaggggatatatctgccatgctaaccaagagacgcaagaaattgtcttctgagcacaaactgaagctcgcgtttctactaattgtagatggtgtcctcatagcatcgaaccaaactggtaggcctacatttaaatatgtagagatgttggcagatctagagaaattcctttcatttccttgtggtagagagtcatttatgaagacggtagaagcgatgacacccgagaaacggattctcgataagtgcacaggtaaaagacagctcacaaacgatcctattcagaatttggagaagcaacttcaacacatctcattccgtcttaaaggttcccgcatgcgctgcagctcttagcatttcgtaacatacctggaatggtagatttgttgtcctttgacgacacctccttgacaatcattcattggaaaatttaactcatccaacacaacagatatcccttcctcatattcacgctttagaaagcaaccttaaggtatttttttattacccaaaagtttctatatggtctctataatattctctttctatatatccagtcttatttactaataataccttctatttttcaatagagactagtggatctgcttatagttgaagatattaatgtcaccaaagttggacagagtgggatgatgaggtgaagatatgaaag

SEQ ID NO: 4552 - DNA, 866 bp, Arabidopsis thaliana
aacctcatgtgaacgttctatgaatatcgttacagatagacaacggtttaatgacaccgacaatgaaaataagacgggacaaggtggttgatcaatacaagaatgaaatagaaagactctacaagtagactagaaattttagcatcctctttattttacaatcatctcgtaaaggattagcaaatgtgaaccagtgcttactccaatgtcaatataagctgcatatatctttgttcatcaactagggatttccaagttctgcagcactatggatacttattgagtctaatagaatctataattggaagaagcagttaaaccggtcaaaagacctaagtatgttggagggtttgagatatcttgacattctgtgtttagaggaaggctagatgttgatacaatattgtataatttgcataattatattatccgttcaatccaaaagcatttaagtgcgatgtaaagtgatggttttttctagtttatgttaaaacaaatgattagtctcactctctagtcgatagaatattgcaacttgtttataaatttgattaggtgagctatgattagtagtgcataaatacattatctatgagacaaagaaacgtgataggttattgttttttcttgtatgcgtctggcatatgtatgtataaaaccaaatatcaagcagaacatatgcgattttcaaaatgtgggcggtgctgaaaacatatattagtttactccaacttgcagaatatttgagtatattaatgcaaaaacagtaaacgcaagagcaggtgcattactagctaagacagcttggttgagagatagagacgaaaatggaagcggcgatgaacaccacgatggagactgctgca

SEQ ID NO: 4553 - DNA, 463 bp, Arabidopsis thaliana columbia
agagtgtagtaatgcggttactgtacctaaaatcaggaactggtttctttgtgattccaagattagcgttataaaatgcctctatagtaccaatgtcttcccagtaaccatcatataggtaagcttgcacctgcagtgcccatgatcaaagttagcaggttttgccttctgcatagcataatcagctacaagaagctgttgaatccgaaagcaaaccatagagtaacagagacttgcttgagcatcagaatacaaactagatgttgtaaacatgaatataaacactcaccctcagtccaagggaagtggcaccgggaatgacttcacttccaaagtcattagctccaggaaactgattccgtagtaagtctagcattacatctctgcttacaacataaatacccatactagcaatgaaaggcatctccttggctctctgatcatcaagacctagaattgttgt

SEQ ID NO: 4554 - DNA, 599 bp, Arabidopsis thaliana columbia
tgtagatatgtattcttgaatatattagatttaacaaacacttttaaacctaattgattgatttatattacaccacatcaccaataatagagctatcaacatcaaacagtaaatatttacccatgatcagttgattgttctatttgtgtttcttggatcattttggtgtttttgctatgtatttgaataggctatacagtgttatcatggtatttatgtattactaaccacaaaccagctttaaaaactatatataaagctgtacatatatactttcgtttttggattatctatataagaagtaatttttgcattttacaatattttttagattcgaaatggcgaagatgtaccggaagttggcactctgcggtggtgagggaggacaagaatgggacgacgatgtatatgagggtgtaagaaaagtgtatgtagggcaagatctcaaccgtatcacttacatcaagtttgagtacgtgcaggaagacggcgaagtagtaacaactgaatatgggacaacaaatcagcaccctaaagaggttctcattgcatttattctcacccttaattttttgcgatactagtaaattctcttgtga

SEQ ID NO: 4555 - DNA, 626 bp, Arabidopsis thaliana columbia
ttactccatttatactatgatcctcgtattgttgatcacatcgtattgttttaacttttaacatatttgcaaaataaaatttcagaaaaaaagataagaaataaaatactcattccccaaatctttctccaaactagtcaattttcctctttgggaccataattaatctactctttaaatttagacccaacatttttattaattaaaaaacccaaacctgtaactgtctcttagctagtggaacaaaatgagttcaatatcatcatcttcttcatcttccccaatcatttgactcacaaattcactttccactacttcgtcaaagttccaagatgccaaactcaacgacggaggactccgtcgccgttccactactcccctccctccgccgcgctactaactctacttctcaagtagcaatcgtcggtgccaacgtctgtccaatagaaagtctcgattacgagtacgtaaactctcaccgttgcttctccttccttcaattatcttcttcttaactttaatttcgttgttactctttcgattcagaatcgcggagaatgatttcttcaagcaggattggagaggtcgtagtaaggtagagattttccaatacgtgtttatgaagt

SEQ ID NO: 4556 - DNA, 489 bp, Arabidopsis thaliana columbia
ctatgccggtgattatatcagtcggacacatgaattgatcattctccatgagacaaaacaagacaacctccgtgacggtggcgtagagcttagagaaagagagagaatttcgtcttgcttccttagttgagctaagaataaagaatggactttgaaaaaacccaccttttatggtcagctttgtctgatcaaaggggaagtgacaaccaggcgctttaacctgtcgagtggctgagctgacgtggcgtaaccctctttaattatgacgcaagtgtgagtagaagagactgatacagacattagaagaagtcattaactaacataacgtcaccgtttacaacttcaagtagtcaagtttctggctcttaactttaataatctacacaaacaacaatcaaagcaggcattctaggaggtttacttttcatcagagatttcttcatcgtcatcttcttccaatatgtacaccaaagctcgtcttctttcagc

SEQ ID NO: 4557 - DNA, 533 bp, Arabidopsis thaliana columbia
tattactgatggtgctcttgtggtggtcgactgcattgagggtgtgtgtgttcagactgagactgttctacgtcaggctcttggtgagaggattcgacctgtcttgactgtcaacaagatggacaggtgtttccttgagcttcaggttgatggtgaggaggcttaccagactttctcgagggttattgagaacgctaatgtcatcatggctacatacgaggatcctctccttggtgatgttcaggtttacccagagaagggaactgtggcgttttctgctggtctccatggatgggcgtttacactgaccaacttcgccaagatgtatgcttccaagttcggtgttgttgaatctaagatgatggagaggctctggggtgagaatttctttgaccctgccaccaggaagtggagtggcaaaaacactggttccccgacctgcaagcgtgggtttgttcagttctgctatgaacccatcaagcaaattattgctacttgcatgaatgaccagaaggataagttgtggcctatgt

SEQ ID NO: 4558 - DNA, 339 bp, Arabidopsis thaliana columbia
gacactcctttcttcgcctgccaatacaatgcctgagctgcagcatttccacctcctctcactccacatagctactcaatatgatcatcaaagattatgatattatagatctcaccgtgtaacactaaaaatatgacaattttctcggggtaaagtagtatccttacctgcattgcactagagtagtactcttttgcaatcactgtctttcccttgcaaagttttatcctcattttaccaacatgaaacaagtggatagattctgatgtatggtcttccccactcatttgggtcacaactacctgtaaattacaataaggggaaatataatatacatac

SEQ ID NO: 4559 - DNA, 566 bp, Arabidopsis thaliana columbia
ggtgtctcataaaaaaaactttgtagtaaaagaatagaatgatttgataatagagagagagggttgatagaaagaactgacgaggaaggtgaagccggtgacggaggcgaaggaggtggcaatagaggcggcggatagaggaagagagccaagatggccgacgaacatgactgagattatttgcagacaaaactgaagaagactcactgcgattagtggtccagacaacagtagctgcttctccacttcctcctttacaaatctacttctcttctctttctctccgatcagaggccatgacaacatatcctctctctcctccctcatcagccctttgcttcagagaatgtagactcttgagagagaaagagtgagcgacagtacttgcaaggttatggagacaacacagaaaaaagagagaaaaaaaaaaggttagggattaccctgtctttggggattcgtgttttgttcggtttctctaatgatgtgtaatgttagggattagtgttttatattatcttttaaggttatggagacaacacagaaaaaagaaagaaaaaaaaaag

SEQ ID NO: 4560 - DNA, 588 bp, Arabidopsis thaliana columbia
ctgagtaatctgcaatggattccattccggcgtattcaccaatccgtaagctatggctagtttctcgctgtgatatcgccctactcgctcttcttccttttcatctacgtctggaagaaggtgttgctcctcctctgagtacccatactcggaaatctcttccattagttcatccactttttggtatatctgcctgtttcatttagattcacacatcgtaaggttatgagattatgaaatgaagacagagaaagattttagtattgtcagataatttaccttttcaccgtctcattgtaagaatcaaacctatctcctgaaagaaagctgtgagtctgatctccaacctcaacccaagtacaagccggcatcatgcttaatcctttgctctccaatgtctccaaaacccctgcagcttctgcagtttttcccatactgttgtacatattatacatcacaacgtagtttccgagcttctcgggtcccattccatagagtttttcagcaaccactcttccaagctctaagttttcctgcatcctacaggcattcaagagtgctgccacatgttcacagtggtttcaaagg

SEQ ID NO: 4561 - DNA, 570 bp, Arabidopsis thaliana columbia
caacagccctaccaacaatagagtttggtccagtaagaggaatctgttaagccaacacaaaatgtatcttaagagattggttcactacagcaggtttggattaggaaaaaagcataaaaaggtacacagctataaacctggcaatcagtgattgtgaaggtggcagttcctgagaaaagcaaaacaaaagcttttatgtaaatccatgaacactaccgctggtcaaaggtgacaactgtactatacaactaagactgcaaaatcaaatttgagagagtagcgaaatttgatgcaaaacagctctaaataagcttgagatgagggatacaaatgttgagaaggcataccatcatctccaacagtgatgtttcctagatcaccagcatgtcgattagcatcctcaggggcacagtgtgttttaccatcggggttgaaatgtggacctaaaataggaatttaataacaagttcagttacttttggcgataattaaagtcccaatacgaaacatagatataagctccaaaagtttctaatccattgaaaatttgcagagaggtatgcataagag

SEQ ID NO: 4562 - DNA, 605 bp, Arabidopsis thaliana columbia
ctgtggtgatgatcatggtggagagtttagagagaggttctgtaaaaatgttgtgtcatggaattctatgatcaaagcttacttgaaagtgggtgatgtggtctctgcaaggttgctatttgatcagatgaaagaccgcgatacaatttcttggaacacaatgattgatggatacgtacatgtttccaggatggaagatgcttttgctctgttttcggaaatgccgaaccgtgatgcacattcgtggaacatgatggtctcgggttatgctagtgttggcaatgtagagcttgctcgccactactttgaaaaaacacctgagaaacatacagtctcgtggaactcgataatagcagcttatgagaaaaacaaggactacaaagaagctgttgatttgtttatccggatgaacattgaaggagagaagcctgacccacatactttaacttctcttctcagtgcatctaccgggcttgtgaatctgcgtttaggaatgcagatgcccaaatcgttgtcaagactgtgatccccgatgtccagtcccaatgccttacactatgtatcaagatgcggtgaataatggagcgaggagaactcgatgaatg

SEQ ID NO: 4563 - DNA, 189 bp, Arabidopsis thaliana columbia
gaggatcacgatccctactgttggctttcctatcatcaaagctgatcgtcaaggagaatttggtattcctttcttaccaacaaaatatggcttccttgattagttttctggatggaagttagattttacattggcaggttatcttacaaattccgtcttttctcaggagcaactgaattttcataagtt

SEQ ID NO: 4564 - DNA, 475 bp, Arabidopsis thaliana columbia
gaaacccattaacttgttgtgcagaagacagagactgctgtctcaacatatggagtcctgtttcgttttcaaaagaattcagttgtgatgagaatcctgatctcatgtccaagtcagcatttaccatccctcttccaacagctagaattgcaggatccacaaagtcgatatcacttgcaccatttgaattaccaactggaggtggtacttgatatgcattcctcaatgaagtagagtcaagaaatcgatttcctatgatacaagtggacaaaagttttagtctctagcatcatccgtactctatgatgcgacatataggagatgaggaaatacctagtgtagtatctgatgataggcccactctttcatgtgacgagaagccaggaggaggtagcctgttgggagcagtcaatcctggaggcgcagaaacttgaggtcgtgaaactgcaataggacaacagatcagaaaaattgg

SEQ ID NO: 4565 - DNA, 612 bp, Arabidopsis thaliana columbia
tgtccaatcgaaatgactacaaccatgctcagttgaacatgttatccgaacgggccagaatcagtacaattgtggggttgtttgcaaatccaattctcagtttttctgctgtattcggaaatgacttttggcgatttggatttgagttaactttggatcttgtgaaccggataatcactaaggcaaacacagttcttagtttgatcaccgaggacacaacaaccaccttttccattgataagaaagcaagcttattcactgcttcttactaccagcgcttgcactctaaaacagtgtgtggtgctgaggcgaagtacatattatctgacaagagcaactctttctccattgggaagagacatttatttggtgatgacgatttgatccaagctttattgagtgtgagcaatggtggttctatgagagttctttttcaacatcattggactttgaaatcatttttcaccatagctggagaaagattgttgaccattcaagtcaacgatttggtttagcagttgaactatgaatagtgatccttttaaacctttttttgtgtaatctggttcaaatttatgatgaaatatgttttaagtttttgtttaagatagg

SEQ ID NO: 4566 - DNA, 471 bp, Arabidopsis thaliana columbia
agtgtgctttaaaggttgataccataatcatgtgttgtggcgattacaaaactggagctacttgcatctatatggtgaggggagatatgttcaagaagattcagatcaattctgggatttttcagttttcttactgtgtctatcttccaaatttgatctcggttccttttgaatcacatcaagtgtaatattctttattagctaagatactgaaacaagtttaaattctgaattttcttgattagttacaaatttgaattcgataattgtgttactttcgattccgaagaaatttttactctcactattgttggagcatagaatacattcccttctttgaaagttgattctgtttaaatttatgctgtgttctatatgtgggctgattacagaacacagcataggcctattcacgatccttggcacaataacaatacagaatcggttttgttttatccggtggatgtaatg

SEQ ID NO: 4567 - DNA, 591 bp, Arabidopsis thaliana columbia
gacatctttgcatctcctgaaagccaacctcgccgcttgtttggtggtgcaacacaatcagaagttaaaggaaataagaacacggaggaatctgcaccgaggagctcgcgtgcatctgtcaaaacctcaaacgtaagtagtgtcattacatcatgatgatttttgggatggctagaaaactgacctgtttcaataaaaaaatttaacaggggcaaagcagcaacagattgtttagtgaagaacatgttgtgaagtcatcaaagaagatacataaccagaagtctcagtttcaggggctcacaagcaatggtatcttcaaatctgataaaatccctcctggttattcagagaagatgcaaagctcagccaaaaagcgggaaatgagcggacacaatatatttgcagacgggaagtcggaatatcgggattactatggtggtgcgaggagacctcctggtggcgagacagcatttcattggtctaaaataagtcttaaaccacagacactttttttttttcttttttttggtttaagacagacactcttaatatgttcatgtttaggatttagttttaacaaagtagtttgtg

SEQ ID NO: 4568 - DNA, 566 bp, Arabidopsis thaliana columbia
ctttatgagcccacaaagagatacatcacactatctgaacgaaactaaagcaacctaacatagtctagaaactactaaaatgaatgtttcaaaacaattttaacagaaggcaaaagtgaaacaacatactcctttgcgagaacgaggacgaggagctaattcacgtctggtaacaacatgtcccttgttcaacccaacgaacaaaccggtcttcacttgtggagttgtcatcttctgtaaatttcatagacaacaaacaaacaaaactttctattcaatacaaaatcaaattttacaagagacggattcagagataataaagagatgaagagagttaaatcaaaagggattgatagaagatacctaatcaatggatcgagctcctccggtggttcagacaaaagaaggacgccgactgaaaattacatttttgtatatataccagagagactcaagaaaaaaccctagtccagtttgggcttttattgggccttataaattttgggtcagttttgacaaagtaaatacaaggctatagctgctttgctaacgtgattaattattta

SEQ ID NO: 4569 - DNA, 747 bp, Arabidopsis thaliana
atattgaagtacctcataagcagtggcgattttaacaaacagtttcctcgattcaggatccggattcttatctggatgactaaatcgaatcatcaaaattgagaaacaaagattagcaaaacactaatcaaaatcaaatctgaacaatgtctaaacaaatccagaatcatccttactgttgaagagagagcttataataagatctcttgatatccgatgcgttcgcatcttgagcgactctgaaatcgataatgcaaaacgattaagagaacgaaatcaaaatctgaatttgaaaatgaagatcggaagctgatgaacaaacccgagaagagcataacaatcttcagcaccgcagtaaattgccgttgaagattggacgaacaaggagagaaagagaagaatcaaagctaagcaccaccgctccgtcaccggcggcgcatctcgtgattagtcgtcggcgaattcggaaggaaaatactctttgggcctttttttgtttgttatgttgttataagaaacagaaaattgagagttttttttttttgtgaaggtcaacaataaatgtgactttttagaatatttaattttgttgggccattatagattttacgttagtagtatattctcttcttaaataattgagtcttatcgtgcaaaataataggaatttaaaaacttacaaaacattatactatatatttatatatttggtttactatttagatgaaagataattatatatgtttg

SEQ ID NO: 4570 - DNA, 571 bp, Arabidopsis thaliana columbia
tggctcctttgctccgccattgttagggtttctggatctccgtttctctgtatgttcttctcaatgttgcatctctgttcgtcactgttgatttttaaccatcttcgtctaatgacttttgtttgttttcagggaggctgaggaaaccttaaaacgatttaaaacctggaggttatagggtagacaaaatgtctgctacgagaggaggtcctgatcaagggccgtctcagcctcagcagcggcggattatacgaactcagactgctggtaatcttggagagtcattcgatagtgaagttgttccatcatctcttgttgagattgccccattcttcgggttgctaatgaagttgaatctagtaatcctagggttgcgtatctctgtaagttcttctaaaacttatttcttaatttggttctctgtcatttggttgtttatctggtttttggttctgctttctcccttaggtcggttttatgcatttgagaaagcacatagattggatcctactccagtggaagaggtgttcggcagtttaagactgcacttctacagcgtcttgaaagagtg

SEQ ID NO: 4571 - DNA, 600 bp, Arabidopsis thaliana
tggaagagatgcagagccgtggagttaacattactcaggtggtgttcaatacttcaattaatgggtactgcagaaaagggagtatcgatgatgcattgatagcgttgagatatatctcaagctgatgtgatggagaagaaagggtttcaagctgatgcttttacttataacgcggtttgctaagtaaatcaaaacgatatggtgaggcaaagcactggttgttcacgatgattgatagaagtgagcgtaaaacggttgaccatactaatctgattgatatttactgcaaaatagagaacttcaaagaggcaaagaagctacttgaagagatggccatctgagggagaacaacaacctaatgttgtcacttaaaatgtgatgatcaatgcgtactgcaagcaagggaaagtaaaggaagctcggaaactaaggacggacttggaagacaaaaggatggttctctttgacgaatggggctcaaagggtttgggtcaaaacgttgtaacatacaccgcaatgatctcatcgggtttgccaaggctggaaaatcgacgaatcatttggattctaggacaggttaaaacatagtaaatagggttt

SEQ ID NO: 4572 - DNA, 571 bp, Arabidopsis thaliana
ggaagataggccatcccaacctacggccctcaacagtatataagaaaataagaaaaagataccaccagctcgtgaatggaaaaaagcttctcaggtttggaatcgcacagcgggtaggacaactaaaagcaccgcgagcaaacagaacgggaagaataacccgaaaagaaacaaaggaaggtaaatagtcccgcaatgcaagatctgtctatgagagtgtgtatatagaatggttgagacccaaattcttccctgtctagcattctaacgcataggtctgcacctgtggttcaaaatttttccaaggatggaaatcgaaacattcatatgttagttcaaaaagattcgtttgctttcattcatcttttattattatttcaagaagatcaaccttgttaataattctacctcggccaagttctcatcgggagagctatttggtgcagtgagattggacgcagcagctgtgttgtaccggaagatccttagttttcctcctgagataaatattgagcaaatatcaatacaagtcaacattttagcgccgagaagttttcacattacgatttag

SEQ ID NO: 4573 - DNA, 523 bp, Arabidopsis thaliana
ttttaatgttagctacagctgttaaagtagatagtttagcattagggcagcaagttcattgtatggcattgaagttaggacttgatttgatgcttactgtttcgaatagtctaataaacatgtactgtaaactgagaaaattcggtttcgctaggacagtattttgacaatatgagtgaacgagatttgatttcgtggaattcagttattgccggaatagctcaaaatggcttagaagtagaagcagtgtgtctgtttatgcagctgttacgttgcggcctcaaaccagaccagtatactatgacgagtgttctaaaggctgcttcttctcttcctgaaggcttgtcgttgagtaaacaagtacatgttcatgcaattaaaatcaataatgtttctgatagttttgtctctactgctctgattgatgcctactctcggaacagatgtatgaaagaggcagagattttgtttgagaggcataattttgatctcgtcgcttggaatgccatgatggctggttata

SEQ ID NO: 4574 - DNA, 466 bp, Arabidopsis thaliana
gatctcccttccaccacctgcagcagttcaggagaatgaacgatcaacaacagacacttgacagagattcacatactgctctgctgtaacagaactaaccttcttcctttcttcatcagtgtagcccttatattctttcgctatcgccagaaatgcagtcctcagtttacctataacttcatcttggacaggaccctgagaaaaggaggaaagaaatgactcaaactaaaatttaacatatgaacatatacttccaggatttctcagttgctcaccttttcacaagaataagataaacgttcctctgcttcaagctcagttaacgatttctggccccaagcctctacagctgattgtacagcttcttcagctagctttgctttctcatttgacagtttgcatggaaataacttctcattcacctgaatcgttaaaaaaattctacttagctcagtgtacccattag

SEQ ID NO: 4575 - DNA, 1594 bp, Arabidopsis thaliana
tgatcgaataaattcaaaccaagtcaagaatcatctcaaccgttgatcgagtaaaacgaggaggagtattataagccgttggattgattgaccaaatgagagaaatgatcctcactgtttgatcgattgttcaaaagcaaagaactctccatcgtttgatcgagtattgcgcatttcaagaggatgctcgaccatttactcgagcttgaattatttggagaccaaggcataagtcgcgtgaccccacttgttcccccaacactccattacttgatggacaaaacaattacccataccctcactgtttccaactcgctcttctatcccttccaaaagaaaccaaagaccatcctcctccacccattgaaatcgccaaaccatctttgaaattctctctttcatcatctcattttttgcaaatcctctatctctcatcaatcatcgaaatcttcattgcaaactctccctttcactcctcaagaatttgttctcaccatcaccatacctcaccaaagttactcgatcattcgcaattccatcctcaaattttcgaccggtttttaagctcaaattccatcaccaaaaaccgaatcctttccactttgatacctcttggagagttgtttttgatcactttgttgagctcaccaccaaactccatggattcaagaagaaatagttcatctcgggctagaagatcctctattgataacgaagaggttgcagcaattgacatgagtggtatgactgatcgccaaattcaccaagctcgccgtgctcaaaggtctagctcgattaaaggtggaagttcaagtcgttcaaccatgcagagagaagaagtagcaagaggcaagaggattgttgaggctgaggaagaacaccatgaagaggtagtctttgaagaagcggtttctgaggaagaggttgagatcattggggatgatacaccagcccctgttgggaaaagaaaccggccaagaaggaagagagagccaatcccaagcgagtattatcaatacttgaaggaattgaagtttgagggaattaactagataccctcataaggaaacaatacaagagcttggtattcgtggggaggtggaatacttaatggagttggccaatcttgcaacgttcatgagctgccaatttgggggatttaaagaggagagctgccaactccttgcaaccctcaaagtccattttcatgttgacgattcggagaaagaagaaagaggaggtctcggttacattacctttaaggttaagggtgtcgagtatgcgctggatatcagccaccttgatactatgtttgggtttccaagcggagagagtatccaccaagactatgaccaagacgagctactctctctttggacaacaatcgctggtccaatgccctactcgcctgccaagagcaagagtttttaattcaaagtctcgtgattagatacctctaccaatgcatcgccaacaccctttttccaaagaagactaccagatttgttgatgaaggagagctatgtatgattgatcaagctttattcttcattctgagagagacaaggatgagaggagatggcgggtgatagag

SEQ ID NO: 4576 - DNA, 580 bp, Arabidopsis thaliana columbia
cagtgtgcttcaggttgactcgttcttcgaaccggtctcatcctcggaattctccaatttcaacatggtacctgaaccgattaaccaagtcaaattcaagaaccgacaacaactcgttaaccggaacttgaagaagattgatcctgtggatgctctaatggatgagatcataaaaggtaaagctttaccggagaaagggaagcttcttcaaactgtgatggaatctggaccgttgcttcaaacacttcttgttgctggtccacttccacggtggcgtaatcctcccccgcttcaacagagctttagagtccctccgatctctaactcttacggttgtttacggcgacgacaacgacttcaatgctgaattttagaggttgctctgttcctagaattgctaccggaattgaagttgcaactaaacgacaacgatttcattagtgtttttgttgttacaattatttttcttttattgctctgttttttttttggttatttacttagttatttggaattatattattgtaaagatttaaaaatcgtttttggagggtttaagagtttgtgtgtatattggagt

SEQ ID NO: 4577 - DNA, 1246 bp, Arabidopsis thaliana
gattttacaaggattttttaaattataacacaagaaggttattgaaaaacctgctcaactgtcacagaaatttgctctacaatcaaacataactgaagcaatcctccactctgtgagaatttgtgcataaaagttgcaagctgtctatcgttcctaatataaagaggatgagattgtatggttgtagacgtggagactaacttgtaactaagcttcaaagaattggttgaactatctatttgaaaatcctctacaagaatatcaaccaacgcgtgataggtaatgtgctcatcaatgagcactaaagaagctcccaaatcaatgtctaattcaaattcccaagtcatattgtttgtcaacttccacaagccacaaacagaatacaattctagcattataacctgataagataaataacaacaaaatcaacacccacaaaaacactgtcactacaaagagaagcaaggtttacaaatcgttttaaagcgtaagtaagtagaatagaataatttacaagagattttaaaagctttgaaaagtggttaacatggtttacaaatcgttttaaagcgtaagtaagtagcatagaataatttacaagagattttaaatgctttgaaaagtggttaacatggtttacaaatcgttttaaagcatatgcaaaagaggtaaacactaaatcagaaccaaaatctattacgaaatagtataacgaattcacataagccaatctatcacgaaaccagtatacggaatcaaaaaggattttagaacagtataacgaatgtacaaggattttagaaacaaattcaatcatcaaatctcaaacaaaattcaaattcgaagctgaagcaaatgtcaaactgtcgattgaatcaggattcaaataacgagttcacataatcaacaacaaaaatcgaataaaccaattcgaaaatgaagatttaagctaacattataaaatcaaacctgggaaacgcaagagattcgacggcgacacacagctctacttacgacagcgaagatgggttttcacggcgagtaaactcactatttccgacggcatgggattcaacggcattcacaatttccgatggaggaagaagagagagtgtgaagaaatgaattaggtatgtgggtagctcattaagggtaatttggagcgaaaagtattagaaagggtagaaatgaaaataggaaaaaaaaagggtaaagttgcaaaagggcattgagaaaagggcattag

SEQ ID NO: 4578 - DNA, 1337 bp, Arabidopsis thaliana
ctagaggataccattagaacccatgaaaaaaatgttccaagtggacatgaccattggactttggacagcccaattgacacttctaactcaagtaaacgtcatcgtttttttcattgaacatatcggcgaagatacctcgccgttatacgatcggagaaagttacagtcttttattccgagaatggttcagccgcgattcgtccgtccgacgcaatcatcgccatcttccatttctggagaaccaaattcatcaaatctatacgtcgcgaattgtggaccggcggttggactaacacacaacgcaatcgcggcggtgttcgctgagttcggtgaagtaaacggagtctacgcggcggatgatagcggcgttcgtgttatcgtctctttcgctgatcccttctccgcgaaagagctctagaagctttgagtggtcgaccatgtcctgaccttaaaggacgttctttgcatattcgatattcagttcttcaattaccttccgaggtacttccaattaatgggtcttatcatatcacgattagatttttatatggatctcaaagttttgatctttatgtaatgttagatctctatgttgcaaagttttgatctttaccaaaagacagagactttatgtttgtttggtatctgcttgcaatgagccttttttatgtttttgcttagacgcaggtgaatgattgtgttccagtgtctttgattgattcagagttgaatattccagggcttttcttgttacctgattttgtcactgtggcagaagaacaggtacatggtatttagtaatgtgcttatgttgtagggatttgatttctttttttacctcttgtgttacttattattgttcatgtctttatcagcaattgcttgcagctgttgatgctcgacattggattggtcttgctaaacggcgtgttcaacactatggatatgagttttgttacgggacaagaaatgttgataccaaaaagcgtctcggtgagcttccgtcgtttgtttctcctatacttgaaagaatctatttgttcccgaactttgacaacggctcagcaagcttgaatttggaccagttaacggtatatcatcagactctgtatatagatcaagattctgttataattgttcttaactacattgaaggctgaggaattcttgtgaatattaggtaaatgagtacccatctggtgtgggattatcgcctcatattgatacacattcagcatttgaagattgcatattcagcctttctttagctggtccttgtattatggaattcagaagatactctgtttccacatggaaagcctcaactaccgatgctg

SEQ ID NO: 4579 - DNA, 1036 bp, Arabidopsis thaliana columbia
tgatcccgagaggttcttgctatatctaagtatggatttgcaaagtccatcttttaaatagctttttgtttaaccatgtggccaagttttaagttgtttaggttgatcagacatttctcttagaatgtgagagtctgaactcactttaaattcgcgaattcccaattttgggttgagtcaattcggcttacttactgggctagagccttaattactttttcttttatttaatgaaccttttgtctttaatgcgacggttgttatttccgttctcgagaaacaggaaaagttccacgcctttgaggcaataattactttttctcgatttccaaaaatagtttaaactactcggacacgccacaattattaaacttagggttccaaggaggatcctaactctctattaataggaccacaccctattaccaaatttcttaaatatgatctcagaaatttacttagtaaacacctcaaggatggagaatgaaggagcctctaccgtttgccctctcgaccccggcaacccgctgttcctgtccggcgatggcttcgagcccgccagcgttctctttcctcacgccgtttttcacttccccttgaaggacaagaaagaagcgtacgactttatggacaaggtaggattccccctctttcttcttaaccaaacaactccctaccatactaatacggttcttatactaggtcgttgacaagtatcgccgcctatgcgatgaaagacagcggttgggcctcaagaggcaaatgctcgaggcccgaatttcctgtgtggaaaggaaggtgaggtccatggagagtgaccccttccagtgggattggaggaacttcgactgtgcggcaaagatcccgcatatgcttcggatgtatctccgtgctcgaggtcaagttccttgccccgtaaatgctccggtcgaagtgatcccgtctgacagcgaagaggacaacgacgaggaggaggatagcaacccctgaagcgcgtgaagaatgagcccgaggtagacgtcaagaatgaggcgtc

SEQ ID NO: 4580 - DNA, 1625 bp, Arabidopsis thaliana
gttggtgaggcttacatgaagatgctcgaagaaaggatgtctgaaattgacaaggatggtcctcaaatttctggtaattcctcgcagcattcaactcatcgtatgctcagcattgatgaaaagaatgagattttttttaaagtaattttctgtttttattttgcttacaatctgcttgtctttgtttgcttggaatttatgagcaatggatacttaaagtaatgatgattgtctttggtgattgtaattgtcttattgtttcagtgtactcttacagatggcaaagggaacccttttggccttggatcacttgtggagactctgaacaaaagaagaaggacggagagttatgcgagctcttcatcaacagttgcacagcttcaagagcagctgcagctcaagatgtctgaacaagcggacgaaaatgcaaaatgtgatgaggagcacgccaatctcaatctcggatagccagcttggagaagctcgtcctcttcataaaaaaaaaagatcccgagttggatgcttatttgtcttcagattctacagatgttgaaccagtcacacttccaaccaccacacaccacacttccaaccgccacagccaaccaaccaaccatcacagaagcaggcaccaaaggagacaacagattaggcaccacacccttagtctctacttcagttactttgtctaacactgcttctaacaattaaacttgatcttttgtagcttttgttgaacttgttaggatgctaatcttttgttgcttttgttgaacttgttaagatgataatatttaggtttcactatgattttgtgaatgtaaacttgattactgttcttaatggtatttaactagcatcattggctttttaattcaatattaatcaggtttatcattccaaatatacgacaatttgtgactaaaccaaaacaaaaaatgtgactaactagtgaccaaaccactttataaaccagtgaccctttcgtcaccaaacttactcccactatgtgacaattatgtgacgaatttgtgactaaatcaaattatacaaatatgactaatgtggcacaagcgtacaaaagtgttacaattttgcgatgaattttaaagcgccttaacttcgtcgcaaaaaggaaagactattttccgactaaattgtaactaagtgtatgaaccgtacctcagtgtacctcgttgcagtttagtcgcatatctgcaacttcttgggatcgtcacaatacagtcgcatatttacgactaacagaacgcgtccgcaattcgtcgctaatcggcgaccattttgcgactttattatttagcgacggtttaatatcgtcactaagtagtcgtaacaaccttgtttgcaaccattttgggactaatattggagttgcaaattgcaggttttcttgtagtataattgttgtagtctcttcctttctcttaggttttcggaaaatactgctaccttttctcttaggtttccccaaatactgcaatcttcatctatctcactgtcttcaacgacgagattcacaatatcttctggtagaacatgaaataaaacaagtaaaattcaggcttcttgccacaaacttattgagtcacttagtagaaagaaat

SEQ ID NO: 4581 - DNA, 1125 bp, Arabidopsis thaliana
actccctttgcccctaaatggatcgacattcctcacctgagatgggctttgtttgttgagcatcagagtcatgaggggatgcatattctcaagtttcagcataggacgcaaatggatgccaagcttctcttacccaaccaagagctaacaaccatcacagtgagaggtaacatcgatttcaacccgcctaatgaagaactcttcttcatggaaagagcacccccgacgagagaggcttcagacattgaagaaagggttgagagtgaagaatgagctgagaatgaagaaccagaggagatggattgggagaactacaatgctagtaggttccattttgaagaacacaaaccaccaccaagagtgagtaagagtctgactgttgcgcataagaacattggttcgatgagtgcttagaataagtttcaagacaggatgttggaaaaatgtggcaaggccataaccgcaatcaggctgtactaagttgttcatcttcaggcgccaccatggtgaaagaaaaccgccctgaagaagtggtttcaagaaggcagagagtttcaccttcaaggcaatctgcctatgagcgacgagaggtaagtcgccctcaagctcctgcaagacattcatctcatgagcaccgcgagcagaagagaaggagaaaaacaagaattgttcgtccaaggagcaaggacctccttatgtccagtagaagatcactcgaccaagatactcgacgtgatatcgagcaaagtgtcgagtagaatccgtgggttcagaacgagcagaacgtagagcaaaatcagtgggatcaagatgggcagtactcgagaatgaattgggatgcttaccatggcatcaacgagcaggaacccacctctgacaactgaggtaacaccacctcactcattgtacataccattagcgtctttttatttttcttgtgtgttttgtgctttggtgttgaattctctttcagatttttattacacaagggactgtgtaatttaagtttgggggagggttctagacatgtttaacattgtgttctcttttcttatttcaaattttgcatcatttaaggcatagaaaaacgataaaaatttgaaaaaaattcagaaaattatttca

SEQ ID NO: 4582 - DNA, 551 bp, Arabidopsis thaliana
acactacatttagatgttagcagtttatgtcgtactaagataaagaaattccctaagtatatgcctctacatggtctcaggtgtttgattgaaactctgttgccgggttctcgataaattgagaatactaactgtgtatagaaattagcttttcttcccataggactgatatatctcttactcaggatacacggcaatcaactggcagaaatgccgtttatcggaacccgctatatgtacaggcgtcaagggatgtgtcgtcgactaatggatggcattgaatctgtaggccctcctccacttcttgtcatatcctaaattcctttttctgttagtttggtggttatttacattaaagttcgtcgcttatttctctcaaatgtttcttgctatatctgaagttttattagatgtctggcaattctgctgctatcctgcttgttttggcgacgggccattctgctttttctcaggttctttcaggcattaagaaagaaatatggaaatagctttgcatttccatgtctgatatatgctaaatgacaaaatga

SEQ ID NO: 4583 - DNA, 550 bp, Arabidopsis thaliana
tccatgtctgatatatgctaaatgacaaaatgattgctagatcacactgaactaaaaacatggatttgtgtagtcatttgatttcaaatatgtataagtgactttataggatagttgatgcgaactagtcaagcttcttagtatgccatatgtcttgatctgctgtgtactatctcagtcttctgttttgtttagtttagacttcattctgtgtacgatttctgaagatccatattacaaatgtgctttatcatcaggcgcttggttctctcaaagtagacaagttagtcataccagcagtgccagaactgattgatacatggacttcaggctttggcttcgcacctgtcaatgattctgagaaaaaaacaattaagaatctgaacttgttggtgtccctggcgtagacatgttggggaaatcattggtgaaggagaagatcactgactcagttgtttcatctcccaatggtactaactcagtttctcttggcatctgaactttttaaaatgttcatgttatgtgtacatgcatacttgcatctattgac

SEQ ID NO: 4584 - DNA, 1493 bp, Arabidopsis thaliana
tccctatggagatcttgttgcaatggtatatcaggatttcagtttggatagtagggattgtaaggttagtctaagttataaaatttgtagaacgatgcttattctcgacgatacacctcccgtaatagtatgtaacggaagacaattcgaaggttttctccgtcattgtaaaatgggaagcatatgactatgtgttacggtacaagctataggttgtgtggttggcgaaccagaagttgaaattgtcgaagagggttgctggataactgaggatgttcttgggtttagtcggcggaaaatccacaaaaacttggatgagttgaggataaagaaagcggaaccaattatagatgaggagtactgataagtgtgcattttacatgttttgagcatccatttgttatcattattgcatcatatcaccactgttttataccatttctaatcatttgtcatcactttgcatgtttaggataattttgcatgcatgttgcatatttgtgttgatttcaggtgatttggagctgttgacgggctaattagaagaagcggacctgatcatgtcaaaccactcgacccccaggtcgagcagatgctccacgacatcaaaggaccactcgaccccctggtcgagtagaagacttcaccacttgaccacctggccgaataccaccatgagagtcactcaatcacttcactcgaccaccaggtcgagtatcatcacctccaccacctgaccatcactcgatcacaccactctaccaagaagttgagtatcaccatcaccatcactcgactacatactcgattgccagcttcagagtcttctccattccgcactcaaccagacactcaagcacaaggaagaaaagaagactccagctaatcactcgaccacccactcgaccacctgggtcgagtactgttcttaatccgtcccaatactacgtcgttttgagtattagggtttcagaaatatttcgctataagtagcatgtactttacatttttgtaaaatctaagttttattccgcagacactgtgttcttgacattttgtaatcctcatttctcttaatctattcagtattcagtatttgcttttcaatatcatttactaagttgttcatcttgttatcatcttgctattactctgttgctattatgttttcattatgttcatcgtttatgtcttctacaatgatgtgtgagtagtgaataggtttctgaggatgggttagagtagtttagaattctcagtatgctaggtggttgagtttgatttatagatcctttctggattagttgttcttaatgcctattgctttctgatcaactagaatttgagctcagacatttccgcgcccaaaaggtgttcgatgaaatgtctgaaccactaattccagagattcttggctctgtaccaaggtattggttttagggagcgttttggctttaacttgtttgattcgtaatgcctgttaggttagctct

SEQ ID NO: 4585 - DNA, 1043 bp, Arabidopsis thaliana columbia
ccaacataattgagatagaaagcataaacacagtgaatagagaaggggaaagaaggcatctcttcaatgtatatagatctgaatgaaactctgaataacaatggatgaatagctttatgtctctcacaataaggttttgcaaagagcttgataaaagacttcatcaaagaaacttaggtataaaaacaatatatatagaccctaaaaacgtctagggactaataatgcaaatagggaagtcttctggggcaaacttgagcttctgtaaacttgaaagcgtctagggtttttgctgggccgaaactggtgtcgatcgacaccaagagtgtgtcggtcgacactcctcgcagattcctgaaccaaaatcgtccttagcttccttttccttagcttttgctccaaaatgtctccttatctccattgttgtcccattgcatagaatacctgaaaagacattaaaatgactcgagaaataacataaagactcaaaatcttatacctaaaacatagataaaatctgtgaaaattgggtaatatcaactcccccagacttagcttttgcttgccctcaagcaaaacacaaaagccgacactacaagaaaacaggtaaacgacgactacaatcagcgacaacaaacgtagtcgtaacattatacgactatttgacgacggatttacgactcgcatgcgacaacacgaaaaattgtagttacatagtcgttgttttacgactatcgtatgcagtcggcaaagagtcggcaagtaacgactatttgatgattaaattattgaagggataatgttgtcgttgcttagtcgctaattaacgactattctaccgtctattttatttagtcgctaatttgacgactacaggacgactagacgtcttagtcggcctgtagtcgtagaaacgtcgcaccatagtcgtataaagtagatggaaaacgtgtttcgcattggtaagtaggtacagctaactatttagttgtagtcgtaaattagtcacaaaaattggcctatataataaacgttcacgcaac

SEQ ID NO: 4586 - DNA, 2208 bp, Arabidopsis thaliana
gcgattgagtgaaactgagctgcttgcttctccggggttgcgatagagtgatttgccctggcagggctccgaggctgcgatagagtttttttgctgaaggcgtcattgggcattctgacttcatgtttctgtttttcctctgtttgaactccaaaagcatccaaagtacctgaaaacaaccaaatatgccatgcacatgcaatcctaatgcaaaatcgtcctaagtatgtaaaacacactaaaacgactcctaatgagatgaaatgtggatgaaacaatgacaaagtggtgaagaatgaatgcctaaatcatgcaaattatagacatatcaacatgcattaatattaaactcaactagaaagaatagtttaaacgatcaaacaaagccatagaaaccgccaacctagactttcgatctaaaagtccccatgaattcccctttgaaaccccctcaaacaaaactagagatctactcgctcgtggcaaaggagctaatcaaaagttgggttgagtaaaccataacaaaaagatgaataaaaattcaaaagggtttagagattacttctttgaatgtagaatacaagaggcaaacctccaccttaaagagtcttacacaaaacgagaaagagaaagagagagatagtgattttcaagcttcaagaggtgcggcggcgagttggcagctttcggcgacggctaggtttcgcttgtgatgaaggcacacttaagtttagggcttagaacaagtatttatactctagggccaagaattaggtttaggggtacgaacgtcattccgccgataagtaagtgatcgggccaagaagtgggcttcagggaagaagcctaatgatggtggcacaaagaggaaaggacttgggcgtcacctaatggggggtggtgagctactcggagctgcctgagttcaagtctccttggccggatgtgttttggatttattattttcaaacggccggttcttgacatgtcttcactctttgagtcatatcttacagacggcttcatggattgctttgattcgacttcgacgttaatctttactcttttagctttccatgcataccaaaatatcttgttgctgtggtggggaagacctcggccggatgctaaacttctgaaatattggaatgatcgccttttgatactcttagcttcaaaactcttgaaaccttcttggcacctagaatacgtgtttctcctcttattggcgctagaatggcaccaaattctctatgaaacataagaaaacaattgctagaatgggctaaaaagccatcttatcacttgactccaaacttttgcttcttggattgcaaaaccaagagtctcttgcggacgttcagtgacattctcaaaaataaaccagttttgactcttccaaatataccatattatccatgaaaaaataccaagtatatattcttctatacaaaattgcttgccgcgccagagaagaaaatcaaaattataaaagagataatttcggggaaaaatgttctccgaggacgggataggggacaaagcccaaatttgtcgtgatggcggacagaagaatagaagatggtttattgattcttcctctgctccacatcaagggtacccttttttggtgccaatatgacggtaaaaaggcattggtttgtcttgagacatcctaagagacattgcaaggagaaatgtttaaatttcagcgtggttttaattttccatacttgtgcctgaagcggtgaaacactaggtccctaaaaagggggatcacaagtaggacgagagaggtctcttgcggcccaataattggattttacagtatatttactagatttagtataataccagctgtcggcatcactcttgtaagtacgactcggcctaatccctaaaatgaaagtgatatcagaagaatcaaccaaggcttgaaggcgtgaattaggtcattaacataaaggtgtgaattccttatgttaagaatactttttgctggccttgcagggacagaaggaatccaaggatcttgccatacacgggttcgccttctagagcctattgttcgtcgtagacccgagagaagaagtggtttagctgccataatacttctccatccaaaagaggggcagttagtctttcctatatgtataggatcactatacctaaagtatcttccttcaacaccggctaaggagacgattt

SEQ ID NO: 4587 - DNA, 679 bp, Arabidopsis thaliana columbia
cccgctactcgatgccgctactttctcaaaatctgatgatggttctgaaaaaggaatgtcttttgaagacttcagaagctggtgcccactcgttccaactatcagaaagttcctcggcagcttgcttattcccccgggtccaggttgattctttgtcttctctcgtctttaactcatatcttgttgacaaaactggtcaaaattttccttttttcacttttttatatcctctgaaccttgttatatagtgagacctggatatcaagtcccggatctgctatatgaagatagtgtgagttcagataggctactattaaagaaggaatacgcttggcatattggaggagctcttcctcaccacgagcttgtagagtggaagctgttgtatcgcagttccttacacggtcaaagcttcaacacattcctcggacacacatcgtgagtgtttctcaactgtaacataacatcatttaaacttgaccgagtagaatcaagacataaaatataaatatattgccgccccctacaaaaaaaatttctggatccgcactggttgagtcaatgttaatgtccttaactgcattcgtaaatgtttaatttgttatcgatacttgagttactatttacacataagggcattgcatgatagggggatgagggatgacatggctgatggatg

SEQ ID NO: 4588 - DNA, 433 bp, Arabidopsis thaliana columbia
caggattatgtctagtctgtttggagatttgggcaaaaagttcgtccctgagttcaacacgcttcaaagtttttttgaagagctttccaacgaggtcaatgcgttcatctaaactgggaggcgtagatcgatcagatgaatcaacacccatatattttaagatgagatgacacaacttggtagcacggctgacgagatcgctgttaatcttgaggagagatgtggggattggatcctgaaggaaggaaggggagagagacatattcagtcaatggattgtcaatggggaagaaagggggggaaagaaaaaccttttgacagcaaagcatatcctcaaatgtgaagcgctcgcggacattggagccagaggactttttggaatagaagaagccacgctgtccatcagactggatttgtttctgcattagccgca

SEQ ID NO: 4589 - DNA, 969 bp, Arabidopsis thaliana
ggttgggaacgaaactccacatcatactcgcttatttcgatcgcccactttgtaattcgctcggattggtttgggttatgaagtaccgttcaaagtggctgattggtgaaaaccactatagaatgcgattggaagtagggtcagagcttacgagcagcctttataactgccaatgctagcttctccagtttttcattaccatgatcgtctcttactaacactccactcaccgccgaacttgacatcgagacatatatatatagagtctcaccaacctcaggtttggccaagatcgtcctgctcataaggtaggatttgagctcctggaaggcggtttcacatttctcatccaaatggaaatccttattgccacgtagaagtttgtagacagaaaggcacttgtctgttgatcgggcgataaagcgattcaaagctgcgatgcgacctgtcagccttggtacttctcttttgttctagggggacggtagtttgattattgcactgatctgctttggattggctttgattcctcgttcggtgactatgtatcttaagaattcgccagatgtcactccgaacgtgcacttagtaggattcagcttcatctcgtacttgttgaggatatcaaaacacgcggtaagatgtttcatgtgatcttccgcctgcaaagatttcaccagcatatcatcgaggtaaacttcaattgtgactcccaacagttcggcaaacatttcattgaccaatcgttggtaagtcaccccagcattcttcaagccaaaaggcatgactatataacaatagatcccgcgatctatgataaaagcggtcttctcacagtcatctttatgcatcaagatctgatattaccccaagaaagcgtccatgaaggacaaaagctgattcccggcagtcgcctctacgagcgtgtctatgtgtgggagaggataactgtcttttgggcacgctcta

SEQ ID NO: 4590 - DNA, 1267 bp, Arabidopsis thaliana
actagtagcaggagctatgacctttaaaccagagatggtcacacggcgacagtggttaaggcaatgtgcatttgttgactatcaatcacattgaggttctcaactctcatattcttgcacttgtggaatgttaaggcctacaaaaccaacatagtcttactttaatagagagtaaccacaccaccaataaaggaaatcaattggatgcttaccgttggagcacctcgacaaggctgcaaaagaaatggttgaaagaaaagtgagaattcccttttactctctgaagataacatgttgagaaagaaaaaagaggcaactaacgttggaatgattgtgtttgcaagatctttcccaccattcttgccccatcccgttaacagtgccgcctccttcaacagttaagcggctcaaaccatggaaatatagccattttcggcggttaagaccttcccaaacatctggatcattgggagcaatgattgtaccagagatctaatggccaaaaaagagagcagaaagcaatgaagacaacagaacaaagacaacaatctgaaaatatccacaaagattcgtacataccgtctgtgaagggaaggtttaacctggagtgtgagtcttgctttacaaggtccagaaagatcaatatgccgaacgagacaagtgtaattttcaggcaccaagattctggttttgactttggaagaacaagctgtcttccaagcatctgcaaacgcctgcgttccattatcacccgacacaaattatataagtatctaccgttgctgtctgatttcctaaatcctacccatagattcaagatttcacagtgaaaagaggtttctcgagggtttagcgaatcgttactttagtgtcgtcggtgacgccattgcctttggcaccaaaattgccaacgtggaggagccgttcggatctgggtcgggtcgagcgcgactgtctccgcgggagactgggaggagcgattcgaacgaattcgcgtttgcggtcaaagcgagtgaggaggctacgactagtagtaacaaaagagtgacaagagtaccgccgcgtgaataactcataatttagatttttaatttttaggaaccgaatggatttatagacattaaactcaagatactataatgaggcttatgtatgattttagaataaacaaatggatatagatagagtctatgtataatcagaattacaacagatctagattcctcctctcgatcttgagagtgagattagtttcgtggatgtagtg

SEQ ID NO: 4591 - DNA, 665 bp, Arabidopsis thaliana columbia
aacgcttaagctcgtgagaaacagacgccaaacgtttcaccaccgttgttttcttctcaagacggtttcgtttcagcaaagtaagctccggactctcttcaacgctagatccaccttccattttcaagctatgtacagagactgtatcgtcttgtacatctaccgtgagtccacgtatggtgccgtacgtgttctctgactgttctcagcagtgaatctggagttccccggttttttatagatcggtggtaattgaccaccgctcattggtccgctgtttccggcttctgcatcagagtgatagcctcctgacacttcaaaactcactctagacattttttaacacactctacctgaaaattttctcgtcgccgctaaatttcaccgggatctcaaacaagagacacaaaatgatgaagaatttgttgtctactggttatggtcttatggaatctctcactacttttttagaggaaaattttgtaaacgcagagacaacatttttcccgagaaaatgagagaatttttccgggaaaatatttgatgttattctctctctgaaagtaaacgatctctcaagtaatttttgataggagaatgtagaaatggattcgtataaatagtgaagagaagagacgagtaaaagaatttgaatacagaagaga

SEQ ID NO: 4592 - DNA, 492 bp, Arabidopsis thaliana columbia
gataattttcttattattcaattagacgagtatcaatacatcacacacaaacaacaagaaaaaaaacaaaaagaactactgtttcttgagaagaagagggccaacgttatctccattagctttgttgtgcttcacatgactcccatcacacaatggaaacgtccccgacctccaacacctaaagtcaaatcaaatccatgcatgaccatgattttatatacatgcacaaaaatacttattcgtacatttgttcgtttgtaaaaagactactaattaagaaaaatcttacgagcagaagctttggcaaaacatatggattagtatgaagatacattaatgtataaatcactactatgcatgattttaattaaaacatgattcaaatagtagctaactatgttcttttctttcctaattaataagagaatgtgaacctgcaatagggagttatgttcttggaaagctcggtgacaacgacggagcaacaacctt

SEQ ID NO: 4593 - DNA, 538 bp, Arabidopsis thaliana columbia
tctaaaggtaaaacaagattcaaatcctctgtttttcataacgtttcttgatttgttaataatttggaaaattttcaggaacattcggggattagcaagagcgagaagaagagagtatgcgggctaatggattgtaggaaactatccgcggaagtagtgaacatgcggtacagaacgaacgtttgccaatgcgggtgattgtgcaagttctcttctttgaacagattagagccaatggttcatcaacaggatatagcactcctgagcttaccactactactctaaacactgaggatgatgaatgggaccatgagaaagagttttgattgaatctttcttattttgtttcttcaacaccatctttgagttttactggtagtttcaattttcctaaattagaaaacatttggtgcttgacctttgtaattgggccaagttttaatgggctttgtgttcggcttgaagcctttctcatctcgaattttaaatgagaataaaaatcagagcaaattttgcattcatttgtctcgttgatgat

SEQ ID NO: 4594 - DNA, 519 bp, Arabidopsis thaliana columbia
atgaatcaatgattttcttcatattattgtcttggtataaaacagagtccgatagaatgacacctctgccatttttgatgttttggaagatttggttatcaaacacaaattggctatcccagtccaacggaatcctgacattaacatcaccgccttggggacactttgacctcaggatttgaaaaaattccgggtttatcgtaggatcttgagcatctaaacgtggtatgacaaagaagcaagccgttgtaccaatagtatgtgcacctttaacaaaaataaagttcgagtaagcaagatagtgttttttttgtcttttcaaaatagtatttaatcaagttgttgagattatgataaataccagcactaagaagtacaagatcttgatctgaaagccctttttctctaaattttgatttcaaagtatttatggaatcttgaacatctggcaagttcttagcatgatcaacatttgcaatcagaccgtctctccgaccaggttggaacttcataaaatgg

SEQ ID NO: 4595 - DNA, 559 bp, Arabidopsis thaliana columbia
aggatccccatcctccattttccttttcatactccaaatattctttcaatgactgatcgaagtgaaaaatgaagtcgattaaatttttctttgtaattgtagggtggtgcttgattttgaaagtggctgggatgatatctagattgcctatatggtccaagatatccacaacgtaaaccatatcctgaatcaacaaaataatatttacctataggtggatgtggaaaatgtgtatcgccttgcatagccaatgcgagaacttttgcatcatgtgcagaaccaggtacaccaacatatatatatatatatatgtaaacaatatgtctaagttgcatatacccagaatgttcatgctgcatttattttttctgttccagtatcgttgttggtctcttccagaaaccttagcaggaacatgtgtcccatccattgcgccaataaaccctctgaagtgtggccagtaacgcctatctgatcgcaacttaggatgaactttagtgagagtcattgggtctggcttaaacatatctattgagataagctccatgaatccaataat

SEQ ID NO: 4596 - DNA, 573 bp, Arabidopsis thaliana columbia
  unsure (1)..(573): unsure at all n locations
tnnnnnnnnnnnnnnnnnnnnnnnctaaagatgatccccattataccaggcataataatcgcggcgatccctttggaactgtaaaccatgccaacattagcgccggtgaaatgaagagtattaatcatgtaagagccgagggtaaccagccagctcccccagataaaatattgcaaaaaggacattacctttaagcgcatccgatgctcataatcgtttccttgtcgcatcatttggcctcacccgcgaggccgtttcttattgtttttctcaggcaattttgcgcagaaagccacaaataaggttgatgaagttctgcttagagagctccgcagccgccagcgtttgcgcatgtgacaatttcacatcgcttaaaccttccgccatattggtaatcgcagagaccgcaacgactttaaggtcgcaatggcgagctgaaataacctcaggcaccacagacataccaacaacatccccaccaataatttgcatcatgcgaatttccgccgcagtctcgaaattcggtcccggatacgagacgaacacgccctctgtcagaggggaacctcttct

SEQ ID NO: 4597 - DNA, 561 bp, Arabidopsis thaliana columbia
cgtgtcgtttaaccaacggtgttcccaatttgctgtctgttgtttgccttgttcgatcgcggtaatgctctctatggatcttcgtcgcctgtgcttcaactcactccttctaatttcaagtctaaggtatgtccgtgaccgtgatttatatgatcttctctttattcgtttagcagtgtatagcttcggcttaagtgttatatataattttaattacgtatgtagtgatacgtaatgtgttaatttcgtttaatgttctccttggaaatggttggcaggttcttaattcaaatggagtcgttttggtagagttctttgcgccatggtgcggtcattgtcaatctctaacaccaacttgggagaaagttgccagtactttgaaaggtattgctactgtggcagccattgatgctgacgctcacaagtctgtctctcaggtttgtgttattttgagttatcttttgttctttttgtcaatgtgattgtgattgatgaaaagtttctgcatccttgtgatgataaagaagaatgttgtctcctctactaggattatggtgtgag

SEQ ID NO: 4598 - DNA, 535 bp, Arabidopsis thaliana columbia
  unsure (1)..(535): unsure at all n locations
agctctagaagaaactcacctgcccgcagagaaacccctcgttctggccctgaagcggcagacacatctaaaatccaagacacataaacaggtacaggtacatccacagtccaaggcacataaacaggcacaggtacatccaaaggccaagacacagactcctccagacctgaacctgccaagttaggtactacagcttagattttttttctcaaagtctggctctagccttgcctttgtttttcgtagctatagtttcgcttctaatttttgcgcctagtattgattttctagtcgtttcttacgtagaagacgaagtcctctcctcgttacaaattaaagatgttaagagaagctccaattctttcaatctgttttttttgacggaataaaccaacacatgtagcctatttctaaatgggtctaaatttgtcggcggcccaataaggggtcataataaaagaataaaaagccttaaaaaggaattagtatgtatctgaaatcaagctcactggactggacgaccanaaaaaaa

SEQ ID NO: 4599 - DNA, 636 bp, Arabidopsis thaliana
cgttgaagttcatttccatacttgctcttgcattgcagtgaaaatttccaaaaacttctagatagtcatcaaaaatggctacgaaatttaacatacactcaacaaagcaacagacacaaaaaaaatatggaaaaatcaaatacttttcgatactaaagcagaaagttaagtaaccggctcattcgtaaaaccactcctacaaggtgaaacagagtcgagcaaattaaaagtcacaatactctaatttctgaagacgaatcatagaaagatctaagttttacaagtttccatcattggcaatctctagaaaacacaaagctaaggtattcagaacaattccaaaaacttatgccaccaccaccaaccttatatagcaagtcaacgagagaaagtaatgaatggatcctaacctttgatgtgttcatgatgatcggaagcagcagcagcaatcttagcctcatgatcttcatcatcatcatcgtcatcatccctacgtgatttaacagtgacaatagcttccctggtagctccaacattcccaggaggagcaggaccatcacgatcatcaggatatctaacaacaacaacaggacaaacacaatggtgaacacaataatcactaacagagccaagctt

SEQ ID NO: 4600 - DNA, 470 bp, Arabidopsis thaliana columbia
actaagaacaaaagggttcaatgctatattggtggtggtggacagattgagtaaatatgggcatttcatagccttgaagcatcctttcacggccaagtctgtagctgaagtgttcattagagaggttgttagactgcacagatttcctgctactatggtatcaaatcgggataaggtcttcttaagtcacttctggacagaactcttcaagatacaaggtacatctctccaaaaaagcactgcttaccaccctcaaacagatgggtagccagaggtggtaaacaggtgtctaaagtcatacttaagatgctttgcgggaaggagaccaacttcgtggatacagtagttgccttgggctgagtattggtacaacatgtcttatcattcgtcaaccaagaccacacctttcatggcagtttatggtagagatctgcacctatgttgagatacgatgatgtcctactcccaat

SEQ ID NO: 4601 - DNA, 487 bp, Arabidopsis thaliana columbia
aaggctgctactaatgaatagattaataatgattattcctaacaaatcaaatcttccaccatttgttatcactgaaatttcctctaaactctccctttaataaaacaaattcacaagagaagaacaaattaaaaacaagtattaaaagaaacaatgttacttgattgatcattcatcttcatcatcatcaccatcaccatcatcttcctcttgcaaactacttagacagaaacaacttcgagtctgagccatcaactcttttttatttttcatcatcatcataatcttcctatgatcatcaccatcaccatcatcatcctcataatcatcattgtgaatgtgatgatcctcttcattaggttcttggagtgcaagtaaaggcattgaattagggttttgccacgagtaaaaattcgaagctgacatagatcttcctctcctccttaacttattagcaataaccaatctcctcctcttgttaaatgga

SEQ ID NO: 4602 - DNA, 558 bp, Arabidopsis thaliana columbia
tgagctgtttggtccatgcacgaagcgaatttggccgcatcgacctgaccatctccattcgtgtcaagctggatgaacatctcgacgagtttttctgaagggatagatggagagagagcatgaatcgcgtcacgaaactcttcccaagagatcttaccatctttgctcgtgtcaaacctctcgaagatatcacttaaagacatattattcatattcttattaatatgcacttttgttgattttctacacaaaacaatgggtccttgtatttatagatttgaagttattatattcacgtacccgttttacaaatttgcttgatttatttatatgtgaacattgtaaatggttattaaatgtatcaatattgtttggtaagaaaaataaatagttggtttacataaaaagaagtaaatccttttttccattaaaagaaaaaaaaaatcaaaatttcccaagaatgtggggatgttcatctaaaatggatttgtttcacttattgatagcccatgtaggtgccaatctcaaagacttcacgtggttgacaaagacccaagg

SEQ ID NO: 4603 - DNA, 1067 bp, Arabidopsis thaliana
gtaaaacaaatccatgcaacatcttatgaagttgtgatgtggagtacaaaggtcatatgcacataataacttacatagatggttcaataaatcatcgttagatagaataataatgttaatattcacttaatcaattttactaacaacaagtcgttcaacatatataaatgatgttgatcaagggacatttgtacttaatgttgggagattgttgactgtgatatctttgctagtcttatttgtttcattatgatccgatgtcgtaagcatactcttcatttccttgtttttagcccatagcacaatgtataatgctccaacgataatcactgtaccaattatgctgtaatgttttcaagtaaaaataaaccatattatatatacatacgtatatcaaatccatttccacaaaacaatacaatatacatgagtttgtacctccccaaatgaagtgtttcatctagcaaaaatgatccaacaagagctacgatcacaagtcctacagggctaaataccgatacaaataacggtcctctagactcaatgcaccatgcgttgactgctaccaccatcccggaaatcagaattgcctacaatggacaacataaagcacatatattcaaggccaacctaaatgaatcttcacacatgtatagacttgtatgaatttgtaattagacaacaagacatatatatatatacttaataatggatggattgatatttaccgcataagcaatggttaatagtctgatattccatcctaatctccattcatctaaatcgtgttcccagcaaagagcgacaagcatagccactacgcctcccatcatgttcattagagtcgcgttccaataaggccctccaaattgtttgcttatcttaacctataaacaaaacaaaaacaaaaaaaaacacgtacatgcctaatgccttagtacacaaaacaaacacaaaaataagaaatctgaaaaacaaacaaaaaacttgcctgcaataaaaaccaaagtgagatggaaatgtttccccaaaaactagaagagcccaaggatggaaatatggtgagt

SEQ ID NO: 4604 - DNA, 540 bp, Arabidopsis thaliana columbia
  unsure (1)..(540): unsure at all n locations
aaactggaatccttgctccacttctggaggagaccgtgtttcgcggattcttcatggtctctcttaccaaatggtaaaacctctgttcttttttctcatttggttctggacaaaagcttactacattttgttacgttctgtatttcagggtcccgaccccaatagcgatcatcatcagctcagctgcgtttgcccttgcccatttcacacctggtgaattcccgcagctgtttattctaggtaaaacataactaaaaacaaaaccatttgcattttctcatggttatgaacatttctggatgaacaataagtatcttttggtttaggaagtgttttgggattatcatatgcacaaacccgcaatctcattaccccaatggtcatacacggtttctggaactcgggagttattttgctactcacttttcttcaggtagaaaactcattcctatgatcactacaatgtcaaaataacatatcaactcttagcttatgtttgttttgtctctgttgtnttttgtagaccaagggtatgacatt

SEQ ID NO: 4605 - DNA, 547 bp, Arabidopsis thaliana columbia
ccggagattccggcgccggaatcatctccaggttcatagagagctttaagagataaaacttgctggatcgcttgagatttattccacgaaggcctgcgcattcctgtttcgacacgtgtcagccgccattctccagagagcgaaaaaaaaagctcggagagaagaagaatagagaatttcaaaaaattgactatgtacgattcttctcagcaaaatccgtgaggaagatcctaccgtcgaagacaataagaccggaaaaaaatggagaaaggaagaagaagaaacctttctctttgaggaatttgcggcaatcttcgcgagtaagctgagaaatgtcttcttcagtgagaagcttcagaggcttctcaagtatagacttcgccgtagtaactcctacatccatatcccttgtcagattccggccaaaacggcctcaccggagtcccgacgagagagcagtggcgttatcgtaataattggagggttttgagggcaaaattagaagagcgagagagagagagagagagaaagaaagagaaagagtgaa

SEQ ID NO: 4606 - DNA, 355 bp, Arabidopsis thaliana columbia
tgtataattattcgacaatcatcatatgagatcgaagattagatcaaaagacagaacaaagatcaataattccgatggaaaaacacaactgatgtaaacttaagagcttgtgaatatggagacagcttaggttccttcagagacggcaagcttagccaattcaccaggcagaacaagtctcacggcggtatggattacacgagacgtgatcgtcgaaatcatattgatacgagcgagacgagacgattcctgagcgagattctcgaaaatgtcgttgatgaaacatgttcataattcccatcgcttaaccagagataccaatatctggatgaacctgattcacatccttgaaaaa

SEQ ID NO: 4607 - DNA, 549 bp, Arabidopsis thaliana
  unsure (1)..(549): unsure at all n locations
nnnnnnnnnnnnnnnnnnnnnnctaaagtgccgatcgttggtccattgttggggcctactactacgacaccaatgctaacaagcaagccgactctatgttaggtgtgcaatacagctcctgctgctatgcaattcgcgtcggttacgagcggaagctgaacggttgggataacgataaacaacatgcggtatatgacaacgcaatcggctttaacatcgaacttcgcggcctgagctccaactacggtctgggtacgcaagagatgctgcgttcgaacattctgccgtatcaaaacactttgtgatttgttgatttaccacgtaatccgcagtgcggttaattgaaatggaaaaagtatgaagaactggaaaacgctgcttctcggtatcgccatgatcgcgaataccagtttcgctgccccccaggtagtcgataaagtcgcagccgtcgtcaataacggcgtcgtgctggaaagcgacgttgatggattaatgcagtcggtaaaactgaacgctgctcaggcaaggcagcaacttcctgatgacgcg

SEQ ID NO: 4608 - DNA, 534 bp, Arabidopsis thaliana
  unsure (1)..(534): unsure at all n locations
nnnnnnnnnnnnnnnnnnnnnnnctaaagggcgtcaccagctgcgccatatctttatcgccagtgctgatcagcaccggacgcccggctttttcggcttcgcgcgccagagtaccgataacgtcgtccgcttctacgccagaaaccgccagcagcggcagtcccatcgctttaaccatcgcgtgcaagggttcgatttgtgcacgcagatcgtccggcattggcgggcgatgtgatttgtaatgttcaaacagttcatcacgaaaggtttttcccttggcgtcaaagaccaccgctgcatgcgtcggtttatattgcatgatcagactgcgcacgatgttgaggacaccatacatcgcaccggtcggctcgcctgcgctgttagtcagcgggggatccgcgtgatatgcgcgataaagataagatgaaccatctacaaggataagtggattttgggggatctgaaccataatgtccgtgcgtgtttatcagattatgggtaaaggatgccacagacaggatgacaacatgagtt

SEQ ID NO: 4609 - DNA, 560 bp, Arabidopsis thaliana columbia
atatagttaatgacaacttgttttaggggcgaaaacgttcaagatatatttattctatttatttatatagaatatatagaaaaatacgttgatgaggtttcttaattagtaatgttattgataaagatacgtgaaagtttcaaaacatgtctaaattcatacggaatcttcataaacaatactaatccataaaagaatcacaaatcaccttccataattaggaaaataagaatactaggaatttaaagataagagtaaaattgggtttgatttattacctgcagggatctcatgagagcttctccacttagatttggaaatgacgcaatcatagccagcttctcggaggaggctagatacttcgccgcgtaaacagctacgacaaccgtcggtaaccggtctccggcagacacataccaaaccctttgatctaactactttcaacgcttccttagttgcttgtcttatctttgtctcaattgaacttgtcctatacagtgtcgcctacacatttcaagatttggtccacaaagaaaattaacttataagacgccacaaag

SEQ ID NO: 4610 - DNA, 517 bp, Arabidopsis thaliana
gtgtgctctaaagtcagggcttcaatttgcattccttgttcgatctcttttcgcgtctggtttagcgcatcgagttcatttgccagcacgcgcgcttcgaccgatgttgtcgcacaacaatagcgccacaccgacggacatatcgtccagtcgtccggcagcattgagacgtggccccagcgcaaaacctaaatcgctggcgccgactctttgtgcatcacggtttgccacttcaagcagcgctttaatccccggacggcactttccggctcggatgcgactcatcccctgccaggtcagaatgcgattattagcgtccagcggcacgacgtccgccactgtccccagcgcgaccagatccagcagttctgccaggttaggaattgcgatgttacgctcatcaaaccagccctgatcgcgcaaaaaggtgcgcacgccagcatcagataaaacgccacacccacgcctgccagtgatttcgacgggaaattacagtcgcgcaagttagggttaatga

SEQ ID NO: 4611 - DNA, 446 bp, Arabidopsis thaliana
ggatcccatatgattaacaggtgaatagcaaagtttctatcatttttattcaaaaaaagattcataagtaataaaatgatagtcaacgtttctttttctttgtgtgtttggccttttgttgcagcgtcattgttgtacaccaccagtcacactattgtgggatgtgataatgggtaccttttaatgtcaggagcttctttcttacagtgatccacctcgaaacaaaccgtatagttcagaggaagtttcacttccgctctctctctcttgtgtatatgtgttcactgggaaaaatgtggttggcttcgtcttctccatggctctctgagctctcatgttcatattcggctgttgtagaacatacgtcttcagttccagtaccagtccaatggctcagatttgtggtactctctccttgccctcaacgcgctcgcttctccgccgtt

SEQ ID NO: 4612 - DNA, 611 bp, Arabidopsis thaliana
gatcccccgaacaaaactgaagatgaccaatttaataatttcgctaaaacaaaagtgcaataaaatgtgaatttaacaatgatgacaagaacaaatatcagtcgaacatcgtggaggtgacaaaaaaaagaatctgaggaatctaagtaatgaacagatctaataagatcagaggaagagagtggagaaatgtttgagaacgaaaccttgcagggacgatttttgatgacgatgtaaccattcttacggatggttccagcttgttgagggtaggttttggacgctccggcgtcactggactcaaagtgatgctcctcgtcggacatggttgcagcagcgagcttcgacgaggattttgcggtacagattttttggtaacagaggaagttgaccacgatcgggaaagcgcaaaaggcgtttcttttgggctttgatatatttaagggttttatgggctttaaagccttattgtagagagcgtttctccacgttcgatcacgtgatctgatatgagagatcaatgttttctccggtcatatagagatcaatgttttcatgtctttgaaacatgataaattttacgaataatgtaagcgattaatgttggtttt

SEQ ID NO: 4613 - DNA, 1651 bp, Arabidopsis thaliana columbia
tgagactggccttgtcgacaaccatcgtacaatggattttgagcaccttctaacaagtcgtagaattttttagaatggttatgtactggttcctccacattctgattagtaccgtcttgatgatagttatcatcaaaccccacgttataacgaaatgcatcgttcaccatatccacatatggatcttctacaacattacccacatccacatatggatcttctacaacattacccacactttcataattctctcttagatacgtactatcaattacataattactcgttcctacattcatgttgaaatcttccccatgcatataccaaacataataatctggcataaatccttgactaaacaaatgactactaacttttctacccgagacgatatgttttttattcttgcacacagcacaaggacaatggaatttacctcgacaactttgtactataggctggctattagcaaatgtcaagaactcctccactcctgcgacgtattctgctgacaaattccctgtcatttcttcgaacctcttgtacatccaatctcgattaaaaccaccgctactcggataattatagtttcccgccattataagactaataataaaactaaatatatttttaacgtttttttcttcaaaaacgtttatttttttaaaaggtattatttgtattgtgtttgtgttgtgaatgaatattgtgtacgagaaattttcattatataggcaatttttgggtgactaaaacacgactaaatagtgtagtcgtttaaaataggtacaacaacttacaaaacgaattacatgtgtttttttaatcgaaaattacgtctattttgcgactatatttaatgacacgccgttgtagtcattcaatagtcgctatttaaacgactattacgaggtgtcgtatattagtcggcaaattacgtctattttgcgactatatttaatgacacgtcgtagttgtcatagaatagtcgctgtttaacgactattatcacgtgtcgtatattaatcgcaaactagcgactaatttacgacaacatttggcgactaattacagagtgtcatataatagtcgctctttagcgactaccaaggcgtcttgcctctatagtggtaatttggcgactaactaacgtctatatttttgttagttgtaaattagtcgtataattgtacccaaatagtcaccaaatacagcgactatttatgtagtcgccggttgtagtgggtagttaactgttaactacaagaaaacagttaactacccactacaaccggcgagcatttgaaagttcctcctgaagtttgtcatacctctggtactgatcttgcaattcgccattcgatttcatgagttcggaggaaagattgtcaatttgatccccaattttagcttggtgtcggtggaggaactgtggtcggactcaagagaagagaatttgcctttccaagcatcaatgtgctgttcgctgtcaagcagtagtctttcgtactgttcgaccatgtcgttaagctcactgttcgcctaagcaaagattacataatcaggagaggtaagttagcatgcaaatgatgagtaaggtgggaaggtgtgaagatagacatacccgagatgaatgatgggcgtgaagtag

SEQ ID NO: 4614 - DNA, 1220 bp, Arabidopsis thaliana
tggctaacgtttttgagtagaattcaatcatatcgcatcttagaactaccaacttggacattgattttatttgctctacctgatgctttggttctgagtccccgccttcaaacctctccttcaactacgtcttcttatttgcttgagggcaagcaaggactaagtttgggggagttgatatgtctatagtttgcatgttttcagtgtccattcatcatcgttttgagtccagtttcgtatcattcatcactgttttatatcatttctcatcattcttgcatactttgcatgattaggatagctttgcatagatattgcatttctgagttgttttcaggtgatttggagctgtttgcgagcaaattggaagaaacgagccagaaacagaagacatactcgacccccaggtcgagtgactttggagccattcttcccacatactcgacccccaggtcgagtgactttggagccattcttcccatccactcgaccaccaggtcgagtaacctcagctcaggccactcgatgacactactcgaccccctggtcgagtatcagttcaccacaccacctgacaacattcgaccgttcactctaccacaccactcgaccccacggtcaagtatcacttcgccacaccatcaccatcactcgaccattcactctaccaagttactcgaccccctggtcgagtatcatcactcaccaccatcagcatcactcgaccggacactcgatcacgtcttcacagtctactcaaatccgcactcaaccagacaagctgagcacaaggaagagaagaggagaagacaaagtgtttggaagcggcctggacttccatcggatcacgaagcccatctcggcccattatctctctatgggccgagcgattaggttattggcccgtctactatcattttatttcgttttgtataaatagatgtcttagggttctgtcctgagacatctagtcgacattgagtttttgctttagttttattttctgttttactctactgcgccgcttttgcttttacaacctgtaattcgagatttttccaagttattcagattccgcatttgatttcatttgtcatcttgtttctctactctttctctctttacttatgcaatattatcgtttatctgcgtttatgtctttgagcatgttgtctaagtagtgacttagaattcttagggataggatagagtagttgtgg

SEQ ID NO: 4615 - DNA, 787 bp, Arabidopsis thaliana
gtaaaatcccgatgctgacacatctacttaccaagcgggtgggcgacttcaagaagtgtattaataagaacgggttcaaatggggtaaatttatgtccgacattgctaatggagtacacataaaccgtgaacccaatatgaagtggttgaaggatgtcgatgttgtgtatgctccgatgaactagaagagtaaacattgggttgctttgggaatcaaccttaatgaacggctaataactgtgtatgacgctttaatatcgcacacgcgggagtcggctgtgaaggcgaaaatgactcctatttgcgaaatgatgtcgtacttagtcagagcgatgtgccaggatgtattgatttctccgtactcagttgaaccttttgagtatgtgcgttgtcctaccgttgctcaaaacccaactataggagattgcgggtcatacacgatgaagttcttggagttgcttacgtttggacaccctttttcggaattgacaaccattcgagaagcagatatggtcttctaccgtcagaaatactcggttgacatctacgagcacggcaagcgggaggtcgtactgtgcaattgctttaatcgtccaagaacaatattctgattctttacaactaattattatgaacaaacctatcttacatatgtgattgcaactacatttaatttggagattgtctgaagttaatttagtttcctcgatcatattgtcgtacacatcgttcacttccaattacataatgtaaatgtgtacgtacatatctatatgtctcgtacact

SEQ ID NO: 4616 - DNA, 1710 bp, Arabidopsis thaliana
  unsure (1)..(1710): unsure at all n locations
ccggttcagacgattcctcgatcttggggatcgagtaaaaagggtgatgcaaagtctgcgcctttgcctccatgctctgaatgatcaattggtcgagtggatgcttcttcctctcctatccgtatgctcagatgtctggttgagtggggaatgaggaggatccaaagacgctttgatagatcaacaagtcttgtagagttggtcgccaatgatggagtaaagggttcgagtagaggattgagtaagaggggcgagtagaccgatctgctgcttcctctgtggctgtctggatggagtaatcttgtcgagtaaattgctacctcctctgtagctgcctggatcgagtgaactcgtcaagtagtgatatagctcaaatttgccttaagcttactccctcaattaagagatcgtcgttagcacttaagggtcgaattccactgagctctcgatgttcacttaatggacttatgatgttgtttaataagctaaatgaagtaattaaatagtaaagacaaataagcaagtaaaagagttgtagattcaagtgattagagcgtcaggtctaaggaattatctccggaaatagataaattgtagatctagctaatatcaggattgttctcgcaccgttctcaaactcaaactataattctagagtaaccggtgcggttccgcgaaactctctatacttacaactaagataaccggagaagccgagagatcttatgctaaagcatgcattattaataagcttgattagttcacctagtatctaaaccagagcccttctatgagcctacctgttctttcttagatgcctaggctcatctatgatggttcaaataacaaatacctatggctggaatacctattatctaatatcaagttctaggtgattaatctaaaactagcactaagaataatcaaggtgaagaactctaagaataatcttaagggggttttcaatctactaatccatctaaatccctattgagactccctggacccaacaaggtgattactcagacatgacaatagaaacacaaatcataatctgaatagttttcattgatgaattaagaataataccaaaggagttcagaatcctctctttagggattggattctttttctctaaagtgtaacaaaagctcaagaacaaaaactaggtctaacaatgaccaaacaattaggtatatatctctaataacgtgcagggactaatttgcaaataagaaaaacttcagggcttcttaaagacttggtataaaacaaatattcttctggcagcgataagagtgtcaatcgacacaggtgtggtgtcgatcgacaccagcttttgaaaaacgtccttcaagatctttattgctgaaaaagcatccaaaattccttattgtgctccatagttcccagatgtgtgagtgtacctggaatgactcaaaacgtacgaaaaagactagaaagactctaaagaccattctgaaactgtgttagaaatcagtataaaccgggacatatcacctctcgcaaacttcactgaagtttcatagtttttctgtgtgaagcctgagatctcgttcctaaatctagtggtgcgagcattagagaagacttagcaagaaaagtttcttacaatcacctcaagagttgatggattttggnggtagagcttctcccagtggtgtgcttgtctccaaagagaagggaata

SEQ ID NO: 4617 - DNA, 876 bp, Arabidopsis thaliana
tcgcgctgcctgcgagccacaaggcgatgggtaaacgtgtgcggacggatgattcatcgtgcaagacacagagcaagaagaagaaggcctcgagtgccgaggcgggacaagagctccctatctttgaagatcgggtagcctccgcgaacctcctcggtgggtgcgcctatcctttgctttctcctccggatactcttctggagtcgcggaagtatgctgaaacggcttcccacttcttgccggtaagtgcctattcaattttttcatttttcatgtctggatctccgatctgtaattttctttctttgttctctaggttgtcgcctcattgaaccgaatggtgcattcgtacgattcggccatgaggaacaacatggaggcggccaacaggttggccgagatgatgctcggatccaagctgccgagcgagaaagagatgaggcgctctcccaagctgccgcgccgaaaatagcgaaggaggaggccgaaaaggaggctttcgtgaacaaggcgaacgccattaagatggccgagctgaacctgagggcggactccgaggttgttcgtctcaaacgcatgctgaccgaggcgagggggctccgcgataacgaactggctcgggcttctcaaatggcaaggcgcgaggcctccgaggccaaacttaaggccgccgcagaaagtgttgcttcttgacgggattaatgatcagtttatgtatttatcccaagcgcggggtaatgcgcaactgatcaaggcactcgaggagggtggagtgctggcgaccgagaaggaccaggttgaggaatggctgaaagacttcgccaatgtcgaggttgactttgccaattttatcgccgagctgaaagaggaactcaa

SEQ ID NO: 4618 - DNA, 855 bp, Arabidopsis thaliana
ggtctatttatacgcaatcctaggttgccctaattgggaataagacaaaataggaaagtcggcgcaggagcatcggccctaggcagtcagaaaagccgagtggcttggtcatggtcacatagttcttctcgtgtgtcctgacagagggtgcactaacagttcagtcaccgttttagatcatttccggtacaaaagtatcgacggagatttagtaggggtcgtcggagactcatgggttcttaaacctgactctgtttcggtgacgtggcactcaatgaaaggagtcaaaaaagattcgtacaaggagatcatctcggctcttggcaaagacgttaacggtttgaattcctcagctgaggtcacgagttcgtcgtatttctacgggaaattaatagccagagcagctaggtttgccttaatcgccgaggaagtttgctatctcgatgtgattccgaagattgtaacttacctgaagaacatgattgagccgtggttagatggtagcttcaaacctaacggctttctgtatgatcctaaatggggaggtttgatcacgaagcaaggatcaaaagattcacaagctgatttcgggttcggtatatataataatcatcattaccatattggttactttctctacgctattgccgtgctcgctaagtttgatcctttgtggggagagagatacagagctcaagcgtacagtctattggcggatttcatgacgtttgggagaaaagatgataataattcaaattctagttatccgcgtttgagaaattttgatcttttcaagctacactcatgggctggagggttaacggagttctgggacggccggaatcaagagagcac

SEQ ID NO: 4619 - DNA, 1223 bp, Arabidopsis thaliana
aactaaaggaatagggccaacaacatgtgttgaggaactagaaccttcctgcataggttcgtcatccccttgattaatgccttgcatcggttctatagcttgtctagttgcttcaacgttcaactggagcacagtgctttgatggttacaagctaattcatcatgcagcaatgacccacatctaaagcagaatttcttcagtttagcgaaaacaaacctaaccatgaatggggctgtggcaggttcgaattcaacagatcgtacaaagattaaacgatcggagatgttcattgtaacatgagcctagacttcaccttcagcatccgcagtggcttctataattttggtttcatcaatatgccccagaacccctgctgtctctctaataactgggtctatcctaaaatcttgaggaatatgcagaattttaacccaaaaggagatttgagagagaaaatttgacaaggtacgattggtccatcgatcaacagccaccatccaaaaattatggtgccaagggccattttctaggacagacatgagatggtgttcagccttaaagaagaattgaacagtaccgtcatcattaattctacttgtaacccttccatccaatctccaagctttaggcaaagcacctttaagtcctgctggtttctgatgttgagggtttagacctttgacaattaggctgagacgattatctatatcacgcgagcgcctcgcttcagctgacatcttcagaggagctctctcagatcctagatctaaattttgaagcgcttgccataattctttatccatggattcagagaagacaacaacagtcaaagagaacaacacgaacggaccggcagagacaccggagagtaagatccgcactaggacgacaaagagatcaccagaaaattgaggcggtggaagtcggtggaggatcgctgtagaatcgcccagaaggaagagagagaaaaggttttttacacacagtagtttctttttttttttaataacaattataaactttaaaatataaatattttttaaaaataaaatttgcaaattttaatatatattactttaaaaaaataaatcgtctcgcggtataccgcgggttaaaatctagtttatatattacaatatctttcactcaaaatgtattccaatatatttcctaaaataagaaatccgcacgtatgaccgtgcagaactagttattggtcagg

SEQ ID NO: 4620 - DNA, 681 bp, Arabidopsis thaliana
gccgttttcaatgaagcctcaaaccacgctccaaagatcgataagagagactccagaaacttcgcaaaaaatgctacttgtcccgcatttgccccattcacagcctcccgttctcctccctccaactggaattgtatgaagtgtcttcaatacgattgcggattctgctccaacggagcacaggaggtaataaagtctctttactcaaaacacacacaccaaaacagtactggctagatgaattaagactcatgttggggttatatgtgttttgtcacagtacgcacctggagcatgcattgttcagtctgctgatatgaaggcattgtgccactcgaaaggcagaaccttcttcaaagacggatgccccagcaagttcgggtacctggccattgtcttccttggcctctacatcattgtgtacgcgcccggtatgggcacagttccatggattgtcaactcagagatctatcctctttgctacagagggctcgcgggaggaatcgctgcagtctcaaactggatgtcaaatctcgtagtgagtgagacgttcctgacattgacaaacgcagtcgggtcatcgggaacattccttctatttgcagggtcatccgcagtcgggctgttcttcatctggctgcttgtgcctgagaccaaagggcttcagtttgaggaagtgga

SEQ ID NO: 4621 - DNA, 508 bp, Arabidopsis thaliana columbia
cgccagtgtgctctaaagattgcccgcattggcccctgtagtgctgcgacgatcattgacacattgggaatccctaaaagcacggcctatttgctgcttaatgaactcaggcgtcacggttttcttagccttgatcaccaggaaaatttttgtttgtggaccaggctggtggagctttccggtcatgcgttaagcaagatggatctccgggaactggctcgaccgcgtttgacgcaactgatggataccaccgggctgttatgtcacctggggattattgataacggcagcgcttattacattttgaaagtggagtcatcagccactatcagcgtgcgttcccatgaaggaaaaagcctttcgctttatcgctccggaataggtagatgcctgcttgcctggcaacctgcagcggtacagcaaagtattatcgaagggctggtctgggagcaggcgacacccacaacgattactcatccacagcaacttcacgaagaactggcgcgta

SEQ ID NO: 4622 - DNA, 308 bp, Arabidopsis thaliana columbia
tgttcttgaggaaagtttatacatcctgactgggatatgtcccattccgtgcatcctgctggagagtatcatgcctctgctagggccaacagtggtgagccactctatgtcaggtaacatgctttcccaactgaggatatcactcatagatcaactagcctgtggatagccgacttacatgaggacatgttgttcgagttcttaatagatagtgattctcatgtaaagcacaactttgagagtctagacaagcttgtataggctgagggatcgatgctacgtgctcgactcactggtagaccaacatc

SEQ ID NO: 4623 - DNA, 527 bp, Arabidopsis thaliana columbia
tggaataaatgccgctggagcaactgcagccatgtatgatggtggctttcagaatgtagccgccgcacagcaactcatgtactatcagtaataaacctcagttcgtggcgccgatctcaagtttcaatctctttgctttttctcttttttttttgtttgtctagaacttgtttgtgtgtgtctgtttgtctctcacttaagttatctatataaagttttatctgcagttgtatgattagttatgtattcccatggattgtaagacaagcgaattacattcaataaaagggatttggatatccattctatgtgattttacatgaacataaacagacaacaaagaaaaaaacattgcggaaggatcagtcagtctctaaccgagcaatgtacgtatcatagaactttccagctttctcgagatctcccagctcggtataacagtctgcaatagctccatatgcttcagtgattccagaatcttcactttccctgtttgagatggcctagaccatggagtgatactgtat

SEQ ID NO: 4624 - DNA, 447 bp, Arabidopsis thaliana columbia
  unsure (1)..(447): unsure at all n locations
tctgatgtaatatatactaagtgctaagcctgattgcattacgcaagatgctacttgagaatcagacatattggacgagggaaaatcagtaatgtgtaataacaagtgaaacaatccgcagaaaatatttatattaggaagcatctatttatacccgtagaaccggagacagtctctgtgaagggaatgaccacagttggccacacgactagccgctgcatggttagaaaagctcagctccaaaaatttgccaaaagacaggccccacgcagcatctgacattacaattctgcgtgtggctggaggaaagccattgatccgaggacatttcaggcaccgatgccacatccaaatcttcccttcacgttgcccaggtagcaattcaggcagtttcttaacagatattgtcagactaccttgcctatgagtataacaatggnaatgtgt

SEQ ID NO: 4625 - DNA, 357 bp, Arabidopsis thaliana columbia
ttgatatgtcaacaacaagatcacaatcattctcattgaagacataaacaacattgacctaggctaaggagcaagaattggttatgattttactccccgatagatcatcttggaatttcaaatacttgagtcgaggtgcatcaatcagaacccctgagacttttgtgggcataacgatgaacgaattcatcaccctccccagaattagaatctatatgaagactggttagtgtcagacagtgaacgcgtaggacctttacgtgatcttcaaacattctaagaatgatcagatctttgagaactgggcaagacgagatgagtgactctagaaccacatcattggcatatacatttgct

SEQ ID NO: 4626 - DNA, 498 bp, Arabidopsis thaliana columbia
ggctcgccaaatttcactaatcttttcttttcatcatttctaattttcatcaccttgcaatcttttatcggttcaaattctgacacaaagagacatagttacattttaaacgaacagaaaacaaataaaaatgtataaagtatactacaatgttcttctattcacataccccacataaaacaattgaacttacatacaaaaaaataaaataaaaaacaaataaattactattaattctttcaaaaaacccaaaatactcataagaagaagaattcataggcttcctgatgacgtgtccttctgtgaagggcttctccaaaagccagccccatagaaacgatccaacatttcattttcaagcctgacgacgtcgtttaactcaccaccactcacatgacattcctcaaaaacaatctcagccgttagatcttcttcattcaatctagcgtgtacggtactttcgcttccttccgccgtcgctgacgcaagcaaaccatg

SEQ ID NO: 4627 - DNA, 465 bp, Arabidopsis thaliana columbia
accttcccatggttctcaaaactgctttggagcttggcgttatcgacatgatcacttctgtagatgacggcatgaggctctcgccttctgagatcgctcttggtctcccaaccaagcccaccaatccggaggcaccagtattgctggaccggatgctagtattgttagccagccactcaatcttgaagtaccgtacggtagaaaccggagataacattggaagtagaaagaccgagagggtctatgcagctgaaccggtttgaacgtttttattgaaccgcggagatggcttgggctctctcgccactttgttcatggtactccaaggggaagtctgtatgaagccttggtacgatcctagttcattattcacaaaatgttctacatatatacacgtaacgataactaaaactaattctaatttaattttactagggaacatctcaaagacatgatattagaagg

SEQ ID NO: 4628 - DNA, 399 bp, Arabidopsis thaliana columbia
  unsure (1)..(399): unsure at all n locations
nnnnnnnnnnnnnnnnnnnnnnctaaaggacgttttatcctgcctggcaatgaccagaaaccaggaagacagcgacatcatttcaaacagcacgatgaaccaaaaagcgttgtccatcaccagcagggcaaccatcgatgcgatgaaaatattcataaagaagcccatcgccgccgcgcctttgccctcgtattcgcgcatataagtcaatgaatagagagaacaaaccaccaccagcaaggagataaccagcaccataaatgccgagagcgtatccattcgcagggttaaatcggcaaattcaaaagggggggcaaaacgggcgactaaagttacaccagcatgtaattgcgtaattccgctgatgatgccaatcacgccgccaccagcgatgtgatg

SEQ ID NO: 4629 - DNA, 602 bp, Arabidopsis thaliana columbia
  unsure (1)..(602): unsure at all n locations
nnnnnnnnnnnnnnnnnnnnnnctaaagattggtatcgcctttacgccatgcgtgctgccaatgtacccactgatttctggcatcgtgctgggtggtaaacagcggctctccactgccagagcattgttgctgacctttatttatgtgcaggggatggcgctgacctacacggcgctgggtctggtggttgccgccgcagggttacagttccaggcggcgctacagcacccatacgtgctcattggcctcgccatcgtctttaccttgctggcgatgtcaatgtttggcttgtttaccctgcaactcccctcttcgctggcgcacgtctcacgttgatgagcaatcgccaacagggcggctcacctggcggtgtgtttgttatgggggcgattgcggactgatctgttcaccatgcaccaccgcaccgcttagcgcgattctgctgtatatcgcccaaagcgggaacatgtggctgggcggcggcaccgtttatctctatgcgttgggcatgggctgccgctgatgctaattaccgtctttggtaacgcttctgccgaaaagcggcccgtggatggacaagtaaaacgcgtttggttttgtg

SEQ ID NO: 4630 - DNA, 1267 bp, Arabidopsis thaliana
tctattcctctgaatgccccctttctccgagatactgacaacttactcagttctggccatgtttcagctcctccactgccttttgccgacctggtcaggtcgttcacccatgcgggcgcacctatccctccattgaaggagctgaagccgaccaaccaggagaactacctccgtttcgcggagaaactgggcgaggtaaacattcttctgaagaataaaacttaagacttagtttaaattttaacccttctcttgtttctttatcaaaccgtgctggagttcaactacgcctgcctgagtcatgaacaccagctctcggacaaagacagggagatcgagagcttcaaacagaacgaggaggagaactcccgcatggttgatcgggctaacagtgttcttagccggatgagagaagctgaagctcgggttttagccctcgacatcgccaatactgacttggctgccaagctggaatcgggcaagaatgcttacttggcggctattgacaacgagaatcgagcccgagctgagctccttgcctgcgaggagaaactgaggaagctggaagaaggtcaagctgcgctgcttgcagatgcgaggagggaagagcggagaaaggttcgggctcagtttaaggacttcacgtctaagtatcagagcttctacgcggaatcagaggaagtttaggcgtcgaaaatccgagctgctgaaatgaaggcgaactgggaactctttgaggagattcagaagggggagatcaccgacacggctgaggagcttgagtcggtcgtgctgacgagattgagttcgcgcaaaaggttgccaaacctaagacctcgcgcccggatcctgttgagatcacatcgctcctcgctgatactccgccagaagtagctgcagattccactgcttctggtggagtgttggtcattgatgagcaaggaaccaacaggaactccgcctccgagccaggtatcaccgccatgttcccggtcgatatcgagaagaactccgaagctgcggagtaaaaaatgttatgtttacgtcggggttgtgttggtccgaagtgacccccgttttgttcacaacttttatttacttatttctgttttcggcctaggaggcattaaccatattttttgtttgacatttatttaaggtcgtagagactgttttatgtttacttggtttgttttacttattttccgaaatacgagataggctcggtttaaatgtttcaggaaattgactaagtataactgagaat

SEQ ID NO: 4631 - DNA, 495 bp, Arabidopsis thaliana columbia
tcgtgaattcattattagcggaacgttgagatcttttgtgacctccgagagcttgaccagatgtgaagactttggcacagattggacattcatggtgactactagtactcttcttcttcttcttcttcaactcatctgagcctaattgatctgtttctgctatcttcttcttgtggcttgctctgtgtccccctaacgcctgatacgacttaaacactttctcgcaagtctcgcactcgaaccacttattcctcttcttcttccatctctcttcatcactttcctcttcctccttctcccacttgtctctcgacagcaacatgagactcaaggccacgtcttcttccgttgttgcagcgtccgacaccgaactcatcggttcctgctccgtacacgactcactgagttcttgaaccccgatcttgatatctgctgctcttgcggtttcacttttcccttcttcgttgggattgttgatgacgtaatgatgagatg

SEQ ID NO: 4632 - DNA, 486 bp, Arabidopsis thaliana columbia
taacctagggatttctccaattaacctttgtctttcaacaccgtgtgttttgccgcagacgagccctccgaaatcaggtaaacttcgacttcttctaaccttattaaattggggttcgtctttagatttgaatgaattatggtttaggttctatctgtgtcggtgttgaatcaattttagtacttggtaggtttatgctcattgacatgatgaaaggttaaaactttgaatgcaagaatgttatctcacaccttgtgtaatgtcacagctaagttatctctgtatatggtttcagtgctgatgctagaatccgtagtgaggttctgtctccgttcagatcagtccgtatgttcttctacctcgcctttatagcaagcggttcattaggaggactaatagccacttctaggctcataggtgccctggcgaatccggctagatcaggtgaagttcttgagatcgttaagggtttgggagttgacattg

SEQ ID NO: 4633 - DNA, 601 bp, Arabidopsis thaliana columbia
ctttcttggaggtgttatagcatgaatgccttatgtttgcttttcttctggcttttaattaagaaagtattgaagccccattatagaatagttttatgaaaatctatgtttttttctcagactgtaaagaaccaatttctctctgtggctacttgtgcattcactgtcattgcccatttcaaaatctatgcataatattattgcatactcctttactgtttctcacttttccgtttctaggatcatccttgcaaaatggaacagtttcagctaataaaagcaagttcgacaataagatagaggcgtcatcggcaaaaatgtattttcattattatggacaacttctacatcagcaaaatatgctacaagattatgtgcggacaggtaaaatatctggcctcaatgtgttgtttgtttcaaaactgttccagttttcttgattttaaacgattcaaacccatcatacgaatatcttctgttttctctcaccgctgtttgtcttggaataactatttatgacctcattcatgtcttcaggtacgtactatgccgcagtcatggagaatcatcagattttgctggtcagtgtgtggcgatgtgg

SEQ ID NO: 4634 - DNA, 505 bp, Arabidopsis thaliana columbia
ttacatgtttacttgtgtgttacaagtgttaaagaacgcgagtgttttggctatataaagtatacaaagcccaagtccatcaaatcacaaagtaatgtctcaattacttctcttcaccatcttagtattttcttccgtttttgtaatcggatccttaagcttcatcccaccgcctcacccatttgatcccttgactgagatcgaactcaatctcgtccgtaacatcatcaacgaaaggtaccccattggtctggaacataggttcactttccagtacgtgggtctcaacgaacccgacaagtccctagtcttatcctgggtttcatcacaataccacaatgtcaagtcaccaccacgtcaggcattcgtcatcgctcgagatcacggaaagacccgagagatcgtcgtggactttgcctctcaagccattgtttcggaaaagattcacgtaggaaatggttacctatgcttacaattgacgagcaacaagcaaccagcgagcttg

SEQ ID NO: 4635 - DNA, 561 bp, Arabidopsis thaliana columbia
atttgaaaagaattattatttgtcaaaaaatattattgaaattttaaaataaaacgatattcaatatataagatacacaaaatgataaaaaaaaagttaattaaaaaaataacctgaattttgtggttttttaaaagctcgtgttcaaatgctggctgtttatatatatctacacattcgacactttctttatctgaagtctaaaaaaaaacatatattagcataactatttaaactcacaaacgatagaatataactatttaagctcacaaacttatttcactggttaaacttcgttttcatagcttttcgtccacattaataaataaacttgtgcatgaaaaaagtgaagataattatgagtataagcatatttagtaattaaaaatgttccaacaagaaatgggaaaaaggttgaaagaatggggaaaatatggtccaaacaaagaggaggaaacgattgtgacaaagctgaaagagagaaaacaatcaatattcctttaaaaaaacacctgatgagtagtatatcattttgcagaaataaaggcttcgaatggaaga

SEQ ID NO: 4636 - DNA, 578 bp, Arabidopsis thaliana columbia
agcctcgcgctcctgacctgacttcacagtctccgttatctccttgataagcgtcaggggagacgttgcttaagtgttgataataaagagcaatcagcttgttcgtaatagcaatctcctgccgaaaacgaaacaggaatgaaaacaagcacaaaatttgggatttaaggggaaaccgaaaatcgattgttacccggccctccttcaccaccatatcagcataggtcgccgcctcgaccatgttcttcacacctgggacctggtaattctgtcctttgatgtggcaaagcagattcgctagcccagcctcgtcctccactttcgttggaagtctgtctaacctcttgagatcggctcggaactcgagaagaggacctacccccacctctcgaggactgacctccactctgggatcgtcccgaggatcgcctgtccacacacacaggtgcttccggattagaaccacgggttctgccccccccttctagaaggacgacacctggtcagctatgacaaatcagctgctgggtgcacacggcaagatcgagcctttttggagaaatgtgcacggtcgccat

SEQ ID NO: 4637 - DNA, 600 bp, Arabidopsis thaliana
gatcccccggattcgacccagcagtaaccatgtagattgactaggtttcgttgtttaatcttggagatcgcatcgatctcggctattagggttgtcttttgttgccttgtggtgcaagtaatcttctttacggcaattatctctgtgggagcaagctgtcctttgtagaaacttccagagtttctctctcccaagagtttagaattgtcgaaacctcccgttgcgttcgatatcgtctggtaggagaatttccttgcacctccgatgaagaatattttgtctctacgtaagaaccaaaatcctgagaagattaggatcatgagtgcaaccgttgctgatgcagcgacgattatgatcagcatcgtgttgttcgacttcttctcggttgaaaccggaggacttggggatggagacaatgttggtggcggatctgggagagaaggaagcttcgtgatatcaaagtctgattctttcccttcgatgttgaagctccaacctagaacaaaatgtgagctcgctacagtccccgtggacgcagagaatccaacgtgatgttcttgggagaaaatcctgaaagattcattttctcgagagaagagg

SEQ ID NO: 4638 - DNA, 539 bp, Arabidopsis thaliana columbia
  unsure (1)..(539): unsure at all n locations
acttattaacattggtctcaatatcaggtatgaacaatgagtcaagatctatgaatactaaccgtttgaagaggtaaaaggaagagcagtgagattagcttcagccttagtggttgtgttggatactaggatatcctcaagtctgttggtttaccatctagattttccaatagtcagattgagtagtcgaacctgcagcactcatcaatcaggcaataatcaagagaaatatagatcatgattcataactaaacaaaacaaaaggtttttgttttctttttagtttttaaggagaaaatgagtcaattaacccaaaaatgaaaaataataagaatcaaaaataaaagcaatattagtaagaacctcctccaaacttaaacgacattgtcccagtggcattcaaatccgaagaaagcgggaaaaataaaagaaaataaaagacaggaaaagaagaatcaaaccagtgggttgcctccactaaagcgcatgtttgagtcnatagcttgactttgcggaagtcatgatgtgggtggaatggt

SEQ ID NO: 4639 - DNA, 1945 bp, Arabidopsis thaliana
cccaacccaagagaatctatctcctatctgtgttaggcctgtaaagtcacaattcctaaccatccttctaaaatcctggaaactagcctctggtcttacccttcctccccttttctcgttattgcctaggagttcattgaagtcccccatgattagccaagggctgttccttctattaattccaatcctctctattctctcccaaagatcatttctatagcttagattgggatgcccatacacaaagtaaatgtagaaagatgattcattacttcgaacaaggcaatctacaagattaggggattgaaataaaactgaaagatctacagactgcttccaaaggagtactaagccaccattaagacctacaggtggaacagttacataaaagggaaatcctagttcacaagctttatcccgaatgtcgtcatcctgctgcttggttgctgaaaggcatatgatgtccgggagatatcgtcgagatatctccttaaagcgtcgaactatgtggtcaatgcctaaacctcgacagttccagcaggttgtcctcatgttggaagtggtggttcagggcccagcgcgcctctcactgtggttgcatcaacttcaatgctatcatcgttgttctcccgtacaatattcgccagctggcttgtgcctacaccaaggtccaaatcgttacgcttacgggttgacggtagggaggtctccatggtttgcatatgggatccgtcttgattcatcgcagacatggattcagtcgcctcaatttttatctccatagagttgtcttcgtcgtcacgcttacgtttgacacgatctgtggtagtgtcaggagccaagttgatcacacactcagagtccatgatagccagagggtaggcacaaggtggtagagaattataatgaggggttcctgagatatcaaggcagtcattagcagaagatggaaaagggttaaagagctcaccaccagcattcccttcctcctgaaacattgtagagtttgcagattgtaagagagcatcatggttaggatcaatatctgcaagatcagcttcagcatcctcaaccggaccattgttgtcatcttggtttacagcatcctggttttggacattaacagcaacatgttccaaaccctccaaatcttcatcatcattaatctctctaataaccactccttgattacgcccttgcggacgctggtcatcctcatcgtcatcatcatcttgttcttctcccccattcacgataacacaggcccctgagtcatgggtcagcatcccacaaacctcagaaaagcctcgaagcctttcatatctgaaccggaaaagtgtgttaacacccgcagtgaattggaacttcctctgaaaccttacggaaatagtgatgtcccaatgtacgagaacacgagcaaaatccacccgcgccacagcctctacatcaaaatcaattttcagcacttgtcccagggcccgtccgatgtgctcgacgacgccacagttgagaaattggaatggaatgcctctgatttgggtccagaaaggaatgaaattgaggagcggcaacaagggctcccatcgttgaagaatcagcatttgatcattgaaagcccacagacctcgacacaaaactgattccaaggattcttcatttgggaaaatgaattgaaaatcccgaccctccactatgcggctgtgaacaagtccggttttaccccagattcgcggcatagaagcgatgattgaacggaggttttgtcgccttggaatcacaggacgcccgaaaaaggatgaaacggttttctgcgacagcttggttcacaatgtcttcaggtaaagcaatgggttcgtcattcacacccaaattgaggtcttggacagcccgacgcaaattgtcaccaatttttgagagattttgatagaagcgaagaggatagaaa

SEQ ID NO: 4640 - DNA, 454 bp, Arabidopsis thaliana columbia
tagaagtatgtagtaacttctgtatgcggaggagtcaacggtagtggtggttgtggagcttttggagtgcgacggagataggttgatgaggctggcaaagattgagtttgggaatatcgtggtaggcaaggcactgaggttctcgaaggagatgtctaggactaggattgattttttttggggtttgatgcagaagctcaagcatttttctccatctcttggtgtaggtctcagggaaacaacattgcaaacatcttggactcatttaagcttcgttgctaactataataactgttgtttatgtcttaaactagttacaatacttaaattggtcgggggtagtcacatatataataatataactcctgtaagagatgttttcgtctttaactgcttttctaaagaaagttgaagtttttatgaagaagagttacaatgtgagaaaaaatgaaat

SEQ ID NO: 4641 - DNA, 1498 bp, Arabidopsis thaliana
ctcttagcctccgcttgtttcatcatatgagagagaacttctgcgcataagataaagagatatggtgacatgggatcgccttgcgtatacctcttcctggaatgatcatccctcttggagatccattgataagaacagaaaaactcactgtagtaacacacttcatgatccactgtacccatttgctatcaaaacccatatgcaacattgttgtttccagaaatttccattctaaacgatcataggctttggcaatatttgttttcaaagccatgtaagatttagactgtcgttttctgacctttagagcgtggaaaatctcatgggctatgatgttgttgtcagtgatcatcctcccagggatgaaagccgcttggtagtcagagattatgcttgataagtgcttcttaagactgttaaccaagatctttgaaataatcttataactgacgttgcaaagcgcaataggtctgaactccaccatactcacaggagcttctgtttttggaatgagacagagatttgtatggttatgtatcttatccagattcccttcttcaaaaaatagttccacttccttcaaaactgcagggctaatctcactccagaaatgatgatagaaagctgctgaaaaaccgtcgggacccggagctctatgaagaccaatgctataaacaacttccttaatttcttcttgagtcaccctttgtgtaagttgcatattcatttcatgtgtgactcgttttggaaaatcctgaaaaacatctgcttgaagtgcatctgaacggtttgaggattgaaacagatcatgaaagtagttgactgcgacatccgcaatagctgcatcacctctgtgaacaaaaccatcgctgtcttcagtagagaggattctgttccgtgctttccttgctttcatcactgaatggaagcatttcgtattcctgtctccttcatgagcccaagagtttctgcttttgagtttccagaaaatctcttcatcaatgtaaggttgattgagttctctcttcaaattatttctttctactgtagttgacaaacttgaagtagccgccttatccagtttatatcggagtgtcctgattctttctttagcgttggttttgtgaccccttttctagcgtgatatttgtctccagcatctagtaattctgtctgtaaaggggatgtccgtctcactctgtctaataccaccatgccaacctcttaagactgagtctttaaacccatccttatgcagaaaacgggtatcataacgaaaacagcctctttggtcttccactgtatcagagacgtaagagaccaatggacgatggtctgattcacccagctcaaggaactcagtttctgaagcgggataattgttgtgccattctgtatttgccatagtgcggtccaagcagcaggtgactaggtgatctcctcgttgcccaacccaagagaatctatctcctatctgttttaggcctgtaaagtcaca

SEQ ID NO: 4642 - DNA, 605 bp, Arabidopsis thaliana columbia
ttctttatatcacacataatactctattatctttatactcaaactgttttggttaacttcaaaactatatgctaatacgttatacgtcccatgcacaaattcaaatgttacgtttcaaaaatgtgaatatggtttttgttaaatacgtttcttcaaaacttcatcaaaaaacaattcgttatacatagctaacacaattggtcgaaagtcgaatctagaaactcattactgctgaatataaaatatgcatgtttattttaataattggtaattaaatgggttttgtgtagacagtggatatcaaggtgaaaatggactgtgatggttgtgaaaggagagttagaaacgtggttcgtcgcatgaaaggttctctttccccatctctctctctgactttgaatcaaaactttcttcaatctctctttttttccctttttgtttccattttctttattctccatgcttttctcttttaaagattcttattcctctcttaaaattgcaattttatagctggccagaatatatataattacaattactaatcatttgctcaatcctttgattggaaaaactgtaccaaacttttagtccgaaaatattat

SEQ ID NO: 4643 - DNA, 1360 bp, Arabidopsis thaliana columbia
tagcactttatttgggtttgagtcggatgttactgttgcgcgtgtatcaccatgcttaagaagaaagttactgttgggcttgatccggcacacgatgttttgtggtcagatgacgaagtagatccacgtgtagacattatggtaaagttggcagctgaaagattcaagttcagtagtgatatattttctgtcccatctgaaaaggttataatcccccccccccggaagacaaaaaagatctgcaattttgaaaggtggttgtaacacccctgaaccgttctataaataggacggacaagaatgccactttgatgaaacttgcggacagttaacaaagattaacgaataaattcgaacctaaattatccgtaccacaagcacatcccactcagttacggcttaggcttgccaacccttgccggaaaagagcgtttgggcggtccataatatttaaggacaagcagcgatatataaaacatctttatatcacatatatgttttattacacaaatacattaccgacatatataagttttgccggctgggagcttagactccaaaacatacaaccttattactacaaagttattttacatcaaggctagtaaacctacactggtattcctagcgtccaagcctcccctaaagtttaacccactactggtcacctgcaaaacaaatagcgtcatgaataatctaggattactcagggagaccggattctaacaattatattaacccaacccaacccctaatcacaaagaatcaataacaaaagattcactaacaataaattaaacaaccactaccaatccccagtctaaacatcctaacaggccactacgaattcatgataccccccaaggtgatgcctccacactcctagacacgtaagcctataagagattacatccctcaatactacatcgtcatgtagcgcttggccggacatgacccgctccaaacctttgtaagccataatgttacggaatttcacgcatcgcacagcagacggatagactatcatggtttacctaacaataggtaaccccctattgctatacaacaacacgcataaccatattcttatgctatccgacaacataacggttatgctaacaaacgggcagcataacgattacacagtcgttaagcctaacttcataaccaatcaatcaaccaagcataaatgattatgaaataataccaagtataaactagcaacctcatgcataatttaacataataactaaaacccaatctgtgtgctacttcacacagctcggttactcacaaagctcagcggaaggttttgggccgtgaacttctccgattgttctccgttttcccgaaacatttt

SEQ ID NO: 4644 - DNA, 1108 bp, Arabidopsis thaliana
acaaaaagtctagaacacaaggtctgcggaaataaaactaggtaaaaaacttcttgtctgcgaaaatgaggagtacatgctacttatagccaaatatcccgaaaccctaatactcaaaacgacgaagtatttggacgggttaagaactgtactcgacccaggtggtcgagtgagaggtcgagtgaatatctggagtcttcttttcttccttgtgctcgagtgtctggttgagtgcggaatgaagaaggctctgaagcttgtcatcgagtatgcagtcaagtgttgtgatggcgatactcgacctctaggttgagtgacgaggtcgagtagtggtctggcagtgaaggtgaaggcactcgacctcatggtcgagtgaagtgatcgagtgatggtctggtgatggagatgagggcactcgatctcgtggtcgagtggtgaagtgaagtggtgatgtcctctgctcgacctgtgggtcgagtggtctcttgagatcctgaagctcctactggacctcttggtcgagtggtttgtcgtgatcaggtccgcttcttgcaaatagctcgtcaacagctccaaatcacctgaaatcaacgcaaatatgcaacatgcatgcaaaactatcctaaacatgcaaagtgatgacaaatgatgtgaaatggtataaaacagtgatgatatgatgctaaagtgatgacaaatggatgctcaaacatgcaaaatacacacttatcaaagaagaagaaggttcttcgagaactgaatctcaaatttatgtcaaaacaaagatttaaattgcaaaataaattacaatcttaaagaaaacaagggctcgtattctcgtattggtccagagagaagagaaagctatcgcgtagagtggatttgaagatattatgggaaaggtttttttctttgataaagtgagaaaaaaaaagaaaaagagagagaagagatgggaaaaggaaagagaagagatggccgatgaaaaaatatagttaaacggtaaataagtcaaataattaagagaatattacatgtagaggcactttttagaaagtttggccgcaaataggcacttcataagcattagtaactttcagtgatcgaa

SEQ ID NO: 4645 - DNA, 1677 bp, Arabidopsis thaliana
  unsure (1)..(1677): unsure at all n locations
tcattttttgttaccgagtgatgcccttcggaatcaagaacgctggggcaacctatcaacgcttcgtcaacaaaatcttcgcattacagatcgggaagacaatggaagtttacatcgacgacatgttggtgaaatccatgacaaaaaaagatcacatatcccatttacgcgaatgtttcaagcagctcaacctctacaacgtcaagctcaatcctgcaaaatgccgctacggagtaagatctggcgagttcctcggatacctagtcacgcaccgcggcatcgaggcaaatccgaagcaaatcgaggcattgttgggaatggcgtcacctcagaacaagcgagaagtgcagcgcctaaccggaagggttgcggcccttaaccgtttcatctctcgctcaaccgacaaatgcttagccttttacgatgtgcttcggggaaacaaaaagttcgaatggacgacccgatgcgaagaagcttttcaggaactcaagaagtacctggaaactccacccatcctcgcaaaactcgtaatcggagaaccactatacttgtatgttgccgtatcggatattgcggtcagcggagtgttagtccgagaagacagaggccagcagaaaccgattttttacgtctcgcagactttcaccaacgcggaatctcgctatccgcaaatggaaaaacttggtttagcagtcgtaatgtcagctcggaagctgcgaccctacttccaatcccattccatcataataatgggatccatgccactccgcgccatcttacacaatccaagccaatcaggacgtctggctaagtgggcaatcgagctcagcgaatacgacatcgagtatcggaacaaaacatgtgcaaagtcccaggtccaagccgattttattgtcgaactgcccaccaaggaggcccgggaaaatccgctcgacacaacttggcttctacacgtagacggctcgtcatcgaagtaaggctcgggtgtaggaatccgcctcacctcgccaacaggagaggtcctcgagcagtcattcagattaaacttcgaagctacaaacaatgtggccgagtacgaagcgctcgttgccggacttaatctagctcggggactaaagataggaaaaatctgagctttttgcgattctcagctcgttgcgaatcaattcaacggagaatacacggctcgggacgaaaagatggaagcctacctgattcatgttcaaaatctagcgaagaatttcgacgaattcgagttgacaaggattccacgaggagaaaatactantcgtgacgccctagctgctctagccttgacaactgacccgagcctgagaagagtcatcccagtggaattcattgagaagccaagtattgagctcggcgaagaagaacacgtcctcccaatacaaatcagcgcggatcaagacgacccagatgactgcagctcagtatggatggaacccatcataagctatatatccgaagggaaattgccctctgacaaatggaaagctcggaaactcaaagctcaggctgcacgtttcgttctagtagatgaaaaactttacaagtggcgattatccggacccttgatgacatgcgtggaaggagaagcgatttgcaagatcatgaaggaaattcacggtggctcgtgcggaaatcattccgggggaa

SEQ ID NO: 4646 - DNA, 714 bp, Arabidopsis thaliana
tgatgtatccacgagtggtactaatatcatattctttatggagacaagccttgctggtagtgcatgttactacaccaataagatgcagaatcgtagataatccatgtgatcatatatattgcttttgtacgttggatgatgcgttatggtgagtagttggagggagacattgcacaaacatcggtttctattattcagatttgaacaaccataagattccttccttaaacgatgtatatatgtctagaccggagagccattgaagacagaacaaacatctaagcattttcttcatctcaaaaacagagaaagaaagctcaaacaaaaaaaatggcagtctccttccatgttcgatctagcagctacccttcaaggcaacaccctcaagccgctcatgtcgatgagcaattaacccgattgagatcttctgggacagcttcttcatcttctatctgccagagacttagcaaccttcaagacttacatgattctcttgaaaagatgattcgcttatctgtcaccaaccaggctttatctcaagatcagattgagaagcttcttgatggatccatcaaaatcttggacctatgcagcatttctaaggatggtttgtcgcaaatgaaagagagtctcaggaggatcaatcgattgtaagaagaagcgtggagatctatacgctgaaggtcagaaatacttaagcctcagaaagtttct

SEQ ID NO: 4647 - DNA, 561 bp, Arabidopsis thaliana
  unsure (1)..(561): unsure at all n locations
tgtataaccaaacgggcttgtatgtgcccctgaatttgtctttaccgaatccaagcataaagaatttgcgtttaagcttgtagtaaccatctcgtaagtcgatcatgagtttttgataatcgcaaagaggaagaggccgataccatctagtggtcgggttgaccacataaccggatttgtcgtgattgtaaagacaaacgagaccgtcacaactactatgtgaaactaagtacagtacgttatccttctcccaaggagtagggatcttgaacgttgatgatgaacccaactgcaatgttcttaaagattctatggtcgggtttataacatggtgaggaaatacagacaccatcagaacatctggatctcctgattgctgacgatgtttcaactaaaattgtatacatttttattttattaaaaagataaatatcattttgttggaattggaaaacaaaatctagaagataactttagatatgtaagggtcgcatatgtatttgattacattgctatgagtatatgcgcactnttccaataatgaaacaataagatgttgag

SEQ ID NO: 4648 - DNA, 546 bp, Arabidopsis thaliana columbia
  unsure (1)..(546): unsure at all n locations
ctnnnnnnnnnnnnnnnnnnnnnnnctaaagaattctattagtctttggattataaacatgcattcacagcgaccgttccttgcgttcccagtcacagcctaccggcagctacgagtcttcttcgccatactccctttccacggatttctctctattctcaacctcatctgttctccgaccccagaaataactcttcatggtataaagcacactgatacaaagtcctaaaccacccagcccaatcgcaaaatacagtgctgagcggtaccctttcaaccgctcttcgggtgagtcaccatgcacaatctggctctcgatcgtaccggcgaatccaaggctgagagaaatactgtagttgacaatcgttgtgaccaggctcgccgcaagaccctggtgctcgcgcgcaacggcgttgctgagcatcaacgtggcagcggggaaggacatgtccatgccccaggggatgataataagggaaacaaacgtaagagcccagtacgtttggtgcacaggtgcaatggtgatgaggatcgttccgagggtaa

SEQ ID NO: 4649 - DNA, 1340 bp, Arabidopsis thaliana
atacacttcaccaattgttttccctattgcctgatgtctgtccgagtctatcgccaggtccgtcgcgtcatgaataacacctttgagttgcgtaaaatactcacgccaagatccatcattttcactgtcaactacaccgaaagctaacggagaaatctgaaaattactatcgtgagctatggctatcaggagcgtccctttgtaactaccatggagaaacgtaccgtcgacatcaacaactctgcgcatgtaatgcatcccagcgatactggcaccaaaagcaatgaacatatagttgaatcttccactctcatcaatttgaagacgcgcgactgtacccagatttgtccgtcgtatcatgtataggtaagaaggtagttcttcaaaactactattaggggttcccagagtgagctcccttgcaaacctcagcgtcttgtatgacttccaataacccattagaactatatctgcagcggatatgtggaaaccaatcaaagacacatatgcaagtgcaagcaagggacatgttcaacaaattcgggttcaactgaaacaatcttccaaaggtgacaaatcgattgatgagtatatacagcatctcacaacaacgttcaatcagttagctctcctaggtaaaccgattgaccatgaagaagagatcgagttcctcctagcagacctacatgaagactacaaaaccatggtggatcaagttgaaggtcgtgaaaatacaccatttgttattgaagttcatgaaaagcttctcaataaagaagcaaaattgatggcactctccctttcggcattaagcgttgtacctgcctcatcaaacattgccaactctcgccaaagatcataccaaggcaagcaatacacacgctcaaatcagtcatggatcaacaacaacaaatcaaaataccaccaaccgaaacaagagactcaaacgaccaggggataccaagggaagtgtcaactatgtgaagtatttggccatagtaccaaaaagtgttcactgttccaacaagaccaatctgcgacgcataacggcttgttgccctccccatttaagccttggcaaccacgcacaaatctgactctaggaaatctgcatcctacaaatttgtggctacttgacagcggacgcacacaccaaatgataagtgaccttcataacctggcgctgcatcaacggtatcatggcgatgactcttttcttattggtgatggttcagatctctttatcacacacacttgttcactatctctaccctccctctaataacttatccttatccaatgttctttgtgtcctaacatcacaaaaccttatacaatat

SEQ ID NO: 4650 - DNA, 933 bp, Arabidopsis thaliana columbia
ttttttggggtggagacaaactgtacaactttttttttgattatctaaacatatgtaaaattgaatttaagatgattgaggaataggcaagagttcttttaagatagtttctgccatcccatcagccatcggaaaaatatgaccagcacctggaatctcatgatacttgatccaagttagtttctgagcaatgatcctttgtagttgtatcgggacgagccgatcatcatccccttgccacatatgtaccgaaccttcacccttagggaacggattctcgatcttcatagggtcaaaactccatttcccaaatccaacaatcaggtctcggtcaagtgattcgtgtgtcccttgttgtgttgtttggttcttgtaagacacccttgcggcgagtttgggcagtagtgcaagatcttgaggagagaacatattggggcttgattgcatcacagctgttgttgaaaatagcttttgattgttccaccagtagagtagccatggagtgtgatgagtaatgagcatcgaaaacctttcggattttgattgtttgttccatagctcccatgtcaaactatctgggaactcggccaccatgagttggtcacaggacaaagcagtgtcgctcctgcgagcctgtgaggaatgtatttgagaacaccccaaacggcttgacctcccattgagtatccaaccacgtaaaatttggaaccaagttgtagttggtcagcaagttgttcaacgtcatgagctaaagtcttttcattgcgactcgagtgaggatcgctctctccataaccaggtcgatcatatgaaaccacgtagatgccatttttctcgagaaagccctgagagacaaacaatgcaattacagaaatactctataagagaaatagtaagagagaaagatatcaaatcattacagggcgaacacgg

SEQ ID NO: 4651 - DNA, 840 bp, Arabidopsis thaliana
gtttcttataaatgaatctgaatattatctttggataaagtttcctatattccaatgtatatctatatccctcttaaattgttacattttacgccgtacctttataattgggcctattgtaaatttaaaccggtttagctggttcactttactgaatttacattttctgaaaataaggatttgagccgaacctacaacaaaaaaatgaaaatttgacccggtttattttggtttactcatctgaaattaccttttatgaaaaggagtcgacaaataatttacttattttcttcggttaaggaaaataactatttccttcttaaaaaaggaatggttgatctcaccgactctagctagggcttataaatacaaagacgcatagggtttcacaacttcatcaccttaacacaatttgttcgctctctaaattcttaaatctttcatcaaatttgcttcacagtgaaaaacctcctccacaaggaacacacaatgtcttcgaagatgatcgtgttgatgagctccgatggtcagtcgtttgaggtggaagaagcggtagcaatccaatcgcagaccatagcgcatatggttgaagacgattgcgttgctgatggaatccctcttgcaaacgtggaaagcaagattcttgtgaaagtgatcgagtactgcaagaaataccacgtcgacgaggctaatcctatctctgaagaggatctcaacaagtgggacgagaagttcatggatctcgaacaatccaccatctttgaactcatccttgctgcgaattacctcaacataaaaagcttgtttgatctcacatgccaaactgttgcggacatgatc

SEQ ID NO: 4652 - DNA, 440 bp, Arabidopsis thaliana columbia
cacagttctgctgctcctacgatctagctatagttgagatgttaacaggaatcatcatcaaccacgtctggtggagtcatcggttctgtgtctggtgcttccaccgcggttagcatctgtctggtaacgagtggaaccctctagattcttagtcatggtggttgttttagaatgaacaagactaagggatttggctgcggaggagcagtgccggactttgatagagtggcttattgttctggtcgagcagcttccctgaacgattatgatcagggtcacttctttgtcagaactttcttcagacaatgagttttgttggatgccatcaatgaactcctccgagttgtgggagtcttcatgatgaaccttcacctgcagtgaagcatctggttttataatcccagctcctggagaaacctagatagagttttttggtttta

SEQ ID NO: 4653 - DNA, 1821 bp, Arabidopsis thaliana
ctcaacaaggatggaaactcttccaaatggatgtgaagtcagcgttcttaaatggagacttggaagaagaagtttacatagaacaaccaccaggtttcatagaagaaaaagaagaaggaaaagttcttaaacttcacaaagcgctatacgggttaaaacaagcacctagagcatggtatggacgcattgatggatactttatcaagaatggttttgagagaagcatcaatgatgcagcattttatgtgaagaagacttcaaaggagatattggtggttagtctctatgttgatgacatcatagtcacaggaagcaacgtaaaagagattgaacgattcaaggaggagatgaagaatgagtttgaaatgacagacttaggagaactaagttactttcttggcatggaagtaaaccaagacgatgaaggcattttcttatcacaagaaaactacgcaaagaagcttttgaagaaatttggaatgcaagagtgcaagagtgtgtcaacgccattgacgccccacggtaaaatagaggaggtcttaagtgaaaagcttgaagacgttacgatgtatagaagcatgattggaggtatgttgtatctttgtgcttctaagaccagacatcatgtatgcgagttcttacttgtctcgctacatgagatctccattaaagcaacatcttcaagaagccaaaagggttcttagatatgttaaaggtactttgacatatgggattcatttcaagcgagtagaaaaaccagaattggtgggattttctgatagcgattgggccggatcagttgaggacaagaagagtacaagtggctacgtctttacgatcggatcaggtgcattttgttggaattccagcaagcagaagacggttgcccaatcaacggccgaggcggagtacattgccgtttgctcagcagcaaaccaagcaatatggttacaaaggttggtgaatgagatcggtttcaaggcagagaaaggtataaggatcttctgtgataacaaatcagcgattgcaatcggaaagaatccagttcaacatcgtcggaccaagcatatcgacatcaaatatcatttcgttcgagaggctcaacagaatgggaagatcaaacttgagtactgtccaggagagttacaaatagctgacatattgacaaagcctttaaacacaacaaggttcgaggtcttacgagaagagctaggcgtaactatgaagccatgatcaaggaggagtgttggacgtgatcaagtcttcatcttattttattatcttagaggagtagtatattatatagttaagtaactgatttataaactattcgtatcacaccgaaaagatacgtatagaattgttaactacaaaacagttacgtgtgtgtgtatgtgtctttacattgggttgtcttctagagacgtgtccctcagttaaagtgtgtcatgtaaacctataaatactgtttatgtatctaataaaagtgtgtggtttgtgtttacaataattagtgcaatacgttgagtgtcgaaagagaaacagagagagtaagacaaaacagagtaaaatctgtgttgtccgatccttaataactttgagagatcaaagttctacaacacataggcgaagaagacaccgagcggaacaattgaaccaaatggaagctcagctagaagagcttcgaaatggagggcttgatgaagcagaggatgtggtgttgtggaaaggaaaaggcgactgttttacaccatgtttcaagatgaaagacacatgggctgcaacacgagaacaaaggacacacgttgaatggcataaagg

SEQ ID NO: 4654 - DNA, 427 bp, Arabidopsis thaliana columbia
  unsure (1)..(427): unsure at all n locations
ccatccagagaattataacgatatgaatcaattttaccattctgtataaaaaaagcatttaaaaattcttgattagttggttaaatattaaacttgtaattacagaacacgaatacggaaagagctcctatagttcctgtatcagcgcaactaaaataaaacatcgatgttttgagtgagtacattgtcaagaagattccactccctgtgaggaattttatatcacctccaagaatgattgtaattcgatcttttgatgtcagtaaacctggatctgattatgatggtatgaaaggtggagttgccggtgggagtatccttccggtaaaaaaatctcagtgccccgagcagataggatccgtcgcggttggatcnatgtaacttgtgtctctctttgctttgtttgccgggtgttttgaaggtgggg

SEQ ID NO: 4655 - DNA, 410 bp, Arabidopsis thaliana columbia
attgtcctaaactttctcttccttctaaccttcttcattggaagcttgagagtttctgcacaattacaagaccctacttacgttggccatgtttgtactaacaggatatcaagaaactccatttacttctcaaatctccaaacacttttgacctctctttcttctaacaatgcttacttctctttgggatctcatagtctcacaaagggtcaaaactccgacatggtgttcggactttatctctgcaaaggagatctctcgccagaatcttgccgtgagtgcgtcatctttgctgctaaagacactcggagtcgatgtccaggtgggaaagagttcttgattcagtatgatgagtgcatgcttggatactcagacaggaatatattcatggatactgtaaccacaactac

SEQ ID NO: 4656 - DNA, 563 bp, Arabidopsis thaliana columbia
atcatccaagattcagcagcttcagaaggcgtttgctgaacttgaaagtcagcgtgctgtaacacttaatctgaagtggaaggaacttgaggagcattttcatgggcttgagaggtctttgaagagaaggtttcatgagcttgaagatcaagaaaaagagtatgaaaccaaaacaaggaaagctcaagaactgttggagaaaaagaaggcagctgttgaggctaaggagaaggcggcgcttgaaaggcttcagaagaagagagacgcagctatgtttactataaacagtgctttggataagtataacaacgctcctgtcagtaaaccttctgttggtgaacgttggccacaaaatgctgtagaggattcatccaatgtctttgctgctgatagtattaccgatgataatccggatggtattgtgcaagatgttcagatctcacctgtgatgggaaattatgaggtgaaggcttatcccagttactgaacctgtcggggatatggcgtcacgggtctcataagtttgtacagataccgcaagaccttgcatcactaagaggaga

SEQ ID NO: 4657 - DNA, 486 bp, Arabidopsis thaliana columbia
tcaaaaaaaatagatagatatgtcacgacaatctttcttggactccaccataacagagacatacccttcactattacaagacttaagattacagacagaacaagaacctttggaatgaaccagctgctactttcttcctccattgtcggaacaccaacaaagagaagagagaaaacacaaaaaggagagctaaagttttcttctttggtctcttttgagtgccggagaaagagggaatgaggtgttaaaaaggaggatttatttcttctttgtttaattcgttttttttttagttttcctatttgtttctttgcgagtttggtttctccatagctggtttctatttggattatttagcttgctggactatttgagcttttatagagagagatcaagaaagagatatagagagagagagagagaggcaaggccaaccgcggtaggggccgcctattggaggacagtgaagggtcaacgaattgaggt

SEQ ID NO: 4658 - DNA, 462 bp, Arabidopsis thaliana columbia
cacttcaggccggcgagatcgtcggaaaacctaaaactattaaccaagaaaacaaaaattattattattattttaaagaaaacaaaaattatttccaaagactcaacagtttccttctttgtgttattatagagatgtagaatttaaatttattgcctgttatatttatttgagttaattaaaggactgattgttagtttaatccttctcaatctatcaattatttcctatttcaagactttgcaaacatttactaatgaacgaaacaaatgattaatcaattaattaattacaaaactgtcagggatatctctaagccgttggattgagtttaatcgaatcggacagtccaaattacatagaaaaagtaggtgtacgaaatgagtgaatggtacctgaacacaaactaggagatggagctttcacaccacagatagttgaaagttgctcagctctctgtgt

SEQ ID NO: 4659 - DNA, 549 bp, Arabidopsis thaliana columbia
gacagacaaactccgattttgccgctctcatcgtcttcttgttgcacacatcgaaaagacttgtcatcagctccagtatgcgttcggaccgtgtgaactagcttgtacttggaccgtctccggtctcccgacttgttagagagcaaaatcgcggccccaccaacacgaaacaagcaattgctaaccatcattgatctattttctccagcataaatgccttgtgtgatgttctcagtgctcaccacaagagcataagtgtttttatgaacatgcaacaagtctttagccaaatcaatggcaataacaccagcactacaacccattcctcctagattaaagcttttgatgttgcttcggagcttgaaagtattaacgaccatagcggatagcgaaggagttggattaaacatgcttgagttcacacaagtataccaatctctctagggttaactttggtgttctcgaatagattttcgagcgcaccgatgataaccttctctgtctcttcacgtgacgctgcaaaagtcttccgcggtggtacgtgaatga

SEQ ID NO: 4660 - DNA, 453 bp, Arabidopsis thaliana columbia
agaggtgatggaacacatattggataaaattatatttgtcaatgtagataaatttacaatttgttgacttgtcccatgattccttgttctaatttatagagtgttttctataagtgcttttgtttctcaagtctctggtagtttgtttgacactactttcatgtattttcaggcgtactccaactatggtgtatgttcgcgagtctcatgtggagaagatgggaaagattcaagacgtggcctatgagatcctaaacgttctcgagttcaacaggtctatatgacagtgaattgtttgtttattttctttacgtcatgatttaagcatactaattatatcttacacaatgcacaacagtactaggaagcgccagtctgttgtatgtcgtttccagatggaaggcttgtactctactgtaaggtaatagttctttacatacttggttctatgtg

SEQ ID NO: 4661 - DNA, 899 bp, Arabidopsis thaliana columbia
gccctatgaaacttgtaggatccacaccatcataactcaacctgccacatcaaaactccatcataaggagtctgcccactaacaataaaaggtcttcaaagtctgaactaagaaaatcatcagtgcaaaacaacagcgcaacagtttcaaagtccatgaatttcaacagttaaagagatgataggtagaccctaacctgacccatttcttagctgaacgagaagccagagtcgccttgtcctgattcttgctagaagaccccttccttcgggatgacccattttgcttattcccactaaacgcattgttttccttacaccttcttaaaccaatcgactccatacccgatttcaccaactcacaattaccaatcttccttctcttcttctcctcaaaacaatcaatttcatcaagctccacactttcagtcttcacagccaccgcctgatctagtaaacactcccgtagcggcctcttacggcgacgatagtagacgcgaacaatctcaggacgctgaatccgcaacttataatcatccgaactacaacaatcgtcacttagactaacaccggtaccttcaatcgcgaattgccgctcatcggaagcgtctgggccttaaccttcttagacatcagactgtgagaaccaacggcattaacacagcacaatgtcgatgaaggactagagtagatactctcaatagaatcgtagcgaatcgtagcttccactagatcgtggacatcaatttctgatctgggtttcgttagaaaaacacgccatggagattattcggacggagaaatcctgggcttcgtacaggagaacctttgctcactctatctatccttgtttgactaaacccccacaaaaactgctagggaatttcgtggattggagaa

SEQ ID NO: 4662 - DNA, 365 bp, Arabidopsis thaliana columbia
ctcacttctaactttgtgtgcttgaaacccttggaacaggttcgaataaggttgtctacactagaggctcacaagatctacacacattcatttccgctacttgttcttcaaccgcacggtctcaagaaaacgggggacctacaaatatctgtccgttttacaactctctctttagccaacatcatctacaattacggccacccgcttctccccaaaatgcactatcttttccctttcacggtcaaccaagtagatggtttaaggtaccaagccatgaacattgtttcaacccgccttggccgagctgagccaccacttaggaaagaggtcgtcgagtacatgctggatgtagattctcacttatg

SEQ ID NO: 4663 - DNA, 934 bp, Arabidopsis thaliana
tacactcaagctagcaggtcttatagatgttgtactgcctatgcatttcgctgaatcaatcctgtgctatgatcactgctaggtaaacaaatgctagaaaatgccccaaggtatcacaaaatccacgcaaacagaacaccaaagtgttgcaaaatgtgggagttattgaactgtttactaacttgacagtaaccagcaataacatcaacataacatgacaagacacagaagaatgcacatagattcaggttaccttattagcacgaggagacggccgccaaggcagcatagcttggattcgaagcttacaaaacacgggagcaccatatccttgtgtggcctctattcagcaggtttaaatagcgatatacacccagatctttattggtagggcctggcaaaaaggttggaggaagcgacaatggttatgtaatgaggtatattctagcgttcagcatctctaagactctaagactaagaccactgtaaggcttctttgcggtcaaccaatttgagcaaatgctcacgctcaggacttgaacaaaaaatgggatgtggaggttcctggatttcaagcattgaggagatcaccagcaagggtttcaactacacagccctgtaatcgcaaatcagaagaaataagctccaggacctcgcggatataagtggtctcaacatgggcattgtcaccggccatgaacacatgcatgcaatcatcaatctctatcgaactaaacccaggctgcttttttagaccgagacccttcatcttccttctcatcttacttgctccttcccattttccatcagcagcatacatattcgagagaatcacataatttgaatggcttttcacattcaggtcggtaagatgcttcatcagcctctctgctaagacgatattgtcccatgattgctgcaactgcaagaacga

SEQ ID NO: 4664 - DNA, 631 bp, Arabidopsis thaliana columbia
gacttcacaatcttggttacttggccaatgaatgcagtataaatgtctttgtggacataaaatctttcagcaccggcacagttttgcccgctggactgaagagtgccccttacagccacttgtgcaacctaaattgtacaatataggcattagttttatcaaaggaacgcctccttttccaataataaataaataaaaacacagaagagagcacgacgacacaaaaagaacacttacatgtgagacatctgcgtcttcacatatgataaatgcatcttttccaccaagctcaagagtgacaggtgtcaatgtctcggcagcatttctcattatctgcaacatattgcataagtacaactcatagcgaactgatgagaatggaaaaccaagtctgaagactgtaccatcttgccaacagctgtggatccaacaaatatcattttatcaacagatgagacaagtgcttctccggtctccgcaaacctgaaaagaatgtgttatttgaggaaatcaattttataacgcacgctaaggagaattgcataaatataatatacagaccctgttatcacatcgactagattttctggtgctccacagcagctaaagctcgctggattatgcggaagta

SEQ ID NO: 4665 - DNA, 598 bp, Arabidopsis thaliana
cttataaatatagacatacatacgcttgtcaggttatcagttagattctcttcatcattataacactcaacaacacacacacacacacactctcctctgtccgacaaagtcacttaaatgggattttcccggcatatacacggcggcaaggctaccaccgcaaccgccgtgacaaagaagtccaatgtcccaactccgacgccaaactgctgcgtcacgtgccttgcaagactcatcagaaaactgaagaaaaaagggaggttgttgctggctacgtcgacggctcggagacaagggagctctttgcaatgccggtacgatccaatgagctattcactcaacttcgacggaggggcgtgtggtacacttcctgatgatgaggactactacttgcggttttatgctttttcttcaagatacgttacgactactaacaatatcaggaagagaccaccacttcctcgtgaatccttctctagcgcttcacatgaattcatgtaatctaatttgtcattttactcttttgtttttgttatctacaaaaagaaaagactagtttctttattttctgtatttggttatttagttcttagattta

SEQ ID NO: 4666 - DNA, 631 bp, Arabidopsis thaliana
tgacatcttcacatcaccatcgtagcgtagatcaccaacggcttcaaaagtatcactcttttcgccggaatcaccgttttcacggcggcatccgtcgctgtaatcatcagatctccacgcggcgtcgttcctaggccggaaaccgcggatgcaagcacagggcttgagcaattcgctgctacaaaaccctaattgaccacagagattgtaaacgcggcaaggatcctccggctgcaaccagaacatgttccagctctgcgtctgtggatcccaagtgtactgcttcagctggccgttggcgccgaccatgaaccgcgtcaccgctggctcggaaacggagtccaacggtgggacgatgtaccaaaacgacgccgtgggagtgtaagggttaacgaaatggaacctgtagatgtaaggaatggtcatttccggaacgccgacgaaggcttctccggtccaatttccggtggaccaatacggtgtggttcctttgtaaacaagctggaactcgttgaagcttggactcagtctcagagagtaaaacccggcgaaggatcgaagagacatcgtcacgaagtcatagctgttagactggtgacattcatccccggaagccacgtgtcagtcggat

SEQ ID NO: 4667 - DNA, 489 bp, Arabidopsis thaliana columbia
gattaacaagcttcaatacccagacccgttaagaaaacgacgtcgttttcatttcgtttaactcatcagatgtctcgcgataccgtcgacagcttgacccgcagctgtaccttgatcgactccaggtgcaataggttcaagatccgccgcttttacaggagcatgagcagcaacagctactactcatccgcttccagttcaggacttcgtgtctgtcctcctggtgtcccctcgaaatgttggtgtggagaagagatcattaccttcacatcgaatacacaggagaatccataccggagattctaccgttgtgcgatcagatgaaggtacacatttcgattttgtgacatatctgattgcttgaaggagtatatgattggacattatgttttatagagcgaaaatgaagagcacttgttcaaatgggttgatgaagctctcttggacgacattaagacggtccatgcgtagtgtaagagcgttgtagag

SEQ ID NO: 4668 - DNA, 524 bp, Arabidopsis thaliana
gccagtgtgctctaaagtagaacagccccagctgcggcatcacatctttaaagaatgggaccaccagctgcgttgcgggcgtgtctttgccggcaaggtacagggcgaaggcgacacccagcgcaatgaccgacatccagaaatacttccaacgagcgatcaaccctttggtgtctttacgcaccactttgcgataatcatcaacaaagccaataacaccgtaacctaccagcaccaccaacacgcaccagacgtacggattggacgggtaagcccacagcagtacggagatcacaatcgccgtcaggatcataatcccgcccatggtcggcgtaccgcgcttgctgaagtgtgattcaggaccgtcgttacgcaccacctgaccaaaggaaagtttttgcaaatgagcaatcatacgcgggcccatccacaatgagatgaacagcgcggtcagcaggctgacgatggcgcgaaacgtcagataggaaaagacgttaaagccggaataatatttgaccaaatgt

SEQ ID NO: 4669 - DNA, 910 bp, Arabidopsis thaliana
caccgattgaggaggataagtatttactgacaagtgtttgacaatcgacctacaagaaaaaacattgagccagtgaatggagagatgttgtggaagcaaacaggaaaagacacaatttaagttttgatagaaggaagaagagaggacgtcctaagaagtttgttaggatgctagaaccaggtgaatcagtaactattccatcaaaggcatcaaaagcaggaggaaatgtgacttgtacaaactgtaagcaatcaggtcataacaaaggaacatgcaaaaatgtcatagtacaattacctcctccacgcaaaagagggagaccaagaaagagtctggtaagttatatgacatttttatgttagtgttttggctaaatttgaactatgtcggatctaagttgtaaaacttgtcataggataatgatgatccatagagcataaacaatgtaccaagaaggtgcagcaagctcaaagtcagtccagaccaactggtgctcaaacccagtccacacaaatttctcaacattcaagtgctcatgcagcaaatcaaaagggtacatgacgtgctagtggacgtcccccggaagtgtaaaatggtgaaggcaagactagtggcaagggtcgtgcaaagaatctgatgaacctcctaagccgcctgtctttttcatgtctttatggactaacaaagtctttgatgtttggcaacctaacaagcaatagtcctcgatcatgtcttttaaggttcttattgatgtaggatgatgtttaattaactatgtatgataatcattaatcatgtaggatggtattgtgtgatcctagtttgttttttttgttgggatctttattttttttcttaaacttaacaactcttttgatttactagaatgactatttatgttaattttaga

SEQ ID NO: 4670 - DNA, 2063 bp, Arabidopsis thaliana
gatccagaagagtaagtgattcaaaatttgagtatgctttaaccgttttctttatacttgattgattgattttcctttcatgtaaatgcagctatgtttctagatacttgttgacaagtgtttagcaagccaactacaagaaaaacataaaaccagtcaatggagagatgctatggaagaaaacaggaaaaagcacaattgaagtgcctgatagaaggaagaagagaggacgtcctaagaagtttgctaggacaaaggaaccaggtgaatccgcaagtaatccaacaaaggcaacaagagaaggaggaactgtgacttgtactaactgtaaacaagtagggcataacaaagggacttgtaaaaatgccacagtactatcagctcctccacgcaaaagagggagaccaaggaagaatctggtaagtaatgagatctgttttgattaaactggtaagtaatgagatctgatctgagttgttgatttgtcataggataatgatgatccatggagcatacacaatgcaccaaggaggtggcagcaagctcaaagtcagtccacaccaacttgttctcaaagtcagtccactcaaattttgcaacattcaagtgctccaacagctaatcaaaagggaacatgacgtgctcgaaggcgtcctctaggaaccaaaaatggtgaaggcaaagatccttctaaagctcgtggcaagggtcgtggcaaaggcaaagaggaagcacccaagcagactgttttcatgatgtctccatggactaacaaagtgtttgatgtttttgcagcctgacaagaactaggatttaagattatgtcttttaagaatgcttattttatgtaggatgttgtttaattatctatataggatggttggatctttgtatgttttggtgagatcctaaacttaaaggttcttttggctaaatggaatgacttttaagcaattttaagcttcaataccattacttcaaacaagagttacatttgattactaagcaattttaagcttccattccatacaaacaagagttacataactaacataccacaatacaagaaacaaaacattgcaagacaacactaacaacaaccaaacactacttccccatcgcaagtatcatcccaattacaacaatgaagcctccccatgacaacacaataaactaacgaagcagtttttccttctcattagcaaccacaacatcgttttcgagcttctccttctcttgctcgttaggcaataacacacggttcattgttgttgaagcacttaaatcttggctactcttggcgcttagagattctttaagtgtctaaagttcctccttctgctgccgattctcatcccttgctttgaataagctcaccttctgcaaaccatatggcctctcaacatctgcccaattgaagaagccatgaacactacacttgaaaaatcttcttccaggattttcgttagttcaagctttcacaaccgtcgtagccctaccacagttgcaaagaggaccccagttcctgctcaccaaatttgcatctgacccagagttatggctcaccatcattgaatttttaaggtttcaaagaaggaaatgaaattagggttcaatgggttcaacaattctagatttaaaggaagaaaggaatgagggtagtgtaatcttttaattagtctaattaaccacgctttgttaaccatcggaaccggtttaacggttccatcagagaaattaacgtctatcaaacaccatgttcattattaccattcaaaaatagatcaggttatttgctaacaacaatttattatattgggtattttattaccaattcaaaacatatggatattaaagtttcaaatgtaaaattagtttggtttttttttgggattttcccaaataatatattataactgtgtaattaaattgtggatatgttcggatacccgttcggatatcgggtcggatcgagttcgggttcggtttttcaggtttggaagtgtagaacctatttgggtattttgagattttggatttgaatttgaatcgggtttttcgga

SEQ ID NO: 4671 - DNA, 845 bp, Arabidopsis thaliana
tcaccctcttctaccaacagccagatcacatccaaacaactccgcaaccattcagctaaagtcttctcagatctccacgactttcctacagagtcctcagttcccagatctctcctgtcccagttaacaagccaattcatcatgtactggaaaatctcggcatgagtaacgggtttgagactagattcaacgccaatcaagataatcttgcaactgacgtgacgcagactgtttacagcagcagctctaatccgttgactatttctcatagcattctctcttacaatctggccagctcttgcaatctgctgcccattctccacagatttcacctctgaagctgatggagaaccaataccatgagctgaaggcagcaatgacgttggattcacagacacaggaactacagactgcgaagaagtagcagaagaaccagccgttgccgctgctgcttgaacaccttggcttaacgacgcctcagcagcggaaacggaagagagaagggatggtaaaaaagtatcccaattgatataactaatcctacacaatgtacgcaaagcaaagagtagaaactcagcacgaggcgcatgattgctacattgcaccaccagagatatcaaaactgactcagtaatcgtcctcaattgctctggatcctaacaaagagttggaaaaaaaaaaaaaactttatcttacgaaatcacaaagagaaagataaagatagttaaaaaacgagactttacattgaattggctctgaagcagctcaaaatccaaaaggaattgctcgtttcttggtggtaagtctctattaggagcatgaacacgcttctgtgatttgtcctg

SEQ ID NO: 4672 - DNA, 614 bp, Arabidopsis thaliana
acgaatacgaaccgtgaaagcgtggtcgatcgatcctttagaccttcgaaatttgaagctagaggtgtcagaaaagttaccacagggataactggcttgtggcagccaagcgttcatagcgacgttgctttttgatccttcgatgtcggctcttcctatcattgtgaagcagaattcaccaagtgttggattgttcacccaccaatagggaacgtgagctgggtttagaccgtcgtgagataggttagttttaccctactgatgcccgcatcgcgatagacactcatgctcacatgagacgaagcgccgattccgaaacaccggtatagcatcttcagaagtcatttcgagtcgatcggataaacgggtcctcgattttcgaagtggagaaggagtgtaagaggaggatatcgcgaagaggaacaggtgatgatgggtttggagtattgggagacgacagaaccaaatcaagagagagatttggaggattcgaagaatcttggagacgcgaacgtgatttagtgttggatcggtgataaggaggcgtagactccattattatgaaaagggcaaaatctcagagaattgaatttaagaactcagagaattgaatt

SEQ ID NO: 4673 - DNA, 538 bp, Arabidopsis thaliana
tgatttaaactagtgtttatctttgcttcttccgaaaatatcttccaattttttcatttaaaccaatgaattgttggtatttttttcttaataataagaagaattatttggcagaaaaaacaaatttcatgcttccataacatgagaattttcaccacttagtactcaaattaattatcaagcaaaatacataacatcactttcattttcttatattataaaacgagaattaataaaacttctctttttctcgttcccacacatatattcgctacatatcactatcagtcccaatctcaattggttaccaaaaaagagtccccaacttggaaccgagaaacaaacaataagctcattaacaaaccgaaccgattatatataattaataccgaaactgccctcccggtgtaggtctggccaaaggaccaagtgggtggtgtcacattaaaagagacgatacttcgacgatcacttgtggtaccaacaaacgtcagacttatgccattgagatatgagttgctttgcaattttgccccaa

SEQ ID NO: 4674 - DNA, 2065 bp, Arabidopsis thaliana
tgcgagcacgatagtcggtgaataattgtaaatagttgaagaataaaatgagcatttttcccgttagttaaatcttttaaaatatctttatgttaaagtcgttaaaaaaatttatataataaaataaaataaatataaaacacctgatactacaaaaaagggaaaaaacccaaaaaaaaaaacaaactattttttatttgaaactttaatacccaattgtttttgattggaacctaaaatcccaaaataataaatgtcgttcaagaaaaacacaatctaattgttcgtggttaaatcatacatgcgcgttaacagacgttaatttggctgacggaatcactaaaccgaggttaatggttaacaatccgcggtttaattgactaactaaaagactacagtaccctcatttgttttccctttaagtctctgtgttcgtgaatgtttattgccctaatttcagttttcttcttttgctcagaaaaattgaatgatggtgagccatagctctggatctgatgcaaactcgttgagccggaattggggtcctctttgcaactgcggcagagctacgacagtggtgaaaagctggactaacgataaccctggaagaagatttttcaaatgtggtgttcatggcttctttgattagagagatgctgagaagccatatggttggcagaaggtgagcttactagaagcgagggatgagattcgtcagcagaaagagaaaatcaaggcacttaaggaatctgtaagggctatgagttgccaagatttgagtgggtcaacgactgtcaatcatgggttagtcaaactcgacgagcaagagaaagacaagcttgaaaatgaagttgtgatagctaatgagagggaaaaaatgcttcgtcagtttattctgttgtcttggggaggcttcattgttgtcattgggatgatacttgcaatggggaagtattgttttgttgttgttagtgttgttgtttgaatctgttttgtttgctgtcttgttgtatgttagttgttgtcttgcctaatgtaactcttgtttgaagtagtaatggaatgttaaacttgcatcaatagcattctattaaccaaaagagccgttaagtttaacatgaaaacaaggatcccacaaaaaacaaagtggatcacaccatcctacatagttaagccacatcatcctacatagttaagaacacatcatcctacattaataagaaccttaaagtcataatactactgctttccaggctaccacacatcaaagacttggttagtccatggagacatgtagaagacaggcggcttagaagcttcatctgattttttgccacgacccttgccacggcccttcccactgttttttccttcaccgtttttaacccttggaggacgtccacgagctcgtcctgtacccgtttgattagctgcgggagcacttgagtattgaggaatttgtgtagactggctttgtaatgccccgcattacgactaggaatatttggtaagaaccgcggatcgtacaaaattatgttagtatcagaaattcagtccgggtaagctatcgtaacggcagttcttcaggtcatacttccggacgtgttgggtgacttaggtaatagttaggggagaattatattattattaccaagggatttaggatttttagggttaggcatggtgtaaggatcggaatcatcctcgacaattgatgagttgacggtacaggaacgtaccgcgggtgagaaaccgagcggtcatggtttggccatgagctgcttgggcggtcatcagaacgtgtggatgagagtgagccgaccttacttgtggccaagagttgcccacgtccatgcttatccttatcccatgactcatgtgtttatccatatccttatcctatccaaaactcatcattatccttatccgttagtaacttggtgaccaagtttcgtagcttagcccctaagtttcgccaactatataaaccccttctcatttcattccaaaccatcactcaccacttcacaaacccacctaaagtcacttaggaaaaacgctagca

SEQ ID NO: 4675 - DNA, 532 bp, Arabidopsis thaliana
ggacgaataatcgaaaagaatctattttctactttttctgcaattatgaatccttcatccccattatgaagcttcgactcttcggcggaaaggcacaactcaccttttgacgactagaaccctcctcgctcgtctgtcgacctctgttctcacctgaacgatatagctggtccgtgtgtactctacaattcgattatgccagattaaccttcccgcttcccgaagctctggtccaattcggaattacacttccccagctgtcccccaaccttctcagaacgatcctgagaattattacggtagcggctgttatttacaattaacatgatatggagcccattgtcatttgttatttacagtaatgttgtctatattttgtagtatacatatgcattttcactcaattgtaaaaattaaacacaatttaggcaaagaaaatcaacggaaagtcttcttcaattattagtcccttctctatacttcactcttttataacatcaatatttttatgtcctttagataataaaagaag

SEQ ID NO: 4676 - DNA, 567 bp, Arabidopsis thaliana columbia
  unsure (1)..(567): unsure at all n locations
ggaaatagaaacgtaatgctatagacatcttcgttttaagagggttttcttagaaaatcatgagatataatagtgcgtatcttacattcacttcagcaacaaacgtaatgcatatcttacattcactttcatgaaactacaagcttaccaaacgaaacaggttgcacacaaaaaagactcccgaaatggtaaaaccgataaagcagaaagtaatttacaatatgaaataatttaaagcaacaagagattaggtcaagggagctgaaagttgtttcttggctgtcttggtgggttcacatgatggtgcaacgggtcaggtcccgaacgaacagtccttaactcttcatgtagtcctaaacccttcgtctttgccttctctgcttctccatttgctccaacccattcactttccattttcatcatcatcatctgccaattgaacaacattttactatgttttgcacaccataataatatatacaaatatttctcgtgacaactanagcaatgaaacagtcgttgaacgtggacggacatctacatgaacattacacatgaatattgaga

SEQ ID NO: 4677 - DNA, 440 bp, Arabidopsis thaliana
ttacctacgcctccgctaaagaacaaaatttgtgtgcaaaatcaaatcatcaaatgaaacataatatcatcttttaataatagtagttatcactctcaaaaccaacctcattatcatttatggcaaatggtactatgtagattctttctgatagttgcagcgaaaaaaaagatttaaaagtttcaagattctggtgctggagctgctgctggaggtttcaggagaggctgtagcgccttcacaactatgctcatatttggtctaaactcagcttcgtattgcacacacaatgctgccaccgctgctagctgcattatattgccaacataacatattctgtcaatctcaaagacacgaatatatcgaaaacggaaatttaatagacatgaatatgaaactattgtatgtatcgaggtaccttagcaactgcttttggaggg

SEQ ID NO: 4678 - DNA, 493 bp, Arabidopsis thaliana
tacctgtttcattctatcgatttaaagcaatcattcgtcttatgtcttctttattgatggaattttttctcgattcctttttagttaaacgagcatcagatgtcaaagataaaaaagagtgaagaagtatctgtagagagggagaaagagatacgacaggcaagtgcttgactacgtctttgttcttagttgtttgtagctcaccaacgtatcactcaatctcttgcaatcaatcataatcttctgacttctacgttgtctgtgtcattgtccaggttgtagaatcagtaaacgatcttgctcaaattatgaaggatctttctgcacttgtgatagatcaggttaaacttatttaatcccatattccgtttgtctagctttagagtcttcggcccttcgaaaaacaaactcaaagcaacccgtttaattgcagggtacaatagttgatcggatagactataatatcgacaacgtcgctactactggtgaagat

SEQ ID NO: 4679 - DNA, 491 bp, Arabidopsis thaliana
ccaacccgcccgtggctgcgaaaatagtgttgggtgagagggagataatgtaccaagcgatatcgcactgataaagatcatggacgcgaggatgaagatgatgagagatgcgcggccgatggctgcgattagccttctgactacatgctgtccaacccaagctgcaattgttgccactcccacaaggtacaaagctgcacaaacgtaaacaaatagtgaggatatcgtgaaactttaatggactccgtggccttattgaatagaatgaatgacacagaactcaccatatggaacagggaatcgtttgagaagatagtattctacaacagacatggatgatgagaaagtcattgcaaaagtggctgtggcacttgagacctacacacaaaaaaacacacaactgttgtacaataacaagtgattctaaattataatgttgtaataaattcattcacacctgtggtgggacaccgagctccaagaacaatgga

SEQ ID NO: 4680 - DNA, 711 bp, Arabidopsis thaliana
cgtcgcaggttacgaagatgcatcagataacagcccgagcctgggttgcgattcagaatggatagaacccatcagaaacttcatatccaaaagaaaagtgcgcttggataagtgggaagctcggaagctgaaagctgaggctgcgcgtttcgttctagtcgaggagaaactcttcaagtggcggttatccggacccttaatgacttgcgtggaaaaagaagcagctcgcaaagtcatgaaagaagttcacggaggctcgtgtggaaataattctgggggaagagccctagccatcaagataaaacgcctcggttatttctggccaacgatgatcaaggattgcgaaaaatgccaaaggaacgcgccaacgatccatctaccggccgagctcctgtcatcaatcgcctcaccatatccattaatgcgttggtcgatggacataatcggccctatgcacgcctcgaagcaaaagaagttagttctcgtcttaaccgattacttctctaaattgagagaggccgaatcatatgccagcatcaaggaagctcaagtcgaaagcttcatgtggaaacacatcctatgtcgtcacggggtcccttacgagatcgttacagacaatggctcgcagttcatatcaacccgcttccaaggtttttgcgataagtggggaatcgtcttagcaagtcgacacacgatatcccaagggaacgg

SEQ ID NO: 4681 - DNA, 851 bp, Arabidopsis thaliana
tgcgtatattagtgacttattgaagaactcaacatcaatgaaataaaaacttaccaggtattaaggaagacgctgtcgaaattgacgatgacttgagaagcaagggatccaatatcttgaatgttatccttcaagaagaacctgcaaatcggctcggctctgtagaccctctcgccctttccggataaggccttaccacacttgaccatggagtagctagcgagtagacgaagcatgcggtccaacaaaaccggcgcttcagggttacgaggtgtagttggtagcttacttgctatttcatagggtgagaggaatgagtcggtgcgagaggctgcggcgtagagagtgtcaaagacaccaagctcgagggcggctttgagaaccataggaaaggcggcggcgttggcaagtctcacggccatcaaacccaactcgttatcatcatcaacaacaattggagttttagggttagagcttaaggtttcttgaaaaaggtatcccattttcctttgtttttgtttctttcttctccttcaaggcactctacgtgatcacactgatcagaaacaagggaaaaactagatattgagagtgagtgtgtgtgtgttttgttgtattgtttgatggatcttactccgttttatagccaagacttagcctcctccatctttatttaattatattgttggcatgccggtcctaatgggcctctagtagaaaagtaagagcctcttgtgccggctgaaatagctaatttttgtttttttggttgaaagaaacagctaaagaatgtttcacgtcgtttgtattttttcttttcaatagcaaaagtcaattttcaaaggtgagac

SEQ ID NO: 4682 - DNA, 1182 bp, Arabidopsis thaliana
ggccattgaagaatctccctgttgtgtctcagctttgcctgggggtactcgacctctgctcctttgttgcagccagcaccgctctgatggtactcgacctctcttcttctactgcggccagcactacggtcgcgtaagtgtcgggactggagaagtcgtgtaatcctgctgctagatcgagccactgcagccttcttctttctcccgagctcccgaggctcgaatgatgaatgcctcgcagggacttgtgagactactaggtcactaggcttaggccggtggtgacttggctcaggccagtggtgactttgctctggcgcgtcatatctcctcgagggcatgtcctgaggaggttgtccctgcgaaatagctgtggtagaagaggagcagtttagcttgtctgtcaaaaacttgatgaccttgaagcacttgatgagtagcctatcttgtgtcttgcaccatttctgcaacttgctgttgtttctgtgagcttcgctcaagctcttgctctccctcgctggaggtacatgctcactgaaatgatacatgctcgtatcgtactcctcctccctatcctcatctgtctcagcaatctcatcctctatagaatctgttgtagggacgttgtcatcagtcggtggagcgctctcaaagtagatgtaatcacgcgcaggcttgaagtcaatgttttcgccctggagtatggttgtggcctcagtgcagggaagcagaatgttggcttttcgggtcaaggagtgctcgaacttctagcgatagaaatcgccaactatgtcgtgctccagaaactcacaacgacgcaagtgatctaaatccatcatcctcggatcgaaccgtggagacgtgagaggtacaccacatgctatcagaattggtgtcacaacaccacctacacaaagggctcttcgcgccctcttcttcccgttggtgtgcgcccacttcctgtatccacagaggtggatcaacagaagcataaccggtggagcatcattgaggtcgccctttaggaacttcttcccctttgttcagcggagaatgcccgtgagtgcagaatcaatcatctccatgtctgtgttagacacggtgcctgtagattccatagagtacagaacattcgctacagagcgttgatagtactggatcccagggcttcgaatctggttg

SEQ ID NO: 4683 - DNA, 1361 bp, Arabidopsis thaliana
cgatgcagactcgccatttgccgttctttttctttacaacgacaggattgcttagccaatcgggatatcgcacttcaactatcgatcctgcttcgagcagtttctgaacctcttcattgacggcatttgcgcattccggaccaagtttgcgtcgtttttgtttgatcggtttgaacgtgagtcaacgttaagttcatggcaagtaatatctggtgcgacacccgtcatatcttccattgaccatgcgaaggtcatgacattctgacttaaaaactgtacgagctcgtccttcaattgttgcggtaaatcagcgccaataccaacacatcgaagagggtcagttgcgtcaatgttaacttggattaccgattcagtccttggtactatgcgttcatcgagcgaaggagtgggttcagttatcataaaagctttagcatttctgagttgacgctcgactatgaaacacgtacgagcaacattgttctgccgacgtagattggcagcattattgttccaacggtcataacagtatcgccgtcgaaccccgtttaaggttgaacgttgtgtttggttgagcgcaagtcgacccccatttgtatcagaacgtccttgaagatgacgttgactgatctaccagtgtcaatgaggactttggtgactgtgctttcagcgattatcaactcgacaactaacggatcattatgcgggcctgtcaagccagctgcgtcggcttcagtgaagattatcggttcagtgttatcaaaagttggggtactgttggcgagccaatcccgtgttacttcagcttgtcggcgataatttctgatggatctgacagaatcgcggcaagtcgttagtccacccatgatcatgtgtatcttgttccgatggatgggggcgttatcatttcgtttcggggcattagttcaccgatcatcatctcgggcacgttcgttttgccgagtctcttctgtccgcagacgctcgttacgttggttataatcatctctctgaactgggtgatacatgttgtccttgtgcgttgctacctgacgtcgttcgtactcaacgtcgaggtcgcctttcttgaattttgagaggagtaggagctgaagttgtagacaatcatcagtcgaatgaccgaagattttatggaactcgcagtaggccggtttacgtttggtatcagtttcccgataatacttgttccatggtttagaaggttgcccttctgaactaccaattgcgtaagttgctgctttcttgcccttatctcccttactataatccttatcataatgctgacgaggtttgtagtgttcgtcgtatgatttatcatttgaatgcgaggctttgggttg

SEQ ID NO: 4684 - DNA, 583 bp, Arabidopsis thaliana
gatcatacccctgttgctattaaggctttgaaagcagatgcagttcaaggaagatctcaatttcaaagagaggtaagttcacttaaaaatcctatacttctcaaatctaaatagaaatcagactttaacttaggtgtggactgactattgagtattgagcattgttataggtagaagttcttagctgcataagacacccacacatggtactactaattggagcatgtccagagtatggagtgcttgtatatgagtatatggccaaagggagtttagctgataggctctataagtatggaaacacaccaccactctcgtgggagctcaggttccgaattgcagccgaagttgcgacgggtctgctcttcctacaccagacgaaacccgagcctatagtgcaccgtgatcttaaacccggaaacattttgattgaccagaactacgtaagcaaaataggggacgttggattagcaaactagtgcctgcagttgctgaaaacgtcacgcagtgccacgtgtcatcaaccgctgggactttctgttacattgaccctgagtaccacaaactggaatgctaggtgtga

SEQ ID NO: 4685 - DNA, 1667 bp, Arabidopsis thaliana
  unsure (1)..(1667): unsure at all n locations
ttctctcattcagacacggaccatcactcttctgccttcctggcgagaatgatttgtcattggaagctcagaaattgtgggttctgaaatccacactagagatttgtaattgagattatgagaaaggagggctagatgttcacagaaaccttgagagttatattgctaagaacgaatggaatttttgtattgataatgacaaagcttttacaatgtgaaaggagattacaagtgtaaaagtatgtgtgtgaatgtaagctgaattgaatgtcccttccaagtcgtccttgcttctttatatgggtctacgcacgtggtagctccgttcgggatctgcggagatcctcctgaatattcggcaggtcagttccgagatatcaggtcctctccgcgagtatctcctcgtcagttcctaggtcattattcgcttatctcccttcatcaggtgactgggcttatttggcccaaatacccattcgcgtatgtgggctcgtcagctgcgtaggtcctctacttagtgggcttggtgggcttttgtgggctgactttgtattttcgcacgtggattcctggaggggaatccagctccaacatttgccccccagcccattgagtgagtaggcgaactcgatgagcggacatataggtcaagtaagattgcgaaaatattcttgacgagaggataaatgtggttagatcagtcggttttgaggataaactcaacaatttcgttttcatttcagattcctttaaccaaaaactttcgagaagatacgcgagataagtcgctgctgatgtggacggccgagctggagcgtctcttcagcgcaccgcatctgacggtccagatcaggcgcggataatagatttctgcaatctcgaaaatcgtggtgatgatggctttaaataactttccacctctccacttgacgtcacgtcaactcacacaactctcaaggtaacttctctcctcctttattatttactgcgctttgttttgtagaagtagaaaaatctcgtttttatttttttgctatctccttcgtttctctgctattccctccttcccgatctgcctcctttgcttttttctttcatctctctcgcccttctccgtcgaaacccaaagatgagcgacttcgaagattctcagaacaagagcaaccactgttacagcgatgattcgagttcatccgagacaaggtnanctggtcaccgccgcgagtacagagacgcgccttaaccctaggcggaatgggtctaattcgtccgccgtcaaccagagccgacaaaccgaagaagaaaaaggttgccaagcaagggggaggcacgccgatgatgaacaacgacctggtcgacctctggaggagatgccaggttccggtggaggtacatatgatactcccaaggccaccgctacatcctgagaacgtgccggtcgggtggtctgcgcttatgccaatttcttcgagaaatacggcctattcttcccaattccggcatgtattctcgagatgctctactgtctcggcctcgcctttccccagatgtgtccgaacttcgtctgccatgtgctggcgttattcacccgggctcgggaagtaaacagaaaattcagctgccatgacctgcttcagctctgccaggtcaagaccaatgctaggagt

SEQ ID NO: 4686 - DNA, 1570 bp, Arabidopsis thaliana columbia
cgctagcccacccccttttcttttccctcaggtgaggaagagaatgttgagtgataagcatgttttttaagcctacttatgttgaatgtgtgattcagttcagttctcctacaaacactaacatgtcgatgcagctatagggggtgtcaatctagtccactgttattgctagcaatcaagacgtgtacagaagcaactaagtcaagccagattataatgatggtgggtttctagtaacaatcctaggacaggattcaaacaagtaaaaatgagaacttaaaagccctactcgatcattgggtcgagtagaaccaacaagcagaactaaaatgcaatcaataggggatacaaataacaggtaaataaaagtgcaatcaacaagggatacaaataggtctaatagaagtcctaaggatggattcattgataagggaaactctagggttcatcagatggctaataggtgaaaggtaggtacccttgacgatagattcaaaaactggggtcaatccactgccttgacagagacccccataactctaccacttcctaatctcaactgtcgttgatgaaacatagcagagtagagtttaaaaaacaatctaccaaagccaataagaagacaagccaatgtcttggtcgagtctacaaatcgttggacgtctatgatcgaatctccacattagccagcgaaaaccgcataggagccaagcgaatccagaagggttctaacctaaacactaaccacctaactaacctagagactaccctaatctaatccatcctcaagaaccctaatcactactcaagcaacattctcaagaacacaaacccagaaattactgaaatcatacaaaatgtagatctaaacaagctaaacaactttacttaaataactaaatgcaaaaacaaaatagattaagagtaattaagttttgaagattcataaacacaaagaaaaactaaaggataaaagctagatcctttggacaaaccccaaagtgatctatttatagtaaaatgttgaaaccctagattcactagaagacaagagacttgaggtggtttgggcgaatattcgatcttggggatcgagtaaagagggtgctgcaaagtctgcgcctttgtgtctatgctccgagtgatcaattggtcgagtagatgcttcatcctctctgatccgtatgctcagttgtctggttgagtggggaatgaggaggatctgaagacgctttgatagctcaacaagtcttgtagagttggtcacccttggtcgagtaaatgggtcgagtagaggatcgagtaggaggggcgagtagatcaatctgctgcttcatctaaggctgccttgatcgagtaagagggtcgagtaaactgcagcctcctccgttgctggctggatcgagtgaatggatcgagtagagtcctctttagctccttctgcacctgaaaacacaccaaaatatgatgtacgaatgcaagatgatcctagatgcctaaatatgcaaaataagctaaaatggtgcaaaatgatatgatacaatgagcaaatgcaaagctaaatgatgat

SEQ ID NO: 4687 - DNA, 1229 bp, Arabidopsis thaliana
gatcgattgttcctacaacgatctgaatctcaagtttgaaactctgaattcaaaaatcaagtatgtggagagtcaatttgcatcaacttctgctccgaagcatccttagcaacttccacggaaagcagtccagaatccaaaggactatggtactgctaattctatcaccatccaccaagaagatgaatctccaccaagtcatcagactcccaatactgaggacagtatgattcaagaaggggggggattcaactcaaattgatgcacctgccacccagcaattcttctggaccatagagcacacacctttgctgaacactcaacattctggaaaaaagttcaaaattgaaaaactcaagaaagatcagaatcaagagatgattagcagtgcctccactcaagaaacatacaagaagaaagtcatccaagaaaaacttgatgatccggttcattcactctgccatgctctctaggatcattgacattcaatatgtgcctttgtgatttgggagcatctgttagccttatgcctctctctacagctaaaaggctagggatcatggaattcaaattctgcaacttagctgatgttctgttgcacaccctcatggtctaatagaaaatctgcctgtcaagattggaaatgttgagatacctacagactttgtggtattagacgtggatgaagaaggcaaggatcccctgatcctaggcagaccattcttagcttcagctggagcagtcatagatgtcaggaatggaaaaattaatctgaaccttgaaaaaggcatcaagatgaagtttgacatcagagaagcttcaaagaaatcaacaacaggaggtcagagttttggaattcaagatatgtatgttgatgaagaaacaaaagctgaaacctcaccaaaagtcaattatacttctcaacttagcaagctgaagagaacttttgaccacaagaagagagcaacagaaacactattttagattgaagatcctacagaagatgactggtatgagatgagaaaaaaattttgaatggtaaagcagagtcatagagggattattttcaagggtgatgaagctgaaggatcaactttggctgtttgagaaaagagttaaaaagatttcagatggtattgacgacgagaagatggaaactgcactagctgtcaacgaagatgaaaatttcacaacagcatggtttgcaccagaagatctgagaggagttc

SEQ ID NO: 4688 - DNA, 1355 bp, Arabidopsis thaliana
gttactggacttccgagaacagcaagtaagcaggatgaatttgggtaattgtagatcgacttactaagtcagctcattttctagcagtcaataaaaaagacacagctgaccgcttagctcaaaagtatatggatgagatagtgagacgtcatgggagttccggtaagcattgtttctgatagagattcgaagttcacatcgttgttttggaaagcatttcagaaagctttgggaaccaaggtgcacttgagtaaagcatatcaccctcagacagatggtcaatttgagcggacgattcagactttggaggacatgcttagagcttgtatgctggattggggaggacgttgggaaaaatatctacctttggtagaatttgcttataacaacagttatcattcaagcataggcatgccgccatttgaggctctttatggaagaccttgtcgcacaccactttgttggacagaagtgggggagcgccaagacattaagcctgaaataattcaagagtcaactgagcaagtagagctgcttaaaaacaggctaagagaagctcatgaccgccaaaagagttatgcagataaaagaaggaaagggcttgagtttaaagttggtgacttggtgtatcttaaaatgagattgttcaaaggactgaaccgttgggctaagagaggaaaacttaagctgagatacatgggtccttaccctatcatagagagagttggagctgtaccttaccgtttggacctagcggcagatttggcagcatttcatgatgtatttcacatatcggtgcttagaaaagttgtcacagaaccagagcttatcatttcacagccaccagaggatcttgagttggacttatcgataaaaggaaaaacggtatcaattgtgagtcatagaggaaatggttcacgagaggaaagaaagctaagtcgattcaaatttgctgggaaagggatggaattcaagagttgtcatgggaatcagaaagaatgattgtagtgggggagaattgtaacacccctattttacaattagacaataaagcccaaaccaatcccgctagctatttaaacacaagtaaaacttcattgtcctcacgtgattataaaaggagaacgcaaactccaaatcaagtcagaaccctaagccggcaacctcggtaagtctcacctcatttagttcaagcctcttcttttgggaattgatttggctcttccctaacctaactctcctttgtgaaccatcgtagcaccactcagaccaccggagatagttgttgtgttgagccggagtcaccgcgtgaatcatcctcaccggagaggtaacgcacgagaatcaattctggt

SEQ ID NO: 4689 - DNA, 527 bp, Arabidopsis thaliana columbia
atatctacagatagagtcccaatacaaaattggaaaaaaaaatcctcttaatcaacaactgttcagcatatgcttttaagccgaacaacaacttctcattggactattcctaagcaaccgagctattgattccgaaagtagaacaaatagactcaaatagtagcatgagactgaggtcaagaaaaggtacctttcttgtcaactctcctcttagatgaacagtcatagacctcggaatatgccctttgggaacatgttcagccaactcttgcatcttggcctgcaagacaatgattttttactcattagtttgatatcagtgcattcacataaatggcactcattgaccagaaacagaacctcctgaaactttagaaactttgatgctctgagctgaagaataggattcccggctttactattaagacgacagcgactagaaggacacttaaacaaaggcatgaagactctagatgtaacttcctgatttgacatgtaaaagaagataatcagagttagtagttaac

SEQ ID NO: 4690 - DNA, 561 bp, Arabidopsis thaliana columbia
  unsure (1)..(561): unsure at all n locations
nnnnnnnnnnnnnnnnnnnnnnnctaaagtttgctacagcctggtgaatattccttatggttcacttgctaccgcgatgacccaacaaccacaatcccgcgcccgtctgggatncggtgggattgccgcttcattgacctttgtctgcctggcatttctgataggaccgagcattaagaactccagcccggaagagatggtgtcggtataccatttctggacaattgtgctggcgattgccggaatggtgctttacttcatctgcttcaaatcgacgcgtgagaatgtggtacgtatcgttgcgcacgcgtcattgaatatcagtctgcaaaccctgaaacggaatcgcccgctgtttatgttgtgcatcggtgcgctgtgtgtgctgatttcgacctttgcggtcacgcctcgtcgttgttctacgtgcgctatgtgttaaatgataccgggctgttcactgtgctggtactggtgcaaaacctggttggtactgtggcatcggcaccgctggtcggnggtatggtcgcgaggatcggtaaaaagaataccttcctgatt

SEQ ID NO: 4691 - DNA, 422 bp, Arabidopsis thaliana columbia
gtcgaccgccagtgtgctctgccagtgtgctttaaaggaatgccattagcatcaaccagacaggctacttccacgcaacatccttgtggcaggttatcaatcaaaccatcgttacggacgttgccgtaaatcacactcggctcgccagtccagatagcgttcatgattgtgctggcatattcccgtgacggtttaatatcaatccgggaggcgtttttatactcctccagatctttatgccagttcgccagctgctcgacgcagcgtttcgggtactcatccatcggtactttagaacgctcaatctaatcctcacgaactggcttagtaaaacacggtgtgtactcagctaaatgttctgacgattccgtgacgaaatagctgagctttttggacaattcgtagcgcacaatattctggca

SEQ ID NO: 4692 - DNA, 516 bp, Arabidopsis thaliana columbia
cagtatcgtgtcaacgggatgcaagagaccagaaattgaagagaaacgaaggcaaagcagcgaaccagcttatgaaagctaatgccgttgatgtttcaaactgaacacagtggttttgtgcgcactattcagatcgttgtctattagaaccgttatggcctgccgatgcacaagctgctgcaaaagtcagcgtcgatgtcacctgaaataatgttgaaaaatgcttatttgtacacatctcttttctcatacgattttattaaattgagaggctaaatggtaaatctcttaccccatcaccaattgcaaacaagctcacaagtcgacggttctgtagagagcgtttgaccataatggcatagacgtcaaccatggctagtgcaagactccacaagctctgcagaccagtagctgcaactaggtagctgatgaatcaaatacagtaaaccatcttagcagatctaacagtcccaaacatggtttaacacataaagcataaaggtttacccaatatac

SEQ ID NO: 4693 - DNA, 747 bp, Arabidopsis thaliana columbia
gaccgagggcctttgctaagacttgctgcgtgaaaacagtgcgttgttcaaagcaagctgagcatgcatctgttatctgaaaacaaaaaacaaaaaaaaacacagtcaaatgtgactctgctatcaatagagactagatagaacagctagcatagtggcagaatttcataaagggtcgtccatgggtaaaacagattaatcttgtcgatagcaactctgacaatctaattagccagttgctgattgcccctagttttctaccttcctaaagcgagtgacatgagatgaatcattaatattcgcgtaaatagcttgcctggaagttactgggaaatacctattttactagtgaggaaatagcagaaaataaaaagggcatttgatatgacatagcagcaatgcttcacgctaccaaaattctgtaatagacgtacacacctaaaccaacgtattatttgaatccccaacactcccaacccaccatttccaccctaatttctggatgacctcgtctctgttgaatttacgatttatgataactgcctctacgtaagtaatgataacgtggccatatgcaactgatgatgaagttttatcagttccttatgcacacttgccaaaagccacagaacttaagcagagctgatgcatcgcacagagatagggatagtccagccagcatgccaataggaaaatatacacagcagtgtaggtctagtatcacgactgattttcagcaaatgagtg

SEQ ID NO: 4694 - DNA, 483 bp, Arabidopsis thaliana
tcattatttatactaataataatcgaataattatgatcccctccgcaagatatttaattagatactacttaatttataattattgttatctctctctctcgctttatatagttccatcgtggtcattcctcacctaaacaactctgcttcactctctatctttcttaagtaaacaaatctttagagagagtggaaaaaatgaattcgaagatcatcgaagctttcttcatcgttgctctcttcactacctcatgcctcgctcaagctccagctccttctccaaccaccaccgtcactcctcctcccgttgccactccaccacccgccgcaactcccgctccgaccaccactccaccacctgccgtctcccctgcccccacctcttctcctccgtcttcagctccttctccgtcgtctgatgcccctaccgcttctccacctgcaccggaagtcccggagttagcccggcgaactagccccgac

SEQ ID NO: 4695 - DNA, 674 bp, Arabidopsis thaliana
catattcacatcataaacctaaaaatactcaagactttaatatagatcaataagaagaacacatattaagctcagtaaaaaaactactcaagggaaacatgtcactagaattgagctaagatggtgatggttaactacacggccaaaaaggttatagccttttaatttgaagttgttttgggtaaaaactgaaagatgaagaaattggagaaatcacgtggtatcacgtggatctaaataagacccgcgaaaataaaaaagatctaagagaaaagtcaccgccagtgagtgagatcatcttctacgttttctaaattcaataacgcgattcccaataactaacactcctaatcgaatttcgtttctgcgtttcccagaaaatttaaactaaaaatcctctagatctggctttctacaatcccaaaatcgtaaaaatctatagcgaagagagagagatttaaaacgtacggatctgatgaggtcgagattgagttcatcaggacgaagaagcatatcggcgctaggattgcggtaaaacataaactcacgatctccatcagcacgtaacgtaacgaaagctacagcagtgcgtgctccaatatcgaagttaatcccctgatcatcaacaccagtcttcctcaaaatccgagcctaacatatgaccgaactcgtcg

SEQ ID NO: 4696 - DNA, 605 bp, Arabidopsis thaliana columbia
tgtcgagaatagagatgcgtgatgaaactatcaagtcccggccagtaacaagatctggggcagcaaaatgatgacacacagcgcagaaccaggaggctggatcacccatttcactgcacttctcctcctcaagagctactggatctgtggaaaataaaaataaaatagtagagctagttcagcaacagaattcattcaatgaggagaaacacagacctgccagaaggaagtcttcccagaggctgattgcaagagtcaaaggcatttctccgaatggaaacgggaaaatagtgtagcgacccttctcacggtccttgtcacgtatagaagagaagtgtcgaggaatgtaggatggtggacgggatatgaccatcatattagctggaggtggagtacgaagaagagaggactcaaggaaaagagcatacatgtttgtcggacctgttgagaaactagagaattaagagaatcccattaagactctagctatggaataaggatgagaagatactaacttttaatgacctccttaagagagattcagtggaatcactgctttaaggatgcacgagggactctgatagtcgccacggagtgatggtgat

SEQ ID NO: 4697 - DNA, 530 bp, Arabidopsis thaliana
cactctaaaatgatgattggtaagtccaaatttacctttcataactcatcatttttatttggctttaaggaatgtggcgtttataagagacaacaactaggattagtggtgggtcatgtcgggctgaagaccgaatgagtctagttaatctcgttaggcccattttttccgaatatagtgttaaattataataaaagataaaaaaagtagcggttttacaataagtgcatcgtttgtttgataaaaaaatttaaacgtaaaaagtttataaaaatttaacttactgatttaaaccaaaatttttaaattttgtttggccaattgctacaaacgtattaagaacaatcaaaaagctcttaacatggttcatatatctatgcagttgatgatgagtacataataataggatcagccaatataaaccaaaggtcaatggatggaggtcgagacacagagatcgccatgggagcatatcaacctagccatctcctatctactaataatatgaggccggttggcaaatatttagc

SEQ ID NO: 4698 - DNA, 558 bp, Arabidopsis thaliana
gatgggaactccttcaaagattctcccacaggaggagtaaacagaatttccccaaatatctcagtaaccatctatcatacaacaagaaaacacatctcaaaaccaatgtactcatctattaaagcagcaaagaaagaaatgcaaaataaaaagctacctcagcaactttagactgaagatctggagtaagatgatcttcaagagttacaacaacaggatagtcagatacatcaaaggcatgtgctctgatagctttgagacatttgatcaaccccacaggtgtagtgagagtcctgtttaagaatggttcagtaaacaagttaaacgccaagcacctaaccttgacttgtttttcgaaataaatttgaagcaaaattatacattccgtgaagaacatcaatatcgtctttgttggaattgggccatatatccaattcaatgactctaacacctttcttcaacgcatcaataataggtacctcactacagtcactgctcagctgattaccagtcagataagaattatgaccagtgaatatgaaataatgcgatatagga

SEQ ID NO: 4699 - DNA, 819 bp, Arabidopsis thaliana
cccggactccttcccagtgtcgctagttacttcttggagcgggtaaataagtgcttcactatctcttgtgctctcaattttccattgcattgttcgttaatcgttacagtaagttattaatcttgaagctgctttcccgttcttcaggctattgacgtgttgacaccagattacgagccatcagatttggatatattatatgcagacggagtcacttcatccagtggtctagcttgtctcgatttctcatttccacagactgcatcagaagagaatcttgatccttctgatcaccatgattccctgctcaggtaagttctgattttcctttttgtttattgttattcaagtcagttcgaaaacatttgaagacattttcttgtgtgctttcaggtaccagttaattagagtaccctcgagaggcctcggggaaaactgcaagtggatagatatgtttgaagacgtcggaatggttgtgtttgttgtttccatgagtgactacgaccaggtgtcagaagatggaaccaacaagatgttactcacaaagaaactctttgaaagcattatcactcatcccatctttgagaacatggacttcctcttgattctcaacaagtacgatctcttggaagaaaaagtagaacgcgttcctttggcacgctgcgagtggttccaagacttcaatcccgtggtcagtcgtcaccgtggttccaacaacggtaaccccactttgggtcagcttgccttccacttcatggcggttaagttcaagcggttttactcttccttgaccgggaaaaagctgtttgtttcttcaag

SEQ ID NO: 4700 - DNA, 567 bp, Arabidopsis thaliana
cattattgctgtggtatgaatcttaaatacctttaatctagtgcatttttaaattcatgcgcagtatcgatcctattcttcatcttctatattatgtcagtctctaattaactttttgttacacttccttgtctaatgatatgaatgaaggtgagctatacgaaagaagtacatttctgctgcttttcttgaataagaagatcttaactctgtgataattctatgttttcttatcatttccatcatagcctgcaaaagcttcttcgttcagttgttttttttgtccatctttttcatctcatacagcttgtgttacatgcaggttagttcacgacagaaggaaacaagcagcacctcgggaatgcgtgagagtgttgagacaagtttgcttttacagcatagagcaaaggtatgttctctttttgatgattgataacagtctgtatcacctaaaattacctttgttgggtcctaaacaaagtatatgaattgttttggttgtgcttgcttaacttcaaaaatgaaaatagccccttaacttcgtgctctaaattcccttaggaagtt

SEQ ID NO: 4701 - DNA, 972 bp, Arabidopsis thaliana
ccggcatagggcctgtgcaaaagaaggatgtaatgaaggcgggagtgatgctcgagaggaaaaaggaatttgctacaattttggctttagacgtggaagtgactacagaggctcgtgaacttgctgacgaaatggaagttaaaatcttctgctctgatatcatgtatcatttattcgatcagtatcaggcatatatatgttgaataattggtttttttaggagctccaaccattttttggagtcaaaccaagttcttactaaaatatgtatcatatttaaccagattttgtttgtactgaatgtacgagcaatttaaacaaaacaaaatttagagacaaaaaagtatattcattttgcgtcttcgttttatgaatatattttttttataaagaaattatgtatatacttttcaaagttcttattgtattgtatggatacaattatgaaaacaagtggtacacttgtactgatccaatattaattcgatccgccgttttgcttagaacagtcgacatgtcaaatctacttttggacattcttagacatcagatggaacaaagttgtcgacataattgtgacctctcagtgggattggtgaaatcatgtgatcaaacatcaatacataactacaccggcaaagaatatctgatgtttatattgttacttggtcatattcataggtatcgagatattatcgtgatcgtgatcggcataactcaaaagtagattagagaagatatatattaaaaatgtggactatgtgaaaattgtaagattgttaattagttagccgtctttgtcattgcttaatttacaggatgcttaataataaggaccactttaccaaaattgattccacctctacatccaccacgcacttcacattttcaacgtgtctctattcaatttctcaatcacatttctttatgaataaataaacccacgggccgcaaagtcttacaattccatat

SEQ ID NO: 4702 - DNA, 577 bp, Arabidopsis thaliana
  unsure (1)..(577): unsure at all n locations
nnnnnnnnnnnnnnnnnnnnnctaaagttttatccgcaaagatttgctgattgcactcgaccttaaagcaaatctctttctcgtctgaaaggtattcaagatagtccaacaaattttcgacttccttattgagagaaagcgagtccagtttcaccaaaacattgtttttatctgccctggcaagagacagtatgttctctgttaaccgcgaaatattttccagctcttcaatgtttccggcaattgtgttttgatattcagcgatacttccggtttgactgagcgtaacctgattctgacccagtaatgcattcattggcgttctaagttcatgagcgagatcgtcagcaaactgacttagacgctcagaatctttgactaaagcatgatgcattttattcaacgcctgcccaagaggttttagtgctctcggtaatgcgctaacctcaacaggctctcggctatcgttataattcagcgcttccgttacaccactcaactttttgatctctcgtaatcacgttctgattaacagcggacttaatactgagcaaagtacaatggcgacaatgcaaat

SEQ ID NO: 4703 - DNA, 664 bp, Arabidopsis thaliana columbia
gataacaacgatatgaaagaatgaggaaaaactgttttcccatgatatctctcttttgtctacacagcttcccgtgcaaggtcacaaacttgctctagctgacccaagtcatcatgctcctgtatggtgaatcgatcctacaagctgtatgtatcttccaaaaactcgggttacctctgtttcctatagtgtacaaagactataaactcgacgcagattcttctatgtcttgatgcactgtagcattcttcaatgtatgacatcggaatcttgactgttttcgggtactgtatcactgctatcttaaggcactcttcttccaactctttgagtctgtccttagacttgattgtttccgcagctgctcaggatgagacttgttacagatgcaatcaggttgtgggttcgcatagaagttctcctctagcctgggaagtgcagcaggcagtctcccatatgctgctccaatcctgtctctatttaatctcttaacctcagaagaaaactcttcccaagatatgataccctcatcaaaatgatctatcagtctaacaaaattcagcctgaaataatcacacagaacaaatcagcacaaaaccagtgaaagaaactacataatctcgccaaaatgaaaagctttattccatggtaccatacctgtctg

SEQ ID NO: 4704 - DNA, 572 bp, Arabidopsis thaliana
ctctatacgaagcttcttatttttcaatggattcggagtttaaactcaaggagactagaatttatgcaaacaagcggttaagtgagtttgtcgcggaaagtagcaaaactatttgcagagaagatgaaacttatatattagagatggtgaaacgagcactagagacgccgtaccattggagcatacgaagattagaagcaagatggtacataaatgtgtacgaaaaaaagcatgaaatgaaccctctcttgctagagtttgcagcaattgatttcaacatgttacaagctaatcatcaagaagaacttaaacttatttctaggtaaatatgaactaaattctatacatgtgttatatctctcaaagtggattatatatgtttatatgatttaattaattatgtgattgtcaatttagttggtggaacagcacaggacttatgaaacaacttgatttcgtgagagaccgaatcacagagagttatttttggaccattggaatattttacgaaccagagtttaaatactgctgcaagatactcaccaaaatattcatggtaattgtgattatgg

SEQ ID NO: 4705 - DNA, 571 bp, Arabidopsis thaliana
gagaaggataagtctttattgaaaagagtttgagatcagtacatgtatacacataaaaggatagattttttaaaatggttacaggacaaagagttttaagagaatgcagagtccccctgtaccggaattcataaaagaaaacactgacccttaaaccgaaagaactctaaaccctaaacgctaaaccctaaacagactttgggttacttctaaaaaccttctcttatggctttagtactactactaaggtgatctgtataggcttaaaaaggattggtatcaagttctgttacacaaacccttttcagccacttatgttacagacaccaatttaaaaacactacatgggttttttctcctaagctctttacatgttgaaaaagttaagaaaacggatgatggtaataagatcaaaccgataattagcaggaaaatgttaatatattctgtattaactattaaccccccatttttttgttgtttctaatcatctaccttcgtccattcaaaccgtcctggtagtggttgttcgtcacaggatcaaagttgtacctgaagaaagagttgacag

SEQ ID NO: 4706 - DNA, 512 bp, Arabidopsis thaliana columbia
atcccgaatactccgcgtcgagttcaggcggacgtagccccgtagttgaaaccgggttattttcaagcccggatgagaaccagtcgtgaacctgggtcaaaaagccgggtttaattggtggaagagaagacggttaagcttttctatgacatggagaagagaaccggtacgcatttgactttctgaattttcaaactcggttcgattttgtccttaaccggaccggtttattgtttgcagagagaggatgaagttacgaagacatcaacaaaaccatcggaggaactagaaaaaccggcgacggagataccaatcgaggcaaacaaatgggtaatgaaggatttagtgagccgcgatggaaaatcgaagctgaaatcggaagtttacttagcgtcgattgatcaaagaagcgaacaagccgccggagaagcagcatgcgcggctggttgcgtgtggtggtggctcattggttccacgcgaatcctaagctcatcgatccttcaggaacagcg

SEQ ID NO: 4707 - DNA, 413 bp, Arabidopsis thaliana
cagttacctgtggtgcagagcggtacacaaagtaccgccagccagggcaatcgtctgttatgggtagagcaggtcactgttcctgactatctggcggggaatggtgtggtttatcaaaccagtgatgtgaagtatgtgattgccaacaacaacttgtgggccagcccgttggatcaacagttgcgcaacaccctggttgccaacctgagtacgcaactgcccggctgggtggttgcctcccagcctctgggaagcgcccaggacacgctcaatgttaccgtaacggagtttaacggtcgctatgatggcaaggtcattgtcagtggtgagtggctgttgaaccaccagggacaactgatcaaacgtccgttccgtctggaaggagtgcaaactctagatggttacgatgagat

SEQ ID NO: 4708 - DNA, 566 bp, Arabidopsis thaliana columbia
cgttatccttttctagagatattttcaagccaaccttacgagaagcatccaacgtttcaacttgagccactgcatacatttcatgagcgtgtctaagctcagctctcaacttcgaaatttcattaagcgtgtcctgaaatcaatgaaaaacatatcaatcccaaatgctttcgatctcacaagaggtttacaaaaaatcttatcgaaccttagtttacctggttgtctgtgaaatagtgtccaaggggagtaacaacatttccgtattcaaagttgctagacatggaactcatagcgtcttttctctcgtcaaaatctctaaactgaggattccaagaaacactacgtgatgtttcagggctacttctcttgcttgcttcctctgcagcatccgaagacctctttttagtttcatctgactcagtagaactagtttccataggaacagaaacccctcttactattgtcgggagattttgcattctcttattggacagagtgtgagggttagatttgagtgcattcgacataacatctaaagaatgtacaaaagaaaagcgaagaaa

SEQ ID NO: 4709 - DNA, 546 bp, Arabidopsis thaliana
  unsure (1)..(546): unsure at all n locations
nnnnnnnnnnnnnnnnnnnnnntaaagccctgttacaaattcaaaacccgagcaaattaacgcaaatcgctattgccgactccgataaattgcgcgtcggtgattttgccgtagcggtcggtaacccatttggccttggcaaaccgccacctctggcattgtttccgcattaggccgcagcgggttgaatcttgaaggtctggaaaactttatccagacagatgcttccattaaccgcggtaactccggcggtgcactattaaaccttaacggtgagttaattggcatcaacactgcaatccttgcgcctggcggcgggaacgtcagggattggatttgccatccccagtaatatggcgcgaacactggcgcacgagcttatcgactttggtgaaatcaaacgcggtttgttaggcatcaaaggcaccgagatgagtgccgatatcgccaaagccttcaaccttgacgtgcagcgtggcgcgtttgtcagcgaagtgttgccaggttctggctcggcaaaagcgggcgtcaaagcgggcgatatta

SEQ ID NO: 4710 - DNA, 407 bp, Arabidopsis thaliana
tgattatagacaatatcactttgataatcaccacttcgtgccacgatcagccccgccgccttgttgatagttgtagtcgccaatgcgcttgccatttcccaatcttctttcacaaacgtcaggacaacttttcccagcatgctagaggtgtcggttttatagtgttcaatgtaaactaaaccagcagatacttccttacctgtatattgagcttgaccctgaaacagtttttaagggaaaagagtaagtttccaagactagtgaaacccgatggtgaaaagacctgaaaaaacatttcacatacaattatggtaatgttattccaaaagtcatgtctgcataaaaggtacggtctatgttagttgcagcgactgtgagcatccatgggaatacattagccacagtgt

SEQ ID NO: 4711 - DNA, 531 bp, Arabidopsis thaliana
ttagcccaattaagaaatagtactctacagtttctcatcccttgctatttgtttcaggagccaaggaatccaatcaatgtgttagcaaaacaagggtctctaacagataggcaacaggtattattcgagaacttgtttgtactaaagagctataagttgataaccaacaaaagcaagcaaaatatatttccatatctgtttcactacagaacaaataataattactattactggacaggagagccatgaggtgcttatgaaatgcctcaccgacgagagaaggtttgataacgaaaaatctgtggcagcttggatagtgtacaaggcattacttcaatggagattatttgaagcagagaaaacaaacatatttgatagaattgttcataagattcgatcgtccattgaggtaataatttaaaggcaatgactatgaaagtagtatctgaaccctctgaaacccgaactttatattcaagttatactaattttggtccagaagggccaagatgacacaagggaactagctta

SEQ ID NO: 4712 - DNA, 599 bp, Arabidopsis thaliana columbia
cttaaagttagggtctttctcctttatgctttggcacatcctcaggaaatcaatgttctcatcctcaggatcgagtttcttgaatgactgaagcaaattcctgacatccttttcggtgaatggtaaaaatcctggctcgacacacttctcaagctccaagagcctcatcatctgctgaactgaaattcctgtcttggaaaacatcaaaatccgacttttatctgcatctgatatggacctgtacgcaggaagaaaacgaacttggtttggttctaagagctcatgattgtggtgattagcaaaaccagtaacacgccattccgttgaacctaactcagtaagtttactaatccttaagtatgcttgacatccacatcgagaagaccttctgtttctctgtggttttccttcgcttagagttttgataggtgtgttaccagcacgtgtgcaaacaaagtagcgcctagtaagtcctttgccaactccgtcttttccttctgtcctgtgacggcgtatggagaaccgcaacgctttgcaaatgtactatagaactcgtaagcagtatcatgtgtaaggaaaatttgtctgagatagggaat

SEQ ID NO: 4713 - DNA, 599 bp, Arabidopsis thaliana columbia
aggattgccactcacagtctataccgaatatgactcaccctgatgttcctgttggaggagaggattcatcggcaattagacaggaggtaagttacttttgtcagaactccctcaactcttgcgttgacgaaggcattttgctgtcaaaggtctttcttaaaacattcataattttcttatgtaggttggtagtccacgtgagtttagttttccaataaaggatcatcttcagcttgggaaggatcttgatctcattgattttgactctgctgctgaggtatacactttgtcttatttcataggcaccaaagcacagtttgtaggttgttggatcagatttggcatcttgcgtacatgctggttttcttttttttagtgcagttgtatttagactgaacatttgattacttcatattgtagagttcacttgagtaggtgaacgatcaccgccttcagtaaagtattagattgatgaccaaatattttggttttccggtatatttaatcaaggagataagttgaagtaacttccttgttattacactcatgcaggtaagtggtcaaagtcttctatctgagaatgaggtagtctattggag

SEQ ID NO: 4714 - DNA, 643 bp, Arabidopsis thaliana columbia
gctttttcttacacccgacatgattgggctgtcaaacatacaatacataatatcataatatagatatgccataagaaaattaaaatattccacttgatccatccaaactagtcacatgcgatgacacatgtgagctttaagtgtcagtgggaaacaaaaggcagtcattcaaattaacttttacgtcccggatctatttgaatatccgtagttaaccccatactcttaattcgatcaaacatacccctaatctttaaagactttttcttcttaggaacggagtgcaacagaggaagaactcatggcaagatggagtcgtagggacaacatgtccgattccaccaggcagaaacttcacttatgtaattcaagtcaaagatcaaattggtagcttctactatttcccttctcttgccttccacaaagccgctggtgcatttggagccatccgtgtctggagtcgtcctcgcatccctgtcccgttctctccccctgacggtgatttctggcttctcgccggagattggtcaaaaccaatcactatgtaagtaactccttattgcctaatgccactgacttgactgcaaaaaaggacgaaattttggggttaggcaaaactcattgtttgttatttaaggtttga

SEQ ID NO: 4715 - DNA, 341 bp, Arabidopsis thaliana columbia
tcacactcttttcttctagcagcttcctcttctgtaaagctcttctttgcaggctgttctctattctccttagcttcacaaggtttaataatctcaccgtttgattcttcttgaagattagaattgctctcaactgatcctttttctgttcttaatgcgtttaggcttccctcagccatcttcatttctgcgtttgcgtcttcacattttacattacaagcctcaggaacagtccttgattcagccttcttggaggacagtggagccgcgatcttagtctccttagaattttccatccgtttaggatgacttactgatttggaacaccatttctctctttc

SEQ ID NO: 4716 - DNA, 477 bp, Arabidopsis thaliana columbia
tttacctgcttcatatccccatggataggaattaaagatatggacttcagggcaggaatttttgaaagtacgagtccccagtagtcaacagaagcacaggtcatgaagaatctgcagcgttacttagactatttataaggatgcttcattttatataagtctgtgtggaatatttaaacttacactataagctttttatcactgttcttgatgaggagatcaactagttgtgatgattttttatctgcttcgcattccatatactgtagagacaaggagaaataaaccgctaagaaacgcatcggtaggacatgtaaagatagaacatcggtttctactagaaagaagtatatacatatgcaacagatatgatcaataggtattttcaatacaacaaacttgctaccaagagaagggaatacaatagagcgtcgaagagaatcgtataactactggatacttacaaattagaaggaa

SEQ ID NO: 4717 - DNA, 463 bp, Arabidopsis thaliana columbia
gggtacagtgtgctttaaagtactgggaatgcataaaaccaccgcgggactggaagtccgtgcccttttacccgacgctaccgatgtgtgggtgattgaaccgaaaaccgggcgcaaactcgcaaaactggagtgtctcgactcacggggattctttagcggcgtcattccgcgacgtaagaattttttccgctatcagttggctgttgtctggcatggtcagcaaaacctgattgatgatccttaccgttttggtccgctaatccaggaaatggatgcctggctattatctgaaggtactcacctgcgcccgtatgaaaccttaggcgcgcatgcagatactatggatggcgtcacaggtacgcgtttctctgtctgggctccaaacgcccgtcgggtctcggtggttgggcaattcaactactgggacggtcgccgtcaccgatgcgcctgcgtaaagaga

SEQ ID NO: 4718 - DNA, 493 bp, Arabidopsis thaliana columbia
gccagtgtgctctaaagttaagtctggcgttcgcgcgatcgataccaagtgtaaaattgaacaagctcctggccaacacggtgcgcgtaaaccgcgtctgtctgactatggtgtgcagttgcgtgaaaagcaaaaagttcgccgtatctatggtgtgctggagcgtcagttccgtaactactacaaagaagcagcacgtctgaaaggcaacaccggtgtaaacctgttggctctgctggaaggtcgtctggacaacgttgtataccgtatgggcttcggtgccactcgtgcagaagcacgtcagctggttagccataaagcaattatggtaaacggtcgtgttgttaacatcgcttcttatcaggttagtccgaatgacgttgtaagcattcgtgagaaagcgaagaagcagtctcgcgtgaaagccgctctggagctggctgagcagcgtgaaaagccaacctggctggaagttgatgctggcaagatggaa

SEQ ID NO: 4719 - DNA, 882 bp, Arabidopsis thaliana
aggatccccttcttttctttctggcttgtcgaacagttcacatctcagagctcataaattttgtggagagcaaagttctcagcaaaatcaaagaagaaccgaacgagagagagaaacgaattcttctcaggtattctcttaaatccaatgtctttcattctcctacttgttcctagaattttcagaatctgtgtatcttcctttcctgtttaattttgctggatctgtcttgagcgaagtgttttcttatgaaatcttcaaacttttgatagaattttataaaccctagctagattcgattctgggtgatgtttagtttttaggtgtttttatatgggcatcagtgattgttgaattatctttcgatttttctcttcgctcctgtgattgtgactttaggtttgtgttgatctcaaagtaacatagatttataaagctagttcatttcctttctattgaagaaacttgacctagttttagtctagtttttaatctgaatcaattgtgtttgttgatcgttgtgatgtcgaaaaccctagttttcgtgttttcggaacttgccctgtgtctaatggagtatgaattagttgtgtagaccaatgcatttgttgtggtgcaggtgttaaagaatgtctcggagatatgatagccgtaccacaatcttctcgccagaaggtcgtctttaccaggtagagtatgctatggaggccattggaaacgccggttctgcgattggaatcttatccaaagacggtgttgtgttgatcggtgagaagaaagtcacctcaaagcttcttcaaacctcaacctctgctgagaaaatgtacaagattgatgaccatgttgcatgtgctgttgctggtataatgtctgatgctaaca

SEQ ID NO: 4720 - DNA, 592 bp, Arabidopsis thaliana
  unsure (1)..(592): unsure at all n locations
nnnnnnnnnnnnnnnnnnnntaaagggcaatgatttccagcgcactgtcagcgcccagcatacgtggcatacgtacagaaccgccaaagccaggcatgatgcccagtttggtttccggcagaccgatgcgcagatccggcgtcgccagacgataatcggtcgccagcacgcattcgcagccaccgcccagcgcatagccattgacggcagcaatggtcggcaccggcagatcttccaggcgattaaacacgctattggcaaagtgcagccactgacttaactgttcttcaggaacgaggaacagggacaaaaattcggtgatatcagcaccgacgataaaggctgctttgttcgaacgcagcagcagcccttttagatctgattgctgttccagcacgccgatggcctcgccgaggctggcgacggtcgcagtgtcgagtttattaactgaacctggggcatcaaataccagttcggcaatgccatcttcagccagtcaaggtacagggtgtccctttgtaaacatgtcagtctctgaatcgcaagtgatctggtcgtacagatgagcgaagtgtgtatttgtgttaaaata

SEQ ID NO: 4721 - DNA, 572 bp, Arabidopsis thaliana
ggttgattattaaagcagtgtgttctttgattctaaatttctttcctttatatgaaattgtagataaatggatcaaatcgttaacgtggatgagtttcaagagctggccaaacaggccctccctaagatgtactatgatttctacaatggaggagcagaggatcaacacactctcaatgaaaatgtccaagctttccgtagaatcatgtaactaatccatatcaatatgatgctatatctacttgatttcaccgtgtcatatgtttgtgtgttgtgtgctttatgtacaggtttaggcctagggttcttgttgatgtgagcaacatagatatgtctacaagtatgttgggttaccaatctcagctcccatcatgattgctccaacagcaatgcataagttggctcatcctaaaggtctgtttagttttatgttcataactagctctgtcaactgtatacaattgctggatttggaaattgatttgatttgtccctatctatgttaggagaaatcgcacagcgaaactgcagctgcgtgtaacctatcatggtactcggtgtttgttggaatg

SEQ ID NO: 4722 - DNA, 483 bp, Arabidopsis thaliana
  unsure (1)..(483): unsure at all n locations
nnnnnnnnnnnnnnnnnnnnnnnnnnnctaaagcggcggtcttaagttttttggctgaaagattattcagcagttgcaggcattttaccttttgccgctggacgttctgtcagacgcttctcaaaattagcattaaattgctttttctgttccggcgtcaggatgttgtaaattttgttctgggtttcccatgtgcgccacagtgttagctttgcgctgttcttccatttttgcgatctgcgcttcagcttttactttatcgaaggtatcgctggcaatgatgtcatgcattgcgcggcgttcttccagcggcggacgtttcatctggtcacgctggcctttcatgatttcgcggatctgctgtttctgcgcgtcggtcaggttcaggtctttgaacatcatgtcctgatgcggaccgaacttgcctttgtggtgcatcacggctcgcgtcacgcggtgctgcggtagtggtgtctgcggcat

SEQ ID NO: 4723 - DNA, 879 bp, Arabidopsis thaliana
tctccataactgaaacccaaaccactaggatctttcttacctcaacactatttacgacactctcattgacacacctgctatttttatcctctacactacctccacaaaaccagtcttctattacacaaaaatgacgcagaaccccagaggcttgtcagattatgaaagatttgaatatgatatccgttaatttccccagtatccaatccaacaaaatataagcagagacccaaatttatgtattagatttgttttacataagatgtgtatatatgatagtgtctggtgatatcttttctggatatctcttggctacatatatgagaattgcagtaaatttgtgctcctaccatttcgttagcgtcccaaccctagtaatatatattatagtgctacgaatgtacgaccaaatccaaggatcgtcaaagctcacaccatttccgcatttatatcatcaagaggaaagccgagacagagatgaccaatgccacatagtaacgagctgactgcaacaaaacgcagaagattcaaagtcggaatgagactcaaagagcaaaatgttctatataatggatacaatcattacaagtatactatggcctccttaatgacagaattcatacctttgatgatgaaatgagtgacttgggagaatcagactttagattgttgaatccaatgtcatatgatatggttccatcaggtttaaaaagtccaaagtgtgtctcagaactcttgcccggttttgagttttcattgaacaatgcaaagatataggctttaagcaccgtttttggtctaagaggtgtcctttcttcttagcaagcctcttcctgaggttatagttatacgttcttgcgttctctggtgttgctgcag

SEQ ID NO: 4724 - DNA, 456 bp, Arabidopsis thaliana
ctattgaacgtttctacgaccttattcgattgtttgatctatcaggcttgttgtgtgttgaagttgcaattgaagtctaaatcgttgctagagatgtattaacgagtttatgtgtgagctattctagttttagaggtttcaggaaatttctaagattcctaaataagagattcttggcttttagtattgtgtggattcaattataggctagctttgtgggatctgggatgtgaatcttagtgcttctgttgttttattgaaatcaggctaatgctgcgtcaggaatggcagtccatgatgactgcaagctaagatttctggaactgaaggcgaaaaggacacaccgtttcattgtctacaagattgaggagaagcagaagcaagtgattgttgagaaagttggtgaacctattctaacttacgaggactttgcagcaagtcttccagctgacgaat

SEQ ID NO: 4725 - DNA, 569 bp, Arabidopsis thaliana
tgccacatgaagaatagtccttacagtagcagttcttactacagggctgtaagtttcaaggtaatcaattccttcttcttgatcaaatcctttagcaactaacctggcctttaatttatccagagatccatctgcattgagcttggttctgaagacccatttactgcccaacacgtgcatatctggagaataaggtacaagagaccatgttcctgcttcttgacagtttccatactcttcatgcatcgctttattccatccttcatcttttaaggcagaagttactgtttttggttcaggatatttgactctcgaagtaagaagagcatacttgggatttagttttctaattcccacctgagatcttgtaaccatgtgatgtctttgagactgtctaacagatgatacagtaggtactgataatcctctattttctgtagttgtttctgttgttgttgctgatgactgacttgttgtagctgtttctgttgttgcagatgtcactacatttgccaagctaggtgatgatactaaagagctgttgcgtataggaacaggatcaatgcctg

SEQ ID NO: 4726 - DNA, 358 bp, Arabidopsis thaliana
  unsure (1)..(358): unsure at all n locations
nnnnnnnnnnnnnnnnnnnnnnnctaaagtatattcgttaatcgggaagcccaacgtcacgtctgtaccataactcttgttggtatagtcggacaggtcggcgtcatctgcctggaagtcattatagaagagacgaccaccgaggcttacgccatctacggtgaagtacgggttggttaccgacagttcagcataggtctggtaatcgtttttggtcccgttgataccaacagcataacctgtacctaaccagttatcctgctgcacaccagcctggaagctcacgccactttcagtaccgtaaccaataccaaagttgaagctaccggtgttgcgctcttttaccttgtagacgaca

SEQ ID NO: 4727 - DNA, 603 bp, Arabidopsis thaliana
  unsure (1)..(603): unsure at all n locations
nnnnnnnnnnnnnnnnnnnctaaagactggtgagacagggcggattgcgtctgatgcaacgtcgccgcagcggctgcgagcgagccgcagttccgcaacgcttgtagcgttttcaggtgttttacttcgatcatgaaagtccttcacttcggcatgaataatttgcgcttgaggaatatacagtaaccgccaattatggatgtgtaaacatctggacggctaaaatccttcgtcttttaaatttatggtgcgttggctgcgtttctccaccccggtcacttacttcagtaagctcccggggatgaataaacttgccgccttccctaaattcaaaatccataggatttacatataattagaggaagaaaaaatgacaatattgaatcacaccctcggtttccctcgcgttggcctgcgtcgcgagctgaaaaaagcgcaagaaagttattgggcggggaactccacgcgtgaagaactgctggcggtagggcgtgaattgcgtgctcgtcactgggatcaacaaaagcaagcgggtatcgacctgctgccggtgggcgattttgcatggtacgatcatgtactgaccaccagtctgctgctggg

SEQ ID NO: 4728 - DNA, 373 bp, Arabidopsis thaliana
agtgtgctctaaagcggatgtgacgaacgtcgcggaaacgtcgctgaccgtaccggggattaaatacgttatcgaccccggtacagcgcgtatcagccgctacagctatcgcaccaaagtgcagcgtttgccgattgagccgatttcccaggcgtctgccaatcagcgtaaaaggccgctgtgctcgtgtgtccgaagggatctgtattcgtctcaattccgaagacgatttcctctcgcgcccggagtttaccgatccggtgattctgcgtaccaacctggcctcggttatattgcagatgaccgcgctgatgctcggcgatatcgctgcgttccgtttgtcgaagcatcggatacatgcaatatccaggat

SEQ ID NO: 4729 - DNA, 540 bp, Arabidopsis thaliana
  unsure (1)..(540): unsure at all n locations
nnnnnnnnnnnnnnnnnnnnnnttaaagccagcttccgccagatcggtttcgatacgttccagaccgaggtggcccagcactttaccgactttcgcgttgcgggttttgccttcgctatcgatgatagtgacctgctggttcggcttcactttaccgcgcttgatgcggccaatgccgataacgccaacatagctgttgtaatcgagctgagaaatctgcatctggaacggaccgtcaaggtcaacgtccggcgcaggaacgtggtcaacaatcgcctggtacagcggggtcatgtcttccgccatatcttcgtggtccagacccgcgataccgttcagcgcagaagcgtaaacgatcgggaagtccagctgctcgtcggtcgcgtcgaggttaacgaacagatcgaatacctgatccacaacccaatcaggacgcgcgccagggcggtcaactttgttgataacaacaatcggcttcaggccgtaagcaaacgcttttttggttacgaagcgcgtttgcggcatcgggccgtcaaatgc

SEQ ID NO: 4730 - DNA, 584 bp, Arabidopsis thaliana
ggttgttggagtagcgttgcgccatgacaaggaggcgacaaggttacataatgtcggcattatgtctgagtttttgctagtgtcgatggcttttgtctcactctggcggatgatttctcggagacgcattgcaaagttgttggtcttctctagagggattgatgggtgaatgagaagaccagcttcaaggactttgagttgccgtctttgccaaatttgatactcatgtacatcaccaaactccgatggtttcacgtgacggagaagctctaacggaaggattattgtctctgctcgcctaccggtctaaaaaataacagttataaacattttattaattaatcaagaaacagagtttcattcacaatttaaaaacagagcaacttacttggccaacaagcgtcctcattagggttttccgtagccgagtgtcactctgttctgtcaccttcatttgctgcctcatgatttctgcagaggttaacggtcgtcgaggccgagcaggcgggactgtaaaaaaccagccccagggctaaagtgtcctgaacgacttcctatgcttccattattacgtggggatgaag

SEQ ID NO: 4731 - DNA, 464 bp, Arabidopsis thaliana
gtgtgctctaaaggctgtagctccagcagtagttcgatgatttgcgcctgaatggtcacgtccagcgcggtggtcggttcatcggcaatcagcagttttggccgacacgaatcgccatggcgatcatcacgcgctggctcatgccgccggaaagctgatgcgggtaaacatccagacgcgatgccggatcgggaataccgacctgattcagcaggtcaatcgctcgctgacggcgggtacttttgttgccgccctgatgcaccttaatcgcttccataatctggaaacccatggtgtagcacgggttaaggctggtcatagggtcctggaagatcatcgccacttcggcacccaccaggttgcggcgctctttttctgagatacgctgcaaatcctggccgttaactccagtttttctgccattacgcggcccggataatcaatcagccccataatcgccagtg

SEQ ID NO: 4732 - DNA, 753 bp, Arabidopsis thaliana
tgtaaggataccccacaacacatgcatgaagcacaaaaaacaagtacttgaacctctccactccagtattatccttttctatctccatggcgacaaaggagttgggatttgtctctaaaagcttcttgaagtagggttggattagtgtgtaactccccatagctgacctcattgcagtggtcaatagcgatttctcttgccctccacgccttccaataatagacgttgaggctgaactcttgccgtaacatccttctcagcacattaggtctaggtccccggcctactccaatatatttcgttctcatcaacttccctataacagccgttgaagcttgcttatggaagtctcctctagcatctacgctacatgtgtgggttgaagttgtgctcctaacctcgaaacgatcgctatccggtaactcgccaaggacatgtatcgctgacacagacagccgccaccacattagatgaaatggaacttccgatgaatcgcatgaattgctagtttcgttgcacaatcttctttgtttttaccttcctcccctgggtcgtcgaaataagatggggcatctctgtcatacaagactgttgcaaccggtgtatccttcacgatcattgcatttctctgtaactccgtaacccttggattatttgaacttgatccaatctccttagagggtaacacgtcttctatcattattgttttcctttatatccattgtgatgggttgaggctccataacgagtggg

SEQ ID NO: 4733 - DNA, 508 bp, Arabidopsis thaliana
  unsure (1)..(508): unsure at all n locations
ggagcttttgtgatctggtggattttctgatgaagaagtgttgttgctcgaacgacggttctctggattagctgcaggagggtcttcgccttgcgctgcaaggttcttgataaggttcattactgtgggaacaaactttgcggatatcgatatgagccctggaagctgaagaaaccacaggtagtatagatcatatgagtattattatcaagaattcttgagtcttgaagttttctcgagtccatgattcttgaaacgctactactactttaatgggatttgagaaggttggcaaacacttactgcaccattgcggaattcgccagggatatccaattgcgtccacagtgcttttgccagaaggaaagcgacaaacatgacaccaagatagagagggtttctgttacatcaaaaaggtaaagaaatcagaatgttacatatcatcattggatatgaagcagtgaatactaagctttgatggaccttanaagagtcatgaattcgttga

SEQ ID NO: 4734 - DNA, 494 bp, Arabidopsis thaliana
  unsure (1)..(494): unsure at all n locations
nnnnnnnnnnnnnnnnnnnnnnctaaaggcgaatggaccagttcacttaacgccacgcaggcatcgattgccggataaacgccgtacagatcgaaatcgtcggctgaaggaatcgcttcttcaaatttctccagttggctgtcgaaatttacttttgcgtctttaacggtcagcgtttcccagatgagatcgagaatgcgacggtaaatttgcccatcaccaaaaccggtttgctggcagaacatggcgtaattggggtacatgcgttcgcataagcaagccatgaaagtgacatgctgccagctttccaggcgctccagacgcagatgaattgggttttgtaacatgttgagttctcaaatacggaaattatccgcagtttacctgaattagggctgatttgctgtatagcgcacgaacgccggacgttccgaggccaccgcgtccgcccagcgcgttggctccggcagacgatagcctttcatgcagcgttg

SEQ ID NO: 4735 - DNA, 556 bp, Arabidopsis thaliana
tatggatattattgatcgatcacacaattcatgttgtttctttcactatcaagtttctcttcaaaataacacaaattaataataataaaaagcggtaatagatgaaaatacaatataagatcgagatatggttgtcggaaaaatgtcagcacaaaatagtatttgaaccaaaaatagaaaaaataaaactttggatcgctagtttttatagtttgtatagcctttgaacaaagagtttttctcaagttcactacgagtcaaacacttgaaccaaaatagattatatgcttttactattccaacataactcaaccgtagtagtaggcatacacgcattacacacaccaacacatatatatatatctcttttctcttacataaagacggacccgttcattatttattgcagtttcaaagacttgcttaagtttcaaagacccacacacagacgaggagtatttttctattcctcggccaagagatgttcgtcgatctctttggagatctcgacacagaattggagaagggtttcgggatgagctacctctcgctaatt

SEQ ID NO: 4736 - DNA, 1030 bp, Arabidopsis thaliana
aatataccggactctcaaagagtatttggtgaaattgtagataggaggaatttggtgtcttggacttcaatgatgattgggtatggatcacatggttatggagcagaagctgttgagctttttgataaaatggttagttcgggtattagacctgaccggattgtgttcatggcggttttaagtgcgtgtcgccatgctggtttagtggagaaaggattgaagtactttaatgtgatggaaagtgagtatggtataaatccagatcgagatatctacaactgtgtggtggatttgcttggaagagctgggaaaataggtgaggcttatgaattagttgagagaatgccgtttaagccagacgaatccacgtggggagcgattcttggggcttgtaaagcgcataagcacaatggattgataagtagattagctgcaagaaaagttatggagttgaaaccaaaaatggtggggacttatgtgatgctttcatacatctatgcagcagaagggaagtgggtcgatttcgcgagagtgaggaagatgatgaggatgatggggaacaaaaaagaagccggtatgagctggatcctggtggaaaatcaagtttttagctttgccgttagcgataaaatgtgtcctaatgcgagttccgtgtattcagtcttggggttactgatagaagagactagagaagctggatatgttcctgaattagactccttagttaatgatcaagaagtcggaacttgaacatgaaccacatagattaagttatatttgcactctgctaccgtttgtggttaagttatcggttagattgatgacgcaagaaacaactaacaaagatcaagtgagtaaagatgaatgacagcagaggattttgaagagcacagaatctgacagacaatatctggacaaatctcttttaggtatggctctatttatacatatagtattgtagactgtcctactagataaagaacatacatcacgatacctcgatttagatcaggtaatggataagtttagt

SEQ ID NO: 4737 - DNA, 908 bp, Arabidopsis thaliana
ccccaaatcaagtccccataaagcagcaagctccaacgccgatggacaaccggaaaaaccttccacggcggatcgaacatgagcatcggaaactgaacaacttccgtgaacatcccaatcacactcctgacacaaaatcagattatcggtgaaacaccgaacagagactggctcgttaccgcaattatcgcagatctgagatcgcacgtgcttcctcgacaacagattcgccgtgtgaacttgctgatcacaaggcaaacacagcttcgccgtatcggctctacaaaacaaaaccgccgtacgctcgccgcagaaatcgcacggtactctctccgaactactcataactgactctctctcaaaatccctaaaattcgaaatcaaaatcagaatttattttcagagactaaggacggtgagaagaatgatgacaaatccatttctcacgtttttcattttgaactctttttttttttggggggctttgtcaaaattatctgcaaatcttttggaatgaagaagacaacgaagctaattattgtaaacagtttggggttagggatttgtttttctgtgttgcgatgtatggaacttgtgtatgatggattgttcagattgagatatgttgagatctgacggtgtaaaagcgtgctgagagagtcgccattgttcagacggcgaagcttacgttgactgtgacagagaatctaagagaaaatatctaatctgctttttcacctaaatatctattttaacgtataaagggaaagttagttcaaagcacatgatttttatgggattaattctttccgtatatagcaataactttttgatcagtgtaataacggctggaatcgtctttttctggaactagtatttacgaacattgcagcgtaatgtatagcata

SEQ ID NO: 4738 - DNA, 493 bp, Arabidopsis thaliana columbia
aggctcgacttgtagcaaagggttatgtgcagaaatatggagtcgactttgaggaagtgtttgctcctgtagcccggattgaaacaatgcgtctccttgtcaaccttgcagcgtcgaatggttgggagatacatcatcttgatgttaagacagccttccttcatggtgagttaaaggaaactgtttatgtcactcaaccggaggaattcaaggagaaaggtcatgaagataaagtctacaaactcaacaaagcgttgtatggtttacggcaagcaccaagggcatggaacaataagttgaatcgagttcttaaaaagcttaaatttgaaaaatgttattaagaaccatcggttaatcgtaaggtaatgagtgagaatattactcttttagtggctgtgtatgtagatgatctctttgttacgagaacaatcaccaagatcattgatgattttaaaagagagatgtcatccaagtttgagatgagtgaccttgg

SEQ ID NO: 4739 - DNA, 527 bp, Arabidopsis thaliana columbia
tgtcgtagttgcttctcaaaatcagacatggtaatagcagaatatagtgaatcggctaccgcgtcaacgtcccaaggattaaccctaatcgcaccacttagagaaggcgagcaaccaatgaactcggacagaacaagggtgcttgtgcgaggcaaatcatcacttactcccaaagacttattcatactaggagttccctgccgacaaacagtgtacttgtacggagctaagttcatcccatccctcactgcattgactatgcagcattctgccagggcataataggcagacttctcaaaccgaggaacagggcgatcaatcagaaccactggctcataatcatgtgaaccataacgctcgttgattcttttaagagtatcatacgtttctttcctcgcttcctgaacgtctttacctgagcctctggctggggtcacaatgtgaataagaactattttccctagcatgctaggatattgctgaaggaggtgtcaggagccaaaattttaagacttaaacctttgaat

SEQ ID NO: 4740 - DNA, 537 bp, Arabidopsis thaliana columbia
tagtaacggccgccagagtgctctaaagtaagaacttcttcaccaactttgatgataccgcgttctacacgaccggtaacaacggtaccacgaccggagatggagaatacgtcttcgatcggcagcaggaacggcttgtcaatcgcacgctctggttccggaatataagaatccagggaagccagccagttccaggattttcgcttcccactctgcgtcgccttccagcgctttcagagcagaaccacgaacgatcggagtgtcgtcgcccgggaagtcgtactgagacagaagttcacgaacttccatttcaaccagttccagcagctcttcgtcatcaaccatgtcgcatttgttcaggaacacgatgatgtacggaacgcctacctgacgacccagcaggatgtgctcacgagtctgcggcatcgggccgtcagtcgcagcaactaccaggatcgcgccgtccatctgagcagcaccggtgatcatgtttttaacatagtcggcgtgcccgggcagtctacgtgtgcgtagtga

SEQ ID NO: 4741 - DNA, 595 bp, Arabidopsis thaliana
gaaatagtaaattgcaagattgttttgccctttttacagttggatgttatatgacgaaggaatgcatttattaaaaatatgttgttgttttttttttatcaaaggcgatttaaattatcaaaaaggtcaaacaagggaagccccgagacaggggttagagtctggacaagctaataaggcacactttgccaaaacatcggctaaaacatttgtcgtacgaggaatgaaggaaaacgaaactgcagaaaactcaaactgtaggtgtcgaatatcatgcagtagtcccaccagttcgtttgtaaccatacccgaaagaaggaggtcaatgagggtcttcgagtctgatttgactagaaccgaagaaaaaccacgggagaaagcatagttaagtccagctaaaatagcgagagttccgcctgaagagctgatgccacgaaacactccgacgtcgaatctttgaagcagagggatccggagctgtctctacctacccagccaagtccacatttcaaggaaacagctttccacgccgcatcggtttcaaaataagatcgaagattggtctcctgggggccgaaaggtgaagaggtagtgc

SEQ ID NO: 4742 - DNA, 1273 bp, Arabidopsis thaliana
aataatatgttttaccttctcttgtattaactctcatactttaaatcgcttgaaacatacccaaaatattttgttgctggaataaaaccatgattattatagaatataggggtgggcatttcggtttaacattgggttcagtttggattcggtttcccttctcttggtttatttgggtttcgtaaaactctaaccatacacaaccgtagttagtttggtttgctttgtgtttgggtcagttttagttcggttcgatttggttttagttcggttcaaaaaattaattaatgtatcaaattctatgtttaaattgcataattcaaacaataccaaaaaagcaaaacctataaaaactcaacctataaatatttagagttatttacaatatttttaatattgtaaaactaggtacaaggtatagaatgttttctgatttattcatgaatcgagtacaatgtttatatacacagagagtctttctctccaagtctaactttctctccaagttaaatttaccaaaaaacccacatgagaatatttacaagatatacacacgatattcttttggctaaccccccccccccctcaagttggagcatatggattgtaaatgcccaacttgaccacgattgactcgaactcacgtcgtcccaatgccttagtaaacacatcagctaactgatccgtagtatgaactttccgagtacgaatcgttccattcatgatctcatcccggactccaggacaatctatttcaacgtgttttgttctttcatgaaaaacaggatttgcagctatgtacaatgctgcttggttgtcacaatgtgaatctatgggcttggtttgattcactcccaagtctttgagcaatgctttcaaccattttaactcacatacagttaaagccatggatcgatactctgattcagccgatgaacgagaaaccacatcttgtttctttgctttccacaaaactggtgagtctccaagtgttataaaccagcctccgacagaccttctactcacagcgcatcccgcccaatcagcgtcacaccaacctgccaacttcaaatttgaatctgacttcaagagtataccttgtcctagtgttcctttcaaataccgaacgacccgcaaagcactatcccaatgatctgttcttggggctttcatgaactgtgatagagtgttcacagcatatgctaaatcaggtcgtgtcgccaacagtagatcaacgcccacaagtcttcgaacgctctggataatcatgagt

SEQ ID NO: 4743 - DNA, 501 bp, Arabidopsis thaliana
  unsure (1)..(501): unsure at all n locations
nnnnnnnnnnnnnnnnnnnnnnnctaaagcaaaactgaaattccggctgcatcgggcagtgattgtcctgttctgtcttgccttgttagtggcgctgatgcagggagcgtcatggtgtagtcaaaaccaccagcgacaggtnaatccacagctggaagaactggcccgcaccctggcgcgtcaggtgacgctgaacgttgcagcgctgatgcgtaccgactcaccggatgagcaacgcattcaggcgatcctcgatcagttaacggatgacagccggatcctcgacgcgggtgtgcatgacgaacaaggcgatcttataggacgttctggcgaaacgtctgcagtgcgcgaccggctggcgctcgacggtaaaaaagcaggcggctatgttaaccagcagattgtcgagcgaattgcgggtcgaaacggaccgctcggcgtatctgcgcctgacactcgacgcccatacgctcgcgaccgaagcccaacaggtggataaca

SEQ ID NO: 4744 - DNA, 500 bp, Arabidopsis thaliana columbia
ggttcacctcccggttaagttactgtcgatgatttgatctagcagacccgtttttctgccacgccattgcccattccgctatgttcacttgttctctaggtagtaccgggtttaaagccggtctacaacagagtgcttccattagtacaacaccaaacgagtgaacgtctgatttctctgttaactgctgtctcctgaagtattccgggtctagataaccaaagcttcctttaaccgccgtgctcacgtgtgtttgatcgagcgaagggccggttttggatagtccaaagtctgcaactttggcgactagattctcgtcgagtaagatattcgtggttttaacatcacggtgtataatgctctgcgatgcaccggtgtgtagataatgtaatcctctcgctgcaccgatgcaaatctcgagtctttgtttccaagacaatggaggaagatcagctccatatagatgactcctcaacggtccattcgccatgtactcatag

SEQ ID NO: 4745 - DNA, 574 bp, Arabidopsis thaliana
  unsure (1)..(574): unsure at all n locations
nnnnnnnnnnnnnnnnnnnnnnctaaagcgcgccgggttgagcattgccgccaacgccgccagacgccatccacagcatcaggatcaccgctaacgcgccaatgagcagcattatcgcttgcgacaatgcggtcagttcagattgacggcgttgcgcttccagccattgaatttctgtattctctagttgcgtgcgataacgatcgctggcaccaaaaatggtcagctcagcttgcccttgcagccaggccgtcagttgttggcgatactgtccgcgaagatgagtcagattttgcccggtgctttttcccgcacgataaaacagcggtggcatcaggaaaagcgtcagtaacataatgccgcccagcgtaaaggcgagggtgaaatcaaggaaacttaacccgattgtcaccaccataatcaccacaaaagcgcccacagcggcgagatactcgcaggtaaagatgatcgagcgttcaacaatccgccacacgcgattgacaattcgcctgacgatagcgcgcagtcgggaggggagaggggcacaatttgctgaaggtgtaattcgcagatg

SEQ ID NO: 4746 - DNA, 606 bp, Arabidopsis thaliana
  unsure (1)..(606): unsure at all n locations
ctnnnnnnnnnnnnnnnnnnnnnnnctaaagggaagcaggcgtttgcgatggcgcatttcaatccggacatcgccaaagagaatatccgcgcggtcttctcctggcagatccagcctggcgatacgtggcgtccgcaggatcgtgggctttgtccccgacctgatagcgtggaaaccttagccccgagcgtggtggcgatggcggcaactggaacgaacgtaataccaaacccagccttgccgcctggtcggtgatggaagtgtataacgtcacccaagataaaacctgggtggcagagatgtacccgaaactggtggcctatcacgactggtggttacgtaaccgcgatcacaacggcaacggcgtgccggacatatggcgcgacccgcgacaaagcccacaacactgagagcggcgagatgctgtttacggtgaaaaaaggcgataaagaagagacgcagtctgggctgaacaactacgcccgcgtggtggagaaaggccagtacgacagtctggaaattccggcacaggttgctgcatcgtgggaatcggggcgtgatgatgccccgtctttgggtttatcgcaaagaacagttggataatat

SEQ ID NO: 4747 - DNA, 619 bp, Arabidopsis thaliana
  unsure (1)..(619): unsure at all n locations
ccaagaaacagatcgatcgatccccactaagacattgtctgatacttttttcccatacatcgtggatccattccctcttcgaccaaacttccacaggttcaaaccaaaccggaaatcacagagttcggtttacaactcaagaacctaaattaaaaggatcctaaaaccagagacaaatagataagcaaaactgaaccgttgaccctgtcaaaaatacgtaagttcagcattaccgatccggttattatattattcgacccggtccgagattatttttgttcataaagtggaaccgtcctcactctatccctcagcttaatccgccgtcgttggttcaaacgacgtgcgtattgatcttcgctgattggatctttataatccgtacaaactcccggagctcttggcctatcaatgtctgggattgatggagctatccaaaccagctgctctgttacgcacctctggaaccacggcgataagcaaaggcgtcgaattgactcatcacgggaacttcattactttgctgttattccaagcaaaggattgtgaaaaagtatgaattttctcattatagtacatgcaggagttatgtnttctgtgctgaaaaaaataacatttt

SEQ ID NO: 4748 - DNA, 519 bp, Arabidopsis thaliana
cacaattttctgttctaaaaactgacaactaataaaaatttagaattcgtaccagagttccttcccacagtttctcaagcttactatacttcattatgaggttaactagatattccgccttaaaagtagatggcaaagacttcaatggacaatcatcccagtctagcaatctgagtttaaggggcaaataaacgaggctctgaggttgacccccatctgaccaatcaccaatttttagatattggagattacgcatgcctttgaacgattctttatctattaataacggccttgtcgaaaaatattcctcgaatggcaaacgtattccaagaagagtttctgtcccctgaaaaaaaatccgaagaaaactaatataatcttaacaatcacaaccctatctatttttctgacacatcaaagctacattttaattacgaatgaggctacaattgcttaagtttatcaatcccaaatgacgattaaactaatataaagtcatgcattaaaacggagctgcga

SEQ ID NO: 4749 - DNA, 577 bp, Arabidopsis thaliana
tagtaacgtacgccagtgtgctctaaaggtatgtttatagttttccatcattttatagagacaagtcctgcagtcgctccgataagtctccggtagccaactgctctgcgtcgatatcttccttgacctgttgatgccaggttgtttcatcccacagctcaaacttgttgaactgtccaaccagcatcacttcttttgtcagcccggcatgttgccgcagtactggcgcgattaacaatcgacctgcgccatccatctgacattcgctggcatgacctaacagtaggcgctgcacacggcgctcaaccgggttcatgctcgacagacgcgataatttttgctcgataatttcccattcaggcagggggtaaagcagcaggcacgggtgatgaatgtcaatggtgcaaaccatttgaccggcagcgttctcaagcagctgttccaggtaacgggtaggcactgataagcgccctttgctgtcgagattgactaacgttgctcccggaacatgccagcctcaccccttatcccactttgcccacaatttccactgaaaggagtttacggagcggaggaa

SEQ ID NO: 4750 - DNA, 601 bp, Arabidopsis thaliana
tgcttattacagaggtgcttttggtgctctcatcgtttatgacatcactcgaggtgacactttcgaaagcgttaaacgttggctccaggaactcaacagtaagtcttcttcccttctcactcttttctctgaggaaatctgttgatgtcgttgagcaccattgatggattctataaatgactaaggtgctcttattctctctctgttttggaacaatcttttggagtttgtgaatccaaacacttagaattgatcaccattagtggattctgctgctatgaatctgggtcattcttcattgattctatttttagcttgaggcagtgagaggtgattggtttcactgagctgagaagatactctgttttgttcctcaagtttaagattatttgtttgtgaattcaagacaaatccctaacactttgttttgttactcgcaagctcattgtgacacggcagtgcacaaatgctagttgggaatacatgcgatttggaggatataagagcggtgagtgtggaggaagggaaagctcttgcggaggaagagggattgtctttatggaacatctggtctggacgcacaaatgtagcaaagctttga

SEQ ID NO: 4751 - DNA, 578 bp, Arabidopsis thaliana
  unsure (1)..(578): unsure at all n locations
nnnnnnnnnnnnnnnnnnnnnnctaaaggccgatcacctggccgattggctgcggcaagctgtttaaaggcgtttaccacctttataaagacgaaacctatctctatcagagcggtaaaggccacaccattcaggaagtccgcattgttaaagggctgaataacccggatctcgatgctgcggttggtgaagatctggcacagcagctgcgtgacgaactggaactggtgaaaggcgcgtctaacgagttcgacaaagagctgttccttgcgggcgaaatcactccggtattcttcggtactgcgctgggtaacttcggcgtcgatcatatgttggatggcctggtggagtgggcactgcgccgatgccgcgtcagactgatacccgtaccgtagaagcgagcgaagataaatttaccggcttcgtatttaaaattcaggccaacatggacccgaaacaccgcgaccgcgtggcgtttatgcgtgtggtgccggtaaatataaaaaggcatgaactgcccaggtgccgactcgaaagatgtggtgatcttgacgcgctgacatttatggcgggtgacg

SEQ ID NO: 4752 - DNA, 532 bp, Arabidopsis thaliana
taacgaaacatcattttgttatttttcttttaaaaaatacttttatgtaaaatatatgtaattcgagttaatttaaaattttcattctaaataattaaaacttagggaaaaacaaataaaatgttacactttgagctatttttatactatcattaatttatggtaagtattttctgcttttgtataaattaggcaagatccaactcacttaatttcgggtcaaaatcaaataaaaactgactcaattagattcgttaaaatatactttaaaatgttaatatagataggacacttcttaattatccttagcaaaatgcagttgtaacttgtttacacttcttaaaacatattggctgcagtttaagacaattgtgaaagccaactttgattttgcaaaattggcacacacgggtcacgtgcctagttttaaggagtacatggaagttggtgaggtggaggttggggtatgtgcgactttggcaggcaatctgatgtgtatcggacatatcggtgatgagggagtttatgagtg

SEQ ID NO: 4753 - DNA, 483 bp, Arabidopsis thaliana columbia
gcacttgatggtgttggagaaagttaggtactccttgcatcttggaacgggacatttcttcttctttgtagctttttcgtagtttgatgggtcacagtcggtattgacatgtttctcccatgttatatttgggtcttcgtttgggtttaatcggactcctttagcacagagtgggcagataactacagtcacatcttctctatcgccttttggacaactatgtttcatatagcttcgatgatccaaacaaaacacctgtaaaaatttccaatgtaagacttttcctccaaaccaaggaaacattttgacactaaagattcagagaaaaccagagcgctaactcaaaaacaaaattcaaatcgtcaacagtcaatggatctagcagaaacatgagaacagacaaccgaaccaagagagcagacacgaatcattgttctcttgaatcaagaaagcagtcaagaatcatcacattagttacgagca

SEQ ID NO: 4754 - DNA, 459 bp, Arabidopsis thaliana
aaagatgcttgacgctcaaaccatcgctacagtaaaagccaccatccctttactggtggaaacggggccaaagttaaccgcccatttctacgaccgtatgtttactcataacccagaactcaaagaaatttttaacatgagtaaccagcgtaatggcgatcaacgtgaagccctgtttaacgctattgccgcctacgccagtaatattgaaaacctgcctgcgctgctgccagcggtagaaaaaatcgcgcagaagcacaccagcttccagatcaaaccggaacagtacaacatcgtcggtgaacacatgttggcaacgctggacgacatgttcagcccggggcaggaagtgctggacgaatggggtacaagcctatggtgtactggctaatgtatttatcaatcgcgaggcggaaatctataacgaaaacgccagcaaagccggtggttgggaaggta

SEQ ID NO: 4755 - DNA, 550 bp, Arabidopsis thaliana columbia
catctgtagtgcgtgctttttaggtttccatcttccttttgttgccttcttctagattttaagcaccttctactgttgtttagtacttgggactccacaatttttcaccgtgcctgaccttgtaattcagctttctgagacatctaatttttgtttctcatgtttgattttgtagcatttggctcctgtgggaagcagcatagcacaacctaaggattacaatgacgatcaggaagaagaagaagcagaagaacgtttcatgaatgcagactccattgctgcttttgctaaaccgcttcaaagaaaagagaagaaagacatggacctcgggaggtggaaagatatggtctctggggatgatcctgcatccacacatgtccctcagcaatcaaggaaacttaagatcattgaaacgagaccgccctatgttgcttcagccgatgcggccactacatccagcaacactttactggctgccagggcatcagaccagagagagtttgtttctgataaagcaccgtttattaaaaatttgggaaccaggaaaggg

SEQ ID NO: 4756 - DNA, 592 bp, Arabidopsis thaliana
agatcaatatcctcgagctgagggcacaacttcccgatggctgcaagatttgcatcaccaaagccagggcagttacgaatagacaaagagcgcagagcgctgcaatgagatgaagcaggcaatcctgtggtgagatctctaatactcaaacagttcaccagagagaaagccttcaacttttcaccacagttcaaaagggaaccaaaaaacccaaattgggtaaccctgtggcattcttcaagctgaagactctcaagtgataaagaagcttttgcaaaagagaccaacccgttgtcagataacaaaggggatttactgatgatcgcctttttcatgttcgggcagccctttccaacagattcaagccccatgtcagtcactccttggcaggctgtgatggtcagagagtttaatttttgcagcccgacaccatttcccatgacccagaatcccttctcgctcacgtgtgataatccagcgagcacaagatcagtgatcgacaagccgtaatgacccacaacagcaagagacacatcagtgacattcagcatctgaagcttaagttttgccaaggaacaggtggtgttagaca

SEQ ID NO: 4757 - DNA, 616 bp, Arabidopsis thaliana columbia
ctccaacttcgacattccgtggtcctgaagaattattaatccggcactcaataaacgatagcttcagtcccgcagaaggacatagcccagcactagatgtaagcaaaggtgactccatgagctccacaaacgatcttcaaatgcattcacgatctaacagcaccgtgcatttttagtcgtgggctcgggttcacatagagagaaatcataacctggggcacaggttaccatagatcatccaatgtcctagattcgtctgatcgatggtggactatgccctctttcttctctttttttttgcaggattattacagaacataaataaatggcagaatcatcagcaaaaatgaaaaaaaacgagtggtgcatatgtagaagatgtttcttcgcggtatttttgactgcacccattgttttcttcagtatttaggttttgtaacgttgtcctgtgttaagatttgcacagacatacccaacttctgtatctttttttttacattgtttgtacttaggatcaagtataaaaatgggaagaaattgttgtccatggatgtaatcaaaacatttgtagggatcatatcatcgtattattctatatatatgataatgatagtgt

SEQ ID NO: 4758 - DNA, 497 bp, Arabidopsis thaliana columbia
tcgactatagttatatatgaaactatatgtatcttagaaagttatacctgacaaagaattcaatgtgttgaaacaagcgtgaacagaggaaatgctaacatcaccgtcgttgccgccggaaaattccatcttaaatgttttgttttgttaaataaaaaaaagactagagtttttgaggaacttacttacacatcatgacttgtgttggtgtcagtgagagtgagtgtatgtatatatggaccaagtagataaaccggaaattggtttttgaaccggtttaaatgtgaaacccgtttggatttttgttttgtttttttatctcatcttcttcttcagaaaaacacaagataacagaattgccaccaaagctccatttttatcccacacagaagaagcttggggaatgagaagataagagctctcaaaattccccgaatttcgaatatgattgtaacactaaaccctaagattctccatttctccaaaatccatccttt

SEQ ID NO: 4759 - DNA, 431 bp, Arabidopsis thaliana columbia
ctttgtgtaatgaaggcatggacgaagaagcatcccgacttgaaaaattgttaccatttcatgaggatcggttgataccttttagacgcttcgagttcaccaagtgtaaaggatgctactcgaccgatgaagataatacaagcttcatttccaaacatcccggttgcagttacatttacggaggacaccgatgcaatgagccgggatgtgatgttgtgttccatgaagagtgcgccaagccgttaccagaaatcgaccacccttaccatccagtccatcctctcaagctgatcctcctacataccagagtttctaattgtagtttctgtggagaatttttcagtgtcggttatcgctgtaacaaaatgtgatttccagttggatttgatttgcgcgaggagaccagcccgtacttgttcttgctgaaaact

SEQ ID NO: 4760 - DNA, 1193 bp, Arabidopsis thaliana
cgagcagcaccgcggtggtttcttggcccgcgaagtgaaacagcctgcactcttctaccacatcttcgatactcataccatgatctccagaattcgattccaaaagtattcctaacagatcattctttggagcctcccctgtatccatacccctctgtcttttcatgatgatctctctcagtctagatttcacttctttgttaatttgtctcatcctcaaattgttctttgttggtagaaacctaaacaatgagaagaagcatatgatctttccatatttataaaagcgaaagaacactaaagaccgtttacctcattccagggataaaagccaactcaagagcttttaacactcgccggccttgttcttcttgaagctcaaagattctcttaccttcctcgtagctactaccaaatgcagtacgtgaaattacatctgatgttaaatctccaagatatggccaaacatcgatctcattcgatgatccttgctcggtcaccaacttctcccatttacttatcatctcgctgcagctctcgtagaatgcaggtatcataatctacaaaataaagaaaaaagcaaacaatcagataaggattggtaaaaagtgtgaaaccataagaactgatgtaagtaagaccttgagcttttcaagatgaaaagaagggtttataatcttcctgtgcttagaccatttctctccttcatacagcgcgactccagtcgcgaagagctcaacgattgggtgcactggcggcttcgggaaatcgtaaactctgtttagaacatctttgatgtgttctggtttcgtcacattcacactcgctataggtcccatccacatgtaagatgtcttccttaaacaaaacccacccttagaaccggaggttattaccattaaccaacgcataaattagaaaaacagaggatatctgttttgagttcagatcaaaccatttcttaccatgatccttaacggtctgttgtatcagaggcatgacacgatgcgtgtaatcatcagttagattgatgggtctggacttttcttgctccaccatactggcttcccttttaatgtctccgacaagaaaggtgaaaggagttccagagagaccttgtctctttagataagcctcatttttctttggtctaagccaagctacattcagacctttccatatccataccgtaa

SEQ ID NO: 4761 - DNA, 574 bp, Arabidopsis thaliana
tcaattatactagttttgaagaacttacaaaaagaacatctaaacgttaattaaatgcatttatactaagctttttttcttcataaagtgcaactatactagtattaggctgattttgtttcttagaaataattatatctgaagaaaattaattaattacgtagcgctaattaagttattaataatagtcgacatgggtttccggacaaatgtcatctgacaaaagttctttgcggaaaggcggaggaagaaaaggaggacgagtacacatgagcaatgcccaattcactccttggaaaaatggatgacgtttcacggccgttgcacctagagatgaccctaaccgtcggctaggatccttggcaagtagctgagagatcagatccttggccgcgcttggaatcgttggttctttcgggaattcgagtgctcgagccacgatattggcaagggttagctcgtggtccattcctttgaacggtgttgttccgtagaacagctcgaacatgaatatccctaatgtccaccagtccactgcactaccatgtccttctcctgccatccacattttacg

SEQ ID NO: 4762 - DNA, 585 bp, Arabidopsis thaliana columbia
tgctacaaaaaacagaatcaattaggtttagaagctaaaacagagtcatcaattagggtttgattgagttttctttaccaaagatgtgacgctcaagatctccgttggccatgaattcgtaaattatagcacggttcctttggccgtaacagttgccaagaagtctaatcacatttggatgattagttgcacgtaacgttgtaacctctgccaagaactcaacatgaccagttggattctgtggattttgaacctttaccgctccatcctaatgaaatcaaaagtttcagactttagaaactgggtttcgattattaagcataaaggacatgacctttgggtctatataccacattaagtcttgagaaatagcagcgatggacttcgccgaagttgcctttgccgagataaaattcgtcccggaagtttatggttccgtttacgagctcacgccatagaaatgattctcacaattatcaggtagaggtggagatactggtaacagagcagcagtcggatctgcaaatgaattacaaaggttaaagattgaacaagatactactttcacttgcaagaatgtgacga

SEQ ID NO: 4763 - DNA, 321 bp, Arabidopsis thaliana
ccccaacaccaacaacaccactaataaacaaccaatcttcttctccaacatgtctctatatcttatactcatatagttacatatagaaatcacacctctatgggttttatataagtaacattcatatatatatcttagaagatctttcaaagtagacttacactcagcttgttccatagtccaataactcccacctgaacggttgaaacacatagagcacttccgggcaactcttaaacagaagtgccacacagacgcaaaccgcagcaatcgccaccattgacaacatagctggtctgtacgctacagacctgcgtgttg

SEQ ID NO: 4764 - DNA, 585 bp, Arabidopsis thaliana columbia
tattagttgtccggattataagtcagctatgaataccaatgcttgggattgtatgacttgtttgaaagcttcttctccatcttgtggctattgttcctctcccattggaaaggtaaaatacttttcgaaaagaccaaaaatatattttgaattcaagatccttacttatatgatgatggcaggaacatcccggggcatgttggatctctgatgattcggttaaggacttatgtcataacgaaaaccggctttggtacacgagaggatgtcctagcaattttggttggtttgctcttcttggattgggactttatatcatcttcttctctcctggaatggggactgttccatggatagttaactcagagatttatccattgagattcagaggaatatgtggaggaatagctgcaactgcaaattggatatcaaatttgattgtggctcaatcttttttgtcattgaccgaagctattgggacttcttggacttttctcatctttggagtgacgcagtcattgctctcgcgtgtgttatggtttgtgttctgagacaaaaggaatgctatggaggagattgagaaga

SEQ ID NO: 4765 - DNA, 545 bp, Arabidopsis thaliana columbia
ggtgaatcgggtgattcatggtcagcatgacagctgtcagttggtgattctgaagagggcaaggatggttcatattcctcctccggtgtaacaaagttgtcatctggatagccttcagattagaaacctcttacacgtccccgctcatatgggtacggtggatcaggaaaaacgacgtaatcctcagaagaagagaaaaaacaatttgatgcaaatcatgaaaatcgctggtcatccacaataaaatccgattaccttacgactgctgacggtgcgactataactgccttctcccaggaacattcttggaaaatctcacccaaccctacattcacccgcccaagaacattgtatcgcagaacgatatggttgatttgtgggatgtaaagatcggtaagactctcgagtctcgacaagacttatgtttctgaggaagaactcctcaaaaccatcaaaggtgatcagttaaaccataaaaacagtttctgataccaatattcatcagtcaaactccaaagtattaacgagtccttgcatttcagaga

SEQ ID NO: 4766 - DNA, 597 bp, Arabidopsis thaliana
  unsure (1)..(597): unsure at all n locations
nnnnnnnnnnnnnnnnnnnnnctaaaggcccaggccaatggctacgcggtgcctgcttttaacattcataacgccgagacgatccaagcgatcctcgaagtgtgcagtgaaatgcgatcgccggtgatcctcgccggaacgccggggacctttaaacacatcgcgctggaagagatctacgccctgtgtagcgcctattccacaacctacaacatgccactggcgctgcatctcgaccaccacgaatcgctggatgatattcgccgtaaagtccacgcaggtgtgcgcagtgcgatgatcgacggcagccacttcccgtttgccgagaacgtgaagctggtgaaatcggttgttgacttctgccactcacaagattgcagcgtggaagcagaactgggccgcctgggcggtgttgaagatgacatgagcgttgacgccgaaagtgcattcctgaccgatccacaagaagctaaacgctttgtcgaactgactggcgtcgacagcctggcggtacggattggtacggcgcacggcttatacagcaaaacgccgaagattgatttccacggctggcggaaattcgtgaagtggtggatg

SEQ ID NO: 4767 - DNA, 553 bp, Arabidopsis thaliana columbia
atccccattgtgggcacatgattcacccttaatgccctgtcgctcactctttattagctactaccaattaaatctctctttttcttctcttaccattttcacattttcgagttttacaccaaagcctcttcactttctctctctctctactatagtctcctactacctactactacttcttctctctctctttcattcactacataaaaagcttcgagctcccatcactatataccctccaaagatgcaattttcaagaaactcaatccttaggcaactaagccgaaaagaaggttggagatcggcttctaaaaggtggacttccggagatagctcaacagccttcaacgacgacacaagtggtggtggttatcatcaatggagggtctttatggagtttctccggtggagacacggcggcgagaagtaagagagtgatggttgtagttgatgaaagttcgaggtctaagcatgctatgatgtgggctttgactcatttgactaacaaaggagatttagtgactcttcttcatgttgtgcgtcatgatgatga

SEQ ID NO: 4768 - DNA, 522 bp, Arabidopsis thaliana
ctctagtaacggccgtctaaagactggcggacggtctataaccttgaacgcccgcacgaggcgctggatatggcggtaccgggctcgcggtatcagccgtcagcgcggcagtacagcggcaacacaacgcccccggaatacgatgaaggggtgatggtcaggaaagtggatatcagcggaaagctgagcgtgaaaggggtaagtctgagcgcaggcaaggcgttcaggggagaacgggtcgggctgaaggagatgcaggaagacggcagctacgaggtgtggtggtacagcacgaaagtgggggtgatcgacctgaagaaaaagtcgatcaccatgggtaaaggatgtcaaaaagtgttcaccatgtccccgaccaccatgattgtcggcggcaggcaaatattctcattcgccgaacatggtcttctttaacaggaataaaattatgaataaagactctactcaaacttgggggcttaaacgagatatacactgtgtttcggagcacgactggtgcaggaa

SEQ ID NO: 4769 - DNA, 459 bp, Arabidopsis thaliana
tctaaaggggtcagcttaatactgactatcgatttaatccctttaaagccatatttccacggcacaatcagtcgcaccggcgcgccattttgtggcggtaacgcttgccataaacacctacggtcatcagtgtgagcggatgcattgcttcgtcgagacgcaatccttcgacataaggatatttcagcccaccgccgataaagcggtcctgctggcctggcatctgttccggtgcataaattgtttcgaaagcgacatacttcgcattgctggtaggttcggcaagcgccagagatttgtgcagcggaaaaccaatccacggcaccaccatcgaccacgcttccacgcagcgcatacgataaatacgctcttccagcgggaagcgacgggttaagtcatcatgatcgagggtcaatggttttgcacttcgccgctgattttcagtgtccatggatcggt

SEQ ID NO: 4770 - DNA, 1430 bp, Arabidopsis thaliana
ttgggtttatatataaaaatagaagtttaaccaaaatgcaactcgagatgggcttgaatcactttgttaatgattgtggagaagaaatgttgtcgtgtgaagtgatgggacttcaaatgtgtgtcatcattgcgtcatgactgatggcttcttggtttcctttgtcttttaatatgtttatcttcttacatttttatatgtttgtccttgtcacgtatcggtaatgaaacttcaaacttgatataataaacgaataataggtatgaatactaaaatagttagtgaagaaacagtttctaccaacaaaaagtaatgtatcttttcatgagtgttaagtgggcaatgtttagtgcgtttagtcctttttagtctttagagctgtttccttatctcttcctcttaatcaaaattttctaatacgatttattcagagattttaatagagtaaaatgtgacatttcggtattgattgattcatagattaaaaactatataagccttggttccaacttccaacttccaacttagaaatgtgtatatacacacatttgcatcgataataactcaccaacactctctctgtctccatcgaatgtttcctctaactctcaacaaaaatgcgcaaacaatttgtttttcttctgcctttcttgtcacgtctctaccatgtaagtcaaacctaaatcgttcatttgaatccgtttgtttcatttctctataatcgattcacttcagattttattggatttgtttccgtttattcttttgatcatttttgaaatttttgtaacttccaacaatgcaggtagttatagccggaggagaacggttaactaacggcggtttttcaccggagataaatccgttcacacccaaagcgtctttagtacgttactggaacaaacagatccatcaccaatcacccggctcagcctttctcctctccaaggcttcaccacttaccgccgtcgcctccgccaccttcgccaaactcgcctccgaaaacgctcttccggatcgcctccccgacttctgtccgccgcaaacctcttctgttttccagatttaggtccaaccctcgagaaacacagcaacgacgttaaattctctgtttacgaccaacgaaacttcaccaactacggcacgattcaccccggcggtgctgactcgttcaagaaatattcacaaaacggtaacgcagtaaccgactctttccggcgatacagccgagacgccgccggtcacgaagataaattcacaggtacgctgataacagcaacgtcgtcgaggaaaaattcaattcttacggcacatcagccaccggcggctccggcgattttaaaaactatcaatccggtgttaacaatccgacgactcgtttcaaggcctattccgacgaaggaaatggccgtgctcagacgtttaaaacc

SEQ ID NO: 4771 - DNA, 515 bp, Arabidopsis thaliana columbia
tctagtaacgaggatcccccgtggtgtgtgtgtaatcaaataaagactttagattgaaatcaagaggctaaaaactaatgaaataaatatgcatctcttattattaatccactttgtaaaaaccaaataaactatattcacactacacaacatacaaaaagatctataaccctcccatagagtttgtttgtgaccttctaaagaagctagcctttccaaaaccctatctctctttttgtatctaacaacaatttacagagacctatccaaaccaaaacccaaaaaagaacataactaagaacccctcctcttcaattaagaatcttgaagaaaccaagttgtttgattcagtggaatagagccactgagactccggaatcgtccttgttgcggtttatcctcgaaagacggtaccttttctgcaacggagctcccggagcttcaatctcttcatcatcatcctctacatcaaacggtttatccaaccaaatctgccatggtggaaaaccgaggtt

SEQ ID NO: 4772 - DNA, 595 bp, Arabidopsis thaliana
ccatttattagtaaagcttgggaaatgttcgtctgaaattgcgtaatgcgcaacattgaaattacgataaacaatcaatagtggctcgaatcaaatctagacaacgttcgtcgtggcagctttatttggcaaagatgaaggcgaattccgacaaaccggacaagagttatgcaacttgagccacgggtcgatgcattcggtgtggaagcaatgttcacattcgggtaagcacttaacggtctcttcacttgtgtattctgataaacaaatgggacagagagtgtcatttcgccaagggacactcttggcttgttgttggattgggataaaaatgatacagacggcaggagttatcactatgaagaatggtacggataggcataagcataatatctttaacgttattaaccaagggtttcctgaaagatagaaaaaagtctaacatttttaagaaaaattgttctttgatatgttcttgatgaagccaagattttgatttcaagttggggtgtatatgtgagaacttataggacgagagggttaccagaatcaacgtatgtgaagcatttgactttgaggatggtattgtttatga

SEQ ID NO: 4773 - DNA, 552 bp, Arabidopsis thaliana
tgttgaatgtgatcaattattcttgatgaatctcttaattcgaggttctattgctcatctgattagtttttttgtttgtttacttgctcagatcgatttttttttgaagctaaatctcaaaaatggagaacgacgcaggtcaggtcacagagctctacattccaaggaaatggtatatatcagctctctttgttctctgtgtaacgtttgattaaaatcttaagctaattgtcttaattaagtagcctaagctgattctattgttgtgtaatggtaatttgtttagctcggcaacaaacagaatgatcacatcaaaggatcatgcttcagttcagcttaacattggtcatcttgatgctaatggtctctacactggccaattcaccacttttgctctctgcggatttgtccgtgctcaggtttgtgaatttcactctgctaattactttataatcatctccacagttgttataacaaagtttgtgatgaagtcttcttcaggtctcttatctccatgtttagataaagcccgatatcggagacagattatta

SEQ ID NO: 4774 - DNA, 465 bp, Arabidopsis thaliana columbia
  unsure (1)..(465): unsure at all n locations
nnnnnnnnnnnnnnnnnnnnnnctaaagatcgacaactttatggaaggagtaacactatggcttataaacacattctcatcgcggtcgacctctccccggaaagcaaagttctggtagagaaagcagtctctatggctcgcccctacaatgcgaaagtttctctgatccacgtagatgtaaactactctgacctatacaccgggcttattgatgtgaatctgggtgatatgcagaaacgcatctctgaagagacacatcatgcactgaccgagctttccactaatgcaggctacccaatcactgaaaccctgagcggcacggcngacctgggccaggttctggtcgatgcaatcaagaaatacgatatggatttggtggtttgtggtcacaccaggacttctggagcaaactgatgtcttccgcacgtcagctgatcaacaccgttcacgttgatatgctgattg

SEQ ID NO: 4775 - DNA, 564 bp, Arabidopsis thaliana
caccagtcttattatcattgtttacctcaaaagatatatataatggacgtttttacctcagctaattgtttctcagtcatctccactccttctaataggttttttaacagtggagtagcaccagccaaatcttttgaagtgtcgatcttcgaaaaactctctttgacaacagaagaagctctttcaagattatccgccacatccaaaaggctcgttgcaaagttctgcagcacaacaaaacatattcagcactggattatacacaaagcaaaacgagttaatacaagaaagaagaaaaaggattcgcggagtagagaagtaaacctgtacagcgaactttttggcgctttcagcattacggttagtcctgtccataagagtctgtcattagtactcagtgcgaagaaatttatctttcatttccattatgtctttctgctgaaccttcaaaagatcttccttctcactcacaagcttcactaaatcgtctcttgacaaatcgtcgaagtcaatctctgcatctggaactcagaaaaagaaacttcgttcagtattagacacagt

SEQ ID NO: 4776 - DNA, 543 bp, Arabidopsis thaliana columbia
  unsure (1)..(543): unsure at all n locations
nnnnnnnnnnnnnnnnnnnnnnctaaagaacctccaccagcacttcaaaacgctcgcccatcagcaccggcagttcgctcaccttcactggttcaggtagcagaccaccgtcgctggcaatcacatacagcgggcgattgtcgctggtggcgaaattgagcgaacgggcattacagccattgagcaaacgcaggcgcacgaaccacgcggggcagcgtgttgcgggtagattgcaccgttggtcagcaacgtatcgccaaaccagcccacggcggcggtcatcacatccagttgataatcaatctgcccgtcggcgctaaatttcttatcctgaacgatcaccggaacatcatcgataccccactggttttggcagcattaatttcaggatctcgtcatcttcaatcaccaccagcccagccagccccatcgccacctgtcgcccggttttgccgtgctgatgcggatggaacagcaggtagcggcaggttgatcaacgttcaacgtcaccgagcgcttgccactggcggaataattcctgcg

SEQ ID NO: 4777 - DNA, 716 bp, Arabidopsis thaliana
catcaaaccaagcaacattcttctagacagcaagatgaaccctaaagttgcagactttgggatctcaaagctcatagcactagatggtggaggagtgcaaagggatcacgtaactaccatcgtcaaaggcactcctgtatgttgctttaacattcctctgttttaaatcccttagggaaggtgactaattcccgaaacgtatggtacagggatatgtggatccagagtattacttgagccacaggctaacagaaaagagtgacgtatacagcctcggcattgtctttctcgaaattctcacaggaatgcgcccaatctcgcacggaagaaacatcgtgcgggaggtgaatgaagcatgcgatgctgggatgatgatgtcagtgatagacaggagcatggggcagtactctgaggaatgcgtcaagagattcatggaactagccatcagatgttgtcaggacaacccagaagcgcgtccgtggatgctggaaatagtgagggagctggagaatatctatgggctgattccaaaggaagagaagccatattcaagcccttcagtccaatcatctgcttcaggaatgtcagcgttcgctgttgcttctccaagaagcagttatactaccttctctgaattcacagctaaccaactcgtcagcggagtcattccctccatcgcaccgcgctaatgatcatattgttaaatatgtgcagtt

SEQ ID NO: 4778 - DNA, 587 bp, Arabidopsis thaliana columbia
  unsure (1)..(587): unsure at all n locations
gtactcggggccctnnnnnnnnnnnnnnnnnnnnnnnctaaagatctattcgtttaacagctcgaagctggtgacggtgtgggccggctggtcaacgcgctggtatggtgagttattgcgcgatgacgcgatgatgagtgcggttggtttaagtctgacaattgcggcctgtgcggcgacggcggcggcgatcctcggaactattgcggcggtggtgctggtgcgctttggcaggtttcgcggatcaaatggctttgcctttatgatcaccgcgccgctggtaatgccagatgtcatcacgggcttgtcgctgttgtcatcatccgtcgcgcttgctcatgccattggctggcctgcggaccgcggtatgctcaccatctggctggcgcatgtcactttttgtacggcttatgtggcggtcgttatttcttcaagattgcgggaactggatcgctcgatagaagaagcagcgatgcgatctcggtgcgacccgctgaaagtgttttcgtcattacgctacgatgatcatgccgcgatcatttctggctggttactggctttcactttgtcgcttgatgatctggtga

SEQ ID NO: 4779 - DNA, 464 bp, Arabidopsis thaliana columbia
ccataaagtcaattactggttcttcattaggttatgacaagtcatggcaagatacaaagcaaaataatcaactcccataccttgtattgtagcgtttctgccaacgtgggagaagcaatctgaggaaaatatgaaaacaatgactcaattttgagtatttccagcaatgttttaacgagaaaatgctttattctgtagacgacactttgcttaccaagggatgcagatgcagttatgggaaaatcagagagcacaccatcaacagagaagttgccattgtccacaagagatagatactcagagactggatcgaaactgtagtcgtgtgcaatatcgatatcatttgcaaaacctggcgcaaaaacttgtaatcctggtttgtgagcatcttgaacctaggatgtctgaggaagcaagtactgctggtcatcaagtggcaatatgtaagacttggggacacgaat

SEQ ID NO: 4780 - DNA, 679 bp, Arabidopsis thaliana
gtgtcacatccgttctcacatgctctccattttagagactagaaggttatcacatccagattctgctcttgcaaaggtcactctagtttctcttttggtacattttattactaactcagcaccaggaaccacatctttctcaattcattatttacacaatggaattgtatgttaatgcaggttgtttccaatttacctttcaatataagtactgatgttgtgaagcttctacttcctatgggtgatatcttctcaaaagttgttctcttactccaggttaaccattcattacttgtttttagagtattatgatcccaaatgcttatataggcaagtgtgacaaaaaacatttggctaatcttaggacgaggcagcattgcgattggttgaaccagcactgcgaacatctgaataccgtcccatcaacattttgatcaactgctattctggtacgtacttgttccattattgacattttaactctttatatgtattgcaattcgtcaatgtagttttgctcctttgtttcaagaaccggaatacaatttcagagttcctagggaaaacttcttccctcagcccaaggttttgattcttcaaacttgcatcataactatatgttgataccattacatgaatatgatgatgctgctttacaggttgatgctgctgtcgtaac

SEQ ID NO: 4781 - DNA, 407 bp, Arabidopsis thaliana columbia
ttataaccattttcggccttgttacttgcatcaatatcttgaacaacgatagccccaccgcaatggctagaccgttttgaacggataggaaaatgacaccaaagaacgcgcatagcatcaccaagacatcaaatttatcgatcttccatatgtgacaggccgcgggaaggtcgatgagaccaatgaccgcggtcacaatgatggcaccgaggaccacattgggagtgcattcgacaagcggcattaggaagagaagcgtatccataacagtgaccgacataacaatgtttgaaactgcggtctttagctcccgcgttgttgttgaccgctgatctagagaatgcatccggttgtgacgtagcaagatgtggcagagcttactacgttcatcagagcactggcgatca

SEQ ID NO: 4782 - DNA, 859 bp, Arabidopsis thaliana
tatatgtcaattgttgatataaaatattaggcctgcgacttcgggtaaaccgaaccgaaccgagtcggttatttcgggtttcggttattttggatttttgaaaattcttccgaaactaaccgaaatttattacggttcggttcgattcggatattggtttctttggtttttaagtttaaaacccgaaaataaccgattcttttttttttatttttttttaacattaacagatatactttattagagggatgatgtgtaatcctatggaggatttgtacaagaaacagaggtacataagaatgagagacaaaagtaacaatgttttctaactccactttagctaatcgatcagctgctttgttagttgaccggaaagaccatttgataatggcattagaaaactttttccgccaatgttgtatctctatgatgaggttatgaagttcaaagttccttgtgttcccattgagtaagctttccacagtcctgttatcaccttcaaatatgatctttcgatatcctttactccatgtatgttgcatagccatcaagagagcctgtagttccgcttctagcactgagttgcaaagttgtcatgtaccttgagccgcaagtagataactgcctgtgtcacttcataaaatccaaccagcctttggtgctaagtcattccttgagaaactgcaatcataactgcatttgataaagccgtgaataggtttttgccacccttgcctgcttctgtcatttggacgtcgtcgttgtgtgtcttgctgcaaaggaatccactcatatgagtctcttatcgctttttgtacatcatcttgccaattacttcctttacgctggtagactacaa

SEQ ID NO: 4783 - DNA, 571 bp, Arabidopsis thaliana
gtccctaataatttaatttgatcctaaaacgacgacgtttgatttggtaacaacgaacaatgtactagaaaagaaacaagcttgtattgtactcgtagttgttacttgttagatctcaacaaccaggtcgcacacactaaaatggcgttccgcgttttgctcctcttctcactcaccgcacttctcatcttctccgccgtttctccttctttcgccgcttcttcctccgacgacgttgacgatgaggatctcagcttcctcgaagatctcaaagaagacgacgttcccggcgctgactcactctcttcctcaactggatttgacgaattcgaaggaggagaagaagaagatcccgatatgtacaacgacgatgacgatgaagaaggagatttttccgatctaggtaatccggattccgatccgttaccgacgccggagattgatgagaaagacgttgtggttatcaaggagcgtaacttcactgatgtgattgagaataatcaatacgttttggttgagttttatgctccgtggtgtggcattgtcagtctcttgctcctgagtatgctgc

SEQ ID NO: 4784 - DNA, 231 bp, Arabidopsis thaliana columbia
caattcagcgagtcacaccaccgggagttcacgctttcacaccggccacgtcaccaaacaaccacgagttcgttgcggtagtacaaggagaccaggctcggattaccgccacgtggagttgtttgatctaaagaggaatgagtttatagagttgactcgtttggtggcgccaaagagtcatcacttgaatccattcttgtcccctgactcgtctcgagtcggatatcatag

SEQ ID NO: 4785 - DNA, 933 bp, Arabidopsis thaliana
atccctgtgtattatcttggaataagctatatagagatgaagtaatcatatacttgttctggcttttttttgcctttttttttcttcttctggttactgtgttaagatcacatctctttctttctatcattgtggacaaaagagagatttataacatcagatgtatttcagaataaaatttgtctttcattgtgaggactctgtttctattttctgtcatacttcatcataataacagaacatatcttaaaactcggaagaacaaataaaacccaaccaaaaagactctactaagaaactgatacttacatgcataatttgtatcgatgtttcacacaggaatattgacctttttgaatgagtttgagacggttcttgggctctctctatgcttctctcagacggtgtaagcttgttgaatggtttcaatgtcgagaccttttagtctgacaacagattcaacatgacccttaagtgtgtgaagctcccgcaacctatcaaagtttaagaaagattgagccaataacagaaagctttgtccacaatatatcctaaaatgtgttccttctctgacttcaaaggaagaaaaagcattgatgatttttacctggcgatctcggctcttctcttagcttcttcggccatttgggaaagctcgttgaaatgggttcgctccgggaacatcttagcatctggtgcttgcagaccgtgcagggttctatgtgcatgtgcccattgtagctccctttgtactttcccgaaatccttctgcctcgtgaatgcaacctatgaaaaatatgcagaagtgattatgacagagacttactactaaaggtaccatttgggtccaatcaagaagaagtagatactggctaatggaagattgaaatgaaagacagatgttctttttgatcatccctttgtcgatacaag

SEQ ID NO: 4786 - DNA, 416 bp, Arabidopsis thaliana
taactacttgcttcaccagagatttggtcttcaagtcctcaatcacattaccagtctcatattcagcctctcccaagtaatcttctgcctacaaatcatgcaagaaaaactaattgtgactattcgagaccactgggacccttttcctaggatccagacagagaagtaaagtggtaagtaactgacctttgttactgctctaagagcgaacagaaatgtggagtataggttctgaacgcggtctgggtatcttaacacacgatcatacgacaacgtcaggttttgaccccactgaaatacaagaaaaagtagtctttgagtcattctatatctgcttaagagatgcatttcacagataagtcagattcgtacggcagatcttagcaaagtttgtagctccatgaagtaaataatct

SEQ ID NO: 4787 - DNA, 536 bp, Arabidopsis thaliana
cattctcctacaaagacaccaacaacaaagttacgttaccttgttcgacataatcccatagtgagtatgaatactctcaggagattgcccaaagccagtactggcttcaacatacacacccatctttgtaattccaacagtctgaataagtgactgctctataggcgcctttgaaggcaccaagatcgtgttcatgggattatcagccattccttttcctacatgctcattctctaaaaccacaggaatcttcagatcccgtagcccctggcgaggtccaatcccacttaacatcagcatctgtggtgacccaatagctccactagataagatcacttcacttccctttctattcgagagtaaagcctggtgttgattacctttctcatctttgaatattactcctgttactcgaggccttgttcctacatccaaaaccaaaacaaaagttaaaaacctcctcactcaggaatttcatcgaacatttggtagacacaaaaatttatcagtaccagaagtgtcaaagacgatttttt

SEQ ID NO: 4788 - DNA, 555 bp, Arabidopsis thaliana
accaaaatggttataagccactgtgacttgcatatgtttgtccgcttcattcgtgttttgagcaccaagcaacatcacctacataaacaaatatccccgaaaatgcaaatgtagtggttgatatcaatgagcattagatagaattttatggaaaatttgacgaatgcttacatcgttgtggtgagtgaagtgggagttggagattgtaatgccagtggatccaacaatggcatcgatgagtccatcttgacatttcgacatcgagatatggtcaagccaaatgttagacgaaccataaatcgatagaccatctccatcagctctagtcctcattccgaaatggtctacagagtctcggatcataccaccgctactctcagaaatgtggtgaatatgcagtccatggatgacgacatttttcacaaactgcattgtgatccctgcgccatgggctacatggacattagctcctcgtgcatcgatagtcttgtggctattaatcagaagctcttggtttaacgaatgctcatatcgttcttgaaaatgatcacagag

SEQ ID NO: 4789 - DNA, 243 bp, Arabidopsis thaliana columbia
  unsure (1)..(243): unsure at all n locations
nnnnnnnnnnnnnnnnnnnnnnctaaaggtcaatcgacgtcggggcaaaatacggtcataagatgatcgaatttgacgcgaagttatcgaaagatggcgagatcttcctgctccatgacgacaatctcgaacgtaccagcaacggctggggcgtcgcgggtgaactgaactggcaggatttactgcgcgtggatgcgggcagttggtacagcaaaatgtttaaaggtgagccgctaccgttgc

SEQ ID NO: 4790 - DNA, 551 bp, Arabidopsis thaliana
cttttttctgttttttctttgattttggatctccttaatcccttacccaatctcacatccccttgattctcgattccgacgaccacaactacgatgcctggcgtgacattttcctcactcattgtcttacttttgatgtcctaggccacatcgacggcacgtcggtccctgtcgacgctaacgatcttcaatggaccaagaaagatggcttggtcaaactctggctctacggcacgttggctcatgaactcttccatagttcattcaaaactggtggatctgcaagagacatttgggtcgagaatcaatttcgcaataacaaagaggcgagacaatccagctcgataatgaactccgcttaactgaaattggtgaccaatccattcaagcttactgccaaaagctcaagtcaatttcagatatgcttgccaacgttgacgctccggtctccgagcgcaatcttgtcatgtacatgctcaacggcctcaatgaagaatttgataacagaattaatataatcaaacataaagacccgtttctcagctttgaga

SEQ ID NO: 4791 - DNA, 524 bp, Arabidopsis thaliana columbia
aaaaagaatattacgttgttcacgctagaggcagacacaaagggtaagatccaaaaaaatacgagaaattgtaagttataaggctttattataaagaagattgaggaattagtgttgagagatcttctctgtttttctttgcaggaaagtttccgtgtgttctagagagatagagaaaggggtatgttgttttccagatatcttgcatgacaagaaacctaaacctctggatccaagaaacatatatcagacggttaagatcaaccggcatcacgaccggacattctatgcaaaatctgtggcgccagagggtacaccgccaacatttctcaagaagaaaggatgggagctacgaacctcgaggagcctacatccgaggagacctagagaagctcttggcctagacgaggaactaagagctcgtctcccagcatttggatttccagtttctacaattcggtcaggaagtgtgatagttggagaatggtattgccttttatgtatgtgaaggagaattgtagtgt

SEQ ID NO: 4792 - DNA, 571 bp, Arabidopsis thaliana
ctaacactgctcggaagacgctgtagctgcggcggaagacctgtggattggtgtgtttccagtgggtgttcgatggttaacagcatatccagttttggatctgtgatggcttatgcggaatcaggttgctgaggggttgtctgagctatcacccttcactagccgccttttttctgtatccatcaaaccggattaacgattgtttgcttctaaaagattttcagatctacgattttcgtatactatggtcattgatctcgctcgggtggttgtgttgcaaagtagtgggccttgtatacgacggtactattagatctgttcgttgcctccgttttgattgtccaaatccaactctgtttcttttttttccgttgaccagaatttctttctgtttttataaccgtaaaagattgtaatttccaggcataaacccaattgggaatgggcatatttatttatatattaataaaaatcatctttttatatagaaaaagacattgaattataagttcaaaagccttaggtaatataggatgtgaacacacactttgtcattagtagaataatatat

SEQ ID NO: 4793 - DNA, 551 bp, Arabidopsis thaliana
tcctgttcgagcagtccttgaagggaagcgggtggtagtagtggacgactctattgtccgcggtaccacgagtttgaagatagttcggatgcttagagatgccggagcaaaggaggttcatatgagaatcgcattgccgccgatgattgcatcgtgttactatggagtggacaccccgaggagccaagagttgatctctagtaagatgagcgttgaggcgatccagaagcatattaattgtgattctttggcgtttctaccattagatagcttgaaaggagtctatggaccagtcgagtcacacaggtattgctatgcctgctttactgggaagtacctgtgaccaaaacagagtctgaggaggccgacgcttcatgaaaatacctctactctcttctttgctttactttttaagttttgagaagcatagtttttaattagttgatgcattgcttcatattttcaaagaaatcatcgcattgtcttttatttaatcagtcaaaaaatattacagaatgacgtttcagacatgttttaaaatgagatttgat

SEQ ID NO: 4794 - DNA, 598 bp, Arabidopsis thaliana columbia
gtgcccatttagtatcaaagtgggtttaattagcattttctactaatagtaatttccttatattgttagcagattacacttaacacaggaagatatcattttcaggtcgtgcttcctgaaggatcaaaggacccttctgctgttttgccctttacagtcaatcaagagttgcaggtacttcatcagccacacatatacatgaattgcattttcaaactatggttagtaaaacaacatgtatctataatggtcttgtctcaggtcaaatactcataccttgacattgtgggaagaaccgtggttgtgttgcaaaaagataacgtagttcccactcacaacgtacccttccaggtaaaaaaataccttaacacttacagctaactagcaatttccacagacttaactatatcagcataatgagccaattcctttctttctgctatgtgtagtagtattagaagaaccctaaaaatctgagtgtattagtgttattagcaataggctcattttgttccataagttacaaaattgcttaacatgtgtgacgattttgcaggtgtactatacattcaaaccaatatacatgctagcggaacca

SEQ ID NO: 4795 - DNA, 524 bp, Arabidopsis thaliana
ccaagtcctcagcttcaagcatatgaatgatatgacccatttttggcctcttttgagcattaggatcaacacatcttaaagctaccaaaagggtacgcttcaatgaccttaacgacggtttatcaaccatcctcggatccaaaactccttccgcatctcgattcgtcaccaatctcttcaaccattccacaagattcacttctcccggagcccggctataatccacaggacttctccctgaaataatctccataacaagaacaccgaagctataaacatcgctcctctcattcaacattccggtactcgcgtattcaggagccacatacccaaacgtacccatcacacgagtagtcacatagctcatctccgaacccaagagcttagctaacccaaagtcagaaactttcgagttccattgcttgtcaagcaagatattactcgatttaatatctcggtgaacaactttaggctcaagaccttcgtgtaaatacattaaccctttggctgttccaagaacaatg

SEQ ID NO: 4796 - DNA, 522 bp, Arabidopsis thaliana columbia
ttccggaattatccgtcagtatctacttcatttcacttatctccaaatcgccgaactcactaaatcttctctagaatctctgattcttcatcatttcttatgatctcaggctctaaatctattagattttcatgctctacctcctccaaatctccaattctacgagctacaatatggatggatagatactcaggcaaggaagagcgtcggcccatcttcctcctccgcgctcatcctcgtcggagcatctccaccacagctggtgctcgtcctccagcaccggaatagtcggctgcagctcctcgaactgctattattttatttccatgaccaaaattgtctaatgagaggattgcttcccaaagagtttgggataaggatagtcacagagaattcacaaaaggtgactatatctgtcacgcttttctccagatttggatgattatgatactatgttttacaatgcctggcatgtggatatttcgtcaactcggggtacggatttcagtttgatgaacgttt

SEQ ID NO: 4797 - DNA, 538 bp, Arabidopsis thaliana columbia
ttctgttctcaagctttctctaaacgttttccttgcggcgcagatggataccagtccgacaactggaagtgttaacactactgtaattgagaaacaacggttggctaagtcatctctcgctttcaattgtaaaacgtaagattttcccatcatcaaaaaatttcaaattctggattcatatagaagctaagtttagttatctgtggttaggatagtcataaaagctggttagataacgaatataggaatgaatgcagtcctgagattacatgttttcggtatttcacctgaatccaatgttcttacttgtgacagcccagcatttcgaaagctatttccagagtatgtagagaagtacaaccagcagcaactagctgagcaagctaccacacaactgacaacaccagagtctcctcaaaagagcgataccaaagtcgagtcagagaaaaccatcgatccaacaaagggagattcagaaggtggcttgaaggagaggaaaaagaacaataaacagggattgccagcgtggataatactg

SEQ ID NO: 4798 - DNA, 537 bp, Arabidopsis thaliana
catcccacttccggacaagtccaacggagacaattctggtaactttgcatctcctcttagataatgtagcacttgtctcatacttggtctagcccttgggtcagagtgagagcacaagagacctagcttcaaaaccatttccacctctttttcatcacattccgaacccatattcggatctttagcagccaagatgtctcccttgttccacaacccgaaaacccaatccacgagcaagaacgtctcatcggtctcttgctggaactcgataggacgtctaccgcatgcgacttcgagtaagaacgccccaaacgcaaaaacatcggtagccatcgtggcacgtcctgtcctagtatgttcaggagctaagtatcccaatgttccaacaacatgcgtggtctgaggatccgatccgtgatcatacaaccgagccaaaccgaaatccccaagtctcccattgagctctccgtccaacaagacattgctagctttgacatcccggtgaatcacacttgttccattcctcatggagataga

SEQ ID NO: 4799 - DNA, 607 bp, Arabidopsis thaliana
tttctctttcttttggatgttgaagaggcaggaacaaggaggtcagcatcggcaagagagctgagatttgaggcattaagccttacttgtaataaacccaaaacgcctcaaagtagtaaggcttctagtgcaacaactccagagatttttaggcgacggagaggatccgatattcctcagctgaattactcagattttgataaaacatgtaccaagccccaatcaaatgttgagaacatcgttagcgaacaccgagactctgatcgttcacccccggaaacatcaagaaaatccaagaaggttactttaccatcatcttttgctgcaatgatgagactagctattatgacgtaaccgaggtttttgaaagatttggtgttgtttgacaggttgagattgaagaagaggtcgaacgtttgaagaatgagctacaaagtacagtctttaaatataaacaagcttgtgaagagctcttctccacacaaaacaaggtatagatttctgatcttgaaccctaaaatctgcaagaaaatgattagagatgattttgggaagagaaatttgtatatttgtgatggccatcaaaacttatctgtgaaagaagtgt

SEQ ID NO: 4800 - DNA, 508 bp, Arabidopsis thaliana columbia
aaggagatgttctaggtgtgtgctgacataatgtatttccaaccgaaatccactacagaattcggcaacacttatcttacaatcttataaaaagatgtcttcacaatccatataacccaataagcttagtcaagccaaacgtaaccgccatagctaaccaacctccaaacaaaaccctagccgatgacctaaccgctggtgccttccctagcgctgctcctaaccatccgaaaaccataagagctaccgtaaccgccaccacaaccgaaatgatcctcatcttatactctttcacaaaagcagcagccaaaagcggtacaatcgcacctgcggaaaacgcaagggcagacgcagccgcggcttgcatcggactaggaagcttctctttctctatctccacactgtctctctccatctgagccacctctatatcgtactgagagtaactgagacgaactctcctatggccaactacaagctcctgcaccatccctgcgaatccggagag

SEQ ID NO: 4801 - DNA, 546 bp, Arabidopsis thaliana columbia
cagcctccataaggtcacgaatctcagtatccttgagggttgaaccatatcttcgcaacccggctttcagctcgtcaaacgtaatcgctccactgttatccgtgtccattgctttgaacatttccttcagtccagcaatttcttcctccgagagactctcagctattacctgaatcacagcagaagacatttatggaaaattgttcacaataaaggccaaaaggcttgcggccgggggcttacccgtaaagccatctgctttagtttattcatcgcagagaactgtttaagacgagaaagcacagcaggatctagtgctctgtctggcgcaactccattttcacagatccaaggatggcctgcaaaattctaaataagctagcagatacactaattcaggacctgaaataggagcaactggttagacttacgcaatacttgatgagctgtcagtcgctcagagggccgggaacatagcatgccacggatcaagttttttgcagagtcggatattaggggccaagggtcggagtcaaagtcaatatg

SEQ ID NO: 4802 - DNA, 796 bp, Arabidopsis thaliana
catcttagtctagattatatgcatcttcctgtttaatgtccatttgtgaggagaactttgaagatcatcgagaggaagtaaagaacttagatttgattgagactaattctcgtaccgcttcagccattcccatcctatcccgtggatattcttcagaacactttattcccacttccaaaactagtctcaaccactcatcaaccatggttctgcctcctctgctcgtggaacacgacaataccgactttgtgtagccgtggaggttataaccgccaccaaatgaattgtctgtcggttttttcccagtgaacatctccaaaagtaaaactccaaagctgtaaacatctccttgtattgatggtttgctcccattccatattctacacatatgtcaaagaaacaatagatattaagataggatcattcagagttaattataaacaatcctatttagcatacagagttttggtttatacctggtgcgcatagccaatggtacctctcacaccggcagaactgaactggtttagaaaggttttctcatcgaaattataaaggtgccgagccaaaccaaagtcactaacatgagccgtcaaatcatcgtctagaagaacgttgcttggcttaatatcacaatgagcgacagggtcatgacaataaacatgcagatactccaaagcagaagccacatctattgctatgttgactttctctgcaaatgttaaagaccttgagtgattgtttgcactttccaaatcttctggctgtagccacatatctagacttccttttggca

SEQ ID NO: 4803 - DNA, 273 bp, Arabidopsis thaliana columbia
tgacgctggtataatccctcgcctatgatcagctcttggcgtaagtaattgtcatttaggtaccaagtctatatcatacagatatatcttgacctgaactcgttatctgtgccttcgaatgtcatccatcgccctcagttctgattccagctctccgtacaaattggcaacatagtaaccggagatgatattctgactcaggtagtgtagaatcagtaactgtgagccttttatatctcctatagttctctgaaagggactaaagtaaatcat

SEQ ID NO: 4804 - DNA, 513 bp, Arabidopsis thaliana columbia
  unsure (1)..(513): unsure at all n locations
tagaggattagaggatccccgggtgttagttttgtcaaatgtggtgaggtttaggagtcagaacagcaatgagtttggcctcactagtgattgcatctgagaccgcaacagttcttgttacattgtggtttggtgattcgagtgtggtatttagaagtttagtaatctgaattgtaatatgatggaaactgcaggggctgacagagaagttcaaggagaaggacacagcatactcaggctcagctactttcaactacgaaagcttcatgctcaccgtcctccccttcctcatcgcataagttttttttacggtaacccgtttgcacatcttctgtttttttgtatgttctttgttgtgtgaatgctattgtcaatggaagcttttccggtttagttgaactcaagagtttataaaaaaaatgtgaaatgtatagtgagagatcttgtgttataaaataatcanacaactcattatggttggatattatacatcttgtttattggaatcatgta

SEQ ID NO: 4805 - DNA, 574 bp, Arabidopsis thaliana columbia
ttcctcaagataccgataccctcgtggagagtcctaccttgatgtaatccaacggtatgttcttctcttctacttctttctacgtgaagtcataaactaaacctcaggaaaatatcgctactttgacaatgcaggcttgaacctgtgatcattgagttagaacgacaaagagctcctgtcgtcgtgatatctcaccaggttatactccaaacgatcttgtgcataatgtctaaaaccttaagttctggagggatcaaactatggaagcttaactgtgtaaaacttatgaggtagacacaacttgccactaagttctaatttttcctcttactgttggtgtttacgcaggctgttctgagagccttgtatgcatattttgcggatcgcccctcaaagaaataccccaaatcgaggtaaaatctgaattagaaaatacgagactatcttagaacgattgagctataagctttcagagagtcttggctgcaagcacacacataataacatattttggatgttcaacagatgcacttccactataatagagatcagatgggagttctggtgtcaagag

SEQ ID NO: 4806 - DNA, 594 bp, Arabidopsis thaliana
  unsure (1)..(594): unsure at all n locations
gcagaatgcactaggaaaaaataaaagaaaagattactagaaactgtaattagaaatgttgcttacttggacaatatcctgggaggcgaattaggaactcgcaatgagaataatcttcagctatctatgtcagggaataaaagtaattgaatatttatcacaacctactagccaaataaaagatagtatataaagcttgtataagaattttacctgccaaacgatggagcgatggtgatatccagcagccatcacgtactcagcatagataaaatcccagctaaaagtaacatacaaatttaaaataaagttttaacatttttttcactaaaaccatctccctctagtaacaaaaacaagagattttgaatagagacagagttacaggccgtgaacaaggactaataccaggagaagaaatcaggccaaacaagacgcacaaaaatggatagtagaagtataaaaatgtcacctgaaattggtgacacaaacagaacgtatcccagcatcagctgcagcacggcatgcgacagggacaacatcagacacctgttttcaactanagtttatctcttggtatgaaaatgatggagt

SEQ ID NO: 4807 - DNA, 515 bp, Arabidopsis thaliana
tgaatgtccggtttaacgctgaggatggttacggaggcaaaactgcgttcttgccacgtggagaggctgaaacggtgccttttggatcggagaagttttcggagacgttgaaacgtttctcggtggaagctggttcggaagaagcggagatgatgaagaagaccattgaggagtgtgaagccagaaaagttagtggagaggagaagtattgtgcgacgtctttggagtcgatggtcgactttagtgtttcgaaacttggtagatatcacgtcagggctgtttccactgaggtaaaaatactaactactgttttttaattaccggtttagttttgactgaaaacatataagattagtactagatataagataatttgtatataatcaattcggttttgtttggataattttttggaaaggttgatgtagtttctgtcaaatttacttttcttcttttatgaataaaaaatacatatgagacatagataactatgatagatttgggtcaggttgatg

SEQ ID NO: 4808 - DNA, 968 bp, Arabidopsis thaliana
aataagcccatgtatagactatgttttaaatatgcagagcaggcctacctcgacagggtgttgacaacgagtggaatgttaaaaagcaagcatcgaggttttgtaacgattgacctaatggtattcggtatattgggtaccttcaagaatgcgagaagaaatcaatatttatagagagtgattggaaaaaatatactcatgaaaatgtggaagggacatgttagatgcagtaccaagcaacagagacccaactcgaaggtgatagatcacagcttctgtatgttctgagtgctgggaattgtgatgacaggtttgagatctgcaatattaaggttaaacattattatgacacaggacagaacaatttcgccggctatgaaattgaacaccatgtgagaagttgagccactttaattacataataaacataccttgtcggtcaatggttcacggccaaatggcatagcaccctcaagatactcaaagacaagttcaccaggagagttactgctggcctcactctcatcactcgatgaaccaatgcaaggtttctcttccaaagaggctctgtataaattttgagaaagctctctacagtcattgctcccatcgctactcatgtctctaggcgaatcaccatcactttcttcaccaactctcctgtttaagaacaaacatcaaaacaacgaattttactctagaaagcagaaacgaattgggaattaaagagaaaaccaacgagatgaaacaaatttggaattcaacaccatgataaacttgaaccactgactagtatttgagagcataaaagttgttgtgtattagtcatccaaatgaatatctctagatattgtagcagagaacgcttagaagttggttttcctatctcctaaagaacgtgcatccgaagattaagaacaacccaagaaagaagtggcttcatctcaaaatatataaattgacaaaaa

SEQ ID NO: 4809 - DNA, 873 bp, Arabidopsis thaliana
aaaaataaatggattaacactttgtagaaattaaataatttgcgggaagcttactctttgctagtttcacttttttgaatatcactaatctttcaaagttgtatgtatagaagacaaatacctaacataaattgataaccaccaaatcacatatcattaaggactgttgttgagttttacaactgccatagacccaccaagaaagatgaaacacaaaaggacaaagacataaacatgtgttttgagctacaaggaatgaaaaaaacaatccttgcaatatctcacaagacccctttttctttaagagaaggaagatctcacaaacactatctttctctatcttcctctctcttttactatatatgatttatatataaattttgaaaagcattgaacttagaggagaaagaggatgagcactttcactcttctttaattttttgaagagtcttcactttgtctcttcacacctttcttcaactcttcttcaaccctcttttttaatattcaccagagaaacccaaaagtaaaaatgaagataaaagactaaaccttttaacgttcttgacgaaccagaggtaaaaaccaacgactttcttcttctcacgacctatacacactgtgatctcctttgatgttgttgttgttgtctgatcaagccaaagtgtagctggataccgcgacatttgcaggtgttgttgagtgaatgtagacgaactctagggattttccggatggcaatgagtgcatcacgagggtaaacgaacgagttgcctgatctcgagagtcccagattggtcatagagatcttgacgaaaggttgagactttcagaggtctagagattgttaacacagttgttgagtactgtagt

SEQ ID NO: 4810 - DNA, 529 bp, Arabidopsis thaliana
taattcgatgttccttcctgcataaaaacaccacacacaaagacatttaacaactttgaagagagagatatactcgagattggtttcgtaattagcttcaagatttacctggagaaagaaagctacaacaataacagttatgaacagagtagccgtctcaaatagctggaaatttaggtccatttgggcacccatcatccatccgataaccacgcaaaaaggaacctaaatccaatcaaactatcagacaaaatcttttagagaatgttcagtactagacccaagttcacatttcatatacataccgcgaacatagaaatctgaatggaggatccaatagccactcccaaagacagatcatacacacgagaataataaagttagaacctaaagaagagaatcaaagacatcaaaacgcaagagacttgtctgtgtaccagcttgtctttcatggcaaacatgatggcacctgcatgctcggccgcattcccaactataggaagtaagatgacactgataaaagagattg

SEQ ID NO: 4811 - DNA, 466 bp, Arabidopsis thaliana columbia
tgcttgtcggttgctgcaataatcacaagccaataatgacactgacttatccaacaacatatacatcccattttgattgcagttgaatacctgaaaacacaggaaccactctatggatatgcacttgatcgggccatggtggtggttctatcataattaggtaattttcaaaaggaagtgtagaatccatgataaacgaatgcatagtgaataatcgatgatatctggaagaaaacactctattgatatcacaatcactcaaggaaaagctcgtgctagaaattggtgcacaagctgaaaacagcttacagagagagcctgatgaaggaaaaaactagagagagatataaaagctagaagcttgcagttacctccgaaaagccaaacttctcatggaatttctttgtgttacagtccagcatttctctaaggctgcagtcaatgttgttctttttgacaagtttaa

SEQ ID NO: 4812 - DNA, 662 bp, Arabidopsis thaliana columbia
agtagaaaaatagagaatgttccaccgtccaaaagaaacacaagtacagtcctgagaaggcttgcgatattatccttagtgatatatgtccacatcttagttaagccccaccggttctgatatacaagtggggaaaatatttcataaccacacaacaaatctctctgtttctcccgctcttgctctgttttctcaaagacaaaagacgacatcgtcgttgactcctcttctctatggctactgctaagaacaagggaaaatcaatcagggtccttggtaccagtgaagcagagacaaaggatgagatggagttggacgaagagttccagtttagtagcggcaagtataaagattcgggtcctggctcggacatgtagttaggagatgcttcctctacgtctccaagaagtcttaggaagactagaacctttgaccgacataatccctatctcgtatcttcttatgctactcctcagccgccaacaacaactacatgctctgtctcttttccattttacctccctccagcgattcaaaatcaacaacgatttttaacccgaatgacccttcaggacaaagacagcaacaaatgatctcgtttgatcctctacatcaggtgatacatatgttgcacaacagcagcaagaactacaacatctatt

SEQ ID NO: 4813 - DNA, 552 bp, Arabidopsis thaliana columbia
gtgacttcaacacgttctgttgaacaggatgctctctcaccttcggaggtaaatttgaagttaaaatgtagctgtattttggaaattgttgtgttttcttcttgatggaaatctctgtttaataatctccctttcgcaggctgcaaaggtgtttgagagccaattagcagaatccatattagaaggagatggacaacttgctttcaaaaaacttgcaaccgcaacacttggaaccataatgccaaggatagaaggaaaaggagagtttggtcaggcgagatggaggttggtgtatgctccgcagatcccaagtttactctctgttgatccaactgtggatcctctcaagtctctggcgagcaacatatcatttggaacggaagttgaagtgcagctcggaaaacgtcttcaggtcaggcataaacattgaaatcttctttcttctccatatggcctcatttttttcaaacctaaccaaaataagcactccacggttcttgctgtcttttatctacaggcgtctgtggtaagacagatgaaagattctgagat

SEQ ID NO: 4814 - DNA, 543 bp, Arabidopsis thaliana
agcctccagccaattttagatactagagctttgttcataaactttgacttttgaatgccaagacccccctctctctttggcaaacaaactctatcccaagctaccaaatgcatcttctttttctctaacgaactaccccacaagaaagctctcgccagcttatctaatccctccaacgttgactgtggtaaagagagagtactcattgtgtgtatcagaatagaggagagaaccgacttggttagagttaatctccccgcaaagcttaaagaacggcctttccaacccgctagccttgaagccactctttcaagaacctctccaaacgtatctttatttatccatctttcgagaataggcattccaagatacttccccaactctcttgttgatttaatccactctcattactaatcaacttttccaagtctcatgaaacattctttgagaaaaatatcttatatttctccaagctcactttttgtccagaagctacacaaaacgtttccaagattcttcgtataacccttatttgagagaccg

SEQ ID NO: 4815 - DNA, 1063 bp, Arabidopsis thaliana
ttaatgcaagatttgttagtgatgtatggatggttgggctgcatctagagggtcggattgagaggaatgtgattgagggaatgataagaagattattttcggaaactgaaggaaaagcgatccgagagaggatggaaattcttaaggagaatgtaggaagatccgttaaaccaaaaggttcggcgtatcgatcgttacaacatttgattgattatataacatatttctagtgtttgtttctttttgtcctcatttttaagttgatcaattgtttgcgtgtattcacgaaattgttcctttgtgtttggcatcgttggaataaaagttgttgtttattttcgggaataaaacttgatcttaactaacttgaaaatatgcacatatattgatggactatggatcacaaaaaattatgcttttagggttttttatcagacggttttggctttagtataatcctagtcattgacaccttaaacaatgacacactcaaatggatatgtgtatttgaatacttatcaaagtcttcctcttttggtgcaatttagtttcctattttcttgcaacacacaaacttaccgtaattaattagttaatggcttaatgcttataatatataaacctcactaacataggatttacttatagataccaaaaattattttgcaccatttcttttgagctcacccactccactcacacaatcatgcgatcttttccgccgtcaccacgtcccgcatctatcgaaaacaatacgcatcatcatctacatgaagacttcactcttatggtcatcgtcttcgttttgtatggcattgttgccataaggtatgcaacctttaacgatggttgtcgtggaactaatcttagattccagagaccgcaaccacctctaccgttaccacaacctcagccgccaatgtgtccgcgggagattgcggcgatgattaaagacatagttgtggacgtggaattatgttgtccgatatgtcttgaggatttgaagaaggttgataatgatgatgataaagtcgtggtttgtttatcacaagtgcaatcatag

SEQ ID NO: 4816 - DNA, 1151 bp, Arabidopsis thaliana
tttgtggtgatagatttttgaaggttttacaatgtgttaatgttatgtagacgtcggagtctgagagtatttctcagttcatagctacgcaaggtcctttaccacacacgatggaggacttctgggagatggttattcagcagcattgcccaatcatagtgatgctcactcgattggttgataataatagggtaaacttccttgtcttgcttgtgtatatgagtctctttttagacgattggatattaatatgatctgttgcaaatatactagtacaagcgaagttgttgtgagcatttgtttctcaagttaaatttcttcgtattaaattttagcaagttttaaatgttccataaacagtgatgaagatagaaactatcgcgttgatattgattgttgaacttatcttgtttgttttttcatgctaacttatctaattacttgttacagactgttaaatgcggggactattttcaagacgaagatggacctagagaatttggcaacatatctcttacaacaaagtggataaagactactgacacttcattgatgttacggaatcttgaggttaactacaaggaggtaagaatcttgtatcagttttcttctgtttatttttaccagatcaagttatttcttcgagggttaagcatgtttcaattattgatattgtgttttacagacagaggatcagcccatgtccgttttgcatattcagtatccagaatggcctgatcatggagttcccaaggatacagtggctgtccgtgaaattctaaaaagactatatcaagtaccacctagtctcggcccaatcattgtgcactgcaggtacgatgcatgtcaatgagggatacaagtgttgttcaacgtctcctgagagaattgtttttttctctctcagtgcaggtataggaagaactggaacatactgtgcgatacataacacaatccaaagaattcttgctggcgatatgtctgcgttggatcttgctaaaaccgtggcactatttcgcaagcaacgcattggcatggttcaaaccatggtaaatctttcagcgttacaatttttagctaccaaatttctgtatctcccacataatttgttctgaattgtcaattccttactcttttttgaaggacaatac

SEQ ID NO: 4817 - DNA, 521 bp, Arabidopsis thaliana
ccctagctcggttatcgctcttggatttggaagaggagtatataagtagcaggaagaatcttgctgagtattgggctcttgtgaggaggcggccaagttacaagaaggtaattggaaggtacttcaatggctggagaaaatatgcaacacttgtaaaaacttggatgtttgttagagtcagaagtttactcagaaaatattgaatatcaaaagtttgccttgtttcttttccaccttttcattttccaggagatgcttaagaaaattaattatttcagaagttttaagatgcaaagatctcaaggtaacttaaaaagattaaagaatgtgattgcttttacattgaaatgggactttttgattgtaaaagaatttagaatatactaaagaaaggagagggataggaaagaaacgcatatgactcccctagaggggattgatttcctatgggccaaataaccaatcaatcactgtaattccctttaagagatgcattgtctcattcaacttcatcgactgta

SEQ ID NO: 4818 - DNA, 598 bp, Arabidopsis thaliana
  unsure (1)..(598): unsure at all n locations
agagtacacaaaacagagaaagctttgaaatttggaacaattcagatcagttcatcggaaattaaacagaacccagtatcagattttaagctaattctaatgggcaccgatcaaaatcacatatttagaatcaatcaaaattacccaatcatcaggattcgcagtgacgacgtccatatgcattccgacgaaagacaagatctttccgggaacagatcctgggtactcaacgatgagattacctctacctgaatgatacgcgacatgattgatcaccagaggaccaccaccagtttctgtgctataaggacggagagagtcaaggacgtgtttgacgattaggtcctcttgagggatgagctccggcggattgttctggacgaatttagattcgcctatgagttttgataagagagaaacgtatgagtctttgtcaagagagcctatggattcgatcagtgctttggaagacgaagccatttttgttacccaaagatgtttttcttttggggtttgcaacaaaactaataaggttttggtcagcttgtctacgagcttcgtgtgttgtntaaggttttggacattttcgggtggagtg

SEQ ID NO: 4819 - DNA, 927 bp, Arabidopsis thaliana
tatcaaagcacatgtttgtattttcaaataaattccagcgaaaaattgacttacatgtcctttgctgacattttggtgaagcctattgctaaggcatgttgctttccttctgcatatatggcctaaacaaatacagattcatggtttaagatcagcatatacaaacaaaaatgcaacccagggaaatactgtttttattcataccactggcctttcagcctcgacttcttgatccagaacgcctcccggggatgtaagaccaggacacattatgtttgcaccagacagaacaaactttatggcacctctatcaacttgaaacctcttcattatatttgggtctgcaaaactccaaacattcagctgccaaatttttgacattcgtggctaattgaaaaaactccaagtttctttctatgtatcattcaagtatgtaaaagttagctgaacgtggtgttttcaagaatattttatactcttctggtaacagccaatgccaaaaccttctcactatgataagggtcagctaacccggaaaacataaaacaaaatatactaaacaaaaatcctggctaaccaatcatacgtggaccttttatatagttcactcgcatgaaaaaagccaaaggaacaacaacttacaggaaccaaaccccaggaagttctaaataactcagagaaaagtgtcggacatactattcaggtatatgcagtatttgaaccaggtaagttctactgcagaccacagtaagactaacaggtgtgaagaagagtgattgtatgaataaaacacccagatatgttatgttttgataacaagaccatatagcatggatggtgtgaaggaaaagtgatattacattgatgaagaagcagcagtgttggcatgtatggcccgcacggatacagaagaagagggggcattgt

SEQ ID NO: 4820 - DNA, 1023 bp, Arabidopsis thaliana
ttacatactcattaatcgtgaccattatcagtttttcaaacctcgggtccttagttagtacgaaccccgagccaagagtgtttagtaaattgtagtgggaagccttgaattactcaaatgtaaccaaaacgaatatcaacgaaacatgacaacgaataagtgtaaaatattttcaaagaggacccatcaaacgaatattgttaaacagtcaacgttacatggctcgaacacattttatacaataaacaacaaaaattacaaagtaaaacaagacaatatattattccttggggttgggccacttaattaataaaaacctaacttactaataaatgcaaatttcagtttccaaacaatattaaatgcatcagctgcaattcccacccacctctttttctcttcccctaactaaattaattaaaattaaattttcaaaaaaataaaaaaataaaaatctctatcactctcttctctctctctcccacatggacccagtcttcttcttctttaccatcaaatgtcaacactcgcctcctccgcctccgtcttcctagtccaccctccccttccaccgtcgccaccacaagcaggcaaccactcttacctcacaactctaggctttggctactccatagccatagctctcggttttctcgtccttctctcgaccgtccttttatcctcatacatctgttgccgtgactctcgccgccgcacaaccgccgtggaatccacaggcgatcgtggcggaagtgtaatcctcccccgcataatctttgtcgccgaggaagacaatgaagatctcgaagcaggtgatgtcgtggtgggacttgatcaagccgtcatcaactcataccctaagttccacttttccaaagatacctccgccgcgtcctcagatggctttggtggcggaggagacacaacgtgctcgatctgtttatgtgagtataaagaagcggagatgctgaggatgatgccggagtgtaaacactacttccatttgtgttgcctgatgcgtgg

SEQ ID NO: 4821 - DNA, 866 bp, Arabidopsis thaliana
tatgctcttcttaccgttatactggttctttcaatctctcataccttctgtgcctcagaactgggttttagcttggggtgtagtagaaggggttttcttttttttctccaactctaatatgcttattgtatctctaactttgatgtgacaggctgagggtgtctacaatcagaggcttcagaatttggctgttacacttgacaaggtgactacaatgtctcttcataaattcaaacataatattgctttgctttgccttcacactttttgtgcaattttaaaatgtttttcccaaacgaaggtagtctctgattagtgttatacacaggtgcgatatgttatgagacatgtgtttggggatccaaagaacgctcctcctccgctggagaggcttactcctgaagaaacagtgtcttttgtttggaacggggatggctctttagttgatgagcttcttcagagcctgtcaccgcaccttgaagaaggccctcttaatgaactcagatcaaagattcatggccatgatccatctggatctgctgatgttttaaaggaacttcagagatcgttactttggtgagtgcacctatcatattacttatgcttgaaacactcttatgaaacagtacactcatatcgaatactgtctccccatgaaggttgagagatgagatccgagatctcccatgtacatacaagtgtcggaatgatgctgcagctgatttaattcacatatatgcctataccaagtgctttttcaaagttcgggtaagtcgtttcgtatacttttgagtgacgaaagaatgaatcttgttgaacttcttctgacagatgggtcttgatatgttgcaggaataccagtcctt

SEQ ID NO: 4822 - DNA, 516 bp, Arabidopsis thaliana
ccctcatggaattgaaaagatcaagggcttggctactttgaccgagctttgacagacaatatataatgatattgaaagttgtagtatcgggacgaactttagctcccttcatgagctcaaaataagatagcgcctttgaatactgacgaccactcttgtatgctgacaacacaatgttatgagtgaccaaatccggtccaactccgttatctgtcattttcttgcatacttccagagcctctctccagtttccactagaaccacaagcattgatcaggttattgtaggttgaacgactaggagcaatctgcaaaaccagagaagagtcaaaagtcaaaaccatatcagaagtgaaatagattattcttaattgttagttgggcatcatggaaacccaaaacaaaaatgtaaactttacatgagtaaagcaaagttacacacagcagcacgtaacatgtcatccataagattcatagcccagcgccattgaccagctcgaccatgggcattgataag

SEQ ID NO: 4823 - DNA, 594 bp, Arabidopsis thaliana
agaggatgatcactgcattaggaatcagtttctccaaattcctaacatattttaccattcctctgttctcctctcacccaagcttgcttatgtcacttcctgcagttgatgccatggagattttctttgagggcagagagtataaagatgtaagatctatcatcaacttgaaccttgtagtttaacacttaacgctatacacaactttcctcatatatgatataagtgatattgatttatatttcagatgtggcggtcgcagtttgagccgtttatagaaaagtcagaagctcttcatttctcagtggatcccgttggtaccgacgtcatgtaaaacatttcaactctacattgggttgcagtgcattatgaacaaagttttctctatgaatccgaaaacgtgagttattgagtttaaagaaagcaaaatacattgattatttgcaaataatagctgtgtcctaacaagacaagccaacaaaagaaagattttaagctcccattttccagagacgttccttaacaccgagcttgcagcaaacatagacatcatgtgacgcttgtactatctgatcatgagagaggctacgagca

SEQ ID NO: 4824 - DNA, 353 bp, Arabidopsis thaliana
ctccttagatgttaaagatttttgtgaatgtgactcatcggtatcttgcttataaatctttccggcattgtctacaaacacatgggcatggaagtttttgaatagttcttcatacacatatctcgctagcgtggtcttgcagacgcctccttgaccgctaatcccaatcaagcgaatttcccccttcagattttaaatccaacaattcgttcagtgctagcatatgatgatccaacccgatcagtccaacgttttttgttgtcaatgaattgatctgcttgtatgagacagtatgcgagatggttgctttcagattgatctgctgatccttatccaatagaatttgcatgacc

SEQ ID NO: 4825 - DNA, 534 bp, Arabidopsis thaliana
ggcctttatggcttggctgttaaatgactgttgatcatttacattgcctatgggtatacggacgggggtgcctcttcgttcgttttgctaactatcagcagttggttccttgtaatatcctggttgtttgcaccctatatcttcaatccctctggatttgaatggcaaaagttagtactgtgcttgttacttggtcttcattccatttccgtattcaattgattttctctggtgacacagatggcactatgtcttaaattgtattggatcgtgacctgtaatctttcatgcttgatacaggactgtcgaggattttgaagactgggtcagttggcttatgtacaaaggtggagtgggagtaaagggagagctcagttgggagtcgtggtgggaggaagaacaggtctgtccaaaattttgtattttgatgtattaccgtattctgtattggctagtttttttactatttgtgttctttacaggcgcatatccaacattaagaggaaggatattggagactattttgagcctgag

SEQ ID NO: 4826 - DNA, 817 bp, Arabidopsis thaliana
agattgtaagaaaaaagttactgtcttttgtcttttgtgttgatcagacttttacattgtcttgatcttcttcttgattcttgtccttctgcatctcccaatgaacttgagagcttcatcgatcagaatcacagggaaggaaacaagaataaccacaaaccattccctgaaactcaaaggcacaatcccaaacacattagctaagaaaggaacatagaggatgacacagtgtagcgcaaaggagacagtcatggccactagtagccaagggtttctccatggtggcatcgttaagagactgttgtcttcagacaacgcgttcagcgagttaaacatttcgatagccacaagaacggtgagtgataatgtcattggcttgactttcccgagagtgaagtaatcgcaaggattgttctcaaacgcgatggtcctaagaccacctgcgactgtgtaaggagtcgccgtgaagttcgttccccacgaagaacactctgaccagttctgaagctgagtgaagctaaccaatgtgtgtccatctgagattaggctaatcccaaggaatgaagcttgtgtgtaccacaagacaaagattccaacagttgcaactccaacataagaaccaatcactagatatcgaataagaacccatgaatcaatgagacaatcatcgcttttgcggggtggcttcttcatgatatcaatatcagctggattgaagcctaacgcagtagcaggaggaccatcagttacaagattacccaaagaagctgaaccggtatcatacattccggtatcccaatggcgcggttaagaagat

SEQ ID NO: 4827 - DNA, 525 bp, Arabidopsis thaliana columbia
gattgttgaacgataaagtatcaggactacacttaaaatcacccatttgcctaaaaacctccatagcttcctcaaactttcctccagcacagtacccattaaccatcacattaaaagttcccaaatttacagccaaatgcctcggtggattatgttcctttttcaccgcatcaaacaacttcaaagcctcatcaaacttcccattctcactcaaagcctccagcacataattataagccatagcactcatcctaacctttgaattctctccaacagcttcctcataacactccatagcctctttctccatctccttcatgaaataccccttcatcaattgcccataaaccacaccatcatcaacaaacccaccaagcttctcctttaactcctgataaagctttaacacaccatcagcatcagaattcttcacacaccccatcattagataactataaacaacaggatccaccacaaaacctttaacagccatatcctctttaatctccattgctttctcaagat

SEQ ID NO: 4828 - DNA, 429 bp, Arabidopsis thaliana
  unsure (1)..(429): unsure at all n locations
ccacgcgccaatcccattgcatccacctttaaagaggtgcatcgtaagaaccccagcgtgagacacgagattacagcccacgagaaccaactgacaattcaccacaaacgaagggaaagccgaaccgggtaaaccaaacccggtccagaatctataaccgtaaaccaccgagtaaaccagagtcgtcgatagaatcgctagaatctggtacgactgcgagaattctagccagaggaaagacgtgaaggccatgacggagttacaaaagagctgagacacggcgagcctccggctacgtaaaacggcgaaaatcgtacggaacatgtggagaaagcgcgtgaggtaaaacacgtatgaccanaagaagacacgaccagagggacgagtccgagaggaaacagagaagcgattggagaggagtggcggttt

SEQ ID NO: 4829 - DNA, 761 bp, Arabidopsis thaliana
tttttacgcctcaataatgtggcggtggcgtttcttcagcctgcgacgcgatgttcgacggctggctggcttttaacttctcggtcagcagacgcagatgatcgcgcagtttcgccatctccatttcatgagcggtcaccgtgacgttcagttcttcaatggtgatttcctgaaaagccagtcggctctccagctctgccaggcgtgcttccaatgataaatcctgcatgattcacctcttttgtcgaatggtcgccgcggattctacttaactttgctgcccgagacagcactcatttcgcggtcatcgaaactaatttaaacaaaaagagtctgaaaatagatgataatagggcgtgtctgtatgtagatttgttcgacaacgctttatagtacccttctgataatagttaaccctggggtgagatgccccgatcctggagatatggatgaaatcactgtttaaagtaacgctgctggcgaccacaatggccgttgccctgcatgcaccaatcacttttgctgctgaagctgcaaaacctgctacagctgctgacagcaaagcagcgttcaaaaatgacgatcagaaatcagcttatgcactgggtgcctcgctgggtcgttacatggaaaactctctaaaagaacaagaaaaactgggcatcaaactggataaagatcagctgatcgctggtgttcaggatgcatttgctgataagagcaaactctccgaccaagagatcgaacagactctacaagca

SEQ ID NO: 4830 - DNA, 1558 bp, Arabidopsis thaliana
gtctctctttatctgtgtgttgtatccattttaggatggactgtaggctaaatctgaattgaatcaatgtccttttgtttgcagatataatccattgcacatgcacacatcaccagttgtttttccttgttgtatcaagcacatgatacttaaagggaataacatgaaaggtacatagtttgtctcatcactttctcagtttccgattcatgtatctttcattcgttcctcttttgatgtagccaatttcaatgctctattgatttgcattatcatccaacttttacaaaaaaaataaggatgagttgagagtacaatgaagttgtgccgatccaaaggaactagtcatgaaatgatgatggtgaatagctaaatgattcattgttgttgcatgtacaaatgatcccaacaacgttattaataagtttataactgcaggattgtgaaaatcttaataagcatcaaaatctattaggctcatagtatagtagcaaagcttgttgtttaagagtaagtttcaaaattatgctggaatatagtttgaataacttcattggcatgtggttttcagagtgaagaagaatgatggagtagtttcggagaagatggaggacttttggggttgcattgtcatggaatatgattcaagcaattgcaggagatgatcaaaagtctttgagctttggtccttgcttcaccaagaacaagactttttttagttttcttcaaaagcttagcaaaagtcaaaaacctaagctgattttgtgtgtttttaatctcatatgcattgcatattttttgttatggatggaatattttagttagctgataatattaaccaaatataataattattttaaatatcgaaaattatatgaggttcttgttgttgttgttggtcttttcgactttctgcttaaacccagaaaaatggattcacagctagtcttgtctctgaagctgaatccaagcttcactcctctttctcctctcttccctttcactccatgttcttctttttcgccgtcgctccggttttcttcttgctactcccgccgcctctattctccggttaccgtctacgccgcgaagaaactctcccacaaaatcagttctgaattcgatgacagaatcaacggcgctctctctcccgacgctgattcccgcttcctcgaccgcgtaagttcttcttaatccctctctctttcattcactgtacctgtgtctctcatagctcattttttaggtctcaattcattggaattagacttggaatcgttttaagctgaaattctgaacgtattgcaaggctactcacattttactacattggctcgaaaattatgtctcaaatttctgagctttagttacgggtcactcacagatggttatatccatctgcgtctaatcatatttgtgtcttcatttcgagtatggcttgtcttgtttgaccagtgtacattattagctggagcactatatggtagtagtctatgtatcaaagaacgaattttgacaagtttcatctctcattgagctgtttcttgcgcttcttttg

SEQ ID NO: 4831 - DNA, 566 bp, Arabidopsis thaliana columbia
gtagtaataatccaaacctccccaactgaagtgagacccttgtctgacgattgggaaagcatgcatgaaaacgcagacgcaaacgcagaccgttgcaaccgcaagcattgagtgaatgataggagttgggaacaaacgttgtgaacctgaaactctcctttgatacttcaaagccaccgttgcacacgaggcacaagatgatgatgacttgttcatctctaaacttaatctcttgctcagaccggtttggtcaactacctcgtgctcgatgtttagtgagacttgcttgtttcttttgtctgcaagtttacgagccaccaatgagttatagttatggttgttccttattgcagcgtagctgtatggagtttgcccggttgcatcgcgaagagtgttccagctcgataatccaatctgaaaacataaatgacggttttgtcagttttgaagaagcaaaaaaattggatttgagagaaagagagagagagagacatacatcttgtggatcattggtgagtagatcatcatatcatctgacagatgtcatgcactagatgtaaggtgtg

SEQ ID NO: 4832 - DNA, 1735 bp, Arabidopsis thaliana
aaaaacttttgtaataaaagtggttggaaaaaacaatttagataacggatgaacattaattaatcaactttatagatttgtcatttgtgactacaaatattgtagatacaatgaattagtccatcaaatcagattagtatgtataacctaataatctgtagtggagtcggtattgtgtcacctactagatttatatccgtcataatgcatattgttgttgatacaattagatcataaaaacaaaaattgcagttctacgttgaagcatctcggagaacaagtgatactcaactttgagacatcaaaatccgaagtaaaaaactgaacataatacagactatattcgataaaaaaaggataactcatgatctttactctttttttctttatccctcactgctttaaaatttccactaatactcttttgtttctttgattattattatcctagttatgaaaaagaagaaaacagaatgcatatacatacaaatatgaaagaatatttgattaaaatgatgcaaagagccccataaagacaaaacaaaacaaactagtttttgttgtggaagaagaactttttttaactatgaacctctttatcatcatcagcactttcaatatctttaggatgatcgaaattggccgggacgatggtatcaggagcaacttcatcatcaccggactgagaggattcgctaggtccaggtgcagcagcatcatctggtgatgatgaatctggtaagccctgaccatgtgttacattgatcataaaatgctgaccgaatttacattgttcgccatcatagtttcccgagaagaaataattggaaccttctttaacaagaggaacacttattgagacgggaacaggagatgttgctgaaggatttgcagccgaccactctgttgtatcattgttttcattgttgtcgtaatcacaatctttgtatgttttgaaatcatatgtctgaaccaccgaatggttgctatctgtgttgaatactacatattgaaaacaaaacaaacgatataacattttgctaagttattgtagtaacgaaaatggggttgaagaaaaaaatcttactgaggaaatccccaaagaaaaggatttggaatcggcccatttctgataattagcagagggtctctcttgaatatcgaaccatcccgtggactctcccacagtgtagttcttgtacgcatcagctgataaactcagaagcataaggcacatgatgagtaacacattgacacaagatgaacaagaaggcgacataattcttcttactctcttgtccgtttttcttgattataaattgtgattcgttgattgatctttctttgtaataaagaaaggcataagaaactgtacataaagtaataatgagctcgtcattgactgcatataaaaccaagacatgtgtgagtgtgacatgtggacaattcttggggatgcgaaggaacatgagacgatacgaagtggtcggtccaatcaaatgacaacgcctctttgctcttccccatgtgatctctcactctcacaccttacttttgctgtcttcgcttccctacgtatcattacttctttcataaatatctgtcaactgcctttttctactaaatggaggatattttagataacgtgttttgtagtgtttcaaagtcggttgaaccggtatttaaccggtttgattggaccttaaaaaccaagggcccatttaatggagtaaaa

SEQ ID NO: 4833 - DNA, 495 bp, Arabidopsis thaliana
  unsure (1)..(495): unsure at all n locations
nnnnnnnnnnnnnnnnnnnnctaaagcggaaaccgctaccgtgaagatccggtacgtatgctgcgcgcggtacgttttgccgccaaattgggtatgcgcatcagcccggaaaccgcagaaccgatccctcgcctcgctaccctgctgaacgatatcccaccggcacgcctgtttgaagaatcgcttaaactgctacaagcgggctacggttacgaaacctataagctgttgtgtgaatatcatctgttccagccgctgttcccgaccattacccgctacttcacggaaaatggcgacacgtcgatggagcggatcattgaacaggtgctgaagaataccgatacgcgtatccataacgatatgcgcgtgaacccggcgttcctgtttgccgccatgttctggtaccactgctggagacggcacagaagatccccaggaaagcggcctgacctatcacgacgctttcgcgctggcgatgaacgacgtgctggacga

SEQ ID NO: 4834 - DNA, 836 bp, Arabidopsis thaliana
caaaaactttaagcaacaaaaaggaaattcataggtagatacagaaattaagttggaagaaaaccttgttatttagatagatggatattgagagagcctcttcaggtcccttggtccattctagaatcttctttgcccaatacattctgcatgtaatgttgataaacgtcagtttttaccatagttgctattatatagcacagtcaaaatccagataaatgatttcacttgccgcatgaaaccgtgcattttcccttgataaaccatctctaactgtgaagcattccatagctgccaagattcaacaactcaaaaaataacacttaaatgcaaatgctatgagaaaagagattggtggcttacaggatctgctgtcagtcccttctctaactgctccaacctacaatttcaataccgtttaacgtgcatatagaagcttggaagattttctttccaaaagaattaaggagtaatggctaaaacattacgagtaaatgtgttccctcttatctgaagcatgatccattagtgacttgcgtgcccactcccaagctcccttcaaagaatcataatgaggttgataatagcaaaaattgtcggagagttctcttcgcacaatcaattcttccaagaatgtgtctaccgcctttaatggacaaagacaaacaatgcaaataccaaactaagagagtgaccaacaggtaacaaacagagaaaactacacaagtatatacattcaaaagtatgataggcctatgaacctgaggggaagtactccggactctacgcgcctccaaggcacaacgctgagctgatacgtgcccgaaatgtagata

SEQ ID NO: 4835 - DNA, 852 bp, Arabidopsis thaliana columbia
caagcaatgaagcctgcctctcagcaaatggaaaaccatgcctgacagtgaaaggacgttcagtagatgacgatgacgacgacactccagtgtaaccaggataattcatatgctgaggagggcttccccagcgatacggatgatcagatgaagtcccgaatcctgaggagtgtggagctataaacctcatggagttggaaattccccctgttatatgctctggcaaagaatgaggttgcccataggaaatgttgtgcatcaatcccttattcagaatagtttggtttgaatgattcaatagcccttggtcattactgactggtgaaaatccatgaaagctagaaggatgagcaggaagaattgaagccagtcctggcatattgtctgagttaactggcctgaccattcctagaccatgtggcctcgtaaaggcatgcgaaggagagcccttcactgggctaccaattggccagttacctattaagtagattgaatgaattacggaaaaggcatgctaaccaatcgagagaaaaagttgataaaagaaatgatcaatatgagattacctggtggagaattagcaacatgtgaacctacttgattgtagaaatttgtaacttcggttctctccaaatcttgactttgtgacgggaccgacctgcatacaaaaagtttccgttcacagtgtatgcaagataactcaattctttgacatatacaaagtgcagaaaactcacagtcgacgagcccctccaggacgactaagttcgagctttatacattttccacctatctcgcttctattcagtgctttcaaggctgtctctgcatctctaacatcatagtactcaa

SEQ ID NO: 4836 - DNA, 510 bp, Arabidopsis thaliana
cactcttcttcttcttctctttgtttacctccttcttcaatgttactttactataaccgagagcttttgaattatgtaggacgggaagatcgatttctcggagtttacagcaatgatgaggaaaggagatggagttgggagaagcagaaccatgatgaagaacttgaacttcaacattgctgatgcttttggagttgatggtgaaaaatctgatgactgactcatcattcttccacaatttctgttttttttctctttaatttcgtttatattttgaattctaatttctaaggatacaaaaatatattctggcttgttttttgctttcctttttatttttgtacatgagcaactttctaaatttttatcctcatatggataatttttgcttcatataaaagtttttgaattccaaagaaatgtgatttagggatggcgaaaagaaaccgaaccgaaccaaaatcggatttcataagtaattttgttataatacaaactgtgaaactgtag

SEQ ID NO: 4837 - DNA, 567 bp, Arabidopsis thaliana
atgagaccacacgcgagacgcattgagagcttgaggaatacaattcaaaggtcgccttttacaataccaatggaagaaatgattagacgtatacagaataggtttgacagggattcaaccccagtccctgattttagtaaccgagaggcatcagaaagagtcaacgatcgagccaattcgatccttaaccgggttatggacctctaggggagttagatcagagcagaaccaggctagtgctgcagcagcagccattgtcgcagcatcagaggatattgatctaaatccaaacattgctcctgatcttgaaggagaaagcaacacgagattccatcctctcttgatcaggagacagttacagtcgcaccgagttgcaaggatctcgactttcacttctgcgttgagttcagctgagaggcttgtggatgcgtattttaggactcatccgttggggaggaacaccaagagcaaaaccatcatgctcctgttgtggttgatgatagagactcattctcaagcattgcagctgttataaactctgagagtcaagtggatactgcagttgag

SEQ ID NO: 4838 - DNA, 528 bp, Arabidopsis thaliana
cgttaaaattaattaaaaatctataaaggtaaaagatttcatctttctcctgacgcgttttggcggttcgttctgcacagtttcttcttctgatgctctttttttgtttttaagaattaagggtttctactttaatcgattggagcacaatggcattgacgagataccagatacggaacgagtacggcttagcggataaggagctctaccaatccgccgataaggaggatcctgaagctttgctcgaagctgcttccatggctggtctcgtcggcgttttgcgccaccttggcgacctctctgagtatgtttttttttttttgttttttaattcaatttcggtccaatataccctaccgtttgaggaattttactgtagagaatgggacactgaaggttccgtggaattgaatttcgatgctatatactctgaatctagagaaaacttgaatctagggtggtctctttgttttttgcttaaaaatcttattcggtgtagttcaagtttcttgtgtgctgatgagatga

SEQ ID NO: 4839 - DNA, 511 bp, Arabidopsis thaliana columbia
tgtgaaaaggttttctataagtaagatttagtttatatgagatgtatatggaggattattgcattttaacattgattttgggaaagtgaaaggatatattttcttcacaacgacaaacacgaacaattatgacgtaaacgcttttttattcgacttaacaaaagacctcatagttaatccaactcactccctttgctctaacttggccttcctcttctccatgacaaagaagacaaacagagaaacaacggagaagacgctgaaaaatgtggatgctatgtctagccccacgtgatgaccacttatggcatgaacactgaagagatttgtcgtccttccctcatccgtgctctgtccgtatgcaacttcgtggccatctccatcgattccataggcacgtacgaagtaggttccagtggggatatcaagtccgattgtccaatcgagtgattggggggtcttgtcgtatgccttggacacaatctcatgagggcaacttctgtccttgaag

SEQ ID NO: 4840 - DNA, 571 bp, Arabidopsis thaliana
atgatcaaggtaacaaggcggctggacgatgctcaaaaatgggtaaacgaaaagtgtcaggctggagattcgagtaccgagccttacattgtttcacatcacactcttcttgcccatgccgctgcagtggaagaatttcgaaaatgtgaaaaaacttcgcatgatggccaaattgggatagtactatcaccaagatggttcgagccttatcattccgattcaactgacgataaagaagcagctgaacgagctcttgcctttgaaattggatggtaagttatataagcaaaaaaatttaacgattttgcttctcatcatatttatttgtaatcttgatattcattctatatgtgtataggcatcttgatccagtcattcacggagattatccagagattgtaaaaaagtacgcgggaaataaattaccttcatttactgttgaacaatcaaagatgttacaaaattcatcagatttcgttggaattaattactacacggctcgcttcgctgctcatcttcctcacatagaccctgaaaaacctcgtttcaaaactgaccaccatgtggaatg

SEQ ID NO: 4841 - DNA, 743 bp, Arabidopsis thaliana
tggaaagataagagagaggaacacgcttgtcctcaccaagcttttaattcgtgaacccaataatctcaaatgtgaagttgtagtaaaaaggacctatacctaccttctcatgaatcaggaagaagccgaccattgtacatcttttcgagtagctcacgaagcaccaggccttctaagaaggcctttgttgtttggtaaacctgtacctaaacagaccggacaaacaagcttacctcgacctgtttgcaatagaagccaccaactaatcaggaaatttcaagtgttacgaaaccaaacaagactaaagagatatcgggaaggaaacaaaccgtaacagtttggacattccgtaaactcatatacatctttcgcacgttttcggttgagagctttccattttcctgtaccaccacacatatcacctatatcataacaaaatccaattaaaccaaatgggtatcagtagtaagctcatgaggcattttgcatcatatcaaatggaaacagagaatcattacgaacttttcacataggaaggtgtctacgaaaactattatcaagagttccatatgtttgttgttaaaagtcacaatcaggtcttatatctttcaatcttaagctataagaccctacagattctaaagaaacacaaggcacatatactatacaatatacgtttaaggatatgtttctatatcagagtccagataagaactaaacaaaagacttgcacgcacaaagac

SEQ ID NO: 4842 - DNA, 550 bp, Arabidopsis thaliana columbia
aaatatcagtgatcttgtgtatctgcgatcactattcatgctcgtgattgtttgcgttatttacatcaataccctcctccttgaaacacaaacaaaacagctttagagacactgaggcaagattgattatgttcatctagataagatacacgtacttggttatgtgatccaggctcgtgtactctttgaggattggagttaagatcgatcatattatgatcatgatcaccattcccatttgattcttgaccacgaccagaggaagccttttgacaccgtagtcccagttggtcagcatgattaggcttatcgcctggaaactacaagaacacaacattgtaaagaacagtcaataccacaaatcaagaatgcttcaagatccttgcattttcaaaagtcaaacctcaattctctgtctcagtaatagagaccgcctatgtgttctcttcccaccaacatgtagcaccatatcacattgtagacaaagggaactaccatctatctcacagtagaagaatgctgttcatcgatcaacaacaaaacaaacatg

SEQ ID NO: 4843 - DNA, 624 bp, Arabidopsis thaliana columbia
ttattagtatgtaacagaatcaaaagaggtgtctctctgcaaattcataaatatctgcattaaactatatacgattttgtttggtgtaatagaatagtactaagtaacccatcttactttgtttactattcatatctttttgtcagaacacaaaagcacatttagagttattaaaatagtgattatcttttctttattggtagaaaccatgttaattagtcaactaatgattttttaaatacaagttgtatacttttggtgttgtgattttgatatggaagctaaaagaagatagatcttatgttaacctcgaaaatccatatttgacatacttcaaaaccaagagtaaatgttatagaattgcataaacgaataaaaaaccttcctaaagctttttttacaccaactttactactaagtaaccagaagaaaagatttaaggccgaggtgatttaagcacggctcctagaccaaaccgatgatggttcctatcagtcagtccaaaggcaaaccaagctcacagattccgcagacggtgtttacatcctgaacgtcccattgtaaccagggatccaattagtcgaacctacaagtctctcgatttgaagtctgtttcgagtttgg

SEQ ID NO: 4844 - DNA, 796 bp, Arabidopsis thaliana
acttatctaacaagcgtcagacgtttttaccgtcagttaggatacattcatcttgtcttttaaactcggtgttctgccttggttacttggttgctggctacatttctgcactttccctatactgggaaagacagcttcccacaccgttgaggttctttcagactatccactcatggctgacaaacattggttaatgggaacgttgtacttggtatctgctttaagttgcatggagcttatccaaaaggtaaaatttgaactttttgttcagttctcacgcatcatctagtttactccactttctcttctttcttttggcagatagttcagaaacgagccttatggtatctgctagatgttgcagaaccaaactacaaagtcaccaaactgcatcttggtcccattctcttggcgtttgctttgcatgggacaatggtggtgattgtgcttcacttaccaataaaaacaatcagtctcatcagccagtcctttttccctctccaatttgggtaagctcctctggaccttaccacataatgtttctaatttctcgattcttgaacaaaatgtgcctaataagggatatgcagggtgtacgaggatgagtttgtgtttggcttacttgttgcttatatgtgcctagtaatattcggtccccggtggttagccaatttaattagaccatccatcagacccataagttcacaagtgggttatcactatcagttctttgctcaagttgagtgatttcttgcttggagagccccgaaacacggtgcaaatcataatatgagac

SEQ ID NO: 4845 - DNA, 792 bp, Arabidopsis thaliana columbia
gtggcgtagagcttcgtaaatcgccttacctctctatataaacccttgactcccattcaaaatttctcaccctagaagcgttctaattttgtttcgctaaggaatcccaagaaaagttccgatttggaagtaggtaagttttccgatcttagtttatttttagtaatcgccgattagtctctaatcaagtaggattatggtatgttacatacccaaataggaggaagataccaatggatttgaagggtaggaatagtcgtttcccaaggatgcgcagagcagctataagtttcggacatgtgttaaagcacatgtttgagtgtttatttcttttaaataattatgactcttaggaggttcatttatgttttcaaagtagtttgacatatattacaagttaaaggtttttctcttaggcaccattatcgaggtcccaatttagaatctagtttttgacgctggcggagttgttgctcgacggcctcaagatgtctcaaagcatctctcgttcttttgtctctttaccgttctttgcaatgctgttgtatacttttgccacgttcctaaccaccattgttctttctctttgattttgtctatggtggttggagatctttttcgaacgttttccaaagattcattgctctgccgatcctttcaggcgagatcctttttcaccttcgtctggtcgacatggtcgccggtgagatctatcttcagaatctggttgctcgattttccggtaacggtggctccaactctaatatatcgtctctctcactccgggtgaag

SEQ ID NO: 4846 - DNA, 1013 bp, Arabidopsis thaliana
tgcacctgaagtcgtagatgaatgagtgaatgatgttaagcatttattttctatcaattttgatttcattgtctatgtatatatatatgttgatagtaaggaaaaactgcagttgtgttacgggtttagttatggtttatacctgctgggttggaaggatcaaatagagcagcgggtggcccggtcactggcgaccaacccggtccataaaaatcgtaggccataatgttaacaaaatccaaattgtcggcaatggcttgaaccgggtactcctcaccatagtaatccggggagtagtaaaccgcagccgtcaagagcaaaggcagttgattagttctgtcagactcttccacaaccgcagctcgccattctttcacgagtttcccaaagttggccatctccacgtcattgcttggatactcccaagctaggtcgaggccgtagaaatccttcttcctagcgatatcgatcgaggaatcaatgaacgctttccggtttttgctgttacttgccatggacgctaacacagctttgtctgcatctttacccccgatcgacaagagagtttgcacgtccgtgtttttgtctttaacggtatgggtaaagctggagacttggcatgagttcgcggcagagatagtgacttcatgggtggaagagtcgacgtcagcgaaggcgcagaaaagatgggtgaagcgagttgagtcaatgtttccggcagggaagtcgttttccggcttcacaacccagtaggaagcttttacgatcgagttggttcggagaaactgagtttgatcagccattttggtcgagggtctttagcaaagtgctttctgtgtttgtttgtgttttgtaattatgaggatggtatcgttgtctatttataagggtttagagaaatgatatggttaagttttggaaaataaaaacaaacttcaactttgagtttagtatttcgaaagcaaaaagtctttgctaaggatgtgagtggcacaaaaaaaaaagcttgtata

SEQ ID NO: 4847 - DNA, 656 bp, Arabidopsis thaliana columbia
tttcttatggtaaaatggcatcaagcttggatgtggttgagaacagtgagaaagctacttccaatttagctactgaggatgtgaatttggaaaacggaaatacacattcttcttcagaaaatggagtagtctctcctgatgagaataaagaactggtggcggaagttatctcagtaagtgcctgttccgtggaaacagggagtaatggtattgacgacgaaaaatgggaggaagaaattgatgtatcagctggcatggtaacagaacaaagaaatggtaagactggtgctgagttcaatagtgttaaaattgtttcaggtgacaaatccttgaatgatagtattgaagtagcagctgggaccttatctccattggaaaaatctagttcggaggagaagggagagactgaaagtcaaaacagtaatggaggacatgatattcaatctaataaggaaattgtaaagcagcaagatagcagtgtaaatataggtccagagattaaggaaagccaacatatggaaagagaatctgaggtattaagttctgtttcaccaacagagtctagaagtgatactgcagcattaccacctgctcgcccagcaggtcttggtcgtgctgctccacttttggaacctgcaccacgcgttcacaacagc

SEQ ID NO: 4848 - DNA, 829 bp, Arabidopsis thaliana
gatagaattgatccctagttccttacaggagacttcaacgaaattattgactccaatgaaaagtcaggtggtcctacacgccctgaaggatcctttgtggacctcagaacctttatgtccacttgtgacctctttgatcttcgccactcaggtaacttcctatcctggagaggcaaaagaaatgatcatgttgtgttctgcagacttgatagagcaatgtcaaacagtgaatgggcagttagttatccctcaggcagaagtgaatatttacctttcgaagggtctgaccatcgaccaatcatcactttctttgacctaaaatagaaaaagagaaaaaggtctgttcagatatgatagaaggctcaggaatatccaggaggttacagagctagtggaaaagaactggatgaaagatgtctatgaagaggttgagaaaaaaataagtagatgtagacacgctattattacctggagccgggaaaagcaccttaatagccaaaaacagattcaaaattgccgtgctaagcttgaggaagccatgtcaagcctagattctgaaccaacccttattaactccatcaatgaagagctagcagctgcttacaaagaggaagaagaacactggaaacagcgaagtagacagttatggctcactctgggtgacaaaaacactggattttttcacgcttgcactaaaggacgattagcagtcaataaattttctgttattgaaaatgaagaagggactaccttttatgaagaacccaaatcttgaaggttatttctgagtattatcagaaaattttcactacaaaaccaggagaaagaa

SEQ ID NO: 4849 - DNA, 1556 bp, Arabidopsis thaliana
cccatactcaggtggctataaaaatgttgaatcctaacagttcgcaaggccctgtagaatatcaacaggaggtattttcttgacatattattagtgaaatttcttgtttagtttcatcatcattgtttactggtttattgtgcacaaactgctgcctctacgaaaaaggggactttgaaacacagttctactgtagttttgattttatagtgttcgctgtggaggagctttgacttattcttgcggcattgcaggttgatgtcctaagtaaaatgaggcatccaaatatcattacgctaattggagcatgtccagaggggtggagtcttgtctatgagtatcttccgggtggaagccttgaagacaggcttacttgcaaagacaactctccacccttgtcgtggcaaaatcgtgtgcgcattgccactgagatatgtgcagcacttgtctttcttcattctaataaagctcatagcttagtacatggtgatttgaagccggcaaatatcctactcgattccaatctcgttagcaagttaagtgactttgggacctgctcactacttcatcctaacggaagcaaaagtgtgagaactgacgttacaggcacagttgcctatttggatccagaagcttccagtagtggagagctaactcctaagtcagatgtttactcgtttgggattatcttattgcgcttgttgaccgggagacctgccttacggatatcaaatgaagtgaaatatgccctcgataatggaacattgaacgacctcttggaccctttagcaggggactggccctttgttcaggctgagcagcttgctcgcttagcattgagatgctgcgagactgtcagcgagaatcgtccagatcttggaactgaagtgtggagggtacttgaacctatgagggcttctagtggaggatcttcatctttccatcttggccgtaacgagcaccggatagcccctccatacttcatttgccccattttccaggtaactaatctgtatatttgagtatggatttccagtattattatcaatctgagaagacttcgatcacaaagtcattaaaatttgcttatctgaggtctcaaaccgttatgttgcagtctaatggtactcaacccgttcttcctctgctttgttttcaaatatttcaggaagtcatgcaggatccacacgtggctgcagacggtttcacatacgaagcagaggctataagagcgtggctggacagtgagcatgatacttcaccaatgaccaatgtcaagctttctcacaccagcctaatagctaaccatgctcttcgttctgcgattcaagagtggcttcaacatcatttgtgaaaataaaatccttcaaaccctcaatccctgttctcttatgaaaaaacgtttttgccttttctgcgggaggcaacagagtaagtgagtaagattagtgttttcagtcttccttatacatatacatacgatctaatcatggatagcagcatatttgtttactttttcaagcatagtgtaagtcctccatatcagtcatatatga

SEQ ID NO: 4850 - DNA, 561 bp, Arabidopsis thaliana
gttgctcttgccttttttatcacggtactgcttgttctagggtatgctctttctaggaggagaaaagcctaccaagagtttgcaactgaaagtgagtttttttttttgttttaacaattatgagttcagggcataaacgtttttaaatatgtcaattcagttgtctctttctctgttcttcaacgatggttatatttctcttgcagggaggtcaatgaccacttatggtactgcaccgccagatgatggtaagagactatacagctatttgcattaaaactgttaatgtccctttggatacgtttccaccataacactatgtatatatgctttctgctgcagatgatattacaacttcaggttcacttcaattcgattttaaagcaattgaagctgcaacaaataattttcagaagagtaacaagcttggtcatggtggatttggtgaagtttttaaggcaaaatgttcttaaactttctcaactactagtttgtgttataaacttagttgccaaaaaaaaagataagaaattctgatagtgagtgaagatcatatgaatt

SEQ ID NO: 4851 - DNA, 571 bp, Arabidopsis thaliana
caagctcctcttgatcgcccacttgctgctgcaagtcctcaaaacgagactgtaatgcttcacgatcagcaatcacaccactttgaggtgtactgatatgtgctgcaatctgactgtcacgtgggcgtttatggtaatagtcggttgattcctgttcagaaatcttagtcacctttccactaatccgcacttgtcgttccaaactcggccaataaaacaataactcagcgtatggattttccgcgagatccaaacctttttgactatcgtaattggtgtagaaatcgtatccgttttcagtcgctccacggagtaaaaccgtacgaacatgtggtcgacctagtcgattagctgttgccaacgacattgcgtacggttcatgcaaatttgcagctaaggcgtgattaaaccagtttaaaaattgaagatgaggatcatgactgatttgagactcatgcaactcaccttgctcatagcttaaacgtagttcactcaaatctttaataacatcgttcattcttgtcacctttaagcagcttgtgcttgagctcgaactgcatctgctaagtga

SEQ ID NO: 4852 - DNA, 481 bp, Arabidopsis thaliana
gacaatgttctttagatatggtagctcgctaagatctgcttcttcgataagccggtctaaaccaacccggttatcgatttcgtctctcgctttagatattacgtcaggatggttaagcaaattggaaagtgcccattctagagtgactgctgatgtgttagtccctgctattaccattatctgcattaacataataacatcagacaatttatcttacttataatcaaagttaacaaaagatctaataattaatagaaaaaataaaggaagaagaaataaaccagtatgatgcctttgatgatttgatcagtgtaatactcaatatcagatttttggaggacaagcaaatgatcgatcattgtagtaccggtttcttgttgccacgtttatcgtcaatgagaccttgtaaaaacttatctgtctcctctcctaactttttaaccctattttcataacttgaaaacagtctgaggatggggac

SEQ ID NO: 4853 - DNA, 506 bp, Arabidopsis thaliana columbia
gcggagaagaagagaaatgtgtcgaagcagcaacacaactataagacggaggcgcgtgagtttaacgcgccggtaagctgtccaacaccggttgtgaagcggaggatgaaggcaccaaagcctgtggatgaagacttgtacaaagtttccccacaacttctctcagtcaaatccaaaagggtaattaaactttaatttaattaacttgttattaaattagtcttatctttgttagtctgcttcgattaatgattttgattatggaaaatgttaataattgagatttgcagaaaagaggaggaggtgggtttgggtgcatttcaaggtgttttttgccaacacgggtgctttgaagaaacaagcgtgagagacttgagtcagaagaacactttgtttttttttcttttctttttctaatcctattatatatatcaaaagactatgcttgtgagagtatgtattgatgaatgcgtaggaataaataagatgaatgctaaaagatagta

SEQ ID NO: 4854 - DNA, 1702 bp, Arabidopsis thaliana
ccaatcagaagaagcagcaacaatcttgtcatcaaaagacttaaggtcagcatttgataatcgtgcaccctcaaagaaaccaaaattttcattctctttagaagaactatttctctgagcatcttctttaccttcaaacataccaaaactctcatcctctttagaagaactatttctctgagcatcttttttaccttcaaacataccaaaactctcatcgtctttagaagaactagttctctgagcatctttaccctcaaagaaaccaaaactttcatccactttagaagaactagttctctgagcatcttctttaccctcaaacaaactaaggttttcatcctctttaaaagagttccgagcatctttctcctcaaagaacccaaagtttccctgcgctgcgaaagaaacactttcctgcgcatctcgtccagcaaacaaactaagattctcatgttccccagaagaaacaacactcttaggtgcatcttttttatcaaacaaaccaacattatcatgctgttgcgatccaacaactccctgactctttacactatcgaataagctaagactacgtggatccttaaaatcatcatcctccacaggtttactctctgcctgctccactttggaaagatctcctctccgctcaacgaaataatcatcaagattaatcccgcctagattcagagggtttttcttctgtactgattgtccatcatcagacttctcctctaatgcagaccattgtatttccaaatcaagaaacttagacaaagcaattccttttgaaggcggtgccttagtagctcctctgcttgacccatccgtttcctttagtggctctaccatctcctacagatgaaaagttcgtttttttgaagacacaacacaccacattctacatctgactaatacacaatcagctaggaaaacaagtaattacaaattagtgagaaaggtatcgacttttaccgatccatcgagattaagagaggtgagaaaccatttgtaagcagaagtggaagtaaatttgatgggatcaggaggattatcactcgtgcgttgctgatttccacagaagacacagatcagagactcgattcctcgtaaaagttttcctttgcagtttcggcaacgaaggtacggagctgaagcatcaagttctgcgattgcctcctcggatgtgggaaggctggggaaggatgagtccgagcaatcgtcgacggaggtgagcttggcctcctttcgaagcgagaccttgagttggtttatcagatctaccgagatctccatcgccatttcgttaaggaatctagggtttgaggatgaagattctgagtcttcctcctctgtatcaataataatatcgaaggatgatcaatttggagagacctgccatctgaggcaaagcttctgcaacatacccaatcaattttaaaccaaaaataaccagacaatcgtaccgaaaccggtttaccagatccgtccataccaaactacttctttgaaattcctttgactcaatttggtttatgagtctttcaaatggttcgttctcttgcttcgatgcttcttgactaaaaataaatgatttattaatctcattgtacaaataaaaaaacacaccttgaacatctatcattttgggaaaatagcacatctcacatgcttatagagcccgtctctactgttgattctg

SEQ ID NO: 4855 - DNA, 803 bp, Arabidopsis thaliana
gtcaggtgatgcagtgttccggctacaacttgttctttcgccttcacaactctcgcaaactcaagaagtgcattctacgacgaccaaagacagaacaaaccaaaaaatcaatcaatcaatcaatcccacaacatgaacgcatttcatcaccgaataatatacactctctaagatctgctggtaactgaaattgagatcaatagagaaactccggacaaaattagtctaatcgtgttctggatcaagactataatagcataaaacacacatatcgagacgagagatgtgaaaaaatcgaagatgatgagagatttggaacctctttcttgttgtgttcatcgacagcgaaacgagcgaggctctcaacctcaccactgttctgattagcagggacatcgccaacacctccgactaaagccatctcttcgttgcagaagcctaaatcactggcgatcagagaggaaatgaagagggatagagagaagaaaacaatgaagagtaagaaacggcttctcatcattctcacctttatttggttcggtgccctgtatttttagatatttttcgttttactcgtcgaattgttgattttatcctctacagttaattcgccgtgtaccggattaaggtgtccatttggtttgatgttggttttgttggtacagttttaagtttaggctctgatttatgaaaatattcttacgatttaaaacaaaaaaggtttacatttgattggatgccaattgaatcgaatcatttgtaagaaaagagtaccgattcgagttatagattggtttgatttg

SEQ ID NO: 4856 - DNA, 832 bp, Arabidopsis thaliana
ctgatctatggatccaatgtgacatttttttagaagttcttcgagacaagagattacaccttctgctactttatcactcactctatatggtgtttgtggaaattcctctggcttgttttgcccctgacttctgcaagcaactgcggcgtctaacagaagaagcaatgggaacaaagtgtagctgaaacgtacataaaccaaaacagttctcactaagtaaacagtcgacaatacaccacaaatgaactcttttaaaccttataattgaaactgctactcatgtgcagattaccgttttttcagcagaaagaagtaaaaagataaagagaaacgagaaaagtggaataattactggaagaaggactggagagaggacggaggagtacggcggaggagaaggagcaaagcagggatcgtggttggatccttttcagggttttgcgaaaggtttagaagctccaagcagagaactttcagttgtgcgaagacagcttctctttccgggtctccctcaacgtcgtctccattggtttcacggcgtattacgacggacttgtccattgaatccgatcaattatcccaccaaactcgaaaatctcgagtcagcaaacagagagagatagaaccgcgaaattgaaaaagaaatgacccgacccgagattaattgacccgatccattgctattggcctttataggtcgtcgtcgtctcgaataaagaccgggaagatttcccctttagggttttaggaataaatgcaaaataaacctgataatctatatagaattgcaaacgaaacctcatattttgtaaagtatcgtacaaatgaaccg

SEQ ID NO: 4857 - DNA, 822 bp, Arabidopsis thaliana
gtctcatgcaacgacatgctgatcgaaaccgagccctacacaaggtgtacatcgttagctataccaagcatacagattatcaaaatttcttagaatcagttttgttgaaacttagactaaccttgtttccaagatatcccatgataccacggccaacacatgaaaccttgaggttggttatacgtttccggagatcatctctaacccacacacacaaaaatatccccaccatctgtttactcgccgcaaggctatagccgcgaggaggagttgaattgcatgggattggggtatcatctgagaggcctgagaagctgaaacggggctgttgtgatgatttcgtatgctcgagctcatttggcgataaattgttggtgttgttcaaggcttctcggataagagacaaccacttagccgcagggccattatcctcggctccaagtacgttaccggcatttaacggcacgatttcttgaaacctaaacaaaacaaagtattgatgttataattactccagaaaaagtatattaaaagtacgataaaaccaattaatatgattatatgcataccctagcacgtaaatgtctgcatcagccggagatttaagccaatcttttaagtctaatccttcatgtggcgacttccctcccacgttccatgtccccacaaacattctaatcatcaacaattaaacaattacgacgttaatgatcatagctaattatagaccagagctaaattataggttaatcatggaagtatttattacttaagatcaagtttgtcatcaacgcgtgtcacatgttgttcccggttgaatgt

SEQ ID NO: 4858 - DNA, 695 bp, Arabidopsis thaliana
tctcttcttctcttatccaggttgctctctaagcctagaaaagaaggttctttcggtatacatacaagcaagaagaacagcgaacgagcggctcaaggttatcggtctttggcctaatagagtcactaaaccaaaccaagtttggcatttatgtatatgatgatgactgttgtatgattattatgtaacattcttgtttatgaaaaaatgtattgctatcatctgatggaaagagaattaagatcttccttttcaccacaaaagtaacaaagagtggttggccatttttttatgtacactgacttctacaatctttgttgcattgtttattcaagaaccctaactcctacacaggtaaactgtaaggagagatgagcttatcggttttggtgtgagcagaggcagtctactcggcgaaagagtgttcattcaattgctcggttggaagcggctcaaccttctcggccttcccgtctttctttgggattatcagaccgtaacctccttcttttctcttgtacactatgtttatctcacctgcaaaccaaaaacaatatcaaaatgtaagtattcctgttgatcttcctccgactcctctgaggtttaagcaatcgagtatttatggaagaaaataaaattgtcacatgcataccagtttcttcattttggaagctatagaagtcgtgactgactag

SEQ ID NO: 4859 - DNA, 1236 bp, Arabidopsis thaliana
cgtccaattcgatataactccatcccaatgatctttctttgattctcttctgcaatgataatcttcttttctctacatcttgaatgttccctttagacgcatgtgttttgtctaagacaatgtaactaccacaaagctctggctcaagctccaaaagactttgtgacacactttcagcccttctataacccttgtgcgctttgcaagcacgatagagtgcagcccatgttgtaagatcaggatttatcggcatattttctacaagctcatgtgcttcgttcaacttccctgctctacctagcagatcaaccactaacacataatgtttcagcgtgggttcaattgcatagtcaagcctcatgctatcaaagaaattaagtcccaggtcaacttcgcttgagttcaagcatgcagttagaaccgcgagaaacacaacctcatctggcttctctcctgcatgcacaccacaacttaaagaactaaactcgatgaataataattaaaaaaaaatgagaataagctaaattcttagactggacaaaatcttttaccggaatacatcatttgtctaaaacattggatagcctgatgaaagcgtccatgaaccgcccaaccttgtatcatagcagtccaagaaagaatatccttatggttcatattactgaacacagtagccgcacagtcaagttccccacattttgcatacatgtctacgagagctgtccctatggctctatccaacttaatcccattgtccaaaatataaccatgaattcttattcctgatccaagagcaccagattttgaacatgcagagagcacagcagcaattgtgtattcattaggctttaagcccttctctagcatctcgaaataggtagaaatcgcagtttcatagtcgccagtttgagaaaacccattaattaatgttgtccaagacaccacatttttctctggcattaattcaaaaagctgctttgctctgttcaactcgccgctatcaacataacccttgatcaaagtactccaagatcctgaatttctctcaggcatggatcgaaaaagtgttgtagccatatgcatatccttggctcgacaatacccattaatcaaaacattccatatcaaaatactctcctttttgattctatcaggactttcttcgaacacttggaaggcatgttttaattgtccggttttggcgtacatatcaaccaatgataacctgacgaagga

SEQ ID NO: 4860 - DNA, 433 bp, Arabidopsis thaliana
cttctcaacgacgacgttctggtgaccaatgtggcaaagctgggctgaagtgtgtagatacaacccttgagtcaagaagctccattattggcgtgaaactcacacacctcggcaccttgtactgattgatcgatgcgcctctggagatggcatagtccatgagctcctcgaacgttccattcttcacaacacgtatctcgagtggtcctatcgacttatccgcaacccgactttgtctatacacagagttcaacgactcctccatttccaagcagcaccgagccatgacttcgtcatttggaggattggtttgatccttcactagaagctcccagtaaatgacataatggccaggtatagtcttcgtctctgcatagctcgtgtactcgataacacgagttccttgctctccaagtaagagcgatgcgttctc

SEQ ID NO: 4861 - DNA, 1127 bp, Arabidopsis thaliana
gaagacaatataattgtaaaaaaatgaaaatttgaataaaaacagaatcagctaatttctttaacttaccagtcaagcaagctgaagagaagttaacaataagggcaacaacattgactgttagttgaaactgcacaaatttctgaatgttaatgtaaacagaacgtccccatttcgctacggtgacgattgtgctgaagttatcgtcgagaatgatgacatccgcaatctctttcgctacctaaaagagtttaaaaaaatgtttgagtcgtttgcataataacattagacttatttggatatatgatactcacttcagtcccggcaatgcccattgctaatcctatgtcagcctcgtggagcgctggtgcatcgtttgtcccgtcgccagtcacagcaacaacttcatcaaaagtagtcctcaactgcttcaccagtgtatgcttgtccattggggaagaacgagccatgacctgtcaagaaaaaaaaaagttatggtttaaagacttatcaagaaagcaaaaaatatctaaatcttgaaaagttacctgaatcttgggaatgagttcaagcatctcttcttggttcttctctctaaacacaggaccttcaattgctataccatcatcagtgagaattccacattctctagcaatagcctttgcggtgttaatgttatctcctgtaaccattctcaccataatacccgcacggcgacaaagttccacggactcccgaactccaggacgaacagggtctttgataccaacaatccctatgcatgtaaaccctttttccggaataccttcatcagccgaaaacccgctttcgatatccatataagcaaggcaaagagtacgaagagcttcatttgcaaactcatcgattgtaacattcaagaacttgatggattcatcatcaagcggaacaacttcaccacttgagttgatgactttatcacaagccgctaaaactatctctgaagctcctttcgtgtgagcgcgaatgcgtcctccttcaggcagctcaatgactactcccattcttttctttgttgagttaaaaggctcaactttaataactttgttagattgtctctcttcttgaaacttacctccaagagatag

SEQ ID NO: 4862 - DNA, 602 bp, Arabidopsis thaliana
tcaactccacaaagaagcgaatgggagttgtaatcgagcttcctgagggaggacgtatgcgtgctcacacgaaaggagcttccgagattgttttagctgcttgtgacaaagttgtaaactcgagcggtgaggttgttccacttgatgaagaatcaatcaagtatctgaatgttacaatcaacgagtttgctaatgaagctcttcgaactctttgccttgcttatatggatattgaaggcgggttttcgccggatgatgcaatcccggcttctggatttacttgcgtagggattgtgggaatcaaagatcccgtacgtcctggagttaaagaatctgttgagctttgtcgccgtgctggaatcactgtgaggatggttacaggagataacattaacaccgcgaaacagattgctagagaatgtgggattttaactgatgacggtatagccatcgaaggtcccgtattcagagagaagaatcaagaagagttactagaactgattccaaagattcaggtgctttttgtttcatgaactaaagacttaattttttttgtttagtttttgaaacataacctttcggtatgtcttatacaggtgatg

SEQ ID NO: 4863 - DNA, 486 bp, Arabidopsis thaliana
cgtttggagatggaggaatctttaaactcggtttatagacaaagccgggtcgctgataaatcgatcggcccgttggagatacgtgtggtacggaacggtacgtttgaggagctcatggactatgccatctcgagaggcgcatcgattaatcagtataaggtaccgaggtgcgtgagcttcacacctatcatggagctgcttgactctagagttgtgtctgctcatttcagcccttcgttgccgcattggtcaccagaacgacgtcgttagataaaactttatatgaaagatatcaaccggatgatgtgcggttttagaatataaagctctgtttctgatgctaattaagactccctgttagatttcttattaggctttgtgaatcgtacatataaaatttgaagtacgtaccgatgtttttttccttcatcttctgttggaatccagctaataactagctttggtccaaaaaccagatatttttaa

SEQ ID NO: 4864 - DNA, 808 bp, Arabidopsis thaliana columbia
  unsure (1)..(808): unsure at all n locations
taaagtggtttagagtcggttgaaacaattaggcaagactttgttgattttctggcagttggtggcacaaaaatttggatcagacacgcttaatccttgcttttttttttttttttctctctctctctgtttgctaaataagtaaatataatgcaattatttgaactagagcttttctaaaatttgcctggattacattaagacaagtttttgttgcttaaaccaacttattcatatgtgataactacttgtatgaattatatattacatcttgttttggggcctaaacgaagaacagcccgcagtcataagcatgccagtgctgcacaaaaccatgataacgtctatgttgcatgtttctctccttttttttctagaaatactggtctctaactatcctcggggtacaggcacactttgaagaagcattgacagcgcgtcatagaggttcagactcaaaaaaacttgttacaaagggtgttagaggaaaaagtgccgcagagaagctgagtgaagaaactcttgttaagttgtcctcacgggtgaaaatgcaggtaactctgaagtctgaacaccgtttatgtcatccttttcattaagtagggcttttttgatttatgactccacctttgtgggtttattcttcctatagattgatgtggtgaagtccttcagtgactctgaaggagcaccatggaagcattccttgtttggaaatccaaatgattcagagacatccaggtttgtcncaaaacaaatttcttgtatcctacgcaagtttaaggaatatgtatcggtagattataga

SEQ ID NO: 4865 - DNA, 495 bp, Arabidopsis thaliana
caatgcatctgatactccataaacttctcagcataacctcgttcttcaagacttgaatcgttaaagaacctattagcgttaaaccctcaacaataacaaaaagatgatccaccagctgaagagacacaaatacggttttcctttagactaaagaaactgacttggtgaaacctttcaagccgacattgtctctctcgatgtaggcatctagggcatggtagacataggagacattgtactccacgctaagattcacaaaaagcaaataagaaaatgaatgttaagattcagacacatcgtcacgtgttaacttagctaactcgattcccacaagcaaaatcattgaaagcaagaaatgacaattgcgattccgaccagccccaccatgataagtgaatcgtagctgaatcagtagaaaagtacccataaatcaattatgaaagagattccgaacaaacaaaaataaatcaaatgagacgattatgatggtgtaaa

SEQ ID NO: 4866 - DNA, 948 bp, Arabidopsis thaliana
taataaatacgccacgtgtgtgtggtttctggcgaaagtatttgcatgtgaagctgcccctttagttggccccaaccaataccaattattgcctcttctcttattttccacttctccacatttaatactatttctcttaatacactatctcattattcaaccgataaataaggaaaataccaaatttgatttcttcccatcatacaaatatttcccttcatacaaaaaaaaatgaaacaactacaattttaatatccatataaattccaatatgaacacctggttttttcttcagcacatgcaaaaagcacccatacataacatttgatatattaatcagaaatgtataatacatctatatatatttctgttcatatatcaaacttatattgagactgtatgaaactatattgcaatgcaaagtataaacatagtaaacaccaatcaaaacaaataataatctgaaaaattgtataaaaatcaaaacaaaagaatttgagagtaaaaattttaaagtacatagagaaagagattatcgcctgcaacgagtaatagcgctacagccacgagagtaaggattagcctgagctccacgtcggcaattgtagtaagatgcgccgcgtcgtgagcaaggaactgtgtttctcctcagcgcaccgtagcttatatacttcgttgttgctaaaatacgcctgttgatctcagagtccatctcgaactcttcctccgccgtggataaggagcactcggcgatggtaccgttgcatttcgactcgatcggtacgaaatcgccggaggattgggaggttacggcggcgaataagaagtggacggtgagaattgcgatgattatcgcaacgggttttgtggagagtcctctcattgtttctttcttcttctttctctgaggtttttttttttggaggtttcaaaagttttattgaagaa

SEQ ID NO: 4867 - DNA, 676 bp, Arabidopsis thaliana columbia
caacttaactaagataaaaaaaaaaactataacaagttgaagaatttttattacccttttggatttgacggagataagttgtggcctgtgggaagattttgaacaagtcttcatccacatgctttggtgccttcattcttcgcttcaccacgggtattggacagttcatcggtacgttaaactcacgtcttccgtcttccatcattacctcttgagacaatgctattgtctttgaccatcaagctcctacataattacctcttgatattgatccaacatcaacactcgaacacaatacaaaaccaacacgagcctaaacacaaccaaatcgaggagcgtagaggaaagtagaagggaggtctcgtcgggatcttcatcggcgcgcagagacgcaacatgcttcatcgaatttaaaacttgagacgacccatcgctcacttccattgccactagcaaaagcctagtaaccgattcaaattaagagatcaggaggaagaatgaagccaccatattagatctggccagaaccaaaaccgacgactgtgggcgggtgtttcggcgatttggtctttcacaattcaacacccacattattttagtttagtttgagaaaatggatatcctatttcggagagagagagagcacagtgtgttcaagaagaggtgatgacaatat

SEQ ID NO: 4868 - DNA, 704 bp, Arabidopsis thaliana
aaactttgattaacagcatttgttttgcctccactttgaaactgttcaatagggtagccccttttacactagttccttttctagaagtctcttttcctacagatttagatgttcgcctggtttccgctcagattttgctttggaagactttgcagctgttttatctaagctagatgttgaaggagatcccaccacaatctgaataaacaaaaacaaatgctatgtaaggacgaaacatactaatgccacagaattcaccttcaacaactgatgaagatatgtaagagatatgtaccggggagacaagggtagcttgtgaaaatataacagctttggaaattttccctgctttcagctgatcaggagttaagttcatttcactgctggaggtctcatttctattcaagaccggagatccagcagacataaaacccgaaatattctgatcttctggctttttgacactgtttgtctctgtgttattaaattgaagttcggaagtcttaacagtggggaaagaatcaagaggagtctttaaattagtagcagcatcttctattgcagttacataagactttacagaagactcagaacatgtagaagcacgggagtctcctagtacgattgcatcacctgcaatatcatcaaggacaagtacatatttcgatgagtgtgagaattaattgccggatcgagaaaagaga

SEQ ID NO: 4869 - DNA, 575 bp, Arabidopsis thaliana
ctgttctttctcgtaatctgaagttactacactgggatgcctatccattgactatattgccacctatctttcgaccacacaccattattgaactcagtctgcgatacagcaaactcaacagcctctgggatggaaccaaggtatgctcattcaaattacatattcgttttactctttctgataaggtcgtcatattgttacctatctttcctgtaattctgtgttttgctgtattgttttcagctgcttccaaacctacggatactagatgtaacaggatcgaggaatctcagagaacttccagaactttcgaccgcagtaaatcttgaagagttgatattggaaagctgtacgagcctggtgcaaatcccagagtctattaatagattatatctgaggaaactaaatatgatgtactgtgatggtcttgagggagtgatactcgtcaatgaccttcaagaagccagcctcagccgctggggcctcaaacggattatactgaaccttcctcattcaggggcgacactgagttctctgacagatctagctatccaggggaaaatattcattaagtt

SEQ ID NO: 4870 - DNA, 536 bp, Arabidopsis thaliana columbia
gtggaattgccacctatcaagaaaagaaaatcaaagaagtcaaacacgtatgaatccaaaaggattcaggataaacttagagcaaaataatacccggcaaaacaactagtaacttacttgaagagcttgtcgtctcaggtgaagaagtaattctcgagcccaacgaacatcctgaacctgaaccgcggatatttcacaaaacaaatcaaaattacgctaaggattggagggagccaattaagcattacatcttaacaggcgaactcccgaaaaacaagtggcaagcaagaaaaatgagaatcattagcgcaacattttgtctagccaaaagtgcattgtacacgcgaggtgtcagtgacccttaccttctatgcatttctggatccgaagtcaaaattgtcttgagcgaagtgaatgaagggctgtgtcgaagtcatttgtcgggaagggctatgactttcaagatacagagactgggatattattggcatactatgattacagattatgttaagtttcccaaaggtgtaagcgtt

SEQ ID NO: 4871 - DNA, 797 bp, Arabidopsis thaliana
  unsure (1)..(797): unsure at all n locations
tttttttttttttgagctcttctataagattaagaagtgatattatgacaagcataattcatggtatacttaattgcagggaagaatcatcaatatctcgtcagttgttggtctcattggtaatattggtcaagcaaactacgcagcggctaaaggtggagttatttcgttttccaagactgctgccagagaaggtgcgagcaggaatataaatgtatgtgacctatctccctcatcatattcgtcttttttttaaacttcctggacatgattgtgaaacttgttccgtctacaatttgctctattccaggtcaatgtggtttgccccggattcattgcatctgacatgactgcagagcttggagaagacatggaaaagaaaatcctgggaacaatcccattaggtaatggacatttcatctcttacatttgttgctgggtaatttatatggataggatgtatctgagacatgaaaaaattgttagataaaaaagaattctgatacaaagcaaaacggtttggttttcaggacggtatggaaaagctgaagaagtggctggcttggtagaattcttggctctcagtcctgcagccagttacataaccggacaggttaatatctcatactcctgtcgaatggtggttaccttggtttctaattatgttagcgacctaaccatggttgaaaatattggtttgcaggcattcaccattgatggaggtattgctatctagacatttggtatgagtcggcttttgtttagttaaaacaatttggtanaagagcaaagttgag

SEQ ID NO: 4872 - DNA, 551 bp, Arabidopsis thaliana
ctaaaccagagtccgaaatcgatccaaacacgacgcttaaagatcttgatctaaattttgcattccgattgcaaaagaactggttccaagaattctgcaggtgaatgattcactacttgtaataaaactctttgttatatatctcttttcacttctttcattagtaaacccaaattcgagtgtttggtttttaacaggcaagtggacagagactgtgaattccttgaacaagagaggattatggattatagtctcttggttggtcttcactttcgagaagctgctatcaaggactctgccactcctacttccggcgctcgaacccctaccggtaaaatcttgtcaaatctttaactcagttttcaaaacttccaacttaaatcttgatcgaagcaacttcatcatctacaagcaggaaattcagaaactcgtctctcccgagcagaaatggaccggtttcttctcgatgccagcaagtaaagaccaaaaattcaatgtttatatcgaaaactgtaaagaatgttttataacacaagtgtggttcttgatga

SEQ ID NO: 4873 - DNA, 816 bp, Arabidopsis thaliana
tagggtttcgaatgagtttctccaaaccattatcagaattagtctcgtcatcacactcgccggcggcatctgctgtatcctaggaccgggaccgccgtcttccacgtcgctaccttttttgcccatgtaaggtgactttccccacttattaccgtcttggtccatttccacatgcccttttcttcccggtgacatgttctctatcagattctgcatcgctgtcatcaccaagtatgaatataattataattaaatatcacagaaaatactaaactaaatttattatgacctttcttcgaccaaaaaactaacttatagaaagccgtacggaaccaaataaaaatctactttaattagtttaaaagttttcataagttttgaaactttgaaaaaactataaaaaaaacttagaaccgatattgagctttatacatttttcctaaaagttaaaaaaaaaatagaagcgtggcaagtaatgataaaaaaaaatatgaaataagttggagattaataaacctttagtagcgaggttgtcgtgaggaggaatagaaactttagggtcggtggatacatcggtggaagaacctctggtcatagcattcttcgcgttggcttccgacaccggagaagcactcgaactccacacgaacatgttcatctccttgttttgtcctcctactcctactccgccaccgcttcctccgccaccactttcctttttcttgactccacttgctccactcgttgaccccgtgaacattgggttcggcggtggggtcgacggaactgaccataaattatagaaaattttattta

SEQ ID NO: 4874 - DNA, 663 bp, Arabidopsis thaliana
gtcatcgaaagcacttacaaagatcctttccctggatggatggaaggaaacaggtgaagctatattctaatgctgcttatatgtatataggtgtgggagaatttgtacgtaacaaaactgattcttctacaattgtgttacatgatacctaaaaatcaggatgatggatcctatagttttatgttacgggaaggggcaactcacggggtttttggttgatccaaaaggagttcttgatgtagttcctgctgatatggttgttaatgcaacgttagctgctatagcaaagcatggaatggcaatgtcagatccggaacctgaaataaacgtgtatcagatcgcttcttcggcgataaacccgctggttttcgaagacttagcggacgttctttataaccactacaaaacatccccatgcatggactctaaaggtgatcctattatggtgcgtttgatgaaacttttcaattccgttgatgatttctcggatcatttgtggagagatgctcaagaacggagtgggttgatgagtggtatgagttcagtggatagtaagatgatgcagaagctaaagtttatatgcaagaaatctgttgaacaagccaaacaccttgctactatttatgagccgatcactttctatggtggaaggtaagacagaac

SEQ ID NO: 4875 - DNA, 753 bp, Arabidopsis thaliana columbia
ttatctataatatgctagatttatgttttgaataataatgcaagctgtttttgatcaatcttctttattcctctaataaatcaaattctagtaatgttctttcactaatgatagaaccgagagctggctgtatgtgtgtttacgctttgacactaattttattctcaaacgacgtcgttttagactgattaacagtcactaacggataataacgggtttctaggttctattaatcactgatacccccatgtctatcttggtcaggtcaacgaattgttcatatcttacatggtagtcaacgtttagttcatgttttacatggccaagttgatgtttaaaatgaccacaatttaaaacttgactaataaagtcgttaacggatgataacagaagttagaagttccgttaatgactgataacggcatgtctattttggcctggttaacgaataatcatgttttaaaagttagttaacgtttagttcatgttttaaacggcagcatacgaagttgacgtataaaatgaccattttttgaaagttgggggattaattgacatcttttcccataagacaatggttcaatcagtaataaccacatcctcattaacattcctcagatagtaaactaaccaatatatgttttattttacttcgtttctcaatctaatagattacttgaattgtttatagattacctcataggatgatgataattaatagtttaaaattttgaacagagacattattaaaaa

SEQ ID NO: 4876 - DNA, 2881 bp, Arabidopsis thaliana
ttctcatgttttaaatggtagtcaacgcttagttcatgtttaaaattgccacatataaagtcgatgtttaaattgaccacaatttaaaacttgactaataaagtcgttaacggatgataacggacgttagaagttccgttaatgactgataacgacatgtctattttggcatgatcaacgaataatcatgttttaaaagttagtcaacatttaattcatgttttaaacagccgcatacgaaattgatgtataaaatgaccattttttgaaagttaggagattaattgatatttttccctttatagtttacaggtacatacgttgataacacaaatcgtataactttctaacggtacagaaaatagtaaaccgtacaaaaataataaaaaagggtaagatgtagaagtataaaactaatagtacaaattaaaagattttggttccacttgtatgtataagtgattacatcaaaatggtattactaagtcatcatttagatttgatgaagtttgtattcgtgtcataaaccgggcgtaggtggagttattgtcagtttggtagcgttttacgaccacacataaaaacatgtttataaattgttaaaaaacaataagacatgtcataaatctaaatgccacaagtagaattatcgaaataaagcttttacataaatacacacacccaaactaaaaaagaaaaaaaaaagaaagagagagagagaagaagaatcgtggagatggcttcgaccccgaagcttaccagtacaatttcatcatcttctccatctcttcaattcctctgcaaaaaactcccaatcgcaattcatctaccatcatcttcttcctctagctttctctcgcttcctaaaaccctaacctctctctattctctccgtccccgtatcgccctactctcaaaccaccgctattaccactctcgccggttttctgtttgtgccagtaccgataatggagctgaatcagaccgccactacgattttgatctcttcactatcggtgccggaagcgtgggcgtccgcgcctctcgcttcgccactagcttcggtgcatccgccgccgtttgcgagcttcctttttccactatctcttccgatactgctggaggcgttggaggaacgtaagatttcttccttcttgtggcttatatcgatagctagtgaatttgactttagtagtagctataccagaatttgaagcatttgcttgatgatttatggtttgattgtgttgtctactcatttttggttattttgcaggtgtgtattgagaggatgtgtaccaaagaagttacttgtgtatgcatccaaatacagtcatgagtttgaagacagtcatggatttggttggaagtatgagactgagccttctcatgattggactactttgattgctaacaagaatgctgagttacagcggttgactggtatttataagaatatactgagcaaagctaatgtcaagttgattgaaggtcgtggaaaggtatgccgaggctcggtgtttatatagttcatgagttaacctctatgtattgatttgagcttgagtatgtattttatatgtgtaggttatagacccacacactgttgatgtagatgggaaaatctatactacgaggaatattctgattgcagttggtggacgtcctttcattcctgacattccaggaaaagagtttgctattgattctgatgccgcgcttgatttgccttccaagcctaagaaaattgcaatagttggtggtggctacatagccctggagtttgcggggatcttcaatggtcttaactgtgaagttcatgtatttataaggcaaaagaaggtgctgaggggatttgatgaagatgtaagtttaaaattgagaatgacttttgctgctttcatttatccgtctggatattttctaattgtaattgttattcttgtttcaggtcagggatttcgttggagagcagatgtctttaagaggtattgagtttcacactgaagaatcccctgaagccatcatcaaagctggagatggctcgttctctctgaagaccagcaagggaactgttgagggattttcgcatgttatgtttgcaactggtcgcaagcccaacacaaaggtatagtgtgatttttattattttccaaaggatgtttataaaatgaaaactggtagcaaagttcatcctttaataatttgtctaagataaactgaccactgctgccccttgtttatgactttaatggaatatgattgttcattgatgtaatgttggctgttataacagaacttagggttggagaatgttggcgttaaaatggcgaaaaatggagcaatagaggtatgatccagtgttttacctagtttttttgtcacttaggatttctattattgcattgtgcacagttctcttgttatacctggttacttcttgtgattgtgctccatgtttccactttttttttgtaaggttgacgaatattcacagacatctgttccatccatctgggctgttggggatgttactgaccgaatcaatttgactccagttgctttgatggagggaggtgcattggctaaaactttgtttcaaaatgagccaacaaagcctgattataggtaacataacaatcttaacttttgatgtttaaacctttgggattttttggtgattgatgagagtttttctctgtttagtcttacatgctgcatcagtgatctataacattttataactgttgtctctgatggcttttatcctttctgtgttctataatcaactagagctgttccctgcgccgttttctcccagccacctattggaacagttggtctaactgaagagcaggtaagtaggatgatttgtcgaaaa

SEQ ID NO: 4877 - DNA, 710 bp, Arabidopsis thaliana columbia
tgaatgatgacaacatgtttattttggcttggtcatcgaatttctcatgttttaaatggtagtcaacgcttagttcatgtttaaaatggccacatataaagtcgatgtttaaaatgaccacaatttaaaacttgactaataaagtcgttaacggatgataacgaacgttaaaaagttccgttaatgactgatagcggcatgtctattttggcctggtcaacgaataatcatgttttaaaatttaatcaacgtttagttcatgttttaaacggccgcatacgaagttgatgtataaaatggccatttttaaaaagttgagggattaattgacattttttccatttcttggctccttttctctaacgtacatttatcagttcatcatccaaaaattcaaaattttcgaacacatgtttggatatgaaacaaaattcgatttgtctttatgttgctttcatatagaaaagtgcaaaactttgttagagctcatgtaacttcttaattttaaaaaacaaaacaaatcagatccaaagtgtaataaagagaaactctagggacttctttataaataaaacaaaaaacatttacacgtcttcgtgtaatttcgaagaaacatcgattctcttctcttatataaaccctcttcgtctcctcctcctctctgctcgaaacaagatccttcacttctctcaaactacgaaaactatggc

SEQ ID NO: 4878 - DNA, 536 bp, Arabidopsis thaliana
cttatttgatgcttatatctgtctccacacgtctagcagacttgaaatttgggaaagggctacactcaaatgggataaaatctggaatttgtatcgatctttctgttagtaatgctttgattgatatgtatgcgaagtgcggggaagtaggagattccttgaagatattcagtagtatgggaactggggatacggtaacatggaacacggttatttcagcatgtgttcgttttggggatttcgcaaccggtttgcaggtaactactcaaatgaggaagagcgaagtggtgcctgatatggctactttcttagttacattgcctatgtgtgcttcacttgctgcaaaacgactaggcaaggagatccattgttgtctgttgaggtttggatatgaatcagagttgcaaatagggaatgcactaattgaaatgtactcaaaatgtggttgtttggagaattcgtctagagtctttgaacgtatgagtagaagggatgttgtgacatggacaggaatgatctatgcatatggaatgtat

SEQ ID NO: 4879 - DNA, 817 bp, Arabidopsis thaliana columbia
tagtaacggccgccagtgttgtcaacaactaattaatgtaacagaggaatatttgggattaagaagcatatcactgagtaaaaagagatactaatttatcaaaatatgttgggaacgatttttattaccttgtccccatcctcagttaggcgcaaacacattctattagtgcatccacaacttgtgaaagttgtcttcaatcctacttaggaggataaaagaaaagtaaatccaaacgttgtatcaggtctaatcataacgtcagtactagtaccttcaaaggacctatcatcaacgcggtatcgcagagcatcgcatagattggccaaagcccatgatgctgttatacgcacctgaattgacaaaaataaatcccattgcagtagaacaataaaatataaaatgcatagatcatgagaacaaataaatgaaagtcagtaatgcaataccgaggtcaaggagtcccgggtattcgcttcaacagctaagataaatttttcatatatctccgcactgcatccacaaagttctttaagttcttgaccatgaatatcttgtcagggttgagttaggacaagcaacagacagtgacaaagggttaagttaccttaaagaagtttctggaaaacatgaaataacaccaatcgctcggcaagctgctgatctgactgaaggtgttttgtcatgcaatgcagcggttatctacaaaaactaaaagacattaggcacctactgtaaaactaaagtcgagatagtaataccaacaatcctaaaaaggcttcaatacttacaattgatgaattaacctgcacacatg

SEQ ID NO: 4880 - DNA, 665 bp, Arabidopsis thaliana
cccagcccatggtcctggtgccattatgctaatacttcctatgttcacaatctttccctttttcttagacgccatgtgaggtacaacagcttgagtcatcctcatggaacctgcaaagtttctttacaaagttcagttcttgaagagacttctcacaacccaaatcaacagagcaaaataaaacatgaaagagttgagtcaagaattttaacaaacacatggtgtgcatataagaagtaactcgaaaattttcattcaccgagcacattggtgttgaaggtgtaatccatggctgaaattggaatctccgccaaaggtccgatacactgaactccggcgttattaaccaaaacatcaatctgaccaaatttgtcgataactttcgacacaactttactcacgctctgctcagactgaacatcgagctcttgcacaaagaacttggaatctttctccaattcagtcatcgtcttctgcgatcgactcgtcgccaccacacgacaaccattagccgagaactcacgcgccaacgcgtgaccgattcctccctgagaacatcctgtgatgagaaccactggcgtctcgtcgctgctgcttcccattttatataattttgaatgaaaagatttaaaagagaaatccagaatataagggtcgaattgcga

SEQ ID NO: 4881 - DNA, 1226 bp, Arabidopsis thaliana
tgaaagatttagacgtctacgtctcccgtatcagtgccctgattataacactgcgtctttatccgttgttagagaagagaaacttgcggtgttgttacaacgcgaaaatacatcaaggacagagatatgggtgacaagtaggattggtgagaccaaagtggtgtcgtggagcatggtcttagcagtggatttcccgtccgaactattcattttgtctggcataagtttcttggtcgatgcggagaaaaaattcgtcgtatgttgtgataattacttcggagaggatgaatacgataccaaaaacttggttcacattgttggagagaacaacaaagtgagagaagttaatttcggagtatccgaatcatcttggccatttttgtttaattatgttccaagtttgattcaaatctgggaaggtgtaggaggcaaaagaaagagagtcgaataagtaagcttcacgcaaacctgttttttttttttccttctcaccgttatctttggtcatatctagttatgttttgactaacaaatgtttcatacatacttgttgcattactttaagacagtttttttttttttaatagtttcgtgatcaaaaaagatctgcattaatgccgcctccagcaacatgggggtttcattcttcttttcttaacacatacaaagacagaaaaagcaattaacctaatgaagagaccaaacaaacataatgaagagctacgtgtacgttccaagtctagttccccttccaggataagatggttgtttcgtgtttctaagcttaattggtatgtgattgttcatcttctgccatcatatatgatagtgcatatgtattgaaattgactttggtttttgtgatacaacctggacacgttttaggtctttgtccacagttgtatcagtttcggtcatgtttgtggtatcaacaaaactaagatacacacattccaagtatacatgacaaatttcactctatgctacaaataaccaaggtttgtactaaaatccaaatacaaagaatttggatgaaccttacagaagctatatggaacattctaacttgatatacttaatttgaataaacaaaaaaagaagtcattatttagttattgaatacttttttcccttgaccttacagattactgattccgatatcatacatatatgtgaatttctgaagaagacaacattgcatttgtacatacattgcaaatgagtac

SEQ ID NO: 4882 - DNA, 841 bp, Arabidopsis thaliana
tcatagacttctcatatgttcggcccactctcttgtagtacatatccaatactaggcctttcttatttgagtcttgatcaatactccccctcaagcgcaagacttatgcaagagtctaagcttggaacacatgattcatcacctcattaaaaaccttagtaaagaaaaccacatgggagaaactttactaagggaaaaagagtgtgatgtccatggttagagaacatgagatcaagagtgagatagatccacaagtcctaatttgccatgtatgaagttgcaaactttgagacttgcggctttggtgaagatatccgccaactgatcttcacttcttgtataacacggtagtgtgactccttcgatgatcttctctcggactttatgacaatcgacttcaatatgcttggttctctcatgaaacaccgaatttgaggctatgtatattgctgccttgttgtcacaatgcatggtgataggcatgtgttgttcaatgccaagatctttaagaagagctttaagccaagtgagttcgttggtgagctttctcattgctctatactccgattctgcactggaacatgagaccaccttctgtttctttgtcttccaagttgcaaggttacctccaatgaacgtacaataaccagttttagatcttctatctcctctatcacccgcatagtccgcatcgcaatatcccactatctcggtgcttgagttctttcccatccatatgccttgtccggagctgcctttgagataccttagtattctctccaccatgttccaatgatacaccatcgggactttcatgtgttgactaacctgatttacagca

SEQ ID NO: 4883 - DNA, 1126 bp, Arabidopsis thaliana
ctaggcaggcatatagagagcagtcacagcttcaaaaaacgtttccaaaaggatcttcccaaacattctttatgtattttctgtatagtctcacaacaaaaaataaggtaaaaggtttgctacattgatgcacatctttcttccctcttgtaattgtcaacctaaatttctctggggatgatggttcctaagtatttacacccaaaaatccagacttctacatctcttttacgcatttgatgtgtatctttatagctgcttccccttgacctaatagttgttaacccaattcgttagagcagcttgaggttgctgataagcaatgtgcgggtgtcctatgggttcacccatagccgttgttgtgtgtggcggtggtggtaaggtctgatatgtagttgaagcagctgccatgggctgtgttggttggtgcattcccatgaggccaccatgaccagcctgcacgactggaaaaccaagtggctgaccttggtatgctaggttatacattggattcacctgcaggttgccaaatccctgcccaatccatgcagctgcactttcagtctgcaacaacaacatcatgtacaccaatgttaaactatatagtctacaattatatatcatcgcaaggatagaacagtaaaaaaactgaccaggtgagatgccttttcttcactatggatagaatttaaggtggttgtagatgggatgctgctagcaaccatgggagaagtgtgtaggtaagggtttgtggtgggagggttttcagtgttgtcaactggttttgcatgagaaggtgctgttagagcagctccttgtggaaaataagactgctgagggatcccgtttgggctcaagaactggtgaatgtacggcggtggcatataatacggtgagtaatagccgtaagggaagaaattgggagggtattgctgcctaagaaaatttgtctgttgagtggctgctgctatggagctctgatctggaggatatgatactaatgaaataggtggagagttggaatttccgggctgcaaattagagaaaagcagttatcgaaaaagtagagaatagatacagggattgtttagagtgcatatactgtgacaagatataccacatacct

SEQ ID NO: 4884 - DNA, 1330 bp, Arabidopsis thaliana columbia
atcttctcttctccgtaaatcacttcgatcaaaacttatctctctctatcgtcttttgttgtgatttaaatgcctcaagtcgttgcttcagcatgtaccggtgggtctgaccggaaaatctcatgtgaaactctggccgacgataacgaagactcacctcataactcgaagatccgacccgtatccatctccgccgtcgattttccaccggaatcttactctttatcaaaagaagctcagctcgaatggctaaacgacaacgccttcttcgaacgcaaagaatcacaaaaaggaaactcttctgctccaatttcgaatcccaatacaaaccctaattcgagctctcatcgaatctcactcaaatcaaaagcgtcgatcatcagattaccgaaaccgcagaagacgtgtttcaacgaagcgaagaaacggagaaattgcagaatcgcgaggactttgatgattccgaaacggatcgggtcgagattgaaatcggatcctacgttatcggagccatgttctcccaaggtttcttgtatcggaagggttagatctaaacgtgatcgtagccgacgaatgcagagacaaaaatccggtcgaaccaattcgtttaaggataaaccggttccggttaagaagcctggttttttcgctagcttcagagctattttcagaaccggtggcggttgcaaagacttatctgcgagtggagctcacgcgcctcggagggatgtcgtagtctctccgccgagagtttcggtgagaagatcgacggatattagaggacggcttccgccgggagacgtcgggaaatcctcgccgcagaggaatagtaccggttcgaggagatcaattgacggcggtgaaccggttctgcctggtttaggtgggatgactcggtttacttcagggagaagaccggatttgttggttgaagtttgacgtggcgtgacgtacggcgttttactgtgagtggtggggtccagtcccgagaaaaaacaaggatcgtgattggttagttggctatatggggcccagaagcgtgtgtatatttgaaaagtcgttgtgatgacatggcgagtggtttaacggagttaggaacacggcacagatagaaaaacgcggacgcttttggattgatttcttacgtctcaaccactttcaccgttttattatatagcttttggtgcgttttttctctttttaagacttttgatatttgaattagtttcgctttttgtcctttttattattttcgttgttttgggttgtacataggtattgttatttctttgtgtacatgtgttttttttttgcttagaaaggaatagta

SEQ ID NO: 4885 - DNA, 3657 bp, Arabidopsis thaliana
tgccacttctttgctatgccttgaagaatcagacaaaacgagtggagtctagagactttgatcctaataccactccttaatatatgcctatcctatcattatttcacaacgcatgtttacttttgttatgaaatatagttttgtttaaagggtggtaacgtaatttatgggttccattaggattgtgttttattttctctcctcatcctcatgcatgtaagaatttgcatttttataaatatatactatgaattcagtccaaccttacagtgtgaacaatttaattaaacgaagcataatcctaaaagaaaataaaactaaaaaaaaatagttaagatggtataagataattttattaagttaagatgttgcacttttcactaagtaaatcaaacatttacatagtgatttgtcataatgtgcatattccattttttcgggtctttcatttccatattcctcagctctttcatatattgaagattgaagagaataagaaagacgctttttataggaaacgaattaaagagtgttgacttgccgtaaaagtaacttaaattgttcgtcgcctgagcatggatttatataaacgtgaagtactatacaaaaccctaaccaacatttgatcaaacgacaatgatgtcggaacttccagagcatttgttagaagagatactctaccgcgttccagctatgtctttgaaacagttagggtctacttgcaaaggatggaactgtttattcaaggataggagattcacaagaaaacacttggataaaggcccaaagcagtttctgattcacatgtctaaagggcttagggtacgctcgatgagtgtcgatctccatagacttccacatgtaaaggtcacagttgaatttaccctaatcaaccctaaatatcctagttgtctagatcaagatcaattcgagatatataaagtctctcactgcgacggcttattgttatgcgtctgcgtcaccaaggaggacaatacttggctcgcggtatggaacccgtgtactggtcaaacaaggtggattcaacccatgacttatatgacaactatactctcggatcctaccaaaataatagctacaatatattggcacacactggttttggctacgaccacgaattccaaatttatgaaattaactccaattcatggaggattattgatgccactttggacttcaaattagggtatattggtcgtggcgtgtctttgaagggaaaaacttactggattgctagtggtgaagaagagaaacggcttggcaaatttttaatcagttttgattatacgacagaaagatttgaacgtctatgtcttccgaataagtatccttgttatgcaactctggctctatccgttgttagagaagagaaactttccatgttatcgcaacgcggaattaaatcaaaggcagaaatatgggtgacaaataagattggtgagacacaagtggtgtcgtggagcatggtcttagctttggatttgcagcctaaacgttgtattggggaaagcggaagtttcttggtcgacgagaagaagagagtggtcgtgtgttgtgataatattagagaccaaggaaaaaccacggtacacatttttggagaggacaacaaagtgaaacaagtgggttttgaagtcggatcatctctgtaatgtatgttttattatgttccaagtttgactcaaatctaccaaggtatcacaggcaaaagaaaaagggacgaatgatcatagtgtttggtgtggatcttggagcaactatcagatttttcaattatgataagttttcttctcaatttcaattaatcgcttctttatgccataatttagaggcaattgctgtaatatttctaaattttttaggcattctttactttgtacttctccttttaattatataggtagatttgatgataattagaagattaagacttcaaaaatggagattatgtgaaattgagaaaagcatcacacaaagaaaatggtttttggtggaacaattgggatatttgcataacatgaattttgattccggtttactatacattatttgtttcttgattccggtttagtatatcctagtacttacttaaatcaataatccgggcatggttaaaattaatcagacgttgaatcaatgagactccccgtcaccgtcaaagccactaagccgtcgtttctcgtcatttggatccgatactcctccgccgcgtcgtcgccgacagtctccttgaatccagtaaacctctctcccgcacacgcttacatgtatatgcgactttattatccattggaatcattttgagtgtgttttttttgtcttggggttcaatactgtagagtggacgattacagcaaactctcgcaggatctgtggaagtgaaaggaaaatctctgcactccggtaagttctcgacggtgaagctaaatccggagatcgccggagctggtaggttcttcgagtttcgatccagattcatccctgcgtcgattgaatttgctcaggaatcgcctctttgcacgacgctgttgaaagatgagctcaaaatccgaaccgttgagcatttgttatcagctcttgaggcgaagggagttgataattgcaggattcaaatcgagagcgaaagttccgatgatcgagaagtcgaggtttgttacctgaatacatacattttgagtaatcataggtcgaatcaatgtctcgtattgtctattttgactggatttgtatgctatagagattgtcaacatcttgctgtgcagtgtagctcttagttttatagacttggtacactggaggagatgatgagtgtaggcaacactaaccaagtgacaggtccctatttttgatggatcagctaaagaatgggtcgatgcgatacaaggagttggcataaacgcggctcaaaaccatgatggtgaaagtgtagagaagatggtcgcacatgtgaacaagcctgtgtatgtttgcaagaacgatacttttgttgctgcatttccggctctagagactcggatcacttgtggtatcgacttcccacaggttcagtctaatggcattttgacttattttctgcttgtacataaattgttattgacttggtctgttgtgtatgatgatgaactttacaggtgcctgctataggctgccaatggttttcttggagacctatccatgagtcttcttttgcaaaggatatcgcatcatcaagaaccttctgtgtctatgaagaggttagttagatccattgttgttgcttaggagctttggaatcagtaaactggtgttcgttcttcaaccatctgtgtctgagggttttgtttgcaggtggagcgtatgcgtgaagcagggctcattaaaggaggttctctggataacgccatagtttgtaggtaaataatcttgcatattgatgactaaagggacacaatattcaactgaaactgtctctaatgcagcgctgagcatggatggatgaatcctcctctgcggtttgatgatgaagcatgtcgacattagattcttgatcttatcggtgacctttcccttttttcacggggcgttaatggagtacttcccgttgttcatatatttgttttttattttttttttttttgttttttttcgggttcctat

SEQ ID NO: 4886 - DNA, 597 bp, Arabidopsis thaliana
gactagaaatacgctgagatttttctctttctcatctgacgcaaaccagtaagtatgtcccttcaaagacacaccgtaatcagtatatctttcgaggatgcagtcacgagtgacatcaagaaacctccatgattgagagttaatctcatagattgcgagttcttggttctcgtagccataaccactatagctcaatattttgtagctattaccgtaggatttgtccaagtaggatccaaaagcatagtagtagcaacgattattgggttcaatccacctagttttaccagtacacgggttccaaaccacgattctagtgttgtctgcgtcggtgcataacaataagccgtcacagtgaaagacttgagaaatctcgaatttatcttcaaaactagaaaaagagtcgattaggctaagttcacatgtggcctctacagatggaattccatggaaactgacactcatcgaaaataccctagagtcgctcaacatgagattctgaaaatcctttggggctttaccaagtgttttcttgtgaatctccattgttgaataaattgttcattgtttcaagtagatcgtactgttcagagatgt

SEQ ID NO: 4887 - DNA, 886 bp, Arabidopsis thaliana
gatctgctctgtttccgagcttcaatttcgcggatccggaagaaggtccggcgggggattcttcgatttcctcagtcctatccatctaaaaccaatttcccggtgagaaaatccgccgtcttaagtggaatttggaatcgagacgcgaaaaacgaaatggagaagcttgttggttaggattcagaagtggttagtgcggaaagctgaattctttctttcaccggacgttcaagccttgtcttttattcttcttctttcttctttgggaatatttaactctgcttactatttttatatatcagatcattaagtgttgtacaaaaaaacatcaaaaacgtcattgttgatttgttgtaatgtttagagatatgctatttttctagatatttttgcagtaatgctaacaggtatgcgatttctatcagttagtattcatgaccacatcatactgctctctctaaataattcagggctccacattacgattttttattataaaatctactagtacttataagaaagtagagttaatgaagtcgatgggaaccacttgggagagtggttacaacactccagtctagtcacatgtaacatgttcatggatacgacctagcttcctcttagtgaggttaaataatcctatagagcccattagaagtcaatgggctaacaaatatatgactggctctagctctagctctagctctagttctaaaaccaaaacccaagaccacaacaaacaatttttgccgtaacacactactaattttcactttcatctacaataatctccaaaattttgtattatgtagagatttgagtctgaatacgctaaaattttactcaaaaactggactataaattagaaattttggtctttttggat

SEQ ID NO: 4888 - DNA, 630 bp, Arabidopsis thaliana
gcagtgtttggaaccacacctgcagctccgcagcagcctagagacagggccccatggacgagccaaggagtggtgcattccaattcaggttgggccaatggaactgcaggtcaaacagcaggaggagcttacaaggctaataatggccagaatccctcttggtccaacacgtctgataaccagcagcaacaatcgtggtcgaatcagacggcagggcaacagccaccgtcatggtcgagacaggcaccgggatatcaacagcagcaatcttggtctcagcaatcggggtggtcaagtccttcaggtcatcagcaatcatggactaatcagacagctggccagcagcaaccttgggctaatcagacgcctggtcagcagcaacagtgggctaatcaaacgcctggtcagcagcaacaattggctaatcagacgcctggccagcagcaacagtgggctaaacaaacgcctggccagcagcaacaatgggctaatcagaataatggtcaccagcaaccgtgggctaatcagaacactggtcatcagcaatcatgggctaatcagactcctagccagcagcaaccatgggctaatcagacaaccggccagcaacaagggtggggaaatcagaca

SEQ ID NO: 4889 - DNA, 465 bp, Arabidopsis thaliana
ataataataataataataataataataacaataataataataattaagaatcgcaaaaaaaaaaaaaaaaaaaaactaagaaacggtagagcttttgagatcaataacaataacgtttatattttctttgcttcctcttgcaattgcaagctctgccaatatcactgcagcctttgtcgagcttgattcacttatacacctgtcaaatgttttagccaaaaagtatcagattcataaatcttattgtaaaataatcttagttcacacgaaaacagagaaaagtcgatattaatcttgaaactcacataagtcgttaaatatattagacaaaacaaaaaaaaaaattaatattcctagtaaagaatctaacccgtctggtggtaatttgccgtaaagacaacgtttcacaagctgatatgtgtcatcgtcggggaaacgtcccatagaccatcgcatgcaagtaca

SEQ ID NO: 4890 - DNA, 1493 bp, Arabidopsis thaliana
agtaacgtccgccagtgtgctctactgctggctgacctatggcgggtgttccatacataggaggtccaggtggtgcttgagagacggcttgcttggctgatttgtttcctcctccagcaacagcaggagaactgttgttgttgttgttgttgttgttgttattgctgttgttctgaccagtgattggtccttgtggcgttgagacatctgcgttgccaacactagtgatgtcgtgaatgcttgatcgccttctgtctttgttcattgaatttagacgaatgaaatacttttgagcatggctcgcaacttgggtcggtgttcttgttactacaaagttgcgagaaatgctacgccaatcacctttcccgtacttatccaaaccaagaagaaataacctgtaacatagaaaagacagacaacagctcattagaatcgctgcataaccaaaagggcagaaacttccaggccatagtctcaaagatgaaaacacacaaaccactgctaaacggaaacagtctaaaaccaattgcaggtaacacagtaaggtcttgtcttgcatctacctcaacagctaatctgcagatagaatgccacacaagtatacagaaccctacttctaaattgcttctccactggattttaatctcctaactaagcaggaaagacatttctaaacacccgtacaacgtatttgaaaatgaacctcgtgatttcttgtccaggaggttcttctatcaccgccaaaatccaatttctcgaaaaagcacatgtaaaccaccaaattatcaagatgacacgggagtagatcaagataatggcgaaaacacaagtttataaaaatggtgtaagaatctcttttaaaggtttcaatcagacagataagcattttttttaactctcccagcaaaacattcaatcaacaaagatagattttactgttacatcagtttcccatatctttggcaagtgagaaaacagtccagtaactaattatatgccactaatataaccattatatacttaactctagtttttacgccttatctaccctaataaggtcccaaaaccacttgcatcttcaagagagaaaaatgaagactaaacttcaaagtaagatttttttgtctctttctaaaaggaaggtggggttcctccaataacagaggttggatggactgtttcaccatgtaaaacagcatctagcttcaacaagtggtggaaaaagatggtcaaaatggtcccgggggttagatagcatctctccatcatctctaacatggtggatgtaatgatatagcaactaggacagggaggtaaagcgaatttatgagaacagctttctctgtcccatgccaagttataattccaataacatctgagacttttaaaacaatcacgaaactaaaaccacttcaagaaatctctacttttctttcaagcatcctctagagtaacctcgggtcagtgccccctaaaaaaaactcaattcatcc

SEQ ID NO: 4891 - DNA, 428 bp, Arabidopsis thaliana
caacatataataatactgtatgcaatacttttaattccaaagttattttgcatatataaatacatttaggtagtaatttatcactgaggagaatgacaaaacaggggtgtcagagacaaactcccaagaaaattacattcaaaataaatatataaaaaacaagggaaaataacagaagaaattaaaataaataccaacacacacacactaggcttataaacaaagaaaaaagtatatctagaaaagaaagatgtaaaatggaaacttataatcgggagaacaaaacaaaacttataataataataataataataataataaaaacacgggtggtggtaataattaagaatcgcaaaaaaaaaaaaaaaaaaaaattaggaaacggtagagcttttgagatcattaccaataaggttaaaatttccttg

SEQ ID NO: 4892 - DNA, 909 bp, Arabidopsis thaliana
gtaacgcccaggatcgccatttacttgaaaaatgctttagccatgacacagtagaagaaattattgattctttggtaagtttctttacgaatgattctgcgagtatgaccatctcggtcactagaagtaacagtgttttgggtcaccaggaaatcgaggctagtagaagaaaagatacatggtgcattacgactctacgtagacttaaagaaagctcaccgttatctttgaaggtggcattgagatctgtaagtctcacaatcaactttgcttgtaaaaatcttcaaaaaattcaaatttccttttcatgactcatgcagcttctttaaaacgaatccaacagatccgggaaggaagattacaaacacttgaccaatgcttaatccgagagtacagaatgtcgctacaaggattaatcgggccaatgtccggcaatttttgtgaggtatgtgaatttccagtattaaaaagcttgccattgcaaacagagtaatgagtcactaatgcgtaatgtttcaatactgaaaagggagtacgagctcgattgatagacaaggatgaagcaccaaaggtataatgttaaatcatatttccaataaccccattactgtgtacataaggaaggcattactgataagaattggtgggtgtgcagtgggatccaccgagcttggagaaagtatcagaggacatggttgatgattacttctgtgccttgactcccacggaacctgatcttgaccttcctgtcaaactcagagaaagcatttagtttcttgatgaaaaaaaaaatcaacttggctaacatcagtccggcactcccctatggtattcgtaaagaacttgtttgttgggagactgatttcattcttcctgaagcagaatgtgttgcagaatttttgtattgca

SEQ ID NO: 4893 - DNA, 1322 bp, Arabidopsis thaliana
ttctgggccgtagattgcgctgatcgttaatggcttcgttgaaatcaacggccttgatcaccatggcttctcggcgaccgtcctgctcctgaactgccccaaaaacaatctcgttcttctctcggttatcttcgaacgacgctgtatcgttcacattgcgtttctgctggttttggtattgatcatagtcttggtaataagaccggttttggttggttccttgtgctctaaggtagggtttatctggatttgtacctgatctcggttctaaagctggtggtccatcttcttccggtatagcgaaactctcttgtaccggccattggttcggttcttgctgatggtggtactgatgaaagtttgggggaattacatttctagaaccggacatcatctcggaaaccgaagaaccggttttcacgactagctttccaagcgaaccgagaaatccttcttctttttccgattcatgttgaggtgggattaatggctgtcgtaccggtcttggataacgttggtacggagccattgtcatgctcggtgttgctacatgtctcttactcttagtatcctgaaatcaaaaacagagcaatgaggcttattggttgtctaccctagttcaaatttcgaaccgaaccaaaccaaagcaaacagattcactcacatggctagacgaagagaacagcgatcgtaccctacgaactaataatgctaacatatacccaaagaacacagcagcaaccagcaaagcggttcctacaaagatatacaaaccgaaatggcatcgtttttaagaaaaccacaacaccaaatataaacaaccaatgtcgttttttcaagaagcttaccaagatggagactatctgtgtcgggttccggttgagaacagtcatgatcgtgaagctgaatctctttaatcaattgattccctcgatcaatgactagaagagagcagcttgaagagacatatattaaatcaaagtcatcggagaatctcattgactcctctttagatccaccgctccatcttcctccagcggcgatggttgagactcctgaacaaaaaaactttaattaaaattccgtttttcaaagcggaaacgcatgcaaacgaattgtagttaccgtcatcgctgatcttgcgtatggccatattgatagtatcggcgacgtagatgtccccctgtcgtccatggctaatcctcgaggacgattcattctcgcttctttgagttcccatcgacatgtcctgtgtagccttcttgtgaaccagagagtagctttggtttaccatcttcagcatattcaaaaacacagattaa

SEQ ID NO: 4894 - DNA, 892 bp, Arabidopsis thaliana
cgtgcaatcctccacacgtgttaagtcagctcgtagttgattcttcccccttgacggtcatctcatcggacggttgagatcagccaactttaagtgtatcacacggaaaagggaaatgtagcgcgagaaagtcaaaagatccaacggtcgatatgaaacaaaagtcagataatcgtacggtagaaacgaagctatatatagcaacaattggattattcttatcatcatcactctctgagatcgaagagaaagcaaaatcaaagttgtgatgaaatctctattgatgagaaccggttcgatgccggttcttcaaaaccggttaatttcaggtggttcatcgcggaagatgacgcctatctccaggaccaactccgtcgaatcattatccagctacggcgagagattcgccggcgggaagatttcgatcgaggttaaggctaatgtagggatgcggagggtgttatcggaaagtgatgtgattagatctgagagaatgttgaaaagagttggatctaagccttcgccggcgagaatcccggaggatgatgaagcgggggaggaagaaattaggtttgcagatggttgggggtctatgatctccggtggtttacgtgtggaggagaaatgtttcactgggtggcggtgttggtggtggatctggttatagcggcggttatggaaacggaggaggaggcggttatgaagataagagcaagatcggtgattattattgagagatgttgagatctaatcctaataattcgcttcttctgatgaattacggcaagtttttgtatgaggttagtgatttctagaagctgaatttgagttttgggaattggagattaggttttgatttgggattgaacttcaggtggagaagatgcagagg

SEQ ID NO: 4895 - DNA, 2204 bp, Arabidopsis thaliana
tgtcactgtaatagttggatatgtgacatccccaaatgttgcttacaccaaatggcgtcgtcaagataggatcatatacagtgttctcataggctccatctcaccgtctcttcaagagattgttggcgtcatcaagataggcttatatacagtgccgctgagatctagacgaagctagcctccacatatgtcaatccttcatgtacacacatccgctcactgatagatcagctcaaactcttccacaaaggtaccttaaccattgatgagtatatcaagggaatcacaacttttctcgatactcttgctcttcttggaaaacctcttgaacatgatgaccagattgagcacattatcgagggtcttcccgatgactacaaacctgtcattgatcaaatcgttgccaaggataagcctcctcaaaccacagaagtccatgaacgacttcttaaccatgaagccaagcttctctccaagcaagctgctgccacatcgatggttcctgtctctgccaacactgcccaacaccgcaacaactacaacaaccgcaacaataacaatagaaaacgatacaataataacaacaacaacaacaacaacaacaacacatcctagcagccttcgaacaatcagaccataccagacgaaagggtctccaaaccgtgtttgggcaattgccaaatatgtcaaacccaagggcatagtgctcgacgctgcccgcggtttcagtctcttcaaacatcacagagtcaccctcaaagctctcctttccgcccatgacaaccacgagcaaacctagccattgggtcacaatatcctgcctcgccttggttacttgattctggcagcgactcatcatcttacttctgatttcaagaacttggcgctacatctaacgtaccatggcggtgacgatgctctcatagctgatgggtcaacaatatctctatcatacacgggttccactcttcttcccaatcaaatacgtgctttacttacttgataaaatattatgtgttccggatacacaaaatttcatttctgtatatcgtctttgtaacactaatcgtgttttggtttaatttgcttgtgacatctcctcaaactactgcgatggtttcttgttccggtccaaagacaactcttacatcttggcactcaagattggggcatccgtcttcttctattttgcattctattatttcaaagcattctctgccgttttcttcttcacaacaaaaacacttaccttgctcagaatatcttataaataatagccataagcttccttctactcaaactaccattgtctctacttgtcctctagaaatcatttttaccgatgtttggacatcacctctttattcctttgataatcacaaatactaccttgttttggttgatcactttacccgttatacttggttatatccgcttaaacgcaagtctgatgtccgaaaatattctaagcctttgtagccctagttgagaatcgttttcactgccgcattgggactctgctttcggataacggaggggaatttgttgcacttcgaagcttcctctctacacatggaatcagtcatctcacctctccatctcatacgcctgaaaacaacagccttgctgaacgcaaacaccggcatatagtggaaactggtctcatgcttatgtcaattgctttggttccaaaagagtattggacgtacgccttctctatcgcggtctatctcataaaccgaatgccaactccggttctctccatgacgtcaccatttcataaactctttgggatatcacctaattatgagaagcgtcgggtcttcggttgtgtttgttacccttgggtgcgttcgtagacgagacataaacttgacaatcgttctcaacaatgtatcttccttaggtactctacttctcatagtgcatatttttgctttcatccccctaccaagcgaatgtatgtgtcaaggcacgttcaatttgctgaatctgtttcccattcgtgaacccaatcgagaggaccacaccaataatgtggtaaattccagctcgccgttgttgatattgctcgcagcacctcagatatctccgtcaccaccgtcgacgcctactgtccaacctgaactccaactcatccgctgcctagacataactcaagtgtttaagacgacaatggtcatcaagactcaccaagaatattg

SEQ ID NO: 4896 - DNA, 765 bp, Arabidopsis thaliana
tactcttcaccgtagtactagtagtaactacgaatatgaatataacatacacgcacttcgccactcccatgtagttctaacaggacaatcttattaacttacgcaatttttcactgacgtaatatatatacaggagaaaacctctaacaggacaatcttattaacttgaaaagatcactacaatctgaccaagaaaaagcaaatcatcaaaactgaaacttccatatgcatcacaaactctccatttatcactatagcagttcataaaatcctatatctacaatgttattagaaagcagttttcagattagatcaaagattagcgtggagaatagcataccagtcaaacatgctctgcaatatgcaccagttaagggtccactcaagggtctttgtcaatacaaggtgatactgtgtcccatctggtgcggatttgactgctggaccagcaccagggatccaatgggaaattgggaaagaaagcaaacctttgttgagcattccaatcaagtagttttctttccgcataaggcgcataaccatatcatgagcagaaagatccttaaccacacaaaggcattgtgagctttgtaactgaacaaccttctcaaggactgttgcccatggcatagtaaggatttcattgtctgtgacatggagactgcaaatttacaacaaaaagaaagaaaatcaattatgacctaaaatgcatgttttgctctagcaataactattcatagcatgttcaacattccacttacttgt

SEQ ID NO: 4897 - DNA, 547 bp, Arabidopsis thaliana
acttccacttttcatcaacctcacgttcccaagccctaactatatgtatatataaataactctatatttgattcattaatttagggacaccaaatctattcaacctaaaagccttcttttcccctatattgaccaactttttagcgaatcagaagaggaatggatgaggtatctcgttctcatacaccgcaatttctatcaagtgatcatcagcactatcaccatcaaaacgctggacgacaaaaacgcggcagagaagaagaaggagttgaacccaacaatataggggaagacctagccacctttccttccggagaagagaatatcaagaagagaaggccacgtggcagacctgctggttccaagaacaaacccaaagcaccaatcatagtcactcgcgactccgcgaacgccttcagatgtcacgtcatggagataaccaacgcctgcgatgtaatggaaagcctagccgtcttcgctagacgccgtcagcgtggcgtttgcgtcttgaccggaaacggggccgttacaaacgtcaacgttagac

SEQ ID NO: 4898 - DNA, 1773 bp, Arabidopsis thaliana columbia
gaaaccatattataaccacacaaaaacctacttagaaccatttcaaaaaattgacttcaactaccaaatgtttgaaataaaaatcaccagtggagccgccttgtggatgatttcaatcgtctctctcaacacagatttctccatttctactattagtttctgtttgtcctctaattttatgaagccagcagaattctttttctccggcagttcattcatattttgtgtctcatgattatttacaacataagctccatcaagactctggcgaagagctacatccctagaagaacgcaaatctttcaacgaaataacaaaaccagaaacacctgatttcagtaactgcaattcttctttagcttcttcattgcctctgcaagtcacatatatcggtattttcacgctcttcaacaaagaatccgccacttgcgtatcttcttcaccagatccaagtataaggaaatcagcaccctcggagcttgaggcaattagagcagaatcaacatccttcacaatccgagctaccagtggaagaagtaccgagtcggggttggatcccatcaatgtgtttctcgccacaatcgccggaagacctgtacatagcattgagagacaaaactcactctatgagaaattaaatgctaaaactgaatgaaatcagttgttaccttcgtcggagagagcaacaccactagcaccaacggcggaggcgatatcaacacgttcagcgatcaagaggtaagcacggcctttgacaagtgatttcagcaaacaagccgcctcgtagagcttaccagcggtggctccgccatcaatcacgacgatttgaaccgatttagctaaagcacggtcgaccaaatcaagagtctcttcacgattcccgctcataacctcgtcggcgtctagccggagaagtaaaccgggaacggcgagttcgggacgcttgtaaccaccaggataaagagttcgcggcctagaagaagaagtctgatcggcggattcatgcgaaatgtttctgatcgagagagaagaaaaacgcctatgacgtggaggagtaaaggaggataacttaaagcaccggccaggaaacggtggagatgcggcggagataagaaacggtgacgtcacacattgccggtgagagattagagttctcatggagagagaaagagagagagtgagataccttcgtctgtgtttctgattagttttcttatctcttaaatatcctattggcccatcccaaagctataagacggacggcgcgattaattacttttcaaacacatgaattaacgttttcacatatgtgttcatatccaaaaggtccaaagtataccacgaaaagggagaaaaacagatttaaattcgtgaaatccctctcccacaattaaatttacttcttccaaacaaagacaaacggcttgaaccagtcaagtaagtgatacggcaccactagatgttccagagcctccatcttttttaatacgaagaagatttgtcctttgtgtgtatgaatttaacaagttttaattatagatttgtgtgtgtatgaatttaaaaacctagtacgtagcatcagggaatgatatcatagctattttagttgagctttcaaataagagatgatcaaaatttagaacttctaagaacatgaacgaataaacaactattttcttttcaaaccaactaaggtagatggtcactgaaagtatatacatcagataaaagttgcttgttattccagatgaagttggaccgagaaaaaaaaaa

SEQ ID NO: 4899 - DNA, 1058 bp, Arabidopsis thaliana
caaatataaagacatatacagtatccaattttgaaatcgtggtggagaactcaaacttggtgatctttcaacaaaaactatgtaaatctttttagccaatgaatttgattaataaatactgatacgtaattagttaagagagagagaggaagaaagaaaacaaaattttgaaagggcccataacatgtcctctctaacgtcaacatcatctgctactattactttcaccctctcatcaaactcactcaacctttcatctttctttcttattacataattcttcagatccataaaacaaattgatcccttaaccttcttcaccaacatctctcttacactcaacaagagatcatatcatgtcctctccaagagaaagaggaaagagtttgatggaatcatcaggatcagagccaccggtgacaccaagccgttacgagtcgcagaagagacgtgactggaacactttcggacagtacttgaagaatcagagaccgcctgtgccgatgtctcactgcagctgtaaccacgtgcttgatttcctcaggtacttagaccagttcggtaagacaaaggtgcacgtgcctggctgtatgttctacggccagcctgagccaccagctccttgcacgtgccctctcagacaagcttggggaagtcttgacgctttgatcggacggctgagagcggcttacgaggagaacggtggacctccggagactaaccctttcgctagcggtgcgataagggtttatctgagggaggttagggagtgtcaggctaaggctagagggattccttacaagaagaagaagaagaagaagccacgccggagatgggaggtgggagagaggactcttctcatatgcctctgccttcagcttctcttaagagattctccatcgtcgtgaaagattttgtggtaatatatgtttccagtatgtgactttgcataatttacatataaaccaagcatatctgcatcatttctgtatatcatatagattttgattgatataatatatataatactatgtatctgaaaccctaattggagatac

SEQ ID NO: 4900 - DNA, 851 bp, Arabidopsis thaliana
ggatcccgactcatcaatctcaaatccatcaacaaaacaagagtttctcaacgaaatcagagcactaaccgagatccgtcaccggaacgtcgtgaaactcttcggattctgctcgcatcgccgcaacacgtttctggtttacgagtacatggagagaggaagcttgaggaaagttttggagaatgatgatgaagcgaagaagttagattggggaaagaggatcaacgttgtgaaaggtgtggctcatgctttgtcttatatgcatcatgatcggtctccggcgattgttcaccgtgatattagtagtgggaatattcttctcggcgaggattatgaagcgaagatctctgattttggtactgcgaacgttcttaaaccggattcttcaaattggtccgccgttgctggtacttacggctatgttgctccaggtacgctttttgacccgttggataaattggttgtggatttgacccggttatggtcgggtcgggttgaaattatggttagatttggtttattcgggttaaattttaaccaaataaaaaccaaaatgttttgtttcggtttgaagttttttttgactatgggttggatttggttcagtttttaaccaaaattttgttgcaaattaagtaaacaactagaattcattatattataacccaattaaaaccaaaatttttgtaggtaatgaaattcctagtctaatttctagaaagaaaaaaataatgttttaagtttggatttggttcagcttttaaataaatgtaaaatttacaaaaaaaaaaaaaaaaaaaaaaaagaattagtgaaaattattattagattatgtaatgatattatattta

SEQ ID NO: 4901 - DNA, 1086 bp, Arabidopsis thaliana
cagactacctgagaagttggaatgtcttagactggtatatatgtgcctttaatgtgtcggttttcatcaagtttgtgctttaacagaagatttatctacaaaagcttatctccacaactttcttcccatgtcttttaacagatttgcgaaaccggaatgaagcctgtatatttggttgctctcctaaaatcatgggaaggtgaaaagtgtatcattttcacatcttccgttgagacaactcgtcgtctatgcaagttactcaacttttttggtgacccaaaaataaaagcaaaagagtattcaggtggtcttaaccaatcacttcggaggtaatattcgaatcttgcattacttagtagcaccgtatactatctttggaactcagaactaacgaattcttctcatttattgaacaaaatttgcctgcagcaaagaactaaaagcgtttagaaaaggtgatatccaagttcttgttgcatctgatgctctaacacgtggaatggatgttaaaggggtaacaaatgttattaattatgatatgccaccatttgcaaagaccttcatccatcgtgctggacgacatgctagagcatgccaggctggccgctgcttcacattgctgagtaatcatgaggtaaactgatattatgtactacacaaacacagaaacattctttctctatatgcttgtccacgttctctatatgcttgtccacgtatgtgtaaacacaagcttgaggtacctcagataaaagatactaggtaaagcattgtgtctgaaacagggaagaagattcagtttcataatcttgtgctcacctcactgaatcattaatctcttaggataaatgtataggaagactgctggaacccaccctctatctgatcctctgctactttttatatactgaagctcttgactctagctccatttgctcattcggatatataaaaatttcaggtaaggcgtttctcgaagctcctggagaaagttgggagtgattcatgtcctatctatccgatcccgcctacttcattagattccattcgtgccacttacacacccggtaagtacctagccgggga

SEQ ID NO: 4902 - DNA, 593 bp, Arabidopsis thaliana
tccggtagcggccaaaccgtcaaatttgcaagacgaacatctagcggaagatatgtgagtttatctcgagataatatagaattatcaggcgagctctccggggattattctaactatactggtgcacatacctccgacgccggacaatcagcccatggccaccaaagccgaagagcaatacgtgtcaaattctttatttactggtggtttcaacagtgtaacacgtgcacatcttatggacaaagtgatcgattcagatgtcacacaccctcagatggctggcgctaaaggctcttcgtgtgccatgcctgcttgcgacggaaatgtcatgaaagacgagagaggaaaggacgtgatgccatgtgaatgccggtatatattaataaacactaattgatatcttttacttgttgcacaagaaaatgaggtttaattctaactaaccaacaaacgtggtgatgattgtctctgtaggtttaagatctgtagggattgcttcatggacgcccagcaagagacaggcctttgtccaggatgcaaggaacaatataaaatcggggacctagatgacgatcgcctgactattctagtgg

SEQ ID NO: 4903 - DNA, 587 bp, Arabidopsis thaliana
agcttttccaaccccaagaaatcgtgacctgatgaattcgtgttcttgaacgtgtgtgaatttcttctggatcactgtgtagatatgtgtatatataagacttgttaacgttacaaatgactataattaatgaaaagttctcaagatcctgaaacaagattttgtactatactttggtctgtgtcgaagtccttctctaaaaccttatcctcccattttttccattgctttatctatgccataacattttgttataatcattagacacaataaaaaacttattctgcgaatagaagttgtccggttttagagtttaggattatcactagcttatatttgttcgtgatatctcgtaactaataaagattaaaaaaaagatttattgttaagtaaggtgtaattaagaaaataccttcatggtaccaaaaacaatggttaagaggcagaaaataatgtgggcaacagctaatacgaagatgaatatatgaagctcgtgcagacgtgataatgacattattggtactttccctgaatttaaacaaacaaaaagatcaaaaaagatacatattatagcaaatttatgttaa

SEQ ID NO: 4904 - DNA, 1047 bp, Arabidopsis thaliana
gccacacattgatatcctaacaacaattacctgtttgctgtcaggactccagctaacagcgtagatactgcctttgtgaccatcttctgaggccaattctccaactttatctccagtcttgccatcgtaaatcataccctttttgtcagagcttacggtaatgaatttagtaccatcaggtgaatatctgatgcagttgacgaagttggaatgctccctgtgtagcagatggtactattagtcaagaaaacaaactgttaatatctaagagacatatatgaattgagaagaagaaagatgcctgtgagaagagtgaaacttaaaaggtggtccatcataaaagttaaccaagaagtcttcaccgcatgtggcaattcggaaaggtctcgttggcttgaaggcacaactcaaaaccctacgagaatggccatcaaaatcccccattgtattgccagagtcccatctacatatataaaacaaacacaaattgatcaagccctagagatcattccattctacaaagtcatcattaaaacctaaattgtttgcctaattaccaaggactcgaaattgaatctcaaaatcaggaaagaagaagaagaagaagtggaggagaaactcacgcgaaggatcgaacaagagatttgccttttccatcgccggaagcaacaattcgaagtccatcgaaagaccattggagatcatcgacacgaccagcaaggactctgaactcgttcttcagcacgaagccgttgtgcgttccccaaacgcgaacagtaccagagacatcagcggaacaatccattcgccgttgggagagtagcgagcaacggtaacagcatagccatgttcgccgtaaacttggacgtcttggagttggcggaggtccggatgaagacagagcggccgttgcagtagagaatggtgtcggatttggaatcgccggagatcaaaatgccgcggcctcgttcggtggagggaacacaaggaaaggtctcgaggagtttcgcatcgtggaattgttggtaggaagaacgggtgaaggag

SEQ ID NO: 4905 - DNA, 1455 bp, Arabidopsis thaliana
aataaccatagtggatgcatcgaatggacgcgaagttattgatattatccctcgaggcctagaacttcttgtttcagtgggcgaatccattaaactcgatcaaccattaacgagtaatcctaatgtggtcggatttggtcagggggatgcggaaatagtacttcaagatccattacgtgtccaaggtcttttgttcttcttaggatcggttgttttggcacaaatctttttggttcttaaaaagaaacagtttgagaaggttcaattatccgaaatgaatttttagatctgtctatttagctttatcaaattcgtaaaaaagaacaaaaaattatgaaaaccttttgcctctctttagatttgctattccttttcgactagatgtcaggaattacttatatcatagtcctaatactagtatgtatattgagaagaattcactttacccccctttatttatttttcaataaaaatttgaaaaatgagaaggggtgtgatgtaactctgtcgttattgaccaattgaaattgatagaatgtatcaataatcaagagtttttttctagtcaaatggcaaaatttgactagatactaaaataagataaggaacacacgcgccgaaaaaaaggggaaccataaatcggcgaaacaacaagttttagggactatagggagtattttttgtcttgctagtcttcgacacaagaaaaggaattttagacatccttttcttgtgtcgatcttgtccttcttgattcaattcgttaaaaactcctattcttagtttacatatatatatatatattatagtagttactttttgtagttttctttttttttttttcaattttgatgaaatactaaataaataaaatcagaaaaaacttctatttcgattctattatagtatagaccaaattttaaattttaatgatagatctaatgataaaaactattgtgtcagccggggaagcaggaaaagggaatgaagtgattccccttttttattctatctttgaaagattaaaaaatactatatgttcataatatactaatttagttaagttcatttttcaaaaacacgataaaaaattgttctgattattagcagttcaacgggaccccctcgaatcagacaaagaaggaagagttgggccccgttgagttcttatgttttcacgtctataactcagctcatccaatttctacagggatgaacctaatcctgaatatgaaccataaaagaaaatacctattaaaccgatcacaagaataccagctacagtacctattacccaaagaggaatccttccagtagtatcagccatttatcccgcttccctccacatttaatcgagtggtcatgctagaaacataaacagtcagagataattattatatataatccatccgaatgggataataaaattactactctttattttttattttatta

SEQ ID NO: 4906 - DNA, 1285 bp, Arabidopsis thaliana
gttgtttctctcttgtttgtacaatgtttgacaggaagaaacatcatgggcgcacggttgttggcaagattcagattgtgtgaaggaagctgtggcagaattcaatttatgttttccaggatcaaaggatagtagggaactatttggtttgaaccataccaatctgaagcagactcttcttgattgtatccaagaaaaaggaaagttaaatggtcataaccccaagtatctggagctcttatcatctatgcttgatattccgaggagaaatctagctactaaacccggctcttccccttccccttcaccttcccgccctcctaagcgtagtcgggggcctccgcgcccacctactcgaccaaaatccccacctcctcggaaatcatcttttccaccatcaagatctccccctcctcctcctgctaagaaaaacgcttctaaaaattcaacttctgcacctgtttcacctgcgaaaaaaaaagaggatcatgagaaaacaatcatcattgctgttgttgtgactgcagtttctacgtttttgttggctgcattattcttcttatgctgctccagggtttgtggaaatggttcaggaggcaggaaaaacgatgaaaggcctcttctcagtttaagcagtagtgattactctgttggtaataatatctccactttctcactgtactaatctaacaagaaatttcttgaactatagagactaaaatgttttttaatgttttcaggttcctccatcaactatggtggttcggtcaaaggagataagcagggtcatcaatcttttaatatttactcaaaccaaggaaaaatgtcatctttcgatggaagtaactctgacacttcagattcgttagaagaacggctatcacacgaaggcctgagaaataatagtattaccaatcacgggcttccacctttgaagcctccacctggaagaacagcttctgtactttcagggaagtctttttctggaaaagtggagcctcttccaccggaaccacccaaatttcttaaggtatcctcgaaaaaggcttctgctcctccaccgccagttccagcaccgcaaatgccatcttctgctggtcctccacgaccgccccctccagctccgccacctggttctggtgggcctaagccaccacctcctcctggaccaaaaggaccaggtcggcctccaccaatgagtctgggcccaaaagcaccccgacggctttctgggccagcagatgcattagatgatgattgccccaaaacaaagctgaagccattt

SEQ ID NO: 4907 - DNA, 814 bp, Arabidopsis thaliana
gttaaaaataatcaagtccaaatactaaccattttttttctttcgatttgaaacatttatgtatgttctgattagatcttgttttgaacaaagtaaaaatgcgaattatttgttagtataatttaaatgtattttttgtatatcgattttcccggtttattcagtacaaaagtatcgttaagtatgaatgtatgatatgattcaaaaaaattacgttgagtatagttttcatttttcaagtccatccagagaatgcatgcacatatctaatttatacggagggtataactataaagcaatatttagttacctgtttacactgaggagcttcgcattgaagagtacgagaggagcttgacttggaagggtcaaagagaacagaggaagaacagccaacgcagccagaacaaggaatccaagcagcgtcattgctagtgtcaagagccacgagcatgggctgagccggtgtcccgatgttagccctcacgatgtaagtcgggctctgaacgatggcccgaccagaggcgattggaactgatgatttcctaacgccagcgaggcttgacaagtataggaaacgagccttatcttgaagaagtgtatctgcccatgaaacagaagttttgaatggagaacatagactgttaatgtggaacactcttagatctgaggaatggctcttttcattgcagtttatggattcagatttcaagattaagagagagattaacaaaatcaagagatgggatctcattgtttaagaccttgattttgtctttgtggtttctagtgtttgtaaagtgaatgtgtgagt

SEQ ID NO: 4908 - DNA, 908 bp, Arabidopsis thaliana
aagaaacctaatcaccaagccgtaatatatagcgtgaagggaagctgtctgggttaatagttttcatcaaaaggtgccaaggctttgtatcatgcgcaggtgtggtccattgtgccaactgccaaccccggctcatacatccaaaagaaaagagttttttaaaattaaaattaactgatatctattaaaattaattaagtgatatagtactatactgtatagcagaaaatataaaagatgatggcacttatggaatgctgatgggaccagaatttggttggtctgattcgtctggctgagaaagaaagtataatttatttatttttttagtaaacgaaatttgttattaaaaaaataagagccaagtaaaaaatatttttaaaatcgtatatattttattatttatttttagcttccggtaaacaaaaaaacacagcctttgttctgtttctctgcgatttcttcgatgttcctcttcttcgttttgattttcagatttgtttaactcggtcgttgcgttgacttcaaatttcttaaaagagagagagagagagagaggagatagttcagaaaatctgtcagacttgggatctttctcggcaatgcgacgcttgttcgccgcgaaatccctctcccgagaggatacaacctttttgtcattctcttcttcttcggtgacgcgtttcctcaaggctcttcttcctctccgttcagatccaagagatgtccgctaattctcatcctcctaattccaaaaacgtcctctgtaatgcagccgccggtgccgccgccggtaattctctgatctgcttctttcataactttttcttagattttggtttggttgattaaagtttcaaactttctgataggggttgtgcggctacgtttgtgtgtctcttgatgtt

SEQ ID NO: 4909 - DNA, 644 bp, Arabidopsis thaliana
attactcacttttaagataacgtttctttatttcatattcaaatttttaataccccaaacattttcttataaagccccatttggtgaaatcgttttcctcatcacaatttaaatacaaagaacacaacaaacgaactagcttaaggcaatatacaagccaagcgctcagcaatggcgatcacacgctcctccttggccatttgcctcatcctctctttggttaccataaccaccgccgattactactctccctcatctcctccggtttacaaatcaccggaacacaaacccacgctcccgtctccggtttacactccacccgtttacaagcctaccctctcccctccagtctacactaagccaactatcccacctccggtttacaccccaccggtttacaagcatacaccctcacctccggtttacactaagccaactatcccacccccaagtgtacaccccacccagtttacaagccaactctctcacctccggtttacactaaacccactatcccacctcccggtttacaccccacctggtttacaagccaactccggtttacactaagccaacaatcccacctccgggtttacactccaccaggtttacaagcctactccctctcccccaggtctacaaaa

SEQ ID NO: 4910 - DNA, 323 bp, Arabidopsis thaliana
atcgatcattaaagcagtctatggtacatcctttgatgaagagagagatccaaagtttttccaagacagagctattttgtgtccaaccaatgacgatgttaactcaattaacgatcatatgctttccaagctaacaggttagtgaattaactttgaactactagagtagatgacaatgaactactacactttgcaggtgcacagaagatttatcgaagttctgattctattgatccttctgacacacgtgctgattaaaaccccgtctatacgcctgattttctcaataagatccagatttctggattaccttgccatttact

SEQ ID NO: 4911 - DNA, 1223 bp, Arabidopsis thaliana
tagagtttttttttttttctctttcagaaaaccaagacatattctttatgagaatttccctagctcatacactccatcaaagtcattcttctctttcaaacatacttaagatccctctaggcacaactcttgtgtatcctttttcgtaggataaacttcacataattaacaaaaacccaacattttcttgtgtaaaaaaaaatacgaagaatgttacatatgttgtaatagtaacgcctcccaaaagaaacaccttatgggaaacccacatgatacatatgttatacatgctcagtctcattcatatatgttaagatgtcaagcaatggatatgagtctcattctgacgaaagcccattaactaaaactatggcccattttatgtgctgcacaaaaacgaatgggtaacgtgtagacatgcaaagtggtacaaatcaaaatcaatgatcaaggtaacgtagtcaagttcaattactctttgtcaaatttaagtggtctctattactaaactatacacaaccgttagatcaaataattctctaccatccaacggtccaaagtctccacttctatttattacaataaaatgagaaaataaaaacgcgcggtcaccgattctctctcgctctctctgttactaaatgaagaagagaatctctccggcgagatcaccggcgttattccgataatttcgcctgagagttgtcgcatgttataaatgggtcttcctttattgtcttgtagttccacaagagtcactctctcttcttcttcttcttcatcttggtgtagtagcggaagcggtggatttaggagtagttctaagcttttcgattctccggcgtgttcgagatcggatttgaagaaacgtagcgggaagagaaattcacggttaaacggactttcgttagaggaaattaaggtcgattaaagcatcgtcgtcttccgctggacagagcagtagcgacgtgatcgacgacggagatcggcggcgcgtggtatagctgttacttcaggagatgtaacgtcggctggaagtttcagtagcggcgaatttgttggtgctggtagtggcggtttagctggaccttcaggtgaggttacttccgtcggcgagtttgtcggcggaagcggcggggattttaaggattgggataagatcggtgctattgttaggttgagttatggaatcggtgagtcacgagatgattgacgcgggccca

SEQ ID NO: 4912 - DNA, 534 bp, Arabidopsis thaliana
tagaatcagaacttcgataaatcctttcttcacctgaaaaaaataatagttcaatatcatatacacttatccgtaacagcagataaagttatatatatcccctttccagtaatgaaaaacggacattcactaacctgttagcttggaaagcatatgatgggttaattgagttaacatcgtcattggagggacacaaaggcttaactctttaagaattgagtttagtttcttgttccaagccctaggtgcttgtcttaagccataaagtgccttgtttaacttgtaaactttttcttcattcccttttgtcacatatccttcaggttgagtaacatagactacttctttaagctctccatgaaggaacgcagtcttcacgtcaaggtggtgtatctcccatccgtttgaggcagccaaagcaatgatgagacgaactgtctcgattcgtgctaccggagcaaacacttcatcaaaatctatcccgtgtcgttgcacataccctttagccacaaagcttgccttgtacttgttgat

SEQ ID NO: 4913 - DNA, 913 bp, Arabidopsis thaliana
aaatccatcttcgtggacggagagagtattaatttgtgctacttttctcttgaaatgttaatcgttattacagcctttttgaaaaaagttgagtaggtattgtaatagtatactttccacgtatgattgagaaaactcaaggtgaggcagagaggagccggtggggatctctcatactctctctttgtttacagagatccaattatcatatcgagccatgaactgattctgattcgatttggcaataattaacatttatcgtctttaaacgattaaataatataaattacattttaaatgaaaaggaccatgcatccaccaaggtgatactgactgcctaattataaatgtcatatcaaaatttattactatatggtttaacaaaaattcttatctgaattttttttctttttcttatctgaatgctttcattctaattaaagattttaatatatgaatattcgcacgtggatatttgtataagatatgcattaatctccgaggctatgtatagttcagaatttgaagtgaagtttaggagaggaagagagatggaggtatttagacttggagagctgagacacctactggtgacggttttcttgtcggggctcgccgaatacttgataaggccagtgatgactgacgtcaccgtagccgcggtttgctccggcctagacgattcatgttctttggccgtctatctcaccggagtacaacaagtggtaaccatatctacttatatatatacacatacatgcatataatattaaatctgttattgtttttacgctttaactaatctcttttcgttgggtgttgattctctttaactttttatctttttatctgatggtgaaaatgatataaaaaaaagacggtaggaatggggacaatggtaatgatgccagtg

SEQ ID NO: 4914 - DNA, 1050 bp, Arabidopsis thaliana columbia
tgtcacgaaatttacaagttaagtaggcaatcccattttttttttcgttgatcaacgtcaaccataattgtgttttcgcattcaacaaaaaaaaaattgtgttttgaataaattacacaaaagtataatcatttgaaacaataaataaagaatatgatttatgttatatttataaaaaactgcccatatataatagtattttgtaaatgaattactatatcattttgatacttgaaataaaacagttatagtagtttgtaaagtatagtactgttgtaaataataaacgatatttgaaatttagctatgcaatttgcttgtatgtgtatatatacacacattctatttgtatagatggccaacagaaatcattaactttattccccaaattattgacaataatagaaagcaaatatataagattaaaaaaactttgcactataagaaacacatgaacacatggtcaccactacagcatacaaaagttgagatcatcaaaagctatgcttattacattttcatctaattaagcactgctaaaaaaatctacgagacacattaatcggttaagtttgccttttaaaaggaagaaagaaagaaaaaaaccaccgatgatgatgaatctctaaataatcccaattatagtatccaattgcaccgattgatatccttgtgctagaacacacaaaacgatccaagatcatctttttgacgatctagaaaagaagatacttagttcttgaccgataatcccacgtgggtcaacgagatggaaagattccgaatcaaacgaaccaaaaactcgtttgaaactcgctcttaagtacatcatatgatcacttttctctcggtttatctcttctccgttaacaactccggctccttcagccaccggagtaagcaccttcaacgcagctagctcagacttcgaaggctctcgtttgatggcgaatcaactttccgaccgttgcaatacatgttccataaaggtgttgtaagaagtgaagaggaagaatcttcatgtgaatcatatccgtcgttattgtttga

SEQ ID NO: 4915 - DNA, 630 bp, Arabidopsis thaliana
tggtgcatacgagtaagccttgagactcccgtcagatccgagtcttagatacgaaatcgttccgttgtaattgattttgttcagatttaaagttcctcctccgcttccgattggtctgacttggagtaaccggcggttattacccgggttcgtagcgggttgtggtgcgggttctaagagaagctcgtaagctgacggctccgttaaattatcgaattctcttgtaacggcgaaagtgacggtgccgcggaaatcgtgatccggccatccgccgtaaactaacggcgtaccggttttgttaacgtacatggttaaaccttttttgtccagcaccatgctgtacggaccatctgagccgttcgaatcagatgtacggctaacgagtttgttgactccgttaacttttaacgattggccggtgaggagtgtatcggtggggtgatcgaaactctgccatacgaatttgccgtttttgtcgtgtaggacgatgtttccgttgggtaagatttggaatccggtgacgcctttgttagctgtgttagtctgccatttgactcgtccgtcagcttcagcgaggacgaggttgccgttacgcgcgagtgagagtgtagcgtttcgccgacggggttg

SEQ ID NO: 4916 - DNA, 639 bp, Arabidopsis thaliana
cggcacttgccatttcaactgtttcggttgtcatggcccaagtccctcccgagaaacaattcagagtgctcaacgaacccggctacgccccatacatcaccgagtacgacgcgagttaccgattcctcaactcaccgaatcagaatttcttcacaattcctttccagctcatgttttacaatacaactcctagcgcctacgtgttagctctccgagtcggaacgaggcgtgacatgagtttcacgcgttggatctgggacgccaatcgcaacaaccccgtcggagacaactccacactctcattcggccgaaacggaaaccttgtgctcgctgagttaaacggccaagtcaagtggcagactaacacagccaacaaaggcgtcaccggattccaaatcttgcccaatggaaacatggtgctacacgacaaacatggaaaattcgtttggcagagtttcgatcatcccaccgatacactcctcgtcggccaatccctaaaagttaacggagttaacaaactcgttagccgtacatctgatatgaaccggtccgatggtccgtacagcatggtgttggacaacaaaggcttaaccatgtacgttacaaaaccggtacgccgttagtttacgggggatggac

SEQ ID NO: 4917 - DNA, 2513 bp, Arabidopsis thaliana
aatgggttatggacgtcgggttctggcaggcaggaaattgttcttgtacggtttaccattggtcttcagagggacttcgcgaattcaaagagcttcagtctgcccctacttgggcgatccttaagaatgtgcctcctcaactctattctcttgacggaatcagtgttatcgcaagtggtatcggagagcccctacacacggagaagtccaaattggacccgatcaacattggcaccactaaggttaaagttgtgattaagcttgatattccgctgccagattctgtggtggtgaaagacattcatgggaactctgctaagatttcggttgagtatccaagacctcctcctaagtgtctgaattgtggatgttatggccaccttctctcgcgttgccctaaacctctaatgaagaagtatcccttcaagagagatcttccctcgggctctaaggatgtctcccagtcctcggtccttcttccaatcgctccttctgatgacgggacttctatcaatttgcttcacaaggaggatgtctcatcttcctccaggataaggagaagacgctcccgttccaaaaagagatcgaccagttctcctcccaagatcgctacctcatctgtggaagtccaggctctgtcgaagtcagcagttacattgtcccatcccaccttcttgaactgcgtcaaagaggcttggtctagtgacattgttgtgggctcaaacatgtttactctgggagctcttatgaaggctgcaaagttggcatgtaggaagctaaatagagagcggttcggtaccttggagtcccactcatggctcagaagatgaggaggcaggactaccaacctctcatcgataaagtgaatagcagattcacttcttggacctccagacacctatcttttgcgggaagattgcagctcctcaagtctgtcatcttctcttctattaatttttggacctccgtcttcctcttacccaatcagtgtttgcgcaaactggagcaaatgtataatgcctttctttggaaaggagccccgaattcggccagaggagcgaagttatcctgggaaattgtttgttcctccaaagtttgtggcggccttggcttgcgggatttagtggcttggaataaggtgctggctctaaagcttatctggatgcttttcacggctgcaagctcgctttgggtgtcatgggtaagagtcaacctcatcaggaataagaacttttggtatctcaatccctctttctctgggagctggattttgcgaagattatgtaagttgcggaccttagctcgtccctttattgtctgtgaggttggatcaggtgtcacagcgaacttctggcttgataattggacctctcatggccctttaattgacttgactgttcctaccggtcctcagattactggtttgcctagagactctacggttagagatgctctgagagggaatgactggtggatctctgcgagtcgcagcaggaaccctatcatcagtttgattaaggggattcttcctcctgtggcaaatatagcagagaagaggatgataggtttctatggaaaccgaatcacaggtctcctaagtctcttttctcctctgcagatacttggattgccctccacccaattggtaacagtgtcgattggcataaagcggtttggttcaagaaccatatcccgaagcatgccttcatttattgggtgccgcttggaatcgtctttacactcgggataggctgagaagatggggcctcaacattccctcctcctgcgttctctgcaactcttgtgatgagactagagaccacctgttttttgattgccactttagcagccaggtttggagattcttcatttctgcttctggtctctctccgccgttttctttcaaggattctcttctttggatgaggtcgccttctccagataaaaacatatccttcattctcaagatcctctttcaagctgtgatttacttcacttggaaggagcacaacgcgaggatccactccgcaacgttccgttcatctgctcaggtcattaaggacatccagttgactgttcgggcgctcctcgaccctctctctcgtcttcagcatcagaagtcccccggtccttctctgttagcctcctggttcagtgtttttcaggtgcactaaggtccttcttcgtgcggtgttatcatggtaagttttcctcttcttttgggcctctgggcttcctcttttctgcttttcttcttttcttttctcttgttggggcctgcgtgcccctcctttgggcttcggccttgtaatgttgggtctgcgtacccttggttgggcctgagggctttgtatgtttttcatccttaatggaaaataaaagaaggaaaaaaaaaaaactctagttaatggctctacatctcacagctccttaagaaatctactcatggatatacatttttgattttgtctttattagatgaactgaataccttaaaaaaataaagaagtgaa

SEQ ID NO: 4918 - DNA, 535 bp, Arabidopsis thaliana columbia
taaatgttaatctacattcttttcagtattcatggagtttaaaagatcatttgaagtcatatacaataagaggaacaattttggtaatgttgatgtggatgtgaatctcttttacaatctctcctagcagaaaacgtaccatcaacgccatcagcgggtggtgcgactggtaacaatataccaaatggtcaagtagttcagtttgaatcttcttcgtgcttcgtggatggtaaaggaaagtacgaagaataccatgagacttacttgaagatagacgggagtaaagccgagaagtttgtgtcaaaagggatgtacaaggatccgagtggtctctctgttcttactggaaacaacaagaagaaactgatggaccatgcaagctttaaaggcttgaaggatccaaaacgtaactctcaagagaaaaccctgagaaccagcctgagccggttgatgccaacagtcagttttaatgacaagactctaaactcacccacatctcagaaacgaaaatccgctgtttatcggctttctttca

SEQ ID NO: 4919 - DNA, 473 bp, Arabidopsis thaliana
cacaaatgtgaaaccgcatactagaaaatccggtatcatctattctaaagttggtatgccatcaatgaattcacaatatcatcacaggttaagatcaccaacatgaaatatcattctagatattaatctcaagatagataatccaatcgacaaaccattacacaaccaaaggtttctattttaaagcaatagagatcagctaaaaacgagacaaaaggaaaaaagaagaatcataccatttgatgagccagccaaagaggaaatgctgcataatcggaactttctcaagcacttcaactctatacatcttaagcaaaccgctattcactttcttccagttcggtacaccacttatatcatccaacaacggcgaatgctcagcgaacaaacctttcttaaccttcttcacaaatgcaatacaagacaagtacatgtattcactagagaaattctccaaaatatcatcgttatga

SEQ ID NO: 4920 - DNA, 940 bp, Arabidopsis thaliana
caaccgtctgatcactacggatcaaagttttaagcccggtgttgaccgtaaatctcctcgaagcggtggacctaacagtgatccgcttggtcagaagaaacttgggggacgaatatcggatctagagtcgcagttaggacaagcgcaagaggaactgagattgctcaaggagcagttggctaatgctgaagctgtgaagaaacaagctcaagatgagcttcataagaagtccaagaaaccaaacccgctggctcgagtggaggaatctgcaactgaggctgagaggattgatagagacgaaatccctggtgatgtgcagaaagagactgatgtgtttgaggttcccgttgaaaagattgcagtagaagaagaagaactgagaagcggcaatgacgaagctgagaaattggttgcaaaggaagatgagataaagatgctgaaagctagactctatgacatggagaaagagcatgaatcactaggcaaagaaaacgagagcttgaagaatcagttgagcgattcagcttcagagatttctaatgtgaaagctaatgaagatgagatggtttcaaaggtgagtaggattggggaagagttagaagaaagcagagcaaagacggctcacctgaaggagaagcttgagtccatggaagaagcaaaagatgctttagaggctgagatgaagaagctcagggttcaaaccgagcagtggaggaaggcagcggatgctgcagcagcagttctttctggagagtttgagatgaatggtcgggatcgatctgggtcaactgagaagtattatgcaggtgggttctttgacccgtcagctgggttcatggatccaccgggaatggctgatgattatgatgatggactgggaagtggcaagaggaagagttctgggatgaagatgtttggtgagttgtggaggaagaaaggg

SEQ ID NO: 4921 - DNA, 1617 bp, Arabidopsis thaliana
cagttgtgtagcatagagtgatcggatggaactgaatccaacatccaggttgtctatttgttaacctcgctagtcctaatctgactagtaaaaaagcagcatcctcttcgcttctgcgtcctaaaccacaaccaccacaccaagcaaatgtgtgactcagacacttgttccatttgctgaaccggtttccacctgtgggcatgttcttagcagctgcagctaataagttaaccggtatagggacaggagcaaaccaagctcccacgagtagcattttcaatgagagaaggtttctgtttccctcagcttgctccaaaacagccaaactgaaagctaaaacctttgcaacaaatggattggacttgcagtattgctcatcatttaagttcagaaaaggcgaggccgaacgttcttcgatttgaactttgtttacagcttcaaagagagcagaaggcagaattgcaagctctgaaagcaatgatccaaccacccaaagaccatagctcaaccttcccaatttctcatcgaaaagcttgaggacctccacctcctccaccgggtaatctttctttcttcttcctctcagtaacaccattgcatcagacgaaggcaatatagaaagctgcacagtgtcaaaggtcatgactttaggaagtctagtagtgatcaaaacatgtgttctctcggtgttcctcggaatcaaatcatttagatctttcccttcccaccaatccttctctatctcaagattatcaatgatcaacagataaggcatgtctctgaataactcacgctttattctcttgaaagcttcaaactcttgttcatcaaagctccttagtctacctctatccttctcagcatctgcactaacatcaagccccaagctgaatgacagatttaacaggttctgtctaaagtatcgagcttcccctccgacccacaaaaccatcttatacctctgagaatacctgtaagcgaattcaagagctaactctgtcttcccaatccctggaactccatttacacaaacaacacttgtgctacttttgcagttactattgtttctacacttcttagtcttcaacaatcttttaagagagtttttcccaccatttggatcactccaagcctcacttcttgaatctgagcatcttccaagctccaagctaataaacttcccatttcgagttggtacaacatctgattcctcatctgcaagtccttcagattgtccacttgcttctcctctggtacttggtgttgtagactcaagatactctccattaccaaataaagccatctccatttcaatgatctccttttctcttccaagaaaagatctgttcctcggaaatggaagctcatcaatcccttccacaatctctttatcagccacactcttcctcccaagctttgccctgagaatcgtcgcagtctttcccacacagcttctccagttactctcattagcttctagtttaaactcatgagacttaatcaacccatcaatggcttctttacactctttatctatggcattgcagttgagaagaccataatctcagaaggaccagtccatagaaaataggaatcaagttcttcttttgagcaaag

SEQ ID NO: 4922 - DNA, 849 bp, Arabidopsis thaliana columbia
gttatattttgacataaaacatataaatttgttattatcatctacaaccaaattttagtgttaatttatttataaaaaaaaaaaatagcaagaattagggatatattagtaagtaattaaattcaattatcaaactcgtaaccaagttgttgctatatgcaaatctttattagttcacaaagcatgcgaaagggtccactatcattagtgcgttacactctgccccctcttataaattatgtaactattattagggctacttattagtgtactatatgtacatattacatcatattcagatgataaattaaagtaaggaaaatctattgttgatcggaactggccggtgcttctaccggtacggttgcagaacgatcacttccttgccggcaaagacgctcgtactccaacgatgacctaatcttaggcaacacaactttaccggaatacttgaggcacaaggcacatgtaatgataagtatagcagacaacatccaactaaactgcagattcgccaatgcttttgccctaatctcagcaccaggggactcacaagccaccgcaccactatgataaacactccttctattattgtctgtagatgttgacatgttactcacgcaacctctaggaacatactctgggatccaaagcatgaaccccatgttcaagaaccagcatccttgaaacataaccgatatcgggaggaatagagccgcagagaaggatttagggaacgaagcagaagctagcgccgaggagaaggagacgaaagcaatgagttggagaaggaaatggtagtgacttcaagacctgaatgatcagtggaatgaaaatgaagaaggaaga

SEQ ID NO: 4923 - DNA, 766 bp, Arabidopsis thaliana
tggtgaggtaaagtgtttgagccatgaggacgaacagagatgttcccggagaattcgctgcgaaatacggagctccccatccgtcgatacggtaaagagaggaggagagggacggagaccaatggcaggaaccgtcaacaacggcggtggaaacagacgacggtgtaaagatactggaaaaggtatcgatgggagtatcaacaaaagctagagcaggcatcttcttcttcttcaacgaacggttacaaatgaattcaaaatttgtggattcaaattttcaacaaacaaaaaaaatggagaaaatgaatctgtgagtttgttagatttgggggaatttgaaacccgccgaggcgaagagcctcggggctaaccccctcagaaggaagcaggaggtgaatctatcaccaccgtgaaacccgccttttacgacccgacccgacccgaaactctccacgattaacgttcagaagaaagcttttttaaaaattttggttaaaaacggaaaaaaacaaatgaagtttccaaatctgtattcaacaacaaaacttttccctgaaagaaaatgagaatgagaattttctcgagaaaatagaggattgagaattttctcgggaaagtttcagggaagagagacgtgaaagaagagagagatggtgagaaatgcatgaaggaggaaggttcgttatataggggagagtggtggctggtgggagagaaggtgagattcggatgaggttggattttgggcttgggccctattttgtga

SEQ ID NO: 4924 - DNA, 1264 bp, Arabidopsis thaliana
catgcaagaagtactcttctttcttgattctcactccactgatcacttaggtcttgaaggccagtaccatgtcctcctcgaattcgctgccttcgtctccttctcttcagctcttgcgtcgaccatttaccctaaatctttttatgcgtctcttgtgttctcggcctcgctcatgtttcaaggatgctggttcttgaacatggggttaatgtttttagatccaaattatgtccatataggggttgcttgagaaccacgaccgatacaccaagaagtaacaacagtactattgttgatcatagtgggctggtttgagagtctccttgtacagaaattatggcacaagcgttacggagtcttcagtttagctggattttatcagctatattgatttttacatttgtattctctctcaaaagtttcggggaaagtcgccgtgtttcccaattgccggtcgtcaacgttagaatacgaacgtaattttcgacgaggaggtgatcgttctactgtcgtggaagcctcgacgaatccttttcgagaatatatttcgtctcgtttatattaatgttgtaatagtatagaaaatatattttgttatcggtaggtaagcttttactatttgatgtaactagcctttgattgttatgacatgtagcaacgaattatacattggttattgataaaagcgtatttccatgatattttttttaatttatatacaaggtttatactggtataacttcaataatggtaagacttatcttttgactagagaactgtataaaatgagtcttggaaacgacatagagttaaagcaactttgtcactcttgtcagataaaaacttatcggtttctcttttccggctttaactctccactcatcactctccactctcaattttcaccttctcttctctgaacaaggcaaacaaaaatggttacaacccaaaacacgaaggccagagtcacctccgtctctaaccgccgatcacagcaagatcctgagtcgccggtgaagaagttcttcaagttggtcttaccttcaacgatgaaggataagatgatggtaattacttaacacttagaaaaaacttgaaataaagtgtttgcatgtgtgttgttatccctgtttcaatttctagggactatatctgaagattcactaaacagtgtccatttcttttgttttatcttggactagagatctaaaagggatacactaatctgatcatttgttcttaagaaatgtagagaatttaagag

SEQ ID NO: 4925 - DNA, 777 bp, Arabidopsis thaliana
acgcgttgctggaaattaacccaattctttttatcagcatctccctgtacaagcatggaaaatgagaatcatttgaggccttttgaagtttgcaaaaatggccatgacaagtgaactgtttacctcaaaatcgttcattagcgatttcatttggtcgtcaacttctctctttgagaccaaaggtttagctacttcatcatctcctgacatctcagtatcatactcactttcatcctcattgatcaatacaaattctttccataaactcttactcgcaactgcacaaaccgaaaaattcatatcactagttatacaaagtttcagggctaggaaaagtttgtgaattcagctaacctttctgcttttcagttggagcaaccccattattgacagggcctgagtcagatgtttcgctaaccgttcgaagctgttggcattcggttttatgacccaagcgccaatgcagggcctggaaattagaaacaacacagattgttcaaatttgctcaaaagagcagaatctagcggaacaaaagaaactacgatgcacatatgcacacacctggtgtttcggtgaacagtatcgagcatttttgcagccgctacatagtttatctcctttccatgttccacaccaagtgcaaagcggacgtaaagtgaaacaaacaatatcaagaattgacaattaaaagagaattctcggcattcagtcaaacccatcaatcagttcataatacctccatgacccaatggcttgtctgttccatcgtgctttgg

SEQ ID NO: 4926 - DNA, 1256 bp, Arabidopsis thaliana columbia
tagaggatccccagatgtttcaaataatatttgcgaattttaatatttttggttacagaattagtttgtacgagtatgttagttctatcttaattattaataatttaacagataaccatatttcatcataacagaaatattttgttttataatttagatgataaccaatttgaattactgatgacagaaaaaatagcagtttgaattactcatccaagaaaatactagtacttaaaagacatgtaattattagattaatttagtttaacgcattcagatcaataagtagataatcttactacatactgcagcctggctgaagaacctatgcattatttaagctattgcttataagaaaaattaactgtgattatgttattatctactggtctaataatgttgtataatgctcagtttggtggacattggtttcactctcgtctattgatttcaagatgttacattgtatgttggttgtcctgtgattcatatccgtgtaccagtaaaaactcaaaaatcctcttaaacacacagagagacatggtgacgataaaacgacggcgtatttgcggtttgactcttgttccccaaagtctcaactctcaaggtcgttgggtggtccaatctcaaatctgaatggaggaagtgatgatttctccggtggagcacgaccctcagggccaggttaagcagcagcaagcggccggcgttggtatactgcttcagattatgatgctcgtgctttccttcgttctcggccatgtcctccgccgtcatcgattccactatcttcctgaagccagcggttcgcttctcattggtataatcctttctctcttcctttggcttttgctctctctctctttgatttctcttatccctagcttcttcttccgtcgtaattttcaggtttaatcgtcggtatacttgctaatatctccgatactgagactagcattaggttttgccctcctccaagtatccctgagttttcccttttatcgtttcctcgctcactggtttgttctttctactctgtatcaggacgtggtttaatttccacgaagagttcttcttcttgtttttgttgcctcccatcatattatatcctttgcttcaatatctgcatttcatccttcaaattcgctgctgctatgctatgtataatggatgtcattttccttgacatcattcatttgtttgaacccagtcaggtttcagtcttcaacctgtaagtgcttatctttctttcttcc

SEQ ID NO: 4927 - DNA, 1321 bp, Arabidopsis thaliana
atactactgctctagttgttgatgctattatatgctaaacataaaaggcagagtgcatttaaagaaaagcatagaagcttatcgttacgttttacatatttgcctttataaatttatagatagtgtttaattgataagaacataatgttttttttatttatatataattaagcatcacatgttgagaagtaattacagaaacgtaaaacatttgacttcaatcacatgggatttgttcataaaactagatgaggagaattatgttttcttacaaaaattgttatcccgcaagccagctttcaaaaagctcccaacgttatcgaatcaattcatattacttacaacgagaaagaagctgttttgcttcgtattttacgtaattgaatatcttcaagaaatcaataaacgtgattattttgttaaataaaccctaaactcttcaactataaagatggtatatcagtgttccaaggtaaaaggatcaaaccaaacccaaagatggaaaatcgagaagtttttgtttacattgtcatctccatcttccgctctctccaattcttgttttggagattccgtccacgttacaatgatgttacgtctgcgttgacccgccctctgacttcggccgcaagctatgattttaagttcatgtcgtatatggtcaataaggctaagtccgtcaataaagcactagaagaggctgttcctctccgcgagccagaactcaagatccgtgaggccatgaggtacacgcttctctccgatgggaagcgtgtaagaccaatgctttgcttagctgcatgcgagctcgtggggggacaagagtcaaccgcaatgtccgctgcatgtgcgattgagatgctccacgcgtcgtctctcatcctagacgacctcccttgtatggacaacgacagcctccgacgtggaaaacccactaaccatatagtctttggcgagagtatagccatattagcttctcaagcgctcatagctttggctgtccaaaagaccacgtcatccacctttgcggacgttcccccagagaggattctcaagaccgttcaggagatggttaaagcagtggaagggcttgttgcaggtcaacaggcggatttggctggagaaggtatgagatttgatagtgacactggattagagcatcttgagtttatacatattcataaaacggcggcgttgcttgaagccgcagctgttatgggagctataatgggaggtggggctgatgaagagattgagaaggctcggagttacgcaagatgtattggggtaatgttcaggttgtggcgatgtgctgatgtga

SEQ ID NO: 4928 - DNA, 1331 bp, Arabidopsis thaliana
caagacgcaatggaattcaagagatcagtcaattctactaataaataattttctaaataaacatgataatttatctatttttgtagttgtcttttgtcaacaaatgtcatcttcataaatgatttctttatccaaaaaatcacaaattcattgccataaataacatggtaagatcacatattaagttgaacaaaaaagggatcacattttcaaatatctacctcatatttttttttgttataatttctgacacgaggagattatggaactgtctttaacaaataaaaaaagggattacggaattgagatcttaaagtttgattatccaaaaaggattttataaacaaaaaaatcaaggtatatatctaaatgcaaaaacgtatgattaaatatcttcgaacctggtgcatgatcaaagcaacgtaacgtatcatgaagattccgtgacccacttaccttcaattttgttttataataatattgtgaaatatttattacatctcttccctctattgttctcttccagtactataaataaaatgtcaaaccactccaacaaaatcaaactagctacacagttataaaaaaaaagtataagcttcacaattttcaagcttcttctcctctgttctttaacaaatccaagaataagaaatataaaacaatgaggcaatttccaagcataagaggaaacataaatgagaagatgatgacaacaatggtggagtctcagacacggtctccgtggcgtacaccggttccttacctattcggtggtttagccgccatgcttggactcatagcctttgctctcttgttgctcgcctgctcctactggaggctctcgcggcagacagaagatgaagagaaacagacggagtccggtgagaaagtggtggctaaggcttttgaggagaagattcttgtgatcatggctggacaaaacaaccctaccttcttagccactccggtcgcggccaagatttgcctggattgtgttaatatggagaagaaagaaggacaaaatggggaatctaaagtaacagaagaaaaccactgactactgagctctgttctcaagagtgtacttttttggattctctgtttttgtcggtttgttttttgtttgttggggaagtagttttcctctgtttttgtcgaccttgagattgtaaattttcattagagtagtaaatgtgaacaaaaaagttgagaaatttcgggtttctatgtataaatgttggtatatgaatatattttgctaaattaaaggtatcaatgtgtcattgttttgatcattaatatttccgggatcctgtcgtgcaggcatg

SEQ ID NO: 4929 - DNA, 460 bp, Arabidopsis thaliana
atccaaggaaaacagagcatttagttgcattggaaggagcagaggaaaggcttaaattgttcaaagcaaacttgttagaagaaggctctttcgattcagcaatcgatggttgcgaacgagttttccacaccgcatcgccattctatcatgacgtcaaggaccctcaggtgtctctctctctccctcattttggcgcatactcttgttatggatctaccatttttgattgatttgtggtttggttttttcgcaggctgagttacttgatccggcagtgaaaggaacaatcaatgttctaagctcttgtttgaagacttcctcggttaagagagtcgtcttaacctcatcgatagcagctgttgctttcaatggaatgcctcgaacacccgagaccatagttgacgaaacttggttcgccgatcctgactattgcagacgttccaaggtaaatcaaaatgaa

SEQ ID NO: 4930 - DNA, 944 bp, Arabidopsis thaliana
cccaacagggaagctagagtcactataacctccacttcctctcttgtgaaataaccaggataatgacttaagcaaaactcgacctcacggatcaaatctaaaccttctttctcacccaaagtcttgagcttccactcgctaaatggatattctgtcttatgaatcacatgaatctctcctcccttgtcttcatctttcaccaacactcttgcactcttcataaaccctcgtacaagctcttgatgtctcctaaaatcacatagcgtacgtggatgaaacaagccgaaaaagtattgttttaaattatgtgcatagggggagacaagttgtgtatataatttaaaatcatacatgatggttttgatttcgtgctcacgaccatagtcgaaccatgcgtaggaaaattgaagatgactctgtcatatatcgcagaaccaccaacgctaggttttgtgatcatggagtgcacgttaactccatagaccacgctgcacccgagtctttccagctcttctacattcgccttcccattcttaaacttctgctctagctcccctacaacattcgttgttgtttgtttttttttcgatgcaaattttaaaatattgcaagaaaatgtactctattttatatagatatacaaatagatcaaacagtaatgatatatctctaagattttttattaccttgagtatcgagagaggttgcggtgaggttagatgcagaaccaaaggctctagctagagacagagaaaaggagaagtctccttctccgaccaaaagaattttttgtttgttagtgtaatgtcttaacgttttagtttcctgaacattcgtttgcatctcacaccatgtataccgtgcatataactggtatacatatgtatttatggatgcatgggtcaaagaggtattaaatgcttggttttgtttgtttacaagta

SEQ ID NO: 4931 - DNA, 740 bp, Arabidopsis thaliana
ctggatctaaatcttgttaatttgttgaacagatggctcgtactaagcaaacagctcgtaagtctactggaggaaaggctcctaggaagcagcttgctacaaaggtaagactcgggctctcacatgtgatctgagtagcttgataaacacatttctagatttgttctaattggtggatgttttaatttaaggctgcacgtaagtctgcaccaaccactggaggagtcaagaagccccatcgttaccgtccaggaactgttgcactacggtatgcaatctgtttcttccccaaattcaattgtgtttttactttattgatatcgtcattgattaaactctgtttctctgttttattgatcttgattgacagtgaaattcgtaagtaccagaagagtaccgagttgctgatcaggaagctccctttccagaggctagttcgtgagattgcccaggatttcaaggtaatgtgtctgttcgtctgattcagtctacaaatggatttaactttttacttgttttgtcataaccttgtgttcttatcttgtctctttgattgcagactgacttgcgtttccagagccatgctgtgcttgcactcaggaggctgctgaagcatactttgtgggtctctttgaggacactaacctctgcgccatccatgccaagcgtgtgaccataatgcccaaagacattcagctcgctcgcaggatcagaggagacgtgcttaattgtgattggga

SEQ ID NO: 4932 - DNA, 787 bp, Arabidopsis thaliana
taagtacaaaaatgatggagataatcaacaaaccgcatgctcaattttctagtaccttgttatccccagtaacaactataacacgtatcccagcagtcatacacgcaagcatagcatctctcacttcttctcttggtggatcaagcattcccaccttcaaaggaaacacaagatgagctagtcttcaacagtaaaagaaaaatggtgaatcttccagtaaacttaattaaatccatcatatttgaaagaaaggcgtaccaacccaataaacgtcaggtcgttctcattatcataggaaatagtttgttgaccgtggggcacggtcttaaatgctaatgctaagcatctcaatgtttcatcgccaaaactgttgcagaaagacatggttagaaaatggaaaacccacttcggtcaaacctttaacagcaaaattactataagaagtgaaaatacaagcatcgaaagataaccatcacgaagtaatatgaaaatgtaatcatattcattaaacaagttgatgtcgaacctgtaaaacctcgactcaagctctgcacggccagcagcagttagaggatcaacagaaccatcaccgttgcagagaattttattacacctagctattatactctctggagcaccgtttgagaacataacatccatttgcttatggctacataggacgctcatcatttttcggtcacgagtagactccaaaacataaaccttgatgaagatagcaatcagttactcatactaaattactatgatattcgttgaaatatgatgt

SEQ ID NO: 4933 - DNA, 1781 bp, Arabidopsis thaliana
tttcgtggtatggatcttttatcctcaaacagtaaagggataaagacaagaggggacatgggagagattctgtctattaggctcggggagggacacaaggcaagaagaagacacagagcagatccggtaaatcctgattttacaaaaccatgtggtttcactttcagacaagaaatgaagagttgtcagatgtgaactcgagagagaatccgatggagacaagaccccacccacttggaattgaagatcatatcaaagcttttagtaaatcatcactacagagattctagtttattgcttacagttaactatgctttcttccgagttttcttcatattctcgccaaacccaatacataaatcacaaactctataaaacaactaaaaggaatgcctacaccatcgccgagataagaacatgttagaggttatatcacgtttaaccgtaagatcttagcgactccctcagtttcaaaactttgtttatatacattctccttgtaataaatagaaatgtatccaacactttcttggtaaaaaaggaacattacaataactgacctcacaattgttactgtaaactctgtaagcatatcaatatgtatatatatataaaatcacattgttctatttgatagagtatgagcgagtgcataccgtttgacgacgctccacgagcacagcagagaaacttgttaaagattggacacaccaggcaaccctgtctgcagattattcaaagtcatggctcttgtcacttctattgcctttgagtatttcaccatctcttcctcaactctcctttggcaaaccgcaagctctgactttttatcgcttaacgggtctcgagcgtctaacatgtgttggttatcgggtcctgactctggtaaaccgacaccaaccattgagtatgactggtagtattttctctctaggtttctaaccgacgaagccttcttctcaagctcttttgatgctgattctgttcttttctttatcttgtgttcatcggcttgttttgcggatatcacgtgtacaacgttgatgaagctcttgattgcctcagatgcaactgtatcgggaatacgatctagagcgagtttccactcatcgcagaaggcgtaagcatcgagcggctctttgtgatgattggcggcgtcttcttggcaaaccggaagaagggtcagcttgaaccaggcgtgaactgagtgtatgaagtcacgttggaatttaatcaaactactgaaactggagtgccaagaagagacagctgattccaagtcacgtgtagcttgtcggtgtagctcagatgttgattcgcctttgcccgatctgttaatgagcccccggacttgctccacgatgctgttctgagtctcatggtattgatgcatagatttccacatgtacataaagctgcatccggtggaaacaaacccaaagattaatgtctccaaaggtcaaaattaatgtcttgttttgattttgtttaacaaaatgtccagagactcgaattgattacagaattcacatgatgaataccagaaaccagaagacattcatttctggcaaaactagaaattagtcagtacgcctaaccaacaatgttattgcctctcaactaattaccaatttcagcaacttactataaaactttcacaggataagctataaaacttaaaaagctaagaaataaattgtaacaattgacaagagaggtaagagacctttttgtctcactctaagcatatcaaggaccacagaattctaaaacgcatggct

SEQ ID NO: 4934 - DNA, 1036 bp, Arabidopsis thaliana
actctctttcgtcacacacaaaataaaattggatcacgtcaaacttttgtgaagtaccatgtatgaatcttaccacccaaataaatccatcacttatcatgcatatctctgaataaaatgtaacatgacatcaaatctgctttgttttctcctgaactaaattcttgaaaaaagtaatatatgaaaatcacagagattttccaaatgttttggggaaaccaatctcatttgctacactcttgaaccaacctccttttaataccacatatatagcttctcttaaaatgatagggtcagccatggttgtattcatcttatcgttctttgcgccttgttccaccgacacaaagccttcgatgaaactctcaagataaatctaatgaactttataaacttcgaagatgttgtaagtatgaatctagtaaatgagaaaccttatgttggacacttatttaacaatgctgtaacaagctcaagggaatgtacataatcacttttttcacaaagataatcatatcattttttcatatatatattacccaatacaatcaaagtatgagacatttctcataagacgagagcatactcttaaaattccccaatacaaacacctatacccaaaaaatttaattccctgcataatcttattaaggaagactgataatctcagaaacgcacaaaaccggagacttttcatgtattaggatagtatccatatgggtaactaacagaatgagatctgtagtgaagattctgttgagtattattattcatttgatctccagactctataggcttcggcttaggcttagccacacgcttgctgctctgttcttggaccgctccaaagactatctcattagacttttcactgtcctgctcataataagtatgcgggatcgatgagtaatgccttagatgctgctgctgctgttgttgctgatgctgatgcttctggtgctgcttttgctgctgttgctgctggttggggaactcagcgtccagctactgtagaatgcgcggtctgacgtagctg

SEQ ID NO: 4935 - DNA, 967 bp, Arabidopsis thaliana
tccctactatcacacagtactactatacagtaaccggccactagtgctaaaaggaaaaaaaaaatatccaagtaaaatggaaatagtcacgtaatttctctcctacacatttacatcttttataaattctctgactcacacagtagctttccaacacaccacagtctttttctttttatcttctctacaaaacaacatcctaccatggaagatgcagcggacgaagaacgtggtttccacgtgatcaccataaggaagcagatagtcacggctgctcttcccctccaagaccattggcttcctctttcaaacctcgacctcctcctccctcctgtccaaatcagcgtttgcttctgctacaagaaaccacgtcatttcttatccgtggctgaaaccctaaaagcgtctttggctgaggctctcgtctcctactatgcctttgccggtgaactcgtgaaaaactcctctggagaacccgagattctctgcaacaaccgcggcgtagacttccttgaggcggttgctgacgtggagctccgggagcttaacttgcatgatcctgatgaaagtatcgccaagcttgttccgaagaagaagcatggagttatagctattcaggtaatataacaccgaaatcatactttcatcgattcagtttcagaaacatattcttataacgacttaactaacttgtatgtgtaattaggtaactcaacttaaatgtgggagcatagtggtaggatgcacatttgatcatcgaattgcagatgctttctccatgaacatgttccttgtttcttgggctgagatctctagattcaatgcaccaatctcttctgtcccatcgttccggagatctatactaaacccgcgacgaccactgattatcgactcatctatagacaagatgtatatgcctgtcacgtctttgccgcttcacaagaaacaacaaatgacctagataata

SEQ ID NO: 4936 - DNA, 1679 bp, Arabidopsis thaliana
tgtaacagaaggaaaacattcacaagattcctaccaaatgcagcatcgatcccatcatcatcaccaccctcgtctgaatctgaaccgttggcattgttcctttcaattacgtaatcaccatacaccactgtaccaggcattgtcgacctaatcgtgctcataacatcgtcccggtcatgctcgatctcaagccttctccaattctgctccacatcaggatccacttcacgcggcttcgcactagggtggtccactttcatgtgtttcctcagctctttgaaggttccagcataaacacagttctcctgcatacagatcctcttcttaagattcaaaaagtcacgagcaggctgtacgattgtccaacctttcacctgtcctctacaaagtgggcatgtgagatttccaagctcagacttattgatctgttgatggcccgatgtcttcagcttagctgacgctttcttgtactgatctaagcaattagaataccggaaactggttccacacatgtaaggacgacatcccttgtcatgagatgagcagagaagaaggacagcgttgtgtggacactccatgcaaaccgaacatataacattctcccaatccctcttctctagacactttgaacaatcttccgcaaacatgtttctcgccacaagtcttttagaagatggaaatttgtatggttttgctcttgccctgaagcgtcgtgaaggaaccctacgtcctgccttcctagctttggccataatctcaaaatcacacctgtacaaatcctcatcaaattagcaaaagaactccacataaaagtttgtaacaatacaagtagatatctcttcatggaaactacatatatttttccagttcaccattcagcatacaacatgattagtagtagcatcccacactctgatttgggaactatttcatgataatgctttacatatgcatctataaaagatatttcacaacctcatagcaaacaaagagggaggttcgaataaacatgttgaattcatacatccctggaattgcatgatcaacaaacaatgctaatctatgaaacttaaatcaaatcaaggaactcataccgaaacgaaaagagatcaaacaaacgaagtaatgtacctcactagcttggaagcctagaaaagtgattcaaactcacaagataactaacacaatgacaaaaccaaatcgacaagttatggaaagcaaacagatggagaatcaatgtatagagataccaagaataaaaactggtgagacaaagtctcgcatcaaatcaaatacagttaataagattacataaaagaaaataaaaaaataacaaaagatgtgcagacatgttacaagacaaccaaaaggaacatgcttcacagaacaactcacgcgacatgacagtgaatcaattattaaacaaacaaaggagaaaccttagaatctaatctaatccacatggaacaaagacctttgacacatctcagatccatagaaatttatataaaaatgttagcataaatgtataagaaagaacgaaatgctctcgataaccctagaattcaaaaacataagaatacacagatggattctgacaagttcaattatacaattcaacaaattttcaatgactcatgaacctaaccagaaatcggaaaagtcatagctacacaaaa

SEQ ID NO: 4937 - DNA, 774 bp, Arabidopsis thaliana
cctgtcacgtctttgccccttccacaagaaacaacaaatgacctagataatatcctcacaagccgtatctattacatcaaagaaaatgcgttggaagatctccaaactctagcaagcggtactcccccaagactggttatggtcagaggacgaaactagagtcgttcagcgcgtttctatggaaacttgtggcgaaacacacaggaagagatctagtttcgaacaagaactcgaaaatgggtattgttgtcgacggaaggagaagacttatggagaaagaagacaacacttactttggaaacgttctttccatcccatttggtggacagagtatcgatgacttgattgacaagccattgtcttgggtgaccaacgaagttcacagattcttggaagaagcagtgaccaaagaacatttcttaaacttgattgattgggttgagattcaccgcccgataccggcagtgtcgaggatctatagtacgggaaccgacgatggaccagcttttgtggtctcctccgggaggagttttccggtgaacaaggttgatttcggttggggcttaccggtttttgggtcataccatttcccatgggagggaagctccggatatgtgatgccgatgccgagtccggtggacgacgggaacggagattgggtggtttacttgcatcttacgaaaggacagttaaagttcattgaggaggaggcttcccagtgtgcttaaacccatagacaattattatctcaagattaacaccatcaattaattt

SEQ ID NO: 4938 - DNA, 1947 bp, Arabidopsis thaliana
gctcgtaccccctttcgctctatacccaactttccaaacttcctccacaaacttagcatcattcatctgtcactccactgggcacaccaaccatcggactcccaaactcaacccttccaacgtagagttccaaccacaatgagtcaaaaagcaacctatcgattcatgagctaaaacctcaagctggttacaccaagaaaccaacaaggctctatctttagtcgattccacaaacccttcaggcaatttcgctatatgagcttctttaatcacccacaagaagttcaaatccgattcttgtagcgcaatagctacctctgcaagttgcttctcaaagagaatcccaaacgaaccaaacgaaacaaatgctactgactgagcctgcttagtctcaagccactccatacactccttcgatatcggtttcaacagactcgcaccatagtctttatcatcttccatccgatcatcaagataagccgatggaatcatcggtccgatcaacgtcgccttcattgcatcagactcaccattttcacaatcctaatcaaaacaacagttctaatttcaattcaacaatgtaacataaagtttcaaactttatagtagaatcaaaactcttacttgtgtttcttctaacccttcaaagccattaacgaataaccaatcagcattttcatggttaggaaactgattcagaagaactctgccatgctcaggatgagtcaaccaatgacgtcccacaaacgaaggtaactcatcgtagctcaaagacggtaagccacggatacgaaacggcgccgaattaggatcagcgggaagaggaaagtcaccgttagagaatttacgcaacacagaacaaacagtgagattattagtgaagaaagaagcagctgaaagttccatagatctagcaacttcaagtccccaaggaagaaacgaatcgtagattaagcaatcgattggtgaatctgtggatttgaatttctcgattaggagagttagggtttcggatccgttgagcttgaaggattctgagtaagtatcgacgctgaaaccggggatacctatggggatgaaatcgaatccatcggagattggttcgacggagagtgatggtgttgtgattgaggaggcggtgtaggtagtggtggcgattgtgactttgacgtttttggagactagacgtttagcgaattgaaccattgggtttaggtggccttgaactgggtatggtaagattacgacgtggcctttcactttgggagttgtttccgccattgttttagctcaacgaagcagagctttgggttgaatttttttttttttttcaattgaagatgataaagtgttgaagacatttgttatttgattttggtttattatatagtcagatctattatgtcgcgttgttcacgttttgcgttggtggcaccaacctcaatgttgttggatagtattattctctttttagaagttttctcaattgaaaaaagtgtaactaaaatactaaaaagacaatgaaataacagaacataataatgatataaaaattagtaaagaacaatggaatgtagtatatcagcacgaaattatgaaaattttgaattattgtgaaataactataaccaatttataggaaagtgatgtaaaaataaataactagtttttaggtttttgtttagagattatgtcgaaataattgtgatttgtagtatatgaaagattggaaagtcacacctctttgacgttagtaaatacagtgagtgtgtgtggcaaatcgattaaacaaaatttatacatatgacatttttgttaggagcaacattttgattatttttatctcctagtgtttctaataattgtggagaccagaaaaagggttttacaatttggtaaaatatcgttttctgtttctcctaaaaactctcaatttagatttttcta

SEQ ID NO: 4939 - DNA, 1156 bp, Arabidopsis thaliana
aaactttcattgcttctcttcttccagagcataaccccttgctcggagtcgttctctcattcttcgatttcgctttcatatagaaggtcatgactccattttatgattttattggttctgtttttttcttcataatgcgataactcataactccgttcaatcgctttgttcaaataagaacactatagcactactatatgttcttcatattcgtgttctttagcaacatgtgaatcaaaaacttcatatttctcgtatagtaatgatcgcaaaacatgttcttgaattagttataaaattctcataatttccttcagaacattaataaactactagatatatgagaaatgagaagggatgaggaacaaatttctatagattattatagatcttgcacaacaatgggacacaaagagtaaaaacttggaataaaaaggaaactaatcataattatcaagagatataatcaacttaatgcgaatgattcttttgatcctttcctccacacgcctgagtcacgaggcagcctcacaatgtaacgctaggaaacttgcaacgctcatttcctgtaacaagatagtaaccattacaaattacaatcataagaatattccagaatttcaccaaaaagttgaaattaaagagtatttacacgtctgtgtagagttttcttgtgagacaagttaagagaaacttaccagggttggtcgtggtctcacgagccaaaccattgaagtagcattgagagctttggttccggaactgagcccagtacgagctaaacgcatagcttgcatgccaagtaaccgtcaccggtgcatagcattctcctcctggagccaacgctgcacatgttgcattgcttcttccgcaagcaaagttaagcgcctgccctagctctgcctcatcggccccatcaaccgccacacaccatacattacctttaaacggaacattgttactcggtttaggcaacgaatcaaaaccagaaaacgatcttctaccgctgaaatctgatgtcgtagatcggtgtaccgtcagggttcaaaattcccaatgtctctctgttccgaaccgggtttctggttttcattggacaaagagaacaaaaacgtcggtataggtgcactggcctaggtggtgtacgagtggcggg

SEQ ID NO: 4940 - DNA, 991 bp, Arabidopsis thaliana
ccctaattataagcgcaagtttgctacttctatgttgaaacacatagatatcttcttttgcaggttctttaaggacgtgatgatgaacgtggggaaaatcacccagaaaacggatgggtttaaggtgtttagagtggatacaatttgcggtcacttgactaacacgcaagacattggagatctttgtatctttcttggacatggtgaagcatactgtgtcccggcaagctcgtctcctggactcagacctaactccatctattatgtgggctgtaactttggtgttcacgatattgcaaccgacactaccactaacttctacacacacagtaatgttcctttaaggtccactgagttcccttactggcctcttcctctctcttaggagtgacttttgatatcgtcggatgtctctaatattgggtggctcttgtggtctccaatattatgttattcttttgggtttggttcatgtactagttaatgtttttggttcgtagatctccgactatttgaaaataaaacatgagagaaacccgttttatctttcttaatcacaactcagactacttattttgaaaacctaaattaactcatttgcagggtaaaaagtaaaggcaatcaaaagtgctgaaagataaaaatggctaagaaatcatcagtgagtagagttgtctagtagaaagaatgaaagaataacactctgaatatatataatcaaactaaaccaaaaaaaaaaggtaaccaagagaaagagagattattatctgagatgttgtaactctagaggagcatatgatgatggttgttttgttgcggaccagctgatcctggcggaggtgggagggcaaggaaagcgtctccaaaaggattagaaggagaaggaccggctgagaactgatgatgatgatgattttgatgataatcatgaggatgagtgtaattgtagggactctgatgcatcatcgtcatctgttgttggtgttgttgt

SEQ ID NO: 4941 - DNA, 923 bp, Arabidopsis thaliana
  unsure (1)..(923): unsure at all n locations
atacacaaaaataaatgatttattaacacaacattaataaattaatttttgtttactatttgattaattcatcagctcagatccttaaaaaatatagttttccaaaaaaaataaaagttaatataagaccaataaaataaagatcacacaaagctcagatcgtcagcggaatatgtgcgttgcacacgtccggctccacctttcttagtagatccttctgagaccatcggcccaccaccaccaccgcatacgaaactgcattccacaccacaaatcttactaaaacacgagaaaagtccattacctccatctgtgtgacggcggttatgctttttcgtcgtcggagttttccgtcttgaactcattcctcccccggcagttgcagctggaacgctcgcgccatcgtaatcagtgctacttatatggcttgatcctatgtcgtacaacggtggaagctctgttcgccatctctcgagttttgatcgcaatccttcgatgctagattcatcgatgctccattcgctgagtattgaactttccgtttcgtgcgatctatctttcgccaatttgtcagccacttcagatggcgatggtcctaactccgattcagttaagattcgtcttccagctaaattcctcactggtgtaccaaaatcgtgatgagttctcatcggtgtagccatgtagtttgatcggatcggggttgatccgacgatgtttgatctcattggagtcgaaccaaccatgttagaccgcataggagttcgcattggagtcgatccaaccatgttgggatgcatcggtgacattgcgatgatgttggatctcataggagttgatccaactccgttagatctcatcggagtagatgcgataatgtttgatctcaatgngtgttccgtgcttcgataagtacggggaag

SEQ ID NO: 4942 - DNA, 543 bp, Arabidopsis thaliana
acgacgtcgttaagaaaccgtatttgaaatactttaaattctcgccggaaggtgagaaatcaccggacgttgagattcctctcgccagtccgacgatgatgcacgatttcgcgatcactgagaatttcgttgtgattccggatcaacaagttgtgtttaagctctccgatatgtttcttgggaaatctccggttaaatacgacggagagaaaatttcccggtttggaattttgcctagaaacgctaaagatgcgtcggagatggtttgggttgagtcaccggagactttttgtttccatctttggaacgcttgggagtcaccggagacagacgaggttgtagtgatcggatcttgcatgactccggcggattcgatcttcaacgagtgcgatgagcagctcaacagtgttttatcagagatccggttaaatctcaaaaccgggaaatccacacgcagaactataattcccggttcggttcagatgaatcttgaagctggtatggtaaccgaaatcttctcgggaggaaacccggtacgcatac

SEQ ID NO: 4943 - DNA, 1998 bp, Arabidopsis thaliana
cagtggtttggatagtggaatatcttcctgttttggtagagatgagaccctttcgttgtttcacgctctgggcaagtttctccacaacaaaagagagacggataatgtcattatatcaggtaattcgttattaagaaatttaaagaatgcaatttagagctcaggatcactatcttctaagctaaagtttgtgtagagtgcagcagctctcttgttcatgacgagtttgcaaggttgccactgaaaatggatgcgccggagaaggttctcagccaagctcatggacaggcggggcgggttgtggattttctacatgaaaatggtatcaactactacctcgtcttgactatccagtattgagttagcatatgcactatttcctccttgatagagtgacacatgagagcatacctaaacttacatttgtttgtgcttttcgtactgaaagattttctaaaatggactctttatgttaatgaagtgttagattttgtgagtgacggagccatagaagatgcctggtgtgtttcttcgtatttggcggatctgatctccttctcgctgatataagaggaaagatgagtggacataacaacacagaggatgttccacagtcagccggtgcctcggttgctgttcgtggtgtgttgtatggaaacaagcagccatgttcatccaggtttcttttacatacggataccagctgactgtattatagtatacttgtttgaaaataatattatcgattgatctgtattgtgattatgcagatggcacgtgattcggaagccaaaactctggcaagtggagcaatcctcaatacaaacaaaggtcagggtctttccctttttttttcaggaatagaaactaattatacatgtccaatacatatcaaacctgtatatgcttacaaatttgatgtgtgaatgcagaagaatctgagagagcagaggaacataagctatgaggggtcaagagtggcagatatatcagtgatggccacagagtatagccccgtgctgaaatggcttagctacagggcatctccagatgcgtttccgggaatgggcgaagagacagatgaggaggacagtgatatttctgaagatgatgaaatacaagactggtgacattcaccatcttaagtgtcttatatgttaggtcagatagaactggtatgatagttaacaacttaacatcaagggaaggaacactaattgttctgcttacttataaatagaaaatggagagtcacttctctatctaacaatgagcaacagcaaatttatccttggtttgatcaagatcaagcgaattttaaaccctttcttcagtttttttttggagcattttcaagttaacaaaacgatggggtcaggttcttcttttgccaaagagttggctcgagtcaaaacaagattgagaaacagaagcagcgaagaaggtaagttcagattgagaaacagaaacagttattgttttatcaagtttcctttggagggcctttcttggctgcttctgcggccgccttttcagcttcgatcttggccacgattgcatcaatttcagcttcttctagctggcgcagcccagtttcctcccgtgtcattacggcaacctcaatgttctttccgccactctcaactacctgcaatgcaaagccgatatcaaaacagctatgatctcaaaggacaaaaaatcctgaaataacaaaatatcagctaggacggagagggcaccaacctcaagcagagcacggatagcgagtttaatagtttcttggccagaggattctttgtagttcttctcgaggaattccctaatagagttggagtttctgccggtagcattagctttccaagcagagaaagtcccagaaggatcagtctgatatagggaagggaggcgagagtaagggtcaaagccaacgataagagtagaaagaccgaagggtctgacaccaccactttgggtatacttctgttgaaggccagcaat

SEQ ID NO: 4944 - DNA, 1065 bp, Arabidopsis thaliana
ctattcattattttaaatcaaacactaataagatgttcttaaacatttcaactagttaaccccattgttttccctctatatatatacccaccaaggcacaaaccaacccactcactcacattatttaaaacacatgttttactacttgtctacatatatctatataatcatcgtagaaatcgatacttgaggccagcccaaaatcacactcgagtcgaatatatatatatatatatatatcttaatccggctcgttatataaaagctccagacttgtcactagggttgccgtcagattttgtgatcatggagtttcgtcaaccaaacgcaacagcattgagcgacccacttaactggaatgtagcggcggaggctttaaaagggagccacctggaggaggtgaagaagatggtgaaggattataggaaaggaacggtgcagctaggcggagagacgctgaccatcggtcaggttgcggcagtagcgagtggaggaccgacagtggagctttctgaggaggctcggggcggtgtgaaggcgagtagtgactgggtgatggagagcatgaaccgtgatacggacacatatgggatcaccactggatttggttcatcttctcgtaggaggactgaccaaggtgctgctcttcaaaaagagcttattaggtaattcatattcatagttgaatcagacgaaaaataaatagaatcatagaaaactaggtttagaaacccgtacataaactagtttttttaaaaaggaatgcatatttatatccagcgcctatagataaagaacaagacattttataatctgtctcgacgtttttacaccaacaaatgagaataattagtcgtactataaaagttcaaatttctttaaatatgattaaacgaagactaaaacgctctaagttttactacatttttaaataaatacgactttttgccgaaagaaaacatagtacttaagataagagcattttgtgttctaatgaaaattaaacgtttctgcattctctattcttttgactgtcttatacttttattgagggatcgactcgac

SEQ ID NO: 4945 - DNA, 1004 bp, Arabidopsis thaliana
gcattatagatgcataatttaggatttctgagatgaaaatcgcgtgatatagaatgtgtatgaggtttttgatattagactttgttgtgtttgtttgcagtgaagcaaaatggggttgagtttcgccaagctgtttagcaggctttttgccaagaaggagatgcgaattctgatggttggtcttgatgctgctggtaagaccacaatcttgtacaagctcaagctcggagagattgtcaccaccatccctactattggtaaagaagcttcacaccttagtactggtttttaaattgtgatgatggtataaaatctaggatcgattagtgatatgctaaattctatcaacaggtttcaatgtggaaactgtggaatacaagaacattagtttcaccgtgtgggatgtcgggggtcaggacaaggtatggagtctctgtactgcttattgtttgatgaaggaacttttcacccaaataaactgactttttggcttctttttcagatccgtcccttgtggagacactacttccagaacactcaaggtctaatctttgttgttgatagcaatgacagagacagagttgttgaggctcgagatgaactccacaggatgctgaatgaggtaaatatccagtgctatagagaaagagttcttcttcatagttttgttagtttgaaaatcctttacttaccaactcttttattgcaggacgagctgcgtgatgctgtgttgcttgtgtttgccaacaagcaagatcttccaaatgctatgaacgctgctgaaatcacagataagcttggccttcactccctccgtcagcgtcattggtaaataaacatccttataagtttcaaaagtcaaacaatttctgttcgatactgatgtgtgtttttgctcgctacaggtatatccagagcacatgtgcacttcaggtgaagggctttatgaaggtctggactggctctccaacaacatcgctggcaaggtaacataactacataag

SEQ ID NO: 4946 - DNA, 516 bp, Arabidopsis thaliana
gaatatgttgctcgaaatccatgtcatgaacatgtatgttccagttccatggatagcatatagattgacacggattgcattaggtctctttgtaataaaacataaaactatttgcataccaggtatgataaatggtggacaattaaattaattggtaatcgggattttcattccttggacctcgggtttggagttcacactttttaagaccaatattttgggctacgcgaaaagatcagaaagagccgaggcagaaaacgcttgaggcgaaaaccccgggcacacaagccctatcccgcctcctcagggccgtgaatctcctccgtcttgcgttggcttagaatgaccacaatttctgatctcctgaggatgtggtagaggagatctcccgagggctccaatgacatctctgagcgcagtgcgatccatttgcaagacgtggcatactttgtccaagaatcgtgttctttgtacagcggcagtaaagacacagttcttgggactcactatgatgga

SEQ ID NO: 4947 - DNA, 662 bp, Arabidopsis thaliana
caggattgtactttggcttaacccactcacgaagcaaagggtcagaaacgtcctttggttcggcaacaactgtgacttgctgtttgttgttgacgtcgagtccagtgtacaaaattacaggtctgccatcagggaggatcgtggcggatcctgaccagcagctgttgatgtcaaaggactcagaagggacaagggctggttcgagctggatccaattgaccatgtcttgtgaaacagagtgtcccatatgattcttgtcctactgaattcgggagccaaagggttattctggtagaacaaatggtagaatcctttgtaatacattggcgctgaaacaacattataaatatacgtatttcattatataaaacaactttggagttccttgtgtcacaagttagcaatttgtagagtatttaattaccgtttggatcttgagatttccaaaatgcatcagaggaccagaagtgacataaaattaagacaatcgttagttttcagtatcatatagtagaaattaataacctgattcaatagataaattgcaataaacagaaattaaccatttttttgttttggttttatgaactaataatataagagatctttgccaacatgatcttttcttttttgttcacaccaacatgatatatatatatata

SEQ ID NO: 4948 - DNA, 570 bp, Arabidopsis thaliana
tctaatgatttatagtcacatttggagttctcgctgagtgatctctctttatgtgatattgatactctgtttctgtgtgttagttaagtgaagcaggatgggattgtcattcgccaagctttttagcaggctttttgccaagaaggagatgagaattctgatggttggtcttgatgctgctggtaagaccaccattttgtacaagctcaagctcggagagattgtaaccaccattcccactattggtaagcttaaacatcatttcataattcagtgtttcaaaagcttagttccatcaactttgttcataccattcatacaaaattttgtcttccacctgccgtgatgattaaactactacaaactgtggacagggttcaatgtggagactgtggagtacaagaacatcagtttcacagtgtgggatgtcggcggtcaggataaggtataagattatccaactctaaagcattaagaattcttttttttttgcatcactacatggggatctttttcctactgtgtcttggtattattgttgatgaacatagaattacacaaactcacatg

SEQ ID NO: 4949 - DNA, 635 bp, Arabidopsis thaliana
tttactcctcgcgcaaagcggtgctggagttgtcactagaggaagctcgacaacttggtatgggtctatttctattatgaatatttagccttggagcttgttatgtgttgtgcaatacataagctttcttgactgatgaagctaactaattcttctccatttgggaaatgttttgctatttcgaaatctagggcataactacattggttcagagcaccttttgcttggtctacttcgtgaaggggagggtgtggcagctcgtgtcttggagaatttgggtgcagatcctagtaatatacggacacaggtaaatgcaccaactctggattctaaggttaatgttatgtcttagtaaaccatttcgttataacattttgagatacatatatcatttttaggttatacgtatggtcggggaaaacaatgaagtcacagcaagcgttggtgggggaagcagcggaaacagcaaaatgccaacacttgaagagtatgggactaacttaactaaactagcagaggaggtactaaaaatgtgtactcattttgaagagagtgtcatgttaatgcttgaaggtttctactaaaatttggtttttctcttctatggcagggtaactggatctggttgttggaag

SEQ ID NO: 4950 - DNA, 765 bp, Arabidopsis thaliana
ttcttttacttgaaatatgtttctcatgatggtgttttcaagccttgggagaagactcaaagttggcaaccttagaaatggtaaagcttttggcttcatgtagattaagtttttggatttctgtctgtgtttttttttttctttgttgttggatggcaatctgatccagtgtagtttcttgtaaccaaagaatctggttttatttaggtttttcctgaaaactgatgcaatgtctcaagactttctgatctcatataacaaaaattgaaggaatcagatgagtgaaggcattacaatattcagtttaaacgttgtatcaaaaaatctgaaacagcctttgaaggtcataacaatcagacattgtcaagttgtcgaaactaacagagaacaagatgtgtaaccaaaatcagcatcaccttcctttatatttacatggctaatatatgttcgagaagtacatgttaggaccatgaagctatgagtcatgttgagtcacctattcccttatgaaccagcatatcatatactctgtctactttactcggctctactttgaagaagctataagcatcagactttttctttatctgccccttctttatttctcttgttaagatatccacatcttcaaatagtgtacaggcagtattctggtctcattgcacatcttcttttcctgcacaaaaaacagcttcaatctctcaaaccataggaataatgtcacaaatcacaaaacacaaataagatgcaaacatcaagtttgaa

SEQ ID NO: 4951 - DNA, 584 bp, Arabidopsis thaliana
cagctgacctgacaaacatcaactattattgagtcattacgagcaatatgatttttccagaactcatcagcaacttcttcatcagggcgcccatctgcgtctcgagaatttatatatggtttgtgtttaacacgatttaggtcctcgtgaagaccatccagcagaaacgctaaaagctcctgcaaaatgaaaaactcgaattccttgagctacaatgtaaattcaggttaaagaaaatatctggctagtctcacaaacctgcgaatcatgttgattgtacccactaaattgaggagcaaagcgagcaagtttagctttgaatggacgaggtgcaattggtgtccgcccaggagcccataacttcctgagcaagtcaccaaatgcgagagctaattccccctgtgcaaaatgatttcaatacagtcaagaaatgatctgaaatcaactactcaatatctcagaaagaaacaatgcttgtgatctacgcgagaaaataacactgattacctgccaaggaacactaccctaatcaacttctaatgtaacttctgatgatataagatgtcttatatattccaacgtta

SEQ ID NO: 4952 - DNA, 1395 bp, Arabidopsis thaliana
aatttggtttttctctttctatggcagggtaaactggatccggttgttggaaggcagccacagatcgaacgagtggtccagatcttggctcgaagaaccaagaacaacccatgtcttattggagaacctggagttggtaagacggcaatagcagaaggacttgcacagcgaatagctagtggtgatgttcctgaaacaatcgaggggaagacggtaaatattctcccgttggatcatttttaatgaacttaataggcttagttagagtgcataaatatgtataaatatttacttttactttttttgtcaggttataacccttgatatgggtcttctagtggctggaacgaaataccgtggagagttcgaggaaagattgaagaagcttatggaggaaatcaggcaaagtgatgagataattctgtttattgatgaagtgcacacgctcatcggtgcaggagccgctgaaggtgcgatcgatgctgctaacatcttaaagccagctctagcaagaggtgaattgcaggtaaattttctcaattctttttatcagtctaatgctgtcgaaatgtcaattagaaccgtaaactcaagatttacgaaatgttttttttttctttttttacggttgtagtgtattggtgcaacaacaattgatgagtacaggaaacacattgagaaagatcctgcattggagagacggttccagcctgtgaaagtacctgaaccaactgtagaagaagctatacagattttgcaaggtctgcgtgagcgctatgagatccaccacaaacttcgatacactgatgaagccttggttgctgctgcacaattgtcacatcagtacatcaggtttttattttattcaatttcagtctttcaccaacacagaacattgtctttacacaaattgcagcattatctcaacccagcttcttctcttgaatgagcagtgatcggtttcttcccgacaaagcgattgacttgattgatgaagctgggtctcgggttcgactacgccatgctcaggtttaatatttgcatgtatctcaactaccaaagaactatgtgtgtttatatctacttgagctgattcagagaaagtttcgtttgcttagcttcctgaggaagctagagagcttgaaaagcaactcaggcaaatcaccaaagagaagaatgaagctgtgcgaagccaagacttcgagatggtatcgatttcaagtatttcttactctctatacatccaagactaatatttacatttcctgagttcttctttcgacaggctggttctcatcgtgaccgtgaaatagagctcaaggctgagatagctaatgttttatctcgaggcaaagaagtggccaaagccgagaatgaagctgaggaaggaggacc

SEQ ID NO: 4953 - DNA, 825 bp, Arabidopsis thaliana
acctacgctcagattgtgtttcagcatcatgctcaagtctatcaaaagttgcaagatcttcagaaaaaagaaggagaagctggtagaaaaaagattcttcagtatactagatatgcttcagttggttttgcgatagtacaagcaatcggacaagtgtttcacctacgtcattacgttaatgacttcagcacggaatgggatgtatcttctgttacgttgttaacgcttggtgctggtcgcactacatatattggagagagaatctctgatccgaaacttggaaatggcacttccctattgattttcacaagtatcatctcttacttgcctgcatcattcggtagaacaacagcagaggccttacaggaaggaaactatactggtcttggaaccatcgttgtttcatttctcctcttggtactcgggatagtatatgttcaggtactataccaaattttgttccttttaatgaatctaagaagtttggtatgcttatatagtctaacaagcaaagtttttcaggaagcagagaggaaaattccgctcaattatgcctcgcgatacaccagcaaagctggtgggtcttcagaaatctgcttatcttccattcaaggtcaatagtgcgggagtaatgcctatcatattctccacatcatctcttgctcttcctgctactttagcacgatttaccggcatatctgctttgaagaatgttgcttttgctttaacccctggaggtaagttctcctaatacacagcaagtaagaagattgggtcctttgaaactgttttttgttgatgacttcacaaacaaactattgcagg

SEQ ID NO: 4954 - DNA, 518 bp, Arabidopsis thaliana columbia
ccccatcgtcgcgatttgcatgaattaccagttgaagatatttctagcagcattttacagtccttagcaataaaatgcttgatctgcttgtaatcgttttcaagttcatcttccgatgttccagcagcattcgttgttgtttcatgtgtaataattttctgaataaatggagctacaatcgttgtacggaaaatttcttctgcagcgttggtgttatcaatggcagcatatgcacgtaagcagttgtaaaggacacttgtatcgctgttgtttagcccatcaatgaagcaatgacctaggctagcatccaataacacactagcgctctgaatcctcttctccatgttctcaatgaaaggcaggttctgtactggcaatggcataacataaaaagtagtgagcatcagtcataagaccttctattgtcttctgaggctaacaagtatactgtagtttttggaaaacaccagagatttcacaagatttaactatgtagcatctgatgtacctattttttt

SEQ ID NO: 4955 - DNA, 547 bp, Arabidopsis thaliana columbia
gacgcctgtaacagcgggactgtccttgatttacccttcatttgcaggatggagaggtaaacttataaatcattctgctcacttctacttagactgaatctgaaaaagaaacttgtggtgcgtttgtgaaaaatcaggaatggttcttatgaatgggaagaccatagatcagtcagagcttacaaaggaacagatggtggagcagctttctgtttcagtgcttgtgacgatgatgaatccagtggttacactcctgtatgcttccattatatcattcatcatcatgcaactaagcacacatacctctccgtatgttaactggatcatttcgtgctgtttcaggtgttcatggggaagaacacaggagccatgacttatagcttcataaaggcggtgaagacagctggaccagcacccacgtatggccacctgcttaaccttatgtgttctgcaatacgagaggcccagtctcgcctcgcctttaacggggactacacaagctctgatgcatccgcggtaagttaataacgacttgtattatctgaac

SEQ ID NO: 4956 - DNA, 493 bp, Arabidopsis thaliana columbia
tctccaactaagcggcatatcagcctgttatgagaaagaaggaatcatcaacattcaggagaaacctaaatctaacggctcagatcagtttccaacactttcttgtagaactcatcttaaagttttcaacaatcctgtaccttcttctcttaatcgatctgtgagttcaccatcttcaagctgtaacgttcgtgagagcagttcgttttcacgtttaggcttgccattgcctccaatggcacccaaggttccagcggatactaaaaaacagaggaaggttacagagcaattggaagatgtgcattctctgaaactgctccacaatcgttacctccaatggagatttgcaaacgccaatgcacaagtgaagactcaaactcataaaacacaaactgaggttaatttctctgatggtctgcttttatggtaaaatctttgaactaaaggttctgtttatgtttaatggtgttttgttttatcttgtagaccatga

SEQ ID NO: 4957 - DNA, 486 bp, Arabidopsis thaliana
attaaaatattgtttttattaagttaagaagaaacttaactaatttctactctaatggttaagaactattgagttcttaagaaacaaagattcaaattatttcaaaacaatgtgtatccactcaaatcacaacacatatactcttcttagttttaagaaaacatcttaactaagatgtttattaactaaggtttgttgatttcattaactttaatcacttttatagctaagatacatggttggagttgctcttaacaagtcacaacaacacaaatttgaaaatatcatccaagaacacaaaacataacaagtgacttcaatctttataaccagcaaaagccattgtcggagaataccatctaacagttgaactaattctgtcttttggcaatgtaattagccaaagctagtaaaggtttaactctactcgaatcaaacccatgaagctgttcgtgagcatcgctcaacaacttatctgcaaagtct

SEQ ID NO: 4958 - DNA, 951 bp, Arabidopsis thaliana
gttcttagttttgaatcttaaccttattttaaattaaaatgttgtttttactaagttaagaaaagttaggaggaagtttaactaatttctatttcaatggttaagaactattggattcttaaaaaacaacaattcaaaaatgtctatccactcaaaatacaacacatatactcttcttagttttaagaaaacatcttaattaagatgtttatcttagctaaggtttgttgtttcattaaatttaatcacttttattgctaagaatacaaggctggagttgcttttatgtacctttaaattaaggaaaatgacaagtccaaagaagtagtgagaaagatttactacactaaaataaatatctaacaaaataccaaacagagagtttggtgagttaatttttttttacagcagttttatggaactttttgtttgttggttcaaacattgcttagtagaaaaaagcaaaagattcgaagaataactcaataacaacaaacgatccttgtttcttccctttctattgcagatattttttgctatttttagtcactacccatttcttaaaattcttttttttttttcattacacatttcttaaaattctaagcttcataaaattaaaattttcagatttttcttaaaagaaaattgcataaaaaccctagaatatttatagcttacaccaaaaaaatctaataatcagagaaaaacaaacggaacctcatgattatcttgttcacttctattctccacggtggtttctccgaccgtcgtcaccgacggtaaaacaacgtggaagtcatgatctccgacgaggcaccggcgcgtgagtttctgacaagaagtgcatagcacgcgccttacgtgtctccaagctagaaaattcgctccatgaacccaccggtcacattttctacagaggaacgccgagtccgcttcacagaacacgga

SEQ ID NO: 4959 - DNA, 564 bp, Arabidopsis thaliana columbia
ccaatctttatggtaactaaacactaatacgcctcacagttttgtgactttcaaactaagccatctagagaaactgtagttaatgtcttttgattttgagatttgcagctactgtttttggacagaatctaagattagaaccattggagatagagcagaagacgacgtggaagagagaaatgaattgccttctctctgtgtgtgactatattttcgagtttatcccaaagtcacagaatctaagcaatggagccactgttgaggtaaacaagatttgcttatagatataagtccaaaaactgaaataaacatcaatagtttaaaaatagctgttgcggtttttttgtcaggtcatggagagtagaccaagagcagatatctacatcaatctgcctgcactcagaaaactagattccatgcttatggtagttactacaccagaacaagaagctatcatcaataagattgactcggttaatattcctcataaaagtcattctctttgttttctgcaggaggcattggatagtttcaaaagacagagttttggtatgcagaagaagg

SEQ ID NO: 4960 - DNA, 534 bp, Arabidopsis thaliana columbia
tgatgtgtttctatgcatggttggatactgatattagttcgattactgtctgtatccttattttataagtgctaacacctgcattcatttgactcaattacataggcttccgagttgcgatggattatccaaattaactttgttgtgcttgtgacaggggcactgccaaaactttttatgctgcgagcatttctttgaaattctgagccagtttggtcccgtacctcctgatgtaagttcctacttctttttttattcacttaacatcaccttaagaggcagctgtgttgggagattgatatgtgtatatatgtaatggctcccattaacagatagagcagaaacacaagtatgctgcttggaaggctgctgacataaggaaagccattaaagaaggaaggaagccactccaggtgatcctgtggatgatgatactgatttatccacccatcaagcggtcctagtggctcctatgtaagtttctcttcttgaatatttatggattggaaatatcttgatattggcttagcgtgt

SEQ ID NO: 4961 - DNA, 868 bp, Arabidopsis thaliana
gcatgcaggttgatgcaacgtacagactttgcctttgaaagtttaagatggcaacctaaagattgctctatggaagaatttgagggttccaagttcttgagaaggtaaacagaaaaattcctatatttcattccaacttatgcatgtgttaatccatagacgttgtcaaatattcccatcaagtccttagtaacagtgcgtggctctattttacaaattccctcaggatgaagaacaaaaccctagcctttgttggagactcgttgggaagacaacagtttcagtctatgatgtgtatgatctcgggaggcaaagagagactcgatgtccttgatgtgggaccagaatttgggttcataactcccgaaggtggagctcgtcctggtggttgggcttacagattcccagaaactaacacaacggtcctataccactggtcatctacactgtgcgacatagaaccgctcaacatcactgaccccgcaactgaacacgctatgcatcttgatcgcccaccagcgtttttacgccaataccttcaaaagatcgacgtattggtaatgaacacaggtcaccattggaaccgcgggaagctcaacgggaacaaatgggtgatgcatgttaatggcgttcccaacactaacaggaagttagctgctcttgggaacgccaagaatttcacaatccacagcacagttagttgggttaactcacaactccctctccatcccggtctcaaggcattctacagaagcctttcaccgagacatttcgtgggtggggaatggaacaccggagggagctgcaataacacaaccccaatgtctatcgggaaagaagttttgcaagaggagtcaagcgactacag

SEQ ID NO: 4962 - DNA, 517 bp, Arabidopsis thaliana columbia
tttcaatctaacaagtttcatggtcaaaaaacacgaacacagaactaaactattcaagtacaaagcctgtttcggatccgacatttcaagtacaaatgtagtaatccattcttaaattcgagactttaaactaaacttgaagactttagcattatttcacagttacaaactaataatataaaatgaaagggaaaggtttcgatgagagaaggaagctagaacgacgggaaagtgactaaccggcaacatcttgaccgtcgtagataccacgatgaacggtaccaaaagtgccacgagcaagaacagtcttgatgataagtttagaaggatcgatctcccactcaagtctctgtttcctcttgccaacaaatccgccgccgtttagagtgacaggggaagaagaagcagaccaccgatggcgacggcggttgtgtcttcttcatctttcttcttgttcttctctaaagtcaaagctctgcttaagtgtctctctagttgctcgtctaagctttttaga

SEQ ID NO: 4963 - DNA, 408 bp, Arabidopsis thaliana columbia
tcccgtattcgcgatctctttatcagttcattcagcttagttgctctcggaatacccatatcaatgcatccacgttcacctagtgtttcatgaagataccccgaagaactccatgtcataccagaacgatgtagtttcaccattgttaacctctactcgatgaaactgttttgctagtttaatgtatttcagcaacttcttccatatctacgatcctcttgttatgttgtctttcaccgcccaaaaggaatcatcacgtattaagtggttgttttaccatcaagccaaagtgaacctttcgctgaaagtatccccatatctggtttcacacacatactttggttggttcttctatagatctcatcccaatcatcgctcacttttgggagtacatacatctgacaatgc

SEQ ID NO: 4964 - DNA, 597 bp, Arabidopsis thaliana columbia
ctctagaggatcccccactagctaagtggagtatttccacttttgctctgccccttctatttatttgacactttgttcactttaaatttcagctgttgcagatggaacgtaaagtccaatcagcgaaacatcatgagttagtgtactggcatttagcctctcacggtattcctaaaagcctccattgcctttccctcagattaactgaagagtactctgtaaatgcaatggctcgaatgcgtttgcctccgcctgagtccgtatcacgtctgaccgacccatcttttcatcatattgtcctcctgactgacaatgtccttgctgcctctgtcgtcatatcgtctactgtacaaaacgctgtgaatcccgagaagtttgtctttcatattgttaccgataagaaaacctatacccctatgcatgcttggtttgctatcaactctgcttcatcaccagttgttgaagtaaagggacttcatcagtatgattggcctcaagaagtgaacttcaaagttagagagatgctggacattcaccgcttaatttggagacgacattatcaaaatttgaaagactctgattttagttttgttgagg

SEQ ID NO: 4965 - DNA, 607 bp, Arabidopsis thaliana
cagttgcttcaaacactatgataagagaatagtaccgttgctagctcctatcaacatagtcaacaagagaagccaattccaaattccgagttccctcttcttccgaatcttcgcccattatctcagccgggagcttgaacgtgttctgatctccttggggcacaagaaacagaaaacatatcggcaaaagtctcatgacattcctgaccaaaaccgcaagccagaggttaccaaactcagtccgagtcaccttgaggacatgcaacattttccctccaagccaagatgaggtcatgaggcctgcattgtcaattgacattaacaacgcaaaaaaggtcccttcaattccgtgaggacaaagctttgtattgagaacgaatatcaccatccatgtcagacgtatgatcatcttagaaactatcccgtccactactatgaagagataatcaggtaaaccaaattttaagttgagacgtagcacaagaatgaggtcaaacattcctgataaagcaaagagaagttgagtcacaaaaatagtttcggaacggatgaccctttagcgtaggttgtacacagtatcctagaatcgacctatagaccaattgag

SEQ ID NO: 4966 - DNA, 1670 bp, Arabidopsis thaliana
gggtagataggcaacatgatttgaacagggatcgagatcgacgtgaaaagagttcaagccacgatcgagacgataatgatagaagcaaagagagagacagggattggcgcagacgaggcacgagatgataatgatgattatgcttgttctcacctcatggtctgttctcaagattttaaccttttgtgtttttaaatccagaagatattgtagaacttgttctcagacacagcttgtaattttgtatcccaatttctgaaagatttctcactcaattgtttcttctactggattcttgtttttcttatggaactattttagaaatgtaagtagattaggtaggtccccaaattcacaaagaattgtttcttctataccaaaaacacacaaacttgttatgcattcagagaaaaatgtagtgtgtgccttttgcactttccagaagtaaaagtgaagttcggcaaaactgctgaaaaactgaagcatttgcttcaaacactataataaaagaacactagctatcttctatcaacagagtgaacaagagaagccaattccaaattccgagttccttctttttcatctttctcttcgtccgaatcttcgcccattatctcatccgggagcttgaacgtgttttgatctcctttaggcacaagaaacagaaaacaaagcggcaaaagtctcatgacattcctgaccaaaaccgcaagccacaggttaccaaactcagtccgagtcaccttgaggacatgcaacattatccctccaagccaagatgaggtcatgaggcctgcattgtcaattgacattagcaatgcaaagaacgtcccttcaattccgtggggacaaagctttgaagtgaggacaagcagcggcatccatttcaagcgtccgatcatctgagaaactatctcgtccactactatgaagagataatccggtaaaccaaattttaagttgagacggaacacaagaatgaggtcaagcattcccgatagagcaaagagaagttgagtccacaaacaaagtccgcggaacggatgatcctttaggactagttggtataacgttgctgctagaatcgatccgattgaaccaatggagagaatgaaaccaactgtttcctaaaacagaccaggtaggttcttcagcatattacttattttggggtgaagtttgaaaatagaaactatttgttttggtaatacctgagcaaacaaaggaccatcctttgaatctgtgaaccaatagaagagaccttcatgtatgttcaaaccaagagtaagggaaatgtacatatacaaactcggccgccacacatctgaacacttcattgtcctccacatcgctttccctgcatcggtaaatttctggttcacctgaaatgatacaacaagagtcaataccctcatgatcaagctaccaaagagagaataattattacctgtttgtaagagaaaccaggaacatggggctcactaaacacgatcccgactaccgatactaacgcgaatgggaatgtcagcaatccaaagacaccctaatgtcgcaaaacaagccaaatacagcattagagaggaaacacaaatgaaaaagatcatagtagacagacgattcattaaccttagagccaacaagatgaactaagatgccactcataaagaaac

SEQ ID NO: 4967 - DNA, 807 bp, Arabidopsis thaliana columbia
ttgagacgagagatgaaacaaaaatggtgatagaggagaggattccaagtcatgtagatgggagaggatgtgttttgaggacatcaaaaactgtgaaaaatccaaggagactcttttatgcttgtcgatgtggagaggaggtaatgatattgtagtgtaagtactgttaaattatggaacatgtctgaattgtgtttttggtatgtatcagaatggtagtggtcacttgtttaggttgacagatgaagtaatggtggaagagatggaagacatacttccaaagattgatgaacttgaaggggcttcattgaccttacaaaaagggttacaagctttagaatttgagatggaaactctggcaatggagactcgtacatgtgaagctgtggtttgcggctatgagaaggagctgctaggtttagagaaggagattcaaggttgcaagattgaattgcgtgggttgaagaagattcttgtgtgtaaagtgttgatgactcttgtctatgtgtttgtgttgtagtaattgtagttgtgtttgttttgtattgatacgcatgttgtagtgatttggttcccttttgtgttatgtattattcagataatgcacttaccaaagatttaaagaagttgagtaaccataatgtggggaaaataagtatcattttggttacaaaatccttaatctagaattcacataacatgaaaatattatctcatgtatcttataatacaaactttctgcaatcttcttaagaacatggctaaatagcaaacatcgctattaattggtgaatttaaaaacaaaga

SEQ ID NO: 4968 - DNA, 601 bp, Arabidopsis thaliana
ggaatggaagttttgtggctccgaggtggtaaacaaatctttaaagtaatcaaccgcaagtctttccaaatccacctccttgtctacccaaagaccatcttggttcaataaaccaataatcttattccttgctctcttttgtttggtagtagcatgaaaatattttgtgtttttatcaccctctttaaaccacaactcccgactttttagacgcgagaatatctcctcttctctataagcatcgcaaagcttccagtttagtgctaatagatcttcagcggagatagactcatcttcttgagcaaggtcgatctgagtttgtaattccaaaattttcttctcagagtttgaggaactcgatttcttccatagagaaatggatttcctacaatttttaactttttgagtgaaaagaactccttcttgtgaagggatatccatcctccatgaactgattctttaaacccggcttccaagccatcttttatcgaaaataaagggtttaaagtatttttgtgggctattttggattgatgctaggagaggtctatgatcagacccgataatttgagatccccacattggtgtgggaaaaatagta

SEQ ID NO: 4969 - DNA, 539 bp, Arabidopsis thaliana
tcaagatgccgatcactaacaaaaacaaacttaaccggataatctttcgaatacataagggcaagaccactactggtgccaatcggttcaactatttgaaggaaatcaaaacctaaagacacttgcatattttgtagatgcatgtgattgctcttggtttctgataaaacaaacaaacatggggagtacattcgacacatctcctccagtcgacgagaggtaagatctgctcccaccccttgacaattccatgctaagattctcatgtgttagttccgggagggagagtcaaaccccaccgtactaacaattgaaaaggtaattataatttttgcaaaaataatcacctcaatacaagggataattgaagatttgttaaaaactcttgtctttgctctcaacgaacattccaaagtaaaataacattgtaaacatgattttttcagatacaaagaatgtgagaatggtctcccttgacggaggaaatcaaaatacatggacctacatccagaaatttagaacttaaatttttagttggg

SEQ ID NO: 4970 - DNA, 596 bp, Arabidopsis thaliana
attcgtattttgaaagcaattaaaggcatatttgtgggcaacttctagtttaacataaagaatggatcttgtcactcatgtacataccctcaaaatcgttctctgttgatttccatgatttgttcctctgcatcaacatttctaacatggacctctaaatcttcaggtgatgaagaacggatcctctccagctcaaatgaaacctctctcatgtttggccgctttctccctttcctgctaagacactttcgagcgagttttgcgactgccatcacttggcacagcttgctttctcctttgatccgaatatcaattgtgtcaatcactctgttctctttcatggcctcaaggaaatcagttgccaatcctcttccttgacagtggtttttctccggttatgagctccaccaagaccaccccgaaactgtaaacatcgctcttgtcagtatattggcttgataaaaagtactccggatccatatacccaaaagtgcctgcaactaacgttgttagatgagtttgagcaatggttatggatcttgaagttccgaaatcagatactttggctctatatttttcactaatagtatattggt

SEQ ID NO: 4971 - DNA, 633 bp, Arabidopsis thaliana columbia
cctaagtgctgagaactttgatatggtcggtggatcaggttcttctgatgagtctgcttcgcagtcaacggtatgtaaacaagtagagcaatagactttatgatgatatcgagtttgataagattagtatgcactaaattggttggatttttatttgcagagggatattgaagctgagatgaaaaggttaaagattgaactcaagcaaaccatggacatgtatagctcagcctgcaaagaagcacttaatgcaaaaaagaaagtaagaactgttaggtgtacaagagctagttgatgaggatgttttttcttgctttatttgatatattctgtctctcatgttttatgaaggcaaatgagcttaatcagtggaaaatggaagaagctagaagatttgaggaagctaggaatgctgaagaggcagctttagctgtagcggaaatggagaaggccaagtgcagagctgctttggaagcagctgagaaagcgcagagaatggcggagttggaaggacaaagaaggaagcaagcagagatgaaagcaagaagagaacgctaggagaaagaccgtgctcttagtgctttggtacagaccgatgtcagttacagaaaatcatctatagatgagattggg

SEQ ID NO: 4972 - DNA, 1441 bp, Arabidopsis thaliana
taaaatcagacatagaaatactgttgtttagagaaagattttgaatatatagaacattaaatcgccgcagaactttgttgtttagagaaagattttaaatatgataagaactcaactaaagaaaaagaaaaaaaattatgacgtctcaatttagagttttattggttcttttgtacagttctgtaatgttaggaatcgttttatacacaaaggtaacttaaatctttcaaacgtctacggtagtggacggtcattaaaatcagagttaagaaaacgaacaaaccaaatttaatcatatcttatacactcgagaccttgattatatattactcttttatatattaacagaactagaaataaaaactatacattattagaatatcgtaacgtatactaatatcccatcgaccagtatataaacgacacaagtcacagtacattctcatcacataccacaaaatatctcataaagatcaaataaacactaaacctgaaagcaaaaaaatggcagcacgagcaacattcatattctatgctctcttcctaaccacactccaattccttctaacacaccatgtgtcatccgccgcccgaggattatggaatacatcgcccccaacgtcggaatctccgcgatgcatatgcaacttctccataacgaccgtgtcgtaatgtacgaccgaaccaacttcggaccatcaaacatctctctacctaacggtaactgccgtgacaacccccaagacgccgtctccaaaatcgactgcacagctcactcgatcgaatacgacgtcgcaacgaacaccatccgacctttaacggtacaatccaacacatggtgctcatccggttcggttcgaccggacggtgttcttgtccaaaccggtggagaccgagacggagaacttaagacaagaaccttttctccttgtaataacaatcaatgtgattgggtcgaaatgaacaacggtttaaaaaagagaagatggtacgcttccaaccatattcttcccgacggtaaacaaatcgtcatgggaggtcaaggacaattcaactacgagttctttcccaaaacgacaaaccctaacgtagtcgcgttaccgtttttggccgagactcatgatcaaggacaagagaataatctttatcctttcgtgtttatgaataccgatgggaatctatttatgttcgctaataacagagcgatattactcgactatgttaagaacacggtggtgaaaatttttccggcgattcccggtggttatccgagaaactatccgagcactggctcagccgtgttattaccgttaaagtatcttgaagcggataatgtcgagacggaggttctagtgtgtggaggtgcttctataggtttttatatcctcgctagattttatattttcgtgaaagcgcttgacacgtgtgcaaggatcaagat

SEQ ID NO: 4973 - DNA, 576 bp, Arabidopsis thaliana columbia
gaggcaaatctgtcagtataaacttgtaatttcatcgtctccgtcttcttcttcgtttatcagttcttcgtcgcctttcgcttatgaaaaattcacactggtaaagcttcttcctttaccaaacccatttctcttctctagctccttctgggttctcttttcgaagaaccctagtaatcgcgagaaccttcttccccctttctcttcgcaaaatcagaaatcataatcacaatctcttcgtttttttttgcagtttgcagggctaatttctgcgttatcgtacttctaatttgttgagataaacatggcgaggaacgcaatctctgacgatgaaggtaccttaatcgcttcgtcgcaaaccctaatttttttctgtgtgaaacgccgtaataatactagggttttgtttatttcttctgatttgtatgaaaaaattgaatccttttctcttttgcgtagaggatcatgagcttgaggatgacgacggagagccagttcatggagatccagctgagcatgatgaaaacgatgatgaagaagatgatgatgacggtataagttttttccttgattttg

SEQ ID NO: 4974 - DNA, 430 bp, Arabidopsis thaliana columbia
tcaggcgtttgataaagaaagtattgaaacttagattgagtttgctaaatcttaggatcggctttgaagtcaagcttggaagcatgcttcataacgacagtccttctacctttgtttggttgtgatctgatttctcatttatatatcaatccatttgattagttggcctgcagtattcggtgtttcactgtgtctccgtccatttctttccctccaataatgtatgcagtgatttggaagatatacttgataataaactctcgattcgacaatgatgattcttggatacatgagtgagaatctgagaccagccgttggagtagtgtgtcttaaagacgcctttggcaagcgctgcttagacttccgaagcatagcagcaagagaaaaagagatggtcccgtgttttaatgcagtggctacataaaaatgc

SEQ ID NO: 4975 - DNA, 514 bp, Arabidopsis thaliana columbia
aattatacatcaagcattacattttgcttcatgatttttttttggaaaatcaggaagatgtgaatttgctgcatcaaattggcttcgatgcttaccgattttcgatctcatggtcacggattttgcctcgtaagatatcgatattatcggattagatctttgtaacttgtaagcgttgttatatattcttgatgtaactcttctcaattgtttattaggtgggactctaaagggaggaatcaaccaggctggaattgaatattataacaacttgattaatcaacttatatctaaaggtaatgtttctatgtttctcagtctatttgattttaatgcacatagaggaaatcttggtgatgtttaggatattgccaaaacccttgtaatttttttatttttttcttgtaatgttgtaaatgtgtcaggagtgaagccatttgtcacactctttcactgggacttaccagatgcactcgaaaatgcttacggtggcctccttggagatgaatttgtg

SEQ ID NO: 4976 - DNA, 465 bp, Arabidopsis thaliana columbia
gtgtgctctaaagttacaggccagtaacctgatcggtcacggcgtgatgatccccggcaccactgttcttgcgggaaccggcagtgaagaaggggctgtgaccacgaccacgccgtttggtgttgagctgcaacaggcggcagacaaagttacggccaccatcaccgataaaaatggcgcggttgtgccaccattgatattggtgaactgaccgccggagttcacagtttcacctgggacggtacgttgactgatggcagcactgcgccgaacggttcttacaatgtagcgattacgccagtaacggtggtacacaactggttgcccaccgctgcagtttgctctggtgcagggtgtgatccgcggcaacagcggtaatacgctggatctcggcacttacggcaccaccaccctcgacgaagtacggcagataatttaagccttcacatttcaggagtcagtcat

SEQ ID NO: 4977 - DNA, 523 bp, Arabidopsis thaliana columbia
tgaaaaactgcaaaattattagattcagaacattctttggtaattgaagatgggcactaacaaaacaaagtaaagacatgttatgttttagctatccaccaataacaaattgtcatctttattactgttataaatgggcatatctccctaaacaatggtaaccgaaacaaaccaacaaaaagtaaaccgaaacaagatcttgttagcttgattctatcatcagtttctctaatctgagactgttgtctgaagaggcaaataactctcgactcctcctttagcctcactttgctgcttatccgcaacagcctttgacaacccaaacatctgaaaaaggcaaaataacttactattagcaaaatcacaagtagtggctcagtgatcaagatctattacgtgtttagtaaatcatgaagaaagacaaaccttcttgatggttttgttgaaacagttcttgtgatcatccatggaagcattaatgaaatcatcgatgtgatccttgacgtcttctaggaaattggca

SEQ ID NO: 4978 - DNA, 518 bp, Arabidopsis thaliana columbia
tatttgaaagaccctttatatgtttagtggttgcttttaggttattgaccatgttttaggttgtggaaatacttatcaatcactttgctatattattaattcctaactttaacaatgtggacagagaatacaatatgccaaaacaaaatcagatgttgttgccaaggccgatggtacatttgttcctcgcgagaagagaaagagacatgaggagaaaggtgacactttttttttacttcattgcttcattggctcactttgaccattactgcatatgtgtacatgagatttattgctctgtttctcattcccacattctgcatttgatcattagtagtcacatcacattcacattgcttctccacaacctacaaacagtttgttttcgcatctaaatatcgtctttggaagtgcaggaggcggcaagaaaaagaaagaccagcaccatgattctacacagatgggcatgccatgaactcagcatatccaggtgtctatggagctgcactcctgtgagt

SEQ ID NO: 4979 - DNA, 555 bp, Arabidopsis thaliana
gcctgaggatagtgacgacatattcttgggagctcgtttagaaaaagagtttatcgtggaagccactcttttatctcgactaagccatccaaatgtcgttaaggtgagtttatatcatgttatattatgttggttaggttgtatcaaatatgaatgatgcctttgaaaattaacattacatctttcaactctgtttgaaaattatgattatggtttgtttgacttttttcctctgattgatgtgtcctgaaacagtttgttggagtgaatactggaaactgtatcatcacagagtatgtacctcgagggtctttaagatcatatctgcacaagctcgagcagaaatcccttcctttggaacagctaatcgattttggtctggatattgctaaaggaatggaatatattcactcaagagagatagttcatcaggatctgaagccagaaaacgtgttgatcgacaatgactttcacttgaagattgctgactttggcatagcgtgcgaggaggagtactgtgatgttttgggggatacataggacttataggtggat

SEQ ID NO: 4980 - DNA, 575 bp, Arabidopsis thaliana columbia
tccggactcattgggtctgttgatgttgaggagtctgtgaaaagggggacaactgttttccaacctggtcttttggctgaagcccatagaggagtgttgtatgttgatgaaataaatctcttagatgagggaattagtaatttgcttctcaatgtattgacggatggtgttaatatagttgaaagagaaggaatcagctttaggcacccgtgcaaaccacttttaattgcaacctataaccctgaagaaggtgctgttcgagagcacttgctagaccgtgttgccattaatttaaggtactactggagtttataaatcaagtgtgataaatattgcctgtttcttttgggtaattccatttctttctctttttacatcacgatgttaacctttgcagtgcagacctacctatgagttttgaagatcgtgtcgcagcagttggaattgccacacagtttcaggaacgctgtaatgaggtttttagaatggtaaatgaagagacagaaacagcaaagacgcaggtatcttcaaatgaattaagaaaaaaagggcctcattagtaaaaatttgatggg

SEQ ID NO: 4981 - DNA, 482 bp, Arabidopsis thaliana columbia
tttttctgacttcagagtgagaaatctacaatccattgttatattaggtttcaaatttctgttaaaatcattagcatatggctcaattttgaaccttttcagagtttttgtaggtttaaggttttcaagcactctgtttccaatgctgcttccgagatggtttgcagaagcgttgttgctcctactttcaattcttgcctgttcaaacggtaaatttcacatgttatatctatctctaagtttacttttttattacttggtgaagttcatagactctcaatgttaatctgattctttatacagctgcatttatcggtgtaaacattggcactgatctcaccaacatgccaccgccttcagacattgtaacacttctcaaatcacaacaaatcacacacgtccgtctctatgatgctaatagccatatgctcaaagcatttgccaacactagcatcgaagttatggtcggtgtaccaatgaag

SEQ ID NO: 4982 - DNA, 682 bp, Arabidopsis thaliana columbia
  unsure (1)..(682): unsure at all n locations
cttgatttttatgaaacccttggtctgctagattcttgccagaacggctatatcgatggcttccaagcaatttcagaccaaaaaaccatctgattctacatcagcaacaacaacagcgaacgcanatggtatcactcaagaccgaggaccagcaatgacacttactttccaactaatacattggaccgataacaagaaggcggcgatgataatagcgtttggatggagagattggtaagtttcctctatgattgttttgtctttaatttccgtttacatggatcagtaagtgtgttttgttttgtgtttctctcttagatatggtgaaggggggtgcacaacaggttgtcaatgtatatgaaacattctttgggaacacgaacttaacaatttatttatttttgtatgaacttttttattgtgaggtcttctgatcttgatttgaaattaacgaacttggagttcttggacgacaatgttgaagagttttgttacgtaagtcatatgaaaatactatcacttaaaccggcgccgtttctaaagaggaattcaaaattcgtacaatcttcaaccctagagatcccgcgatttcttctcccaagactgacgactctgtctcaaatcgggtggggatgagatgggttgctttcgctacagtgatcacagtggagagagaaagagc

SEQ ID NO: 4983 - DNA, 522 bp, Arabidopsis thaliana columbia
tttagtgagaccaatgtaatgatcagcgtgaaaatgagtaaggaaataagcagaacatccttgaacacaaccatagcgaaaagcatccacagtgaacggtgttcctacatacaatcaatcacaaacttcatgaaattggcaaagagagaagcacatttaggcatatgaattcaaagaagaagaagagagagagagagagagacctggaagtttcttgtaaaatggacatggtcgaggcgagtcattgctaaacgaagagtctctacgcctttttccaagagcactcgtcgtcttcttcgccgaattcgaagcaggtgaagtgaaaggagaaggcttttgtaaaccccaactctgaaacaaatcagtttgtttcatcttcttcgttgtatcaggagaattctcttgtaaaccccaaatctgaaacaagttcgactgtttcatcttcttcacagaagaagaaacagtctcttcatcttccactaaacaagaccaatcagaaccagccttatagaaatcagacgc

SEQ ID NO: 4984 - DNA, 509 bp, Arabidopsis thaliana columbia
gtaacatgaagaaagtgaattttttatatataataagacacataggactggatcagactgggaaccaagatgaatattcataatggtgaatccttacaaaagactacacagacacaacaaatgagttttgagaccgtgactaggttgattagagatctcaaatgctagagtcatcatcaacccagaaacaagaatcctacttttactgacactcttgattgttacacgcagaaataataaagacacaggaaaagagaattaactgaactcttcaagacttttaaaatggactcacatgatggtgcatcggcccttttcttcgtttggttgcgctggcatttgctggaaccggtgtgactctgagggattgtatgtgaactcagatgtgtcaagcccatactgtttcaaaaaaaaaagcaatcagtgaatctcggtatcgcactaatgcttttttttaatttcagcacgttataatcttgttaccttttccctcatacgtgcactccaag

SEQ ID NO: 4985 - DNA, 1533 bp, Arabidopsis thaliana
gccgcttgacttatcaacttctgatcatatctcatctgtttgcatcacacccatttggattgacacctaaaatactacaacgacaagatagtgttttaggattaattgactaaaaacctattatcaatttctcattcattgtaaaacacccttgatcattttaaagtagtagaaacgttttcttgtcaaagtttgagtctttgtcatcgttctgtagttctttgtgagtgagtcactaagtacttcaagatatgcggattaagtttgttgagtgattcaacatccttcattcgttcattgatcgagtgagtcaattaccccaccgattgagcgagtcaatcacacttatatccatcaattccccttgaatcgatcccacacaagagaagcgatcgccagcgtgtcatatcaccaccttcatcatcccaccttccatgtggcaagtttggaactcctgatcatcaagtgatcaaaggatggattagctccaattcttgcatcagagtagattggagatatcagatggctctcgatgtagcaagcaatggtaacttcaacaccaggtatccagcagatgctaccgctgtgatagagaatcttatttgcagtaacaacaccaagaatgctaactttgagaggaagaagattgttggagctgtttcagacaatcaaatggcagaggtaagtgctaagttggattcggttcacaacttgcttacagggaagaagcatgtccactttgcagttgaggatgagactattgagcctgagactgaatctgaagagtgagtcttctacatagatggtcagggctataggaagtttgggcagccacatggcaactttagtggcaacaggtttacagggaaccagtgttcctccaactacactccaaagcctgctttctagaagacatttcctcagagcaacttcaagaggacttatggtaattcagcttaccaagcccccctccaccctcatcagagacaagaatggaatctatgcttgagcagattctaaagagccaaacaaagcttgttgtggagtttagtggaaagtttgatgctgtctacacagatcttaatgggaagatcgaaaatatgagctataacttgaagaagctagatgtccaagtagctcaaactacacaatcaattaagagacaagatggctttcttcctggcaatcttgatgctaacccaagaaagagctgtaatgccatcttaatcagagatggagatgatgtgtgggaagaagttaatactgaagaagagctagagctctgatatagctcaaattgccttaagcttactccctcaaataagagatcatcgttagcacttaagggtcgaattccactgagctctcgatgttcacacaatagacttatgatgattaatattaagctagacaaagtagatgaatgtacaagacagtaaagcaataaaatgagttgtagattcaagtgattaaagtgtcgggtctaaggaattgtctcgggagatagattaattgtagatctagctgatatta

SEQ ID NO: 4986 - DNA, 1390 bp, Arabidopsis thaliana
tttactaccctgctggccgaaaacccgcgtaacggcatcactgttgatgacagcgtgtggccaaaatccaggcgttatgaggagataagtcatgatttttggacatatcgcgcagcccaatccgtgccgtttgcccgccgccattgaaaaggcgctcgattttctgcgcgctaccgatttcaacgccctggagccgggcgttgtcgaaatcgacggcaaaaatatttatacgcaaattatcgatttaaccacacgcgaagcggtggtaaaccgtccggaagtgcatcgtcggtatatcgatattcagtttctggcgtggggcgaagagaaaatcggcattgctattgatacgggaaataataaagtcagcgaatcactattagagcagcgcaatattattttttatcacgacagtgaacatgaatcatttatagaaatgataccgggcagtacgcaattttctttccgcaggatgttcaccgaccaggttgtattatgcaaacagcctctgagatacgaaaaattgtggttaaagtcgcattaacggcgctgaattaatcgaataatcgtctacgccagaacgcctgggtaatgttattgctctaactatattaataattcaggttgctgcacatgcgacttgaattatgacagacatagcctcaaggaatagctatgaaaaaaatactcgaagcaatactggcgattaatctcgccgtactttcctgtattgtatttataaacattattttaagatatggttttcagacaagcattttatctgttgatgaattgtcacgttatttatttgtctggttaacgtttattggcgcgattgtagcttttatggataacgcccacgttcaggtcacctttctggtggagaaactctcccccgcatggcagcgacgagtcgctctggttacccattccttaatcttatttatttgtggcgcactggcctggggcgcaacgctaaaaacaattcaggactggagcgattattcaccgatcctcggtttacccatcggcctgatgtatgccgcttgtctgcccaccagcctcgttatcgcattctttgaactgcgtcatttatatcaactcatcacgcgtacaattctctaacgtcgccaccgcaaggagcttaatcatggctgtgctgatttttctgggctgtctgttgggtggtattgctatcggtttgcctattgcctgggcactgttgttgtgcggggcggcgttaatgttctggctggacatgtttgatgtccggctcgtggctctaacgctggtgaacggggccgctcgcttctccctgctggcgcttccgttctttgtgctggcgggtggaacatgcatgcgggcggcttgtcgcacgcgttgttgcctg

SEQ ID NO: 4987 - DNA, 1174 bp, Arabidopsis thaliana
aactatgtaaacggcgctctttgtatggcgggactgcaggaaaaaacgatggagtgtggctggatggttgcttgtggctcatcaaatcaattgtctctgtctcagctgacctgatgcatgatttcaagacgggacatcttacgcaaacctcgccccgctcaatgcttgttgcacaagccatagggacagcgataggctgcgtggttgcgccactcaccttcttcctcttctacaaggcgtttgatgttggaaaccaaaatggtgaatacaaagctccttatgctatgatatacagaaacatggctattatcggtgttcaaggtccctccgctctccccaagcattgcctagagctttgctacggattctttgcctttgcggttgctgccaacttggcaagagacctcttaccagataagccagggaagtggatcccactcccgatggcaatggctgtaccgttcctggtgggtgggtcgttcgcaatcgatatgtgtatcgggagcttagtggtatacgtttggaaaaaggtgaatcgtaagaaggcagatgtgatggttccagctgttgcatcaggtttgatatgtggagatggtctctggattctgccttcttctttgctggctctggctaaggttagacctcctatctgtatgaacttcactgcggctcattaaggcagaaagattttccagacaaaacccgaacttaccgccggagaaatgtatagtagatgtggttaggttaggagtagacagttaaagagggatgaaaccaaacttacatgtcttatgtaatatttatacttttggaataagaatgaacagaaagagagttggtttcttcttttaccggcgaaagattctctttcccggcacaaacaaaattgtttccatatacaaaattgaaaatgaaagcagagaaactcacctctgaaagtttcccaacacaccacacaaatcatgcctatcttgattcaggccatttgatatgttaaaccgggatttagatagcggtaaatcaaatcctcggtttgattctgttccaaccgcggctactatatcccctgatagcttgccaggaagccacatttcatagttgcgcaaacacaagcaccaaggcagttcttataaaccgcaataacaatgaaaaggatggggatcctctactagag

SEQ ID NO: 4988 - DNA, 687 bp, Arabidopsis thaliana
agtgggacctcgagtgtatgccatagcaggcgaggaggatgttgatgaggatggcgccgacccgattgttggtaagtcttcttaaaaatttatttaagtgatttttctttccatttttggatgagtattgcttgtgcttgtttttggtgttcttgtctttcttagtttaagaacctgtgtaggatcggttcttgttggaggagtcaaagcctacactatgtttaatagtggagctacacactgttttgtgagtcctgagttagccagatgttgggattccacaattgagtaatcggaaaaacggagaaaagttgaaaccgcaggaccaggattggtgaagtcgtcacggacctatcgggatgtccctgtagagattgaaggtgtggagttgtttgggaatttcctagagatggagttgaagcgttatgagataatcctcgggatgggttggttgaagagacataatgctaatttggattgcccaaggttgcgggttaattttactcgagaagagggtaatttgatgtttcagggagtcgaaactcgtagcgggccgatcttttcgatgattcaagcagataatttacagtggactggacctgaagcttacttggcaacaatctctattgacggaggagatacaggaatggaattaaaggatattcttgtagcagcagagtactcaga

SEQ ID NO: 4989 - DNA, 899 bp, Arabidopsis thaliana columbia
tctccagagctgcatccaaggttggactgtcagactgtagcacaggaacaggtttcacttccatggtgaacttcaatggtgcagacgaagtggtatctccttcatcagagggaacaatgcgctgaaagcgcagcatttgatcaatcaggttcggaagcacaagtcggagagtagaggaggggttcgcaactgcattcgaacacgcccagatttcatcaaagatgagtttcccgaagttgaacggtagagctttggccaccatgtaaagcagagtcatcctctccggcttcagaacagagtggttcacagtgggactccaattgtgacagcagatcttgttgagcagagctagctcaggagataacagccgagaagtgagcatcttccaggagttggctttgccgtttgacagagcaatcgcaacttcatccatggactcaggaacttgaatctcagacacaccatccagcggataggaaggatttggaagcttcttcaccatcgggaaggtttgcatagaactccatgacaacctcatgcacataagagtcaatttcagtgaaagtaggaagcagaccagcattgaagagaagttgttgagtactcgcagtgttgtttccatccagaggaaggaaacgcatgtcgttgaagcagcgattcccgatgaccttgtagcgcccaagaccttcctcagtcaaaaaacagctattgtagggagtcttcgatgggaatttgagctccggatactaacgatcacgaacagcaagaagccgacggttctctcggtaacgagacagaaacagaggcggacaatctcagtgacatcacatcttgcagatctgaagagtcacggacaagatcttcagtttgtcctgcagcagaggcagatcggttggatt

SEQ ID NO: 4990 - DNA, 1201 bp, Arabidopsis thaliana columbia
ctagtaacaatcctaggtaaggattcagacaagtaaaaataagaacttaacagccctactcgatcattgggtcgagtagaacacaccggtgaaaaaattaggaactaaaatgcaatcaacaggggataaaaatagaggatacaaataacaggtaaataaaagtgcaatcgacaggggatacaaatcaatctaataaaagttctaaggatagattcattgacaagggcaactctagggttcatcaaatggctaataggcgaaaggtagatacccatgacgatagattcacaaaccgggtcaatccactctcgtgacagagacccccataactcgaccacttcctaatctcaactcacgttgatgaaacatagcagagcagggttttagaaacaatttatcaaagccaataggcagacaagccaatcccttggttgagtctacatatctctggaattcgtaggtcagacatccatttgaacgtcttttggacgctggacgtctgtgatcgaatctccatattagccagcgaaaaccgcataggggccaatggaatccagaagggtataaacctaaacattaaccacctaactaacctagagattaccctaatctaattcatcctcaagaaccctaatcactactcaagcaacattctcaagaacacaaacccagaaattactgaaatcataccaaaatgtagatctaaacaagctaaacaactttactaaaacaactaaatgcaaaaacgaaacagattaagagtaattaaggttttaagattcataaacaaaaagaaaaactgaaagataaagcatagatcctttggacaaaccccaaagtgatctatttatagtaaaatgttgaaacccaagattcactagaagacaagagacttgaggcggtttgggcgaatactcgatcttggggatcgagtaaagagggtgatgcaaagtttgtgcctttgtgtctatgctccgagtgatcaattggtcgagtagatgcttcttcctcttctatctttatgctcagatgtctggttgagtggggaatgaagaggatccgaagacgctttgatagcccaacaagtcttgtagagttggtcacccttggtcgagtaaatgggtcgagtagaggatcgagtaggaggggcgagtagatcaatcttctgcttcatctgagattgccttgatcgagtaagagg

SEQ ID NO: 4991 - DNA, 1139 bp, Arabidopsis thaliana columbia
gagcccattaaatacaaggtataacagttaaggcccaagcccaataaatgtaatgaattaactcaacccgagatgggaaattcgcgttaagatgagctcatttctcgcgttctattagaaaggtctgatcaaccttagaatctcgaaacttaaccacatggtcaaaatatttaaaggcggactttgcaaacccgcattctactttagtcaaaccctcttgggatcatagtttaaaaaaagtttaaaagcctccttaggtaaatacttatccaataattaatttcaagttcttaaatatttgggacaacctccaatttcaagtggacgcaaccactattaatccgtagctatctcgggctcgacatcagtcgtctcggtttcattcggttcaacgccagggagtgtctcgaaagaggttcccggctcgtgcctagcatcacactcatcatccgggatgatctccgtctcgctgttcacaacggaggagctttgggcaaaatagggtcaggttcaacaatctctaccagtatggcaggcaccttaggtgcagcagtatcatccgattcacttgaacctgaggagaacagttcaaatcagtaaagagtatatataaaaaaactgtaagtgataaaactttaagtatgaaagtttaccagcccaatctaaacccgattcacccaaagggggtgattcgatgaagaactctttgaagtgctgagggttgaaggatgaagcggggagagcaagaaggcggctatgtttctcggataaaacggctgtcaagtcggacctctcttactcctcgctgaaatcctcccccgtggacctggtccaacaagagtaggttgctttcgtgctccttaatattagattccagctctgatcttgccttttcggtttgaatgaaaagaatggccccctgaatcagctctatcctgcgacctttcacttcttttctggcttttaacgccgacttagctaactcagcatctcgaagcttggcgattgccttgtactttgccttaagttcggtgaactggttgttcaaggtgtaagcaaccgattcagattcagaaagcctatcttgggcaactgagagttcaccttggagtttgtcatgtctacgggactgatcttgc

SEQ ID NO: 4992 - DNA, 531 bp, Arabidopsis thaliana columbia
atctctccgtcgagctgattgtagctgagatcaagcatttgtaactgagatagctttgttaacccctccgggatggtttgatccaagtcgtttctgctcaggttcatgtagtagagccttggcaaattgttgagcgttgggggtatttcggaactgaatcggtttgaggatagatcaagatactcaagattggttaagagtctgattcctgaagggattttgcctgatagccgattcccgttgagttggagttttgatatacggttgatattgctgattgattcaggtagctcgccggtgatgcggttggaagatagatcgagctgacttagctgtgtcatgttccaaatctcaggtgggatggctccagtgatgctgttgtttgagaggatgaatgcaaccagcttttgactttgttcccagttggctgaaagttgtccatgaaagttgttgttgctgagatcgatgaagttgagagtcgggtaaactccgaaagcctcagagatatctccggagaaactattccctttg

SEQ ID NO: 4993 - DNA, 795 bp, Arabidopsis thaliana
caggtcgactccgaaccgtattcaaagttaaggacaagacaacctcagagatctacgcgttgaagaaagtgaaagaaaactgggattctacttccctccgtgagatcgaaatccttcgcatggtcaactctccttacgtcgcaaagtgtcacgacatcttccagaatccttccggagaagtatctattctaatggattacatggatcttggctcgctcgagtctctacgcggggttacagaaaaacaactcgctttgatgtctcgtcaagttttggaaggaaaaaattacttgcacgagcacaagatcgttcatagagacatcaagccagcgaatctgctacgtagctcaaaagaagaagtcaagatcgcagactttggagtgagcaagatcgtggtcaggtctttaaacaagtgcaactcgttcgtaggcacgttcgcatacatgagtcctgaaagactcgatagtgaagctgatggtgttacagaagaagacaaatcaaacgtttacgccggagatatatggagttttgggcttacgatgctcgagatcttggtgggtactacccgatgctaccagaccaagccgcgatagtatgtgcagtttgttttggagaaccaccaaaagcccccgaagaatgctctgacgatttgaagagtttcatggactgctgtttacgcaagaaagcaagcgagagatagacagcttcacagcttctcaaccacccttatcttctccaccaagattagggttagggttatctccgaagatattgtattggttactgaaaacatta

SEQ ID NO: 4994 - DNA, 934 bp, Arabidopsis thaliana
gagatgaagaaggatctggaagcagccaattagcgcgttgagtctcaggcggaaaagatctttcttatggaaaagaagtttgaaacgctaaagaagaagtatgagagcctgaacaagtatctgtgatcttagcttaatctgtttttctcaatttgaacttctttgtactgtcaattatcattaagtcagcgaattgtgcgattataactcagccaaaacgtacaatcggattaaatttataataactcggccgttacgttagactaactcatccacaactcaatactatctcaaccaacgttgaattaaaatataataactcagccgtaacgttagattcgctcaaccatacatcaagttaatctacgataagtccgccttaacgttagaataacaatgattgagtcacatgtttaactcagccaaacatcaagttaatctacgataaatctgaaagacaaagtttttgaatcacacatgcgagtataaaataaaaagtgaagtttgaaaattgaaaagacagagtttatgataacataggataaggagtactggaatccaataacatacatataatataattgaaaataaaaaatgaagatacaatcacatcaatcgccatcttcattcttcatcggactccgaaattggacgtccggtggatccataccccagtttctcccaatcaatactactcaccgggcgttcacgctgctctgtgtaggccttgccaacctgctccagcactttctcgatctcctcccccacgttaaatccgtcccccatcctctgcactctccttgagtccttagtttggtacatatgaattcttcaattggttaatgtttattgaatttgcaggatacttgtgaggctcaaaaccttgtcgggctgattaatagtgtttctcgagcgagaaacggcgtaggtctag

SEQ ID NO: 4995 - DNA, 601 bp, Arabidopsis thaliana columbia
cttgaaacataaagcaacgtccaagatgagtagaagctaatgaaatgcaactagctgtggcactcttgtgagaagcggttgatttagtaagagtctgagagagtccatataaaggtaatggcaaccacggatgtccattaccgccttcttgaggactcgtcgacctctgcttccttgaagcaaccaaacagcaatagcaacaaacagcaatcagcagaatcaatgtaaccgcaccaaccaaagaaccaatgatcactgccttcttcttgctcttagaacctgatcctcccggaagtaacgacttaaccgaagaaacaccacttaagctcttagcttcgttactaatcttcaaaacctctaacccattcatagtcgcattagtgatatcagcttgtgaatcaggtccaacgctaacggttaaaacaccggaagattcaacagaaccattggagataaaatccttaaagtaaggaactttaagaccattagtcaacgtagagagatcaagacttccaagagcaagatcatcattcacataaagattgaaaacaagcgtgttcaaagcttgactcacaatatcacagaaatgacacgaacaaag

SEQ ID NO: 4996 - DNA, 607 bp, Arabidopsis thaliana columbia
gagttttagatcacttgccttatgattctttcgtaaggaagagtgttggttacttgttcgcgatccagcacggtgcgaagaagatctatgatgctgatgatcgtggtgaagtgattgatggagatctaggcaagcattttgatgttgagttagttggtctagattctaagcaagaaaccgattttgcagtatagtcatgagaaccccaataggactgtggttaatccttatattcatttcgggcaacgttccgtttggcctagaggtttgccattagagaatgtaggtgagatcaatcatgaggagtattacactgaggtttttggtggtaagcagtttatacagcaagggatttctaacggtttaccggatgttgattcggtgttttacttcactaggaagacgactttagaagcttttgatattaggttcgatgagcattctcctaaagttgctttacctcaaggtgtgatggtgccggttaattcgtttaacactctttaccattcgtcagccttttgggggttaatgcttcctgtttcggttagtccatggcttctgatgtgctgagaggtactggggcaaaggcttttgtgggacttggtgg

SEQ ID NO: 4997 - DNA, 254 bp, Arabidopsis thaliana columbia
ccctaggccataggatttttgacaagatccataagagtaccgtatatgtcgacgtaaacaaactttgcatctttgaaatcatattctactgcgtaacttgtaagacctttctgcaatttcatgttgaagtcctccgtaattctattcaagaggaagttacaccatccgaataccccaccgaatgaggctcgatggataggcaaacatcccacaggcatcactcccatcaccgcaaattttctcgctccaagatc

SEQ ID NO: 4998 - DNA, 913 bp, Arabidopsis thaliana
cagacttctcatctgcttaaaatctttcctatatcctgcaactttgatgctcatgttgtatgcctctgaattgtgcttatagccatttctctttcccacccatgaaaagaaacgtaaaacagcgttgccttgtatcttggcatgacgtagaacctcaactaccagttctggtgtgaactggactgtcgatttttctagagcttcttgtgttctctcccaatctcgggaggatgataacacccgacaaatttcttgcacatccattttatcaacagcagataaagctggtggaagagctgactgctgcactagttgtggacaattatagtcatcaacaagctcttcttcttgactaaattctgctttgccagatccgtttagttcatcacaataggaattggatcttttctggatttctttgataagatgaatcttctccttttcaccatttttctccatactagagataacccaagaaaagatatcatctctaataactatcttggaggcgtgcatttgattaaatatcttaatgatctcagcatatcttgatgatctacagagctctttcacaaatatcgaatacgatttccatgtaggtttgatgcctttttcctccatgctgctaaacaccttccatgcctctgctactcggttttggcccaaatgaccagcaaccacggctgtgatagcaacgctgtcaggctcaatcccgttctctatcatctcattgaataagttgcaacccttttcaaactgtttcaacttgaagaggtgttgcataatctcagtgtatgtagaaactctaggtggacgccctgattttttaataacctcaaactgttcaagtgcttttgaaacatcgttttgcctgagatacccactgatgatgataccatagacattagagtca

SEQ ID NO: 4999 - DNA, 640 bp, Arabidopsis thaliana columbia
ggttaccactgcttctattgtcttttgagtgctcactaattgaaatgatactctttgataagcttttatcccacttttctctgttttaagtaagtacttgtttatctcttcagcgctatctaagaagtgatctaatctttttcttatctgacatcaaataaattgttagatatgcgatagttcgggatatgactgctgctggtgttggtttgaaccagttctgctatgcgggactcataactgcacacttaaacaagcagcccagaccagataatctttctactaaggtaacgtgtaaaggtttcttgttcagatttccttttattttttttaaagtaggttttctcacagcctcctttttgctcaaaagattctcgagtttgtggagcagtcaaaaggctggtcagcaattgattcatcaaggaagagtgcagaagatgtgatgtttagcatcagtgaagaagagctgtacaatattccaacctgctgattattcccacaggaccaggtttctgcagaggaatttgactgtgtacacgtagcattcagtgctccgctgatctgaaggatgtaaaagtaagatgatctgtctatctagattcgaaatgtcatgacttagtgggaataagataagataaga

SEQ ID NO: 5000 - DNA, 471 bp, Arabidopsis thaliana columbia
aatccctcagggttgctactcctttggcaatatgagaaactagctagtcaacattgaaattgtcaaagataagcaagtttattggtttcacaaaattataatacagtaaatacaaaatataaatacacacaccttcatgcctcatggaagcacgcaaacgatatgctccagcctgtacgggtagttgactttgtccggaatttcatagtctaattgaagttgtttgacaattgattgtggatccaaaccaaaaatggcttcttcgtctttgtcttcacctcctccctgtaactatgatgtcttcctaagcttccgtggggaagatacacgtagaaccattgtcagccatttgtacgcagcacttggtctaaagggaatcattactttcaaagacgatcaagatcttgaggtaggtgatcatatttctagccacctccgcagagccatagaaggttcaaagttcgctgttgt

SEQ ID NO: 5001 - DNA, 531 bp, Arabidopsis thaliana columbia
  unsure (1)..(531): unsure at all n locations
nnnnnnnnnnnnnnnnnnnnctaaagagtagctacggttgttggtttccagcataggtaaccatagctcaagatagcttcgcgtctggtagataaaattgtgtacttctgtgtggcggtcgaggaacgcggcgacaggtttatcaagacctgtcattggacgcagtttcggatcccagtgcgggttcggcaagaagcgcacgtcaaagacgtaatctgcatcgatagggataccgtgtttgaagccgaaagactcaaagaccatggtcagttcgcgttcacgtttacccagcagacgggtacgcagcatttcagccagctcgtgaacggacatttctgaggtatcgacaatcagatccgctcgcgaacgcagaggctccagcaaatcgctttctttgtcgatagcactttccagcgacaggtttttgctggaaagcggatgcagtcggcgcgtgtcactgtaacgacgaattaaggtattacggtcggcatccaggaacaggagttgcggtgagaaagcgtcaggcaggtt

SEQ ID NO: 5002 - DNA, 559 bp, Arabidopsis thaliana columbia
tctagtaacgtcctctaaagagttaggttacagcgaaccgttgatgattaccctgttaaccaactttcttacagcttcatcgattgttggtgcgttatccatcggtctttccattcctggattatggttgtaccgcaagcgccctcgcgtataaaattgcctcgcttaagcacacggatgagagacagcctcctctcctccgtgtgttactataaaagttatctcccttctcgttcatcgttccatatttgagaaacagtatgtcttccagagttttgaccccggacgtcgttggtattgacgccctggtacacgatcaccaaaccgttctggcaaaagctgaaggcggtgtggttgccgtatttgctaacaatgccccggcgttttatgccgtcacgcctgcacgcctggctgaactgctggcgctggaagaaaagctggcgcgtccgggaagcgatgtcgctctggacgatcaactctatcaggaaccgcaagccgctccgttgctgtaccatggggaaattcgccatgtaccggactggcaaccgatgccgatttt

SEQ ID NO: 5003 - DNA, 542 bp, Arabidopsis thaliana columbia
  unsure (1)..(542): unsure at all n locations
nnnnnnnnnnnnnnnnnnnnctaaagcggacgttaaaaacgcaggcagctgaagtttggttagccagaatacatgaagttggtgtacccgtcgcgccgttattaagtgtggctgaggccattaaattgccacaaactcaggcgagaaatatgttgattgaagccgggggaataatgatgccgggtaatccgataaaaatcagcggctgcgcggacccgcatgttatgccgggagcgcaacctcgaccagcatggggaacaaattcgccaggagttctcatcataaatgtaagatgtgctggtaaatagctcccacatttgaacattgtgggagccgctatttagtcatttttctgacagaaaacagcaatctcctggtccagctctgcaatgtgttcttttacagagttcagcaactgaagaatttcaggcttactgtcatctgaaacaggtgttatttctaaatgatggctaatattaatcaacttttgcaaattcaggatgttaccgcaccgtggatgcgatgaatacactgatggaaag

SEQ ID NO: 5004 - DNA, 590 bp, Arabidopsis thaliana
accaacaccttcaaagcacatcatgccattttcacatagcctgtcagagtcgcgtagatccaaattaaccgcagaaagaaacctggtacaaattcacttggatttttattgagctatcaattttgtttgactatgatggaagaaccttgttttcctgtagtgatagtaacataatgcgtttttattgttggctaaagtggatatttaattttgacataagctaccattatattgcaggagaactacgaattgctctccaggtgtataaaggaaaatttgggattcaatgatgataagccactggctgcctgtgtaatatacaaatgtcttctgcactggcgtgcctttgaatctgagagcacagccatatttaacatcattattgagggaatcaatgaagccctgaaggtgatccttttgttgtgacatatagtacccaatctccttttttttaaagggattttgttactactttcttccaaattggattaccttaaataaattgataggaacactttcatgtaataattttcgtctttgctttatatgtttatttcagggcggagatgagaacggtgtattacatattg

SEQ ID NO: 5005 - DNA, 871 bp, Arabidopsis thaliana columbia
catcggaatcattcgctgaggcatgggagcgaatgtgtcattctcatcttgctgatattggttaaattgccttaagtttactccctcaaacaagagatcgtcgttagtacttaagggtcgaattccacaaaacacttttgttcacacaataggcctaagtgtaaatattaagctagatgcgtataacaaaacaaaaagaaagcaagtaagcaatagcagattgattggttgtaagacaagacaataaaaacgtcaggtttaggatattctcaggaaatagatgattagtagatctagttatagctcggttgtgatcaaaccgttcttaaattcaaacactaattatagaataaacggtggtgtatcgtgaaactcactatgcctaaagtgaaagattcacagtggtgtgccgtgaaatcctataccaagacatgcatgctaaacgagttcgataagttcaccttattacatacctataaaccaagctcatcaaatagtagttctagcaacagatacttatggtgggtatacctattatctagagagacctagaaggagtctggttggagggagtgcggaccgtagtgacggttgcacggatttctttggagtggaagggtgaagctagattcgtcgaatctatgttaggtggggggagaattgtaacgcccgtgaaccggaaaatcggttaggatttttatttaaatcgctaggtttaatcggttgggttaataaaaaccctgaagtgtgcatataaaagaagaaaactcgaaattagggctttagttagcatttttcgttttttaaggagaaaaagagagagaagtagaaggaccagaatcgttagggtttgggaggaaattgttttgac

SEQ ID NO: 5006 - DNA, 1992 bp, Arabidopsis thaliana
cactactttacttttcgagatctggttgaggttctagttttctattcaatcatacagatgacatgacatgtagtcatatttcactctaaaacgctaaccaacattcttcttgcttcttaaagtattatagtatatttgctcctaaactctaaacctaaactctacaccataaatcccaaaacctaaaatctaacccctaaaccctaaaccctaaataccaaatcctaaaccataaaccctaaaccataaaccctaaaccctaaactcttaaccctaaacccttaaacctaaacactaaacgttaaaccatagaccccaaatttaaaacctaaatccttcaacctaaacctaaatatgcacaaaaacgctctcaacttcagtctatcaaaaacgctctgactttgaaggcaaaacacttattttcatattctaaaacactttcacgatcaaatccttactatttcaataatacaatcaagaacaccgtacgcgttaatctacaattctgttgttctttgagaatctcacaaagactcattctttgaagaaacccttaatacaatttctattgtgcgagtttcgactctcacaatttggcgctagaaagagggggtttcattgagatttctcttagccctagaacacagaaccaaccacccaatccacgatggtcaacaatcaaatccccggtaacacagttgacgcagagggaaatccgatccctccaaaccagacagacgttcctgaagccgctgctcccgcgaccctagcagaactaagaagtatgatggctcaacttatgaagaaggtgaacgatcaagaacaggcaatacgatccttggcgcaacaactcgaagcagctacctcccaaggacagatcaggactacccgtttcggcgcaaggcatcttcaggatcgacgaactgcagcagatctcaacccaacacggctcgtgttctacacgcctggcaatactacaaggcccgtctgctgaaccgcaccaaaaattggaagagatcgaaccgagccggcaatcttgggaaatcaggaaacaaaccgcagctccctcctccccgagcagaagttaccgaggccgatcagatcagaatctcggacgatgaagattcagaagagaacgttcggtgggccgaggaatacgctagagaacaggaaataagcgctatcaaggtctccctagccaaggcagaaaacgagatgaagctcgtaagatcgacatgacgcaaatcgtaccaactccacgacctgtgctcggattctctggggaaaccactatgactctcggaaccatcaagttaccagtccgagcaaaaggggtaacaaaaatcgtcgatttctctgttaccgaccagccaaccgtgtacaacgcaattatcgacacaccatggttaaatcagttccgagccgtcgcctcgacatatcatctctacctgaaatttcccacaagcgacaccgtgaaaaccatctgggaaatcaaaaaaatgctcgaatctgcttcatggcagcacacaagctcaggaaccccgccactgaatcgacggccgatgcggatcataagaaggtcaagcttggccgagctgaagagaaatcaatttctgagcaattatagcagctaaggatcgaggaggctcgagaatccgtaacaccaactcccgatccagtaatctccatctgcattgaaaacgaaaagcccaagcgatgcgtagaaataggcggagatctaggagaagagttaacagctgcacttacctctttcctcaaagaaaacatcaatatgttcgcctggtccccagaagatttacccggagtaagtgttgacatcgtatcacacgagctctacatcgacccgactttcaaacctatcaagcagaagaggagataattgggtcgggagcgagcagaagccgtacaagccgaagtagagaaattactgaggatcggctccatcaccgaggcaaaaatatcccgattgga

SEQ ID NO: 5007 - DNA, 676 bp, Arabidopsis thaliana
tattcccgagtttcaacttgctcattcttttaatctcatttaacatttttgtcatatattttggggtctgcgcatggttacagagtcagcacagcctgtcttctcgtgattctctcccagatatacaggtgtcagtgttctctacttctttacactgacatctccgtttcatggacttatctggttttctacgtaatctttgtttaacatgtagtcttggactttcacaattacaaacaggcctagcttggttttcctgtcattgctggctttagatatcgctagtcactggctgcaaatgtacaggtactctttgttgctacataaaatcttcattcaacttcttagatgtattgttcttgtacatagcaaaccaggaatttaatacttgattcgcagtaccttcctatcagggaagaccagccataaggatgtgaaagatagcacgagctggctctttagactctattatggaaaccggatgttcatgggttattgctgtgtttcctgcgaggtaattggatcattgatatctgagctacttaactttttttcaatgtatttctattgggagatattgtaaacacagagtttctcaaatagtcaaatgactacaggttctttatataaccttcttctcatagcaacgaaccaaactgaaaccttgatgaacgtg

SEQ ID NO: 5008 - DNA, 582 bp, Arabidopsis thaliana columbia
tgcaaatcctgacccgaatgtgaaaggaggagtcttgtcttacctggccgagttcaaaccattgggggatactcaaaagcctgtcactttggatttcgagaagccactagtcgaattggagaagaagattgttgatgtacgaatgtgaatacttatcatctgtttgcatcttagtttgatttcccctagcagttgtatggtgtgaagtttctcataacattggttcttgtgatgcaggtgaggaagatggcgaatgaaacggggttggatttcactgagcagattatcactttggagaacaagtatagacaggtaaaaatgctagtataggttggttttcaatttatatagttgagggagacccaccattcaaatttgatgttaatgtatagctacaattttgtttgggaaagacttcttactgacccccgccattttaatgtcaggcactgaaagatctttacacgcatcttactccgatacaacgtgtgaacattgcgcgccatcccaaccgacctactttccttgatcatatacataacataactgacaaggtttggtcctcagtagtaaggctttttt

SEQ ID NO: 5009 - DNA, 653 bp, Arabidopsis thaliana
caacattgggcatcaaagtcacacctttgaactttcttctcacccttgaatcaataccctttggcctcctccagctttcctgaatatttcccaaccacaaagtacataagaaatcaaaccaaatcaccacaaacatgtcaaaaagctcaattcttccaaaaacgacataagagactaatctggaatcaaactcaacctaatctggaatcgaatgaatattgttcatgagagaactcaggcaagctaaaatcatcattttcatgtaatatcttcatagatagagactaatgtcagatgtttaattcaaccaccatattgcatcctaaagctacaaactttaagatacagctaccaataaaaacttaaaggaacaaaacccagagattgatctactaaaatcctaaaactctgtgaaatcaaatgagaaaaagggtttaccttgacggtgattctacggtcactctggggtctgatgaacttagcagacctcttcttcacaaccttcttggtaagcaatgggaccgccatatttgcttcttcgtaagatcgatatctcaaaagcgactccgtaaaacagctgaacaaacctaaaatgtcttttataagcgtacactagggtttctgatattacattactaaatgggctcacgttg

SEQ ID NO: 5010 - DNA, 1056 bp, Arabidopsis thaliana
taacttcggcataaataataaattcgattcacaactattgaactcttcggctaaatacaatgagcgacggctcggagtatcttttacgcatgctcggctatagcacgctatataaatacgagataaattctttcagattacttatgagaagaaatttctatcttcagaaacccggtcatattcaaacagcggtaccccagctcgtttctaaatgctgctcaaagggtgaatcagatcgggtcgcaaccgagaagtttcacccaaaatactcaaactgaatcacagcaggcaataaaatagttcaggtttttcagaatccaactaagtgtttcagaatttaaaaatggataaagccatccaggcatatgttctacaagtcatcggataaagccatccaggcacaagtaaaacaaccgaacaaattaacaaaacaaaaaaataataataacaaaaaccggctcccacgtcgggtacttagtcgagctcttcagacgagcgaatatcttcggcaggcagaagcgacctagactgatcagtgacccccggctcgtcggcaagagtctcaaccgatctgtggccgcccggacttaaagaagtggggtcgggagtaggagccttgagttcctctttcagctaggtgataaaattggtgaaatcgacctcggtattggcgaattctttcagccattcctcaacctggtccttctcagttgccaataccccaccttcctcaagtgccttgatcagttgcgcattagctcgcgcctgggataagttcataaactggtcgttgatcctgtcaaggagcgacaccttctgctcgggggctttgagtttggcgataaaaaccttcgatgtctcgcgcctagccgtttgagaagcccgagccacttcgctatcgcggagccccctcgcctcggccagcatgcgtttgaaacgaaaaacctcggaatccgccctcaaattgagctcggccatcttgatggcattcgccttgttcacgaaggcctccctctcgacctcctccttctccatcttcgcggcgcggcttgggag

SEQ ID NO: 5011 - DNA, 1117 bp, Arabidopsis thaliana
ctttatagtcttgttcaggtctttacatgtttgggattcgtatgtggatattgatttcatctggtttatttggtgctttggctctgagtccccgcttgattgtttgcttgagggcaagcaaagactaagtttgggggagttgataagtgtgtattttacatgttttgagcatccatttgtcatcattttagcatcatatcatcactgttttataccatttctcatcatttatcatcactttacatgtttaggataggtttgcatgcatgttgcatatttgtattgatttcaggtgatttggagctgttgacgagctaactggaaaaagtggacctgatcatgacaaaccactcgacctagagggcgagtaggagcttcaagatctcaagagaccactcgacccccaggtcttgtagaagacatcaccacttcacctcaccactcggccacgaggtcgagtgtcctcatctccatcacctgaccatcactcgaccacatcactcgaccccgaggtcgagtctctttaccaccattacctgatcatcactcgaccccatcactctacctggaagtcgagtatcaccatcaccaccactcgactacacactcgatggcaagcttcagattcttcttcattccgcactcaaccagacactcgagcacaaggaagaaaagacgactccaactattcactcgacctcccacttgaccacatgattcgagtacagttcttaatccgtcccaatactgtgtcgttttaagtattagggtttcagaatatttggctataagtagcatgtacttcacatttttgcaaacaagttttttatctagttttattctccagaccttgtgttctagaccttttgtaatccggatttctctttatctattcagaattcagtattgagcttttggtcttgctgttacactgttgttatcatggttttcagcttgttcaacgtttatgctttctgttatgatgtctgagtagtgaataggtttctgaggatgggttagagtagtgtagaattctcagtatgctaggtaattgagtattgattgatagatcccttctggattagttgttcttaatgcctattgctttccgatcaac

SEQ ID NO: 5012 - DNA, 1205 bp, Arabidopsis thaliana
tatggcccattttgcatgttgtcctgattaggtcgggctatgcaaaatggtttggattggttgggacgtcatcactactatggggtgtgattggaaatatggtctcagtttgcgagctgacatgactacggccagtgcccgttttttcattgctggataacgggtttcagcgtctatcaacgttttactcacgtaatagatcgttttttatccctcgtgatcttctctcaccaggacactgcttatcgcggttcgggagactgccgtgtacaggtacagctgttctccttcttcaggttttgcgagtatgggtggttcggtcaggtatgctttcaattgcttgaaggcttgttcgcagtcctcattcaagtcaaactttttctcctttcagaggagctggtagaaagggacgcatttgtcggtggacctggatatgaacttgttcagggcagcaatacaaccgtttagccgttggacctctcgtgccttttttagtgataacattttgatgaaggctgcaatctgcttaggactgacctcgatgcctctttcggttactaggtatccgaggaattctcctgatggaactccgaaagagcatttctcaggatttagcttcatttcaaatttgtgtaggattttgaagcattattttaatggtggaacgtggtcctttttgtgagctgatttgtccagcatgtcgtcgatgtagacctccatcgttttacctatctggtcagcgaacattttgttcaccaatcgttggtaggtggctccagcattttttaaaccaaagggcattactttaaaaaagtaggtgcctcggtcagtaataaaagctgttttttcttggtcatctaggcgcataagtatttggttatacccggagaatgcgtccatgaaggacagtagttcgtgtcctacaatggcttcgacaagtcggtcgatatgcgggagtgggaaactgtctttaggacatgctttattcaggtccgtaaagtcgatgcatactctccacttcccgtttttctttttaacgacgactgggttggcgagccagtcagggtattttacttcccttatcgatccaaatttgagcaatcagtcgacatcatcgttcatagccttagccctttcaagacctagcttgcgacgtttctgctttagaggtcggtaggtcggatcgacgttgagttcgtgtgagg

SEQ ID NO: 5013 - DNA, 1232 bp, Arabidopsis thaliana
gatcggcctcggcaacttctgctcggggaggagggagctgcggttcgtttctttctgttcgattcgtttcccgatttcccaagatcgctggctcggttcgatctcttccgatttccggtgcggttctgctgacgggccttgtagtattgccaggcgtgtggaacacgagccgtgttgggttgagatctgttgctgctcgtcgatcctgaagttgcctcgcgccgaaacgagtagtcctgatccgtccttgggaggtagctacttcgagttgttgtgccaaggatcgatttgcctgttcttgatcgttcaccttctgcagaagttgagccatcatacttcttagttctgctagggtcacgggagcagcggcttcaggaacgtctgtctggattggagggattgggtttccctctgcatcaactgtgttaccggggatttgattgttgaccattgtgaattgggtggttggttctgtgttccgggagtaagagaaatctcaagtcccctccttctagcgctaaattgtgagagtcaaaactcgcacaatagaaattgttttaagggtttcttcaaagaacgaatctttgtgagattctcaaagaacaacagaattctcaattaccgcggacggtgttcttgattgtattaatgagaaagtaatgattttatcgtacaagtgttctagaatatgaaaataagtgtttttgccttcaaagtcagagcgtttttgatagcctgaagttgagagcgtttttgtgcgtgcccttctctcatccgttgaggtgctttatataaggctttgagccgcccctcgcgatattcttgggagatttgttgttatctttgaggcggcagtgataaatctttatcttctggagattttctcaggattttctctttgttgttaatatcctgaaatgatttccacaatatcatttccaggtctttcggatatggtatcttgaccatgcgtcgggtctatatctttcctttaggattgagatgttttggccttaagtgtgaattttcttccgagccgggtatctcttgtcggtttgtagtcgaacggctcgtttcgtgcgagttagaccgtttacccgaagcgtttacgagattcgcctcggggtggtatcctgaagtacccgaggcgctgctaaattcgggtcagaagattacctgcagggtctccaaggtgttttctaatctggctcgggatgattccttgatgcgat

SEQ ID NO: 5014 - DNA, 1038 bp, Arabidopsis thaliana
tcccttgaggacaacataaagccgagacatcgttccatgtcatcttatgaacagaatgttcaaccttgtgacaagaaatatcaataccttttaattgcagctgaaccatatgaaaccatatctttcaaagttccaagcactgagattgataaatcaaccaagtttttctctcattgggatcctgactccaagatatttaccttgccatgtgtgttttaaagccaacaagcctcagtccgccgatggagcagctgtacttccaccgccgcttccaacggcggctaatgggtattgtcccattccgccgccaccaccactgtccaacatgtgaaagtgaaactaccaatgcaatcaactctggtaaaagagtgtgctctctttgactattctgttttcatattgattcttaaagcatatgtgtttactctcttaagatgcgggatttcgtttatgtgttaactctgcctgaccgttgctttcaattacaaaattgagccagagcctgtaacctacactcaagctgtagaggatgaaaattggaggaatgtgtatatggaatagggtgactatttcataacatagaaattattctaagttttataatatgaaagactgttgaatgaaaactttgagaagatcaatatatctttgtcaatgttgattgtaaatcgatatatggaatgacatacataacattgttgctaactcacatcatgtgaacatctcacgaaaagggtatgatcaactacatttttaaaaaagccaagatgaaagtaaagcatcaaagtctttgaagaaaccttcttttaagctaaccttaccatggcctgggtaatctgatgtattaaaaaggaaataatttctcggtcaaagggctggcaaatatgtttcaacgcaccagatagcatattttctagaaatattgacttgagctgtctactgtaaattacatgaaaaaaaatcttttaactcttggaacagagcctatgaggataacagagttatcgtctgggatttgcgcaaaaaaaaaaagagttt

SEQ ID NO: 5015 - DNA, 1328 bp, Arabidopsis thaliana
tcagagatgtcgacgtcatatttgttcccatgaactggaaagatgagaagcattgggttgggttggctatatgcctggaacgtcgtgctattgaaatcatggatcctttgcgttcgcttacgcgggagtctgtggttaggtcacgtatccttccaataatggagatgctactgtacctagtcagagcgacatgcaaagattatctcgataagccttatcccgtgactccttttacatacataaggaatcaacgtctagcacagaatccaactaccggagattgcggtccgtacgcgatggagtttattgagttgtacatgcttaacactcctgttgaggacatgttttcgattgaagaagatgatatgtacaacttccgtaagggttacacagtcgacctctacgagcatggaattgggtcattaacttagttatttgaagttgcaactaaagcaaacttatgtgttttgtatgccttttggaacttgtgtttggttgtgtttacatttacttgtttgttttctaaacaatttattacttttggatgctaagcaacattttatgtagtaattaacaacgtacaaaaacaagatatcttaccaaagtaagtacaaactacgtgtccacagtacacgactgttgtgtatacaggcggtaacattgatttgacatccatcaatgtaaaattaaatttctcattgaatgtaactgtaatttccccaacaatatctccatccgtggttattaaatgggaggaagaatttgacctcttcggagtatctcatttctaagatggtcaatcccactatttccgacgacttgctcgctatgatagctaagaaagtggcagacaaaagctggttggaccttaagccactgatacgatctggcacttgtggaagagacattgtctaccgaccggatgtccttaaagacgctaacatctacagcttgtgccgtgttcccgatgacttccaagtaggaggtggccataatccaaccggaccccaaggagaaggccgcaatcgaccatttttcaaaaggtgccttctcgctaacaattcgacgactgtgtataacgaagcaatacgtgttctaattcatgaaactgacatcaatggagcacttaagctcatacagcgtcatgcacccgtctgagcagatgcaaccatcgcctgcgccatcatatttatatgtgcgtggtatgattatatgggtgggttgtttcttgacctctacacacgcaaccatcatccataggagtccgatttcaccgagatttgtgtgaggagtcctcgaggagataacaagtttacccgccgtcaata

SEQ ID NO: 5016 - DNA, 1178 bp, Arabidopsis thaliana
tgtagaggcaggcgttgatcaagatcggataggtaagggaagtaaaataccctgacaggctcgccaacccagtcgtcgttagggagaaaaatgggaagtggagagtatgcatcgactttacggacctgaataaggcatgtcccaaagacagtttcccactcccgcatatcgaccaactggtcgaagccactgcaggacacgaactattgtccttcatggacgcattctccgggtacaaccaaatacttatgtgctcagatgaccaagaaaaaacagcttttatcaccgaccgaggcacctattgttataaagtaatgccctttggtttaaaaaatgctgaagctacctaccaacgattggtgaacagaatgttcgctgacaagctaggtaaaacgatggaggtctatatcgacgacatgctggtcaaatcagctcacgaaaaagaccacgtcccgcagttaagagaatgcttcaaaatcctaaacaaattcgaaatgaagctaaaccccgagaaatgctctttcggagttccatcaagagaattcctcggatatctagtaaccgaaagaggcatcgaggctaatcctaagcagattgcagccttcatcgaaatgccatcaccaaaaacggcacgagaggtccaacgagtgactggccgtatcgtcgccctcaacaggttcatatccaggtctaccgacaaatgcgtccccttttatcagctcctccgaaagtagaaaaagttcgattggaatgaggactgcgagcaagccttcaagcatttgaaagcatacctatctgaaccacccatactcgcaaaacccgaagaaggagaaccgctgtacctgtaaacggcagtctcccgaaccgcgataagcggtgtcctggtgagagaagatcacgaaggaaaaaaacagatctattacgttagtaaaacgttgatagacgctgaaacccgttatccagcaatggaaaaactggcactggccgtagtcatgttagctcgaaaactgagaccatattttcaatcacaccccatcgtagtgatgacgtcccaaccaatcatgaccattctgcatagtccgacccagtcacgtcgacttgcgagatgggccatagaattaagcgagtacgacatagaacatcgcaccagaagcagctcgacagcacacgtcctagcc

SEQ ID NO: 5017 - DNA, 539 bp, Arabidopsis thaliana columbia
tgacatagttagataaaaaaagaagaacataaaaccagagtcctaagatcatctgagaaaaatgttaaaatatagttataccgtagttgtgcggggacggaaatgagagaagtctctaagcatatgcagaggaagctgtttcttcgagagtggatacttctctggatccactgttccaacatgaagaagcttctctgcctcaagctcaattacatgttttgcagaagcagccaatggtagtcttaacacaccttcagctacaatacaagtccctagagccataagctgagttgctggaacagttgacaacgcagaatcaacaacaacctgagaggggaataaacaaagttagactcttaaaaaagttctaattggcatttcatcgaacatcttatgcgccaaaaatgtattgaaatcaaacatcataacctacctggagactggagatggaggagccacactgatcaagaagtaaaaaacatactccggtggtggcacggcattctgaccggcgagttctgtcttatcaaagattggat

SEQ ID NO: 5018 - DNA, 602 bp, Arabidopsis thaliana columbia
caaatctcaattcctctttgtttgtttggcttcgcttaagacatgaaaacatgagtctttacctcttctctgtttcatgagaatgctgttgttctgtatcatggccaatgccgaatgtcccattcgtagtctcgtccttttgaatggatggcttcccattcacagctactgtgccatcggatgtttcatccacagcagaaagttctgtttttttatcatcttcagcgacaatggctgtatcagatttttcatcttgttcatgtgctttgtctgtattttgattagatagagctgcttcagctttctgcctctcttctttttctcgacgtctctttgcttcttgctctttcagcagcctaaacctgggatcacatggacgtgttagtacaaaaaaacagcttctaggaacgaatgatgacacattttagaagatttggttacctttcaccaggtttggggcattctggggtcaccttttcaccacccttctctcttggtattttcagttctgaaacagacttctgaactagtggttctgaaaaagacttctcaatttgttgtgttttactctttttgctctttcattttgtttttggtttttt

SEQ ID NO: 5019 - DNA, 524 bp, Arabidopsis thaliana columbia
tgatctcaacctactacttaaacagattcttccgagagattcttgatcctgtaagagaaggaagttttctttgatctggttttgatgtgatcctttctcaatgtactagtagtagtatatacagataaatgagattgacaacaaatttagtgattccagctttctcgaatgtattcaccgagcttttttcccaaaaacgaattcccgctcttgtacccaaaaagattttaccgtttaccgctcttaggcgcttgcaattgaggatggctcatctgtgacaccaacttgtttaggcttctcactagcattatctacttgtttgctcggtttcccgttctgagacttcttctcttcgtccttctttacccgcactggttgaaactgccacaaagtaaaaagaatcaaaacttgaatgagtaaatcattgtgtgaagtgaagtagaggttttgatttaatgaagaacctgatatatggagtatacacatttcttcgtatttgagccatcatttccagagatagattg

SEQ ID NO: 5020 - DNA, 516 bp, Arabidopsis thaliana columbia
gtttatcttccagggattgcatcctagtataagagagttcaggaaagctttggccacagagctctcaagcattcaagacaagcttgactccttgaaaaatagttgcgccagtgcagagaaagaggctgtaaaggaacaagtggaaattaaatctcagcctagtgactctccagtgaacttggagcactcccagctcacagaagagaacaaaatggtatctgacacgaatttagagaaggtacttcgtctgtctcccgaggaacatcctatgagcgtcttgaatagaacagatgaaaaacaggctgaatcggctgctgaaacagaagagggatatggattgtttgaaaccctggcaacggattctaagcaagctactgaaaatgcagcggctgcttcctcgacaacaattccagagaaaattggagaggttgagactgttgttccgggtaatccacgtcagctgatggaacggaatgcagtgaccacgtagaggaaacaaaccatggtggtggaagt

SEQ ID NO: 5021 - DNA, 549 bp, Arabidopsis thaliana columbia
atcttgaggaattagtaaagagaagcatggttatggttgggaggagggacattgtaacttcggaagtcatgacatgccgtatgcatgactcatgagggaggtgtgttatcagagactgtctcaggtgaactacataaatcctcgatctagatctcttgtctatattataaagaatcaaggaagttcatgggcacttttgggtaaggtttccttcagaaagatgaaacttcttcgagttctagatctcgagggagtgcaaatcgagggagggaagttgccagacgatgtaggagatctcatccatttgaggaacctgagcgtgagattgacaaacgtgaaggaacttacatcatctattggaaacttaaagttgatgatgattactttagacttgttcgtgaaggggcaactgtatattccaaacgtgttatggaagctgcaccggctgaaacatttgtgtatgcattcagatcttgatccaaaacaaagctggacttgagtactctaagaaacttgcagcaactctgggattttcctgttggaaagtgc

SEQ ID NO: 5022 - DNA, 516 bp, Arabidopsis thaliana columbia
atcgtttacggcgttgtgaagttgttgtagcctgtaatctgtctcgggccgccgacaaatcttcctcaagggaacgatttcctgctgggataacggaaaagaaatccaaaataggtgagtgaggagggttttgctttatggtctaaaccatgaaatggagctgacgggtaaataaaaccgcaaggatagagagagagagagagagatgatcgtccaacctcggactggtcgtggctgtaacgcaccaagaacctacaacgacaacctctgacatcatgtcttcttctctgtgcgtcaagaacaatggcgtcaaagtaaagagcttgatcttttccttcctgaagatgttataacatagttctagtcagggataaactaacatgacacctatcactaaatgcttagagagcgaagttctaaacctggaaacaaaggacgagatctccagcaagaactgcaacacattctgatgcttcacatgggagagaccgttgtcttacatgctttttgacattt

SEQ ID NO: 5023 - DNA, 485 bp, Arabidopsis thaliana columbia
  unsure (1)..(485): unsure at all n locations
nnnnnnnnnnnnnnnnnnnnctaaagctttagattcgctttggcggctggaaggctgtcagtcggagttcgcttttgaggtgggaaagggagagccttacgttctgcattcgctggcgcaggtagccgattgagctgatctgcaactggtactgtgcctgtgtggagcatgcgctcgtccatagcctcctgctccatgccctcgagttccgcctccagatcttcttcgtccacctgctcgccgaaccccgggtttgtgattgcaatcgcgatttcgtcgttgatggcttgttgttcccgcagtttgtccctgagtctgttagcatgccaattccgctatgtcaccagcggtacagtaagggacgtacattgtctcgtcgacctgttcgacggtcatgccgctgtgaatcttctccatagctgcaccggcggccttcatggcggccagggtctcgtggttaatattggcggcttcaatagagtata

SEQ ID NO: 5024 - DNA, 550 bp, Arabidopsis thaliana
catcgtagttgaatggtaatggaactgatttgaatgctctaaactttcccacgttgttcaaatgctcgttctctaacctgtgttcataacccaacaaagaaataaccattaagaaaaaaagattttgaggagtacatttagatagtttcttggttaagaagtaacctgaagaaattccagataccgcgacgtatgatctcaagaattgcaataagagcaaccattgtttctctatgtaagaacgagatattgaaatccagcacagtctgcaaccacgccaatctcaacacaacgtttacgacctacaaagagataaccaaaattataaagaaatcctaaattagggtttatactgttctatcaatatatcgtagttctcaccattgcaacgtagtagactgatttgtgaggaacaagaagcttctctctcaaccaagatttagatggtctatgaagcaacccccagtcataaacaatgtcccaatatgtgccgtaaaatgttgccaccccgagaaaaccaagccgctatttccaatcatttctctgttga

SEQ ID NO: 5025 - DNA, 590 bp, Arabidopsis thaliana columbia
ctactatctttcttcaaaacatgtcattttagtattcaatgctagattttcttctggtaatatatatagattataggtagaagagatatacaagtacatgcaaacaatataatactaggagaagagaaaatatgtctgaagaaaaattcccagaacgtccaggcgaaccagagtgcagctattatcttagaactggaaactgttatctgaaacaaaactgcaaataccatcacccgaagaatataacgccgagcgagcctcaatgtactctcaatgacaagggcttaccattaagacctggtcaagccatttgcccgcattacagtcgcttcggcatttgcagatccggtccgacttgtaaattcgaccattttacctaaccatcatcctcaacttgcaaatgataaatttgaaactgatattccttatctcgtgtttattttcaataatattctaatatctatgttttatttactctttatatgtatgaaaggatgttattaatctaaggatcaagttaatcaccatggtatcaaattttcatttcatgtaacaaaattggatttttcttttcaagtttcccaacaaac

SEQ ID NO: 5026 - DNA, 538 bp, Arabidopsis thaliana columbia
tataaaggatatacaaatgtcgagtaactagaggaaattaatcgggaactaaccgataatatcagggatagtgcggccatttgaaaaacggccggtcgggctttaggaaagtcattaccataaggtgaaaagttgacttttgcctcggatttcaagttattattattgccattatcggacattgagtctccaaaaacgaagaaacacggcgcttgttgtccgtaaaccaccgtggccgctgtaaatatgatggcagcaactaaccaacaagctttagacattctttcaaccatattcttcaaaaataaaataaaacaagaaattgaacagaggaaatatttattgatgatcagaagtaagatcttattcattaaagttgtcgatataagagaggccagagtttgagtttagatttgaaattgattctatgaagagtattaaaaggctatttaaaagaaagggtaatgagcacaataagggagactacaatctttttgtatgtggggaggatctttaatttagttacctgagatttgtg

SEQ ID NO: 5027 - DNA, 1040 bp, Arabidopsis thaliana
tcgtactctagaccaatctgaagaatccatgtcctcaattctccggcgagggccttggtctttcaacgattggatgtgtgtcattcaacgatggactgctttgcatacggttgttgaattcaaaagaatccctttctggattcagatcagaggaatcccacttcgattcctcaccttgaaaatgatcatttcaattggtgagcgtatgggattgttccttgagacagactttggtagagatggcgtggtcctcacagactacgtacgggtcataatcctctggaacatcgaggacccgttacgctttcagaggattttccagtttagagaagagacatgtgtcttgaagttttgatatgagaaactcaggaatttctgtaccacatgtggaatgttgaatcatgatgctgctaaatgtccaacctctggaaatcaggatcctcctcagcctggtgatgatgatgacgatgttgataatgatgctgatgatgaccatcccgatgtaccagatgtccatcccaatctgctacacgatccaatgaatcagcaatttcccgatgagaacactgaagaagagcaccataatgcttccaaaaagaggaaaaccaacgcttctacttctcagaccgactatagctttcctttggtgtgttgtgatatgcgccaagcctatgcaacagaggatacccaacactgcgttgccaaaagacagaggagagaatcagaagtgctagaagtctggaactggttcatggcaccacataaaatatcgggtacagtacgcaacaacaatgggagaaccacttcaaccaccccacacacttaccgagagggcacggtgggccagaagccaccggagccgccatgaatacagcgttttggaactactggggcttaaaagggtccctggtagttcgacgcctcaaagggattaagaaatcttattccgcggacttactctctttgattgagacaaagaatccggatgacgttgttcgggatgtggcagctcagttggattatgataatgtgaagtgtgt

SEQ ID NO: 5028 - DNA, 546 bp, Arabidopsis thaliana columbia
  unsure (1)..(546): unsure at all n locations
tnnnnnnnnnnnnnnnnnnnnnnnctaaagcacgaccctacaggcacacgcagacctcatgatgggcgacagattaattggcgaacaccggaatatactctggagcaatggctgcgctgcgatccgctgtggccacatgttttcgacgctccagcatacgcacatctacaatcgacactggatgccgtgcaaataatgcctgatgaagaaaaccgatttaatgccctgaaagcggtttttagccagttaatgacagatgcgacgctgacgccgctgttcaactatcactatcgcattagtgcccctcccggcgtgaacggtgtgcgactgacaccgcgcggctggtttgaatttaccgaagcctggcttcccgcgccatcgcaatgaatagctggtccgggttaatcgcaggcgttaccataacgcttttattgttcaagcaggattatctatgaaacgtgctgtcgttgtgttcagtggaggtcaggattcaccacctgtctggtgcaggcattacaacaatatgatgaagtccattgcgtgacg

SEQ ID NO: 5029 - DNA, 660 bp, Arabidopsis thaliana
gaaatcaacttcagacacaaatcctagacgattaccagcacatcttgccattgcattcgtaagaaagagaagtggaatacccgtgatttgaacccagaacggtatgattttcatttcggcttcggtgatatttggataccatctgtgaaccgagagcatccaatcattaaacgaccaaggtccacgtcggagtaccaaattcattgcttcttcagtctggaatttgaattgaactttgcctttgtccagaattcgcccaacacacgagtctgggaagccccaaactcttggcatctgtccaattaaggcacgaagattctgcttgcgaggatttactgtcgttacaaccacagaaaagcgattaacatgcgcacgccgggaacagaactcaggggtaagagccaccggttcatcatctatccccaaggtgaggtcttgaacggattttcgaagtctgtcactcatgatttgtgacgatagtgtttgtgggaaagtgaaatgggattgagaagaaagagaagacggattgaaggttttatagagttgcgtccatggcggtttatgtgggtagttactctcgagattgaaggaaaacgaaaactgccatagaaacggttaggcagagagtaccgtcgtcgaaattctgtaaagcaacacaga

SEQ ID NO: 5030 - DNA, 555 bp, Arabidopsis thaliana
tcttaacattgtgttgaggatggcgtggttgcagactgtgcttgatttcaatttatcgttcttacatcgagaaacgatgattgctcttcttgctgctcttgagatcatacgtcgtggtatctggaatttcttcaggtaaatttttgaccacgacacgatcactaaattctctttaaaccattttttactcaagggttcttcctttgacgacttgcgaacacaggttggagaatgaacacttgaacaatgtgggaaagttcagagcattcaaatcagttccgttaccattcaactacaacgaggaggaagatcgagatagttaactcttagattagatctaatcaaggtttctccaaagagtggggtttcaattttgtttagaacttgcttgtctctgtttgtaatcattaaagagaaggaaatgagcacaatgaggcttcggatataactatcttacctagggttatcattgtgctcgctaacacaatgtgcccaaatcagatctcaaaccaaaattagtcgataaaactaccaaacacgagctactttgactat

SEQ ID NO: 5031 - DNA, 474 bp, Arabidopsis thaliana columbia
ttttctcattcagaatctgatcattaacctcttccaagtctattgttggaatgactccatttacttccgccattatcttcaatgaaaaggcttttctctagtcaagcaatttggacagctaaaaacagtcatcagagaaaaaagaattacatataagtcgaagaaaccctagcaatgatgagttttcagaaatggtttattttctttatatgatctactcaaagagttttcagaaatcagaaataaagagtaccttaatttcgtcgggatccttattaattatctctagatttctcgagaaaaacgaaggagtaaatgtattgtaagatgacttatcgaaggcgagattattatataaagaagtcgaagtattttcgaccatgcacagaagtctgccgtagtaattaataaaatactctccacgctttccacgtgaatgtgacactacgggcataatgtggtcctttgtgttac

SEQ ID NO: 5032 - DNA, 584 bp, Arabidopsis thaliana columbia
aagctcggagttcggtatagactatggaggaacgcagtagatcgtggcgatgataaactacctttctccggctaactgttattaaagaaatctaatggaagtttttgcagctccttattcaccagcaacctcagacaagtgtaggttattaatctggtttattctcaccgaagaaagagctttgccgagtaaaagatctggagtttgtggattcatctaaaaaaccgatgaaacaaagaacttttgcgtagataaaaggacaacatccactgtaaatccaaaggagatatattgttattcatttttccctgtgtacagttcactctctatgagaaattgaatatcagtttccccactaaactaatgtcttctaagaaccaatcgaaagtttcttcagcaaaaagaaagctaatattttcttagcattggtggtaaaatttggcaatttttaccggacaatttaaccatactatattaccatccaagtacatgactaaatttcacattctgtatatgaatgatttgggtttaggacagaacactgaacacgacttatagacttagtaactgtaaccaaacatgta

SEQ ID NO: 5033 - DNA, 1162 bp, Arabidopsis thaliana
tttttattatcaaattggatatagaaaaattgcaattaatttgtagaaggtacataaatgaggtcccgctccggcaaatgttaaagccgtagttattttcttgaaggcctaatgctatcagctgaagattaaaaaaagcccaaaaacatatgggctttggtattctttataagcccagtcacttggaatactagcttatattttctttctttaaaactcagttaatagttatgttcaaatagagagaaaatctaagatgtggtgggacgaagttgccacgtgccaatgagttgaccaatgaggaaactcagtgcgttatccgtagggataatcagataagcagaatctgattttgtcaccagagtgcttttatagattacacaacacacgttcgtttctttcttcttctaacacactctgagtcttgaaggtcaacaacgtcgagaataatggcatcatctctttgtgcttcttctgccatcgctgccatttcttctccaaggtaagctcatctttttctctcttcttatcagttatcatcacttgctatgtaggaatgagactaagatccttgtacagttgtacttaattagtttcgttaacatgactatgatagtgatccattgattgggatttatgatctagtatccgagaatgtgtgtgcggttgtaaaattagtgatccatcatccatttagattaaacgttgtgcgactattgtttgtgtgatccaaacaccgatctgccctatgtaataatatgaatttatgcatggttggtgttattgaagttgtgactaaatttttagggctatgatatatgtgcagtttcttgggtggtaagaaactgaggctgaagaagaagttgactgttccagctgtgtccaggccagatgcgtcggtgcgcgccgtcgcagctgatccagatagaccaatctggttcccgggaagcactcctccagagtggctagacggtagcctccctggtgacttcggatttgatcctcttggtctttgtgagtatattttttttgttcctccttgcatgctttttaacaagttttataaacaaaattagactatatttataattttctgacaaaatttagacacatgtcagcatcggacccggacagtctaaaatggaacgtacaagccgagata

SEQ ID NO: 5034 - DNA, 509 bp, Arabidopsis thaliana
cgccatgattccactaatgagacatgcttgtcaaggagctcgtattgtcaatgtcacttcaaggctcggtagattaaaaggccgacacagtgtacatatatctatatatctctctaactcgattcatcttccttaaaaattatggcagcaacgaattttgacctagttctcttcaacagaaacttgagaatgaagacgtgagagccaagcttatggatgtggactctctaactgaagaaatcgttgacaaaacagtatcagagtttttgaaacaagtggaagaaggaacatgggaatctggaggttggccacattccttcacagactactctgtctccaaaatggcggtgaacgcatacacaagagtactagctaaagaactatccgagagaccagagggagagaagatatatgcaaactgtttttgtcccggttgggtgaaaacgcaatgacaggctatgcagggaacgtttcagcagaagatggagctgacactggagtttggcttg

SEQ ID NO: 5035 - DNA, 2059 bp, Arabidopsis thaliana
tttgcctctgttattatcgacacaaaagaatcgatgaaacgaatcataaattatcctctactactccataagcagcaggttccggtacaatctcactagattgccgtcttctcgacgacgatgaattcccgttgttgttattgttccttccgctacttccttgcgaccccgagtttctcaaaccattaccaccaccaccaccaccaccaccgcttgttgttgctcccgcttgaacagctgttacatccgacgcactctgcctccagctcccaaatatagcagcgttccaagaccctctcgacgagtttgttcttaaccgggaagagcctgaacccgagttggtatcttctcttactactttcagtgggttctcaagtgcgttcacaatgtgtctcattaatggtcttcttgttggttttgggtttaggcatgactttgcaatgatagccattgcccatacttcttctagaaggtcttcgtccaccattaatgacgggtctaagatcttggttactagttctttctcgtttgtgctgatgtatggcaaagcttcttccatgtactcttttgcaagtgcgttgtctggcgagctaatcccgagcttccccgttactagctcaagtaacactttgccaaagcagtagacatcatacgaacatattgcatttgttacacctgaaaagaataaaccaatcagatgtctatcggttaatcggagatggtatatcctgatgaaatttttattctcctaagtgtatacctgaagaagatggttcactcgatctgcaagaataggaaaagaagagacagcgaagcattagtaggtgccaagacaacatacagagtcatgttagggaatcaaagtaaaacagaaaaggaccagagagtttgttaatgtaataagcacttactgcggtaatcgaagtaaacgagaaattctgctttgataagcatcaccttgagcatatgcctcgcttaggcttccaagacgtacctcaaatttatcatcaagaagtatgctacttgcttgtacatccctatttaacattgaacacaaacacacacatgagttctctcgcttttcttcttatcaggcaatagagcatagatcaacaagaagtaatttaggagcaggtgatgtcattgggcttctccatctatgaaactatacactaacaattcttgaatagatcttactaattatgaacatgaaaggttatatgatactaaaaacagaatcaacaaaacaacttccaatagtcttgctatgtcaatgctttaaaaaatatcaagattatattacgagaagctgagcaggagagtagtacctatgaactagaggcggtgaacactcatgatgcaaataagagagtccctcagctgcaccaagagcaattttcaaccttgttatccaatccaaagacttcaatccatcaccttcgttttcggatttcctgaacaaggagctagccaaatcaccgtgtctcataaacttgtataccaagaacttttggctctcattctccaagcagtgtcccaaaaagggacccagcctctggtgtccagccttactaaacaactccagttctgatatatagccttcacttttaccttcccgcacatcgatcttttttataacaacgggtataccattttccaagaaaccacgaaacagattccccgaatgaccacgttttatcagattagcatcattgaattcctctgttgcctgaagaagctgctcataagaaaatgcatttccaagacgtgacaaatcaaaggtttgtgctcctttaggtggttgttgtgaagcttccccggcaggttttggcctgtcgttatttcctctttgtgccgctctgcgtctatggcgcatgcatagaaccagaataattggcaagataacaaaaagaagaataaaagcaactccaccacccactgctgccaatataattactgttctgcggcttatccctgaagaagcatttttcgatgtcggttgtgtcaaattaggacgtccgaaatcattcaatatattggagctgttagagcttataga

SEQ ID NO: 5036 - DNA, 959 bp, Arabidopsis thaliana
cttcgatctcttgaacactatattttctgtatcgaacaatgctatgtcgagaaaatgaatcgctttctttcaataccttcatctctgcgtgtacccgtctctttgcttccacttcagcaagcctgtttgcagcttcagcagcttccaaggctgttttcgcttttgctctctcgttttccactattgacattgctgtttcctctgtcatctttagttcctccaatcgtctttcctcttctgtcctcagcttttgcagctctgtcgcctaaaccaaattttaaccaatttatgaatcaacctcttgagattaagaacaacatggagatatctatatatataataattacctcgttccttgcggttaaagcttctctgcaagctgagctatacatatccatagtttgtttcagctccaaacgcagtctcttcatttgagcttctacatcattctgcaacaaaacaaacattttcattgagtgtaacggaaaaaagaaatcggatttaagaccgataagtaagaaacatggtttaatttcaacttataccaagctctgagatgaaaatgaacaagaagttcttccactttcatcagaaaccgaagaagaaccattgagataactcaaatctgtaaacttgattcctaatctatgagacccaatgctctgctctgagctcgttgacattcttgaggttcttgctgattctggtaaatcgtaggtgaaggaagatcggtctacactcggccttccggagctgatgaaggaaaggtcggatgattcttgttgagaagcactgatgaatgagaactcggactctgaatctgaaaaatcccccattaatttcatatgtccatgtagcggtttcggaagccctaatctacaaaaatcaaaaccaagatttaggaaattgtagacgtaagagattctgaaattttcaatgctaactgaagaaaacctggt

SEQ ID NO: 5037 - DNA, 1026 bp, Arabidopsis thaliana
ggtccacgacgaagtaccaaattcattgcttcttcggtttggaatttaaattggactctacctctttcaaggattctgccaacacacgagtcggggaaaccccaaactcttgacatctgtccaattaaggcacgaaggttctgcttacgaggattcacggttgtgaccaccaccgagaaacgattcacatacgctgcctgggaacagaacttcggagtaagagccaccggttcgtcatcaattcccaaattcaggtcttgaacggatttacgcagtctatagtcatgttttgtggtggtaaagaacggggggaattgaaattagaaagtgaaaggagggaaatcgaattggaggatttatagagttggaaccatggcggtttatgagggtagttactttccgaattggaaggagaatgaaaactgacattataactgttaggcagagagtaccaccatcgaaattccatagaaaaaaacggattccgatcgtcggaaaagcactccatcgtggagaaatctattgatgaagaacgggtacgaagtcgcccagaaaatcgccctcagagagcattgccattcattcatctattctacaaattgttattgaacatatatgcttaattatttatattggttttattcgtaaaaaattaatatgtgttacataatatcgactcacatgaaagtcttatcacaattatacatctagctttcttatgagaatatatgaagcacttgtcgatgtatgtttagaaagtgcacaaataatgagaagatctagatgagctagtctctcgacttccaaatacatcagattcataatgcaccgtaacaccagtctcaaccgtatccatctccactcgtacagttttaacgatctttattattattatattgagactataaattaatatggtgtcaaatgtttgaccacaatggagacacacacatgtatgattatatcatacaaaaataaagatggtaaaatttaatatatggtaaacttatttataggggatcctct

SEQ ID NO: 5038 - DNA, 1781 bp, Arabidopsis thaliana
cgactcttatagaataattattcttaacaatataatcaataaaaacattatatttcatatctaattaacctaacaactaatctaaaatactatcaataataacgcttctataacaacaatcatggatctccactttcacatgtggtacaatcactacaagaaaacagtcgatttgcgagggaagaattactcgtcaaatccttccgcaacaagctaaaagcaagggatttgcgaggacaacaagttcctcgcaaatcgctcctcgcaaatggtaaaatgtcgcaattctctcacaaaatttgcgagaaaccgttttcctcgcaaaacacacgcaattagcgttctagtactttcctcgcaattgctacgacggatttgcgattcttctttttttgcctagcaaatccctagcagcatttgtgatggatttgcaagtcttctgcaacgtctttcagatatattaaggcttgattagtggttaattagactctaattacctagttaattagttgttaattagtcctaattaataaattatggcttgcttagagatgatttttgcttcttaaataaagacacaattgaaagctgaaatttcacaagttatataaaatgtatactacaattataatgtttgaaaccataatcaacttgttctaaaaagattacaaggaaaaagagaaagacatttttctcaaaatactgatgatggagaggattctgttgcaaggttagctagggtagcagcaactgtcttctcattggcttgttgttccggagctgtagctacaggtggttcatttgcgctaaccggtctagtctgtgtcaaggaaccacatcgaagaatggcagctaaagctggatctttctcagcaagatagtcaaacaggatatcgaagctgttgatcttctcagcctgattttgaatgcaagcttcagcggcaaccagcttctgagaaagtataactggatcatcactaggaagcgttggaccactatgggctgaggatgcttcaaactgcagagatccaaccccataaatccttcctttctttctcggagcaacctgcaaagatcacaaaaactcacaaggacacaactaaaaacaagtgagaaaacaagttcaacacaagacaaaagaattcaaacacaactagacaacgctaatagtgactatcaagtacacaacacaaccacacttgcaatagaaagcaattcaaacacaacactacacaaagtataatgaataagctctcaagatttcagacaacacaataagctgtcaagatttcagacaccatacggaacacaataagctgccaagatttcagacaccatacacaacaaaataagctgccaatatttcagacaccatacacaacacaataaactgccaagatttcagacaccatacacaataataagctgccaagaagaatgacaccatacacaacacaataagctgcaggatttcagacaccatacacaacacaaggacttgaaactaaagacacaacaagcacaaaagaaagagcacataaaatttacctcaataaatatcttgttcttggcatgaacagaaagtccacctgatccagtgctctccggattgtcccctgaacccatatgagactcttcctcttcaatcctagatgtcactttcttgtagatctcctctgacttcccatcgatcaagcttccatccgcttttctgtgtgtctcatctagcagctcaaggaaatcaggagtttttttctccagtcttctcacactggggatct

SEQ ID NO: 5039 - DNA, 1442 bp, Arabidopsis thaliana
taaagtcgtagctccatagtgagtttataaatatcatctgattcttgctcttatcaccgaatgtcagtgtactgattaatgcatccttgtgcggacggtctaaaccgttggtatcgctttcatgaaagattacttcgtcatttggtccattaaatggccgcgcccagttacgattcgcgtcggccttcctttgataagccttgattgatgccgccgtgtcttgacaggaagccgtatcccctaaaattgtgaaaatccgtccccgatgcagcctctggctcatcgtcgtctgcttcgcgattacctcggcctcttttgggtccttcggaattcgccgcgggggctgcctgctcgggattggccacagcgttgacctgctcggtttttcctttttccgcttctaagtctttgatggtcaaacctccaccgatctctctggctaggaattttgctgacaaccttgctctgaggctacgacatctggaagtatgatggccgtaactcttatgcaactcacaatatttctgctcgtttcctgcgggttgatcctttgtccaagtgtaggattctcgaccgcgtcctcgaccgcggccttgtcctcggcctcaggcggcttcgcctcagggtgtatcagcctggtaattatgggctctggagaaatttcgcccttcatggtgaacgaatgtcccgccttgagcaccctttttgtgattcggagcactgggttgggatttatcgatgcgaggcgttttcttggacggttcgtgtcttttggctaatagttccatttcttcttcatgggatacgttatccaaggctcggtgcaaggcgtctcggattgtaagtggtttggacaaatttaattcctttcgaaattcggatttataccacagtgctttcttcagagtagagagagccgctaagtcgttgattccttcgactttggctagggtagatcggaattttgcgaggaagtctcgaagtggctcattaggttgctgagatagtgaccataggtcggcgtctgatgtgctgggatcgattagcaccgaatattgcttcaggaagagtgtcgatagctcctgaaaactgtccacagaatttcctttgagtcttgtgaaccaattcagagctggccctttcaagtgctcgacgaacaggtgacagagaccggcgtctctttcttctggtctgaatttggctcgggccaccggagatgatgaataacttcaagtgtccttttgggtcggaagatccgttgaagtactcgattcttagttttcctggatccgagattatcgcgttggaaatcatgtgtgtgaacggtgtgttgtgggactcttccagaatgcggtcgatgttcggggccgaggagactgcgttatgcatttgggatctcacgagcttcatctcgttctctgccttggctagggagagcttga

SEQ ID NO: 5040 - DNA, 1458 bp, Arabidopsis thaliana
catcaacttggttgcagcagataaagacgaatgatcctttttacatcctttatataagggatgttttgatgcatctaacatattaaaaaactttcgttcttctaaattaggttcctctactctatcactattcccatcaaacgagtgtatattttcacgaaaagcatcattcaccatctgaacggtacctacatttgtatctatttttggatttggtcccactaacctatcaacaggataatgttcgctacaactaccataattcaccattcactacaaaaaaacagacgttaaccgactacaaaacaagtcgtttcatagtcgtaaacggaataatacgactattagacgactaaacaatgagttgtatatacatagtcactaagcaacatagtcgtatgttagtcgtatgttagtcgtaagtttacgactaacatacgactgctaaacagtcggcaggaaatagtcgttgattggtcgtaacatttggcgactatatggcgactatgttacgattaattaaactatatatgggggatgattcttgtagtcgtaaaattgtcgtacttttattgacgactactttgcgactattttacgatcaattgtactggattgtgggcactgttctggttgtcgtatcgtagtcgctaaatagtttacgacaactttacgatgcctttacgatcactaaacgactttgttatgttgtcagataataatcggtaatattggtgactgttttacgactatgatacgactatgttccgactattttacgacgactttacgacgacattttgtttccgaataagaatttggtcatatcttgattttttgttggttggtcatcgaatctgataattcggtttgtttgttgtttgaaatgctataaagtgtaacaaaaagacatttattattgaaaatcctatcaaatacataaaacacaacttacacctaatgttcaaagttctaaacacacacacattattgttcaaagttcaagggaaaagggactgaaatctaaacctattgatcattttgtggagtagctggtagaggctctatggttgtcgaagattgagaggccatgaagtcaaggaattgcagatctgtttgtcggagatgattctccactaaggacaagtgttcgagcttgtccttttgctcagccgtgattcgggctgtctcagcttcacgcgcagcaatctcagaatctcgcttctcattgtaggcagcctgctcctcaatcttgcgttgcacttccttcagccgttcttctaaatctagaaaggatgatgatgattctccagggagattgcggttggcacaacctaatgtgtctttgagactgccaagtccataaggattgcctcttgaatccctttcggtggactgaaaagaaataaagaagagattagtgacagaataaccataaactcaaagtcaagaggttta

SEQ ID NO: 5041 - DNA, 1083 bp, Arabidopsis thaliana
ccctgttgatggaaaccgggtatcttgatttctccccggtttagttatggtatccggcggtaagattattaattgtcttatctcatcaggaataatccaaactgatgaatgccaatatccacgtattcatatggtaataatgcgaagttaggtcttccatttcgagaccatctaatatccattcggtccccacaaagttttgggcagcggcaatcgcatgtacacacgggtacttgtcaacatcaaaacgtcggcaagaacaagttttccttagcaagtcaacagaataagacataccaccttcgccaatgacgctgtattgacgttcgaagctgttaagctcggtcaccggcatcgttttcccaattgggcataaggagtgtatttcgttctccacaaccggcacaagaccccttgtttcagaatatttaacagactccttcctatgtttgttaaaccattctgaaattttctcaattatcgcatcaagcaaaggtaaaaggaagtatttccttgcacgcttaaacgtactgttcaatgattcacacgcattgctcgtgtctatattatacctatccccttcaaaatagcacctagcccaattttccacaggagcccatctatccaaatacgtaccgacattaggaaatcttctcctaaatcgagcatactctctcgtgatctcaaaatgagtataaacatgtgcgcatgcaatgaagttagccgccgcttcttccttctcagttccactcgtactttaacgttttgagacaaatgccaaacacaatggccatgtctcgcgtttggaaacacatgcatgattgatttgatgatgctctgatgtctatcactcacaaaaaccaaacctggttcatctggtataactgttttcagcttgttaaagaaccacgaccaactagcattgttctccctatcaattacagcagacgcaatgatataattgtgatgattaggatcttgggctgttgcgaaaactagcataccgccgtatacggtcttaagaaaagtggcatccacaataacaactttcctcataactttgaacccttcaatgcaagcacc

SEQ ID NO: 5042 - DNA, 603 bp, Arabidopsis thaliana columbia
tccaggattcagttaatgcagatggtatatgggccaatgtcttctcaaaccaccgcacagctttaccatacctgaaatgtagttaatgttgttgactcagtttactagatagttatcttctccccattctataatgtagctttgtcattactagcatttggaaatttcggagataagcagactgtaaagagaagaggaacgcactctttcatatgatatgcaacaactccgagttcattataaacaagtggatccgaaggcatatcgcctttgcttgcatgaaaaactagacaaaatagaagggattaaagtaaatacaatgttagcaaaacactaagtcatataagttgaagacaccacacagcaatttctaatttgttacctggtccgcaagcttgtagctgtgagttcgcatatactccattccaatgtacagagttggcaaatgacacctggaacaaaataatatcaagattcaacctgtaaaaaacaatttgtaacgtaataagaagacttctacaatgcttcagggctaaggatgattcattttagtccaagtgacagatttacagcactagttttgaagaaaccaagagtacttga

SEQ ID NO: 5043 - DNA, 1048 bp, Arabidopsis thaliana columbia
gtggtatacttttggtcaagtcctaaaaaataaaaaaatatgaaacttattaatatcgtaaacttacgactcattaaaaaccatacacaaacttatcaaaaattattaaccaacacaaataaccataatctaatatataacaaattctaattttataaaaattaaaagataaataagatatttaagatgcagtgtatttcagattatatcctaatttgttatcaatagacgaagaaattgttatgtttcaaaaaaaaatctttagcaaataaaaaaaggaagctgaaaaataagttagaagtccaaattaataagccggttgcatgaaaaaagaagtcagaaaaaaaggaaagtacaacatcggagagaatctgaaaacaaacactcataatagcagtatataacagacaaacaaaaaagacaaaaaacggttaagatctaaactctctccgtacaatccaacggttgtcactaaactaggatggctttaaacctagtaactcacataaacccaaaaaccggacccgtatttgccagttaccaccgaaaccgaatcaaaaacccttaatttcgacctaaactttgccatattaatacaactctcaaaacacaactctcaaaacttcccctgtttggtccgaaaccgaaactactaaccctaatctctcacatcacataaacaatcacttcacatagccgcaaaatttaatggcagacgtcaaggttcaatccgaatccgaatcctcggattctcatcccttggtcgactatcaatcacttccaccttatcctccgccgcatccaccggttgaagtagaggagaatcaaccaaaaacatctccgactccgccgccgccacactggatgcgttatccacggtgttaatgcctcagatgatgtacgcgccgcgccaccgatgccgttctcacttatcatcaatatccgaatcatcaacactattaccatcaatctcgtggtaataagcatacaacgcttttaatggtgagaataaactatttgggttggtgatttgcaaactggatggatg

SEQ ID NO: 5044 - DNA, 1324 bp, Arabidopsis thaliana
ggaattcgtagatcaggcatccatttgaacgtcttttgaacgctggatacctatggtcaaatttccacagtagccagcgaaaaccgcataggggccaacgaattcagaagggatctaacctaatcttaaccacctgactaacctagagattaccctaatctaatccatcctcaagaaccctaatcactactcaagcaacataactaataacacaaacccagaaattactgaaatcataccaaaatgtagatctaaacaagctaaacaactttatttaaagaactaaatgcaaaaatgaaatatattaagagtaattaagttttgaagattcaagaacacaaagaaaaactaattgataaaagctagatcctttggacaaatcccaaagtgatatatttatagtaaaatgttggaaaccctagattcactagaagacaagagacttgaggcggtttgggcgagtgttcgaccttggggatcgagtaaagagggtgctgcaaagtctgagcctttgtgtttatgctccgagtgatcaattggtcgagtagatgcattttcctctcctatctgtatgctcagatgtctggttgagtggggaatgaggaggatctgaagacgctttgatagatcaacaagtcttgtagagttggtcgcccgtgatcgagtagaggatcgagtaggagggacgagtagatcgatctgctacgtcctctgaggctgccttgatcgagtaagtgggtcgagtgaattgttgcttcctctatggctgccttgatcgagtgaactggtcgagtagaatgctctgctgcttccctcttggttggatagagtagagggtcgagtagaatccttgtaaactccttatgcacctgaaaatacaccaaaacatgcaatatgtatgcaagatgatcctaagtgtgcaaaataagctaaatgtgatgcaaactgatatgaaacaatgagtgatcactaagctaaatgatgataaatacatgtctaaaatgagtaaaatacagtgttatcacttaacccattcaaaatctgctagatccagaaaaacactatccgatacatgatcacatttaatcacatatgtgttgtggttaaaacccattcgatagctcaaactcgatatcttgtacttgtcaaacgaaggactcaaagtgaaggtatcaatgatcttccaatcaccgatctttagtgaccagtaaaacttgccaatataatgctttctaatggaacaatgcatcttagatccctatatcaaaaccaagtaaacaaaaacacataagaacttgttatatatttcaaaccgaaatatata

SEQ ID NO: 5045 - DNA, 547 bp, Arabidopsis thaliana columbia
attgatgcaatataagctacattgaagtatgggatctgtatcgctgaagattggcgatggaaccgcaagattcaagcgatcaacgcttttttcttcagctatcaacctccttatgcttttctctatagtcactacaaatctctttgcactatacgccttctcgtctcggtctcaatcccacacgccacaccctcttcattccaacaatgtctctttggtttctcaacatctctcactcatcctgcgaggtcacgtctttcacctggaggtagcttgaatgctgatcggtttgtgtagaagagatcagttctgttaaaatcgcctattgtagctgtctggttctacagagggtgtcgatcgacaccctgatgttgtcggtcgacacaaccgtgaaagtctgccatggaaacgtgattttcaatctgaaggtacctgaaacacaagagaccaatagacaaagaaacacgtgaataggtggtagaaaagtagtatctagacttaaaatgacacctagtctaatgatgaactaaaagagaatttcggcaac

SEQ ID NO: 5046 - DNA, 1371 bp, Arabidopsis thaliana
tccattgtttttccgacatgctcactgaacatcttgttaaccagccgtggataagttgctcctgcattcctcaacccgaatggcataaccttataacagtagatacccctatccgtgataaataaagttttctcttgatcttccggattcatcatgatttggttatatcccgaaaaggcatccataaaggataacaattcattcccggcggttgactccacgagacgatctatgtgtgggagtgggaagctatctttcggacaagctttgttgagatctgtaaagtcgatgcaaactctatcctttccattcttctttttgactacaacggtgtttgctaaccaatctggatattgtacctcccttatagatccaattttcagaagtttatccacttcgtcatttactgcttttgctctctccactccgagttttcttcgattctagaatcacttcgatcacaacatcatccactttctgcccgctaggaaatcttgggattactcctttctttgcgggtttcgttaattgctattggatttttaatcggtggctagctaaataacaagttctcgaagcttcttgatctgtctgaattgtttccactccgctcggagttgggaattagagacattggtgataggtagaaggaaccgctttcatttgatagatccacggagttccaaaaaatatgttataggctgctggtttatcgaacacgacaaaatccgcaatcttcgagatctttccagccaaaactggtggcttgatagttccgagagacattactgattcactcgtgaaagccactaagggtgatgggggtcctaccacgtcggctctgcttatccccattctttccaaagtgctaagaaaaattaagtctaccgaactgccagtatcaatgaggatccttgacacttcgaagttagcaacatccaacgtaactacgagtgcatcatcatgagatctttcgaggtgttgcgtctccttctcatcgaacaatatcgaagtgctttgaaaatctacttcctcacttaagcttaatttcaaatgaacgttacggctatgtttcttgattacactgatggaatcacggcagagtttagatcctccgagaattacgctgattttaccctttgaagttcttggtccctcttcgctcgccggccttggtcttttagagttttgattctctggattatcccttgattcatgatattgtttgatgaagttctccatgtcgaattttgagagatctccactggcctataattctgcgagatgcctcttaaggacgctgcagtctttggtcagatgtccatgactcggtgtatatcgcagtacgagctttcatcacggatccaggta

SEQ ID NO: 5047 - DNA, 576 bp, Arabidopsis thaliana
tcaatgagaagatgagtggtatatatgcaaaaacctggtgtatattgggaagaggatgctccaggtagaacagagcaaatgaaactatcagcatgctctttgtattcttcaagtgacttcactttctgaatcagaaactccttgaaaaaacaaaacaaagtcacacaaaaaatgtttcataagaattcaagaaccaatggtctaaatttggaatctttgattagtttcaaagatttgtataaccttggagagaaggattctagcaccaacgtgcttattatcccaactaaacatgttatcaaactcatcagctccaaggatttgtccattagctttgatgtaattgagatatgttgggttatttgttgctttttgtaaccaagcagctccccataacaattcatcctgaacaaaccaaaaccaaaaacatgacttcaatttcagtttttttttccgagattacagttacactttaaattaatatagatccaacttcagaagtttaaaatgttgaacctgatatccagagtaagaacagtagaatggacaacttctggggccagactgcactgtagg

SEQ ID NO: 5048 - DNA, 1498 bp, Arabidopsis thaliana
ctgacagacagacatctacacccatacccacactgtacttgaaccattggcattcttctacaagtatacaccaaaagaattcgcgacgcttgtaactaatgtaagtcgatcattgtgtagcatatgccatttctttcgaggaaattcagcacagttttggtgaagcataaaatcacaatcaatacattcatagaaggattggagaccaatggggtaggtgcaagcactgcaccgcttgtttccatcccggaaaaagccattaacatggaatctaaggtagtgctctttgtggctgaaatgttgtattatgttgccatatattaccacgtatggctttatatcttctatctcttcagggactccttcgagttctttcccgttccacacatcatttctagtagcacatttcgaatgaatgacatattgaggacacctctggcaagaatacccgccccaggtccaatccaccttttggtgacaaactccacatacagaattcacaacaccaagaacagatgtgcgagcaacacgatgatcatgccgattgatgtttatgaggcgtggaagggaaaaacactcttgatgtatcatgaaatcacattgaacacatatgtaagggcttcgatctccatttaacccacaagcattacatgtaaaagaatcaagtcttgggcgaaagatgagttggtgagcatgagctttcaaatccaaaatagactgtggtggtgggtttaaaagacaatccatatccaagctgaagttacaagcggaacaatgataaaacaatttctctttaatcttttgtgcgcaaagacgacatttaccatcagaatagtctggtggttgacctatgtggagcttaagagggtgtaaagggtggtgagagtggtttacctctaacaggttttttgtgtctggcgaattccatacgcaatccacatggaaggctaaattacattcatggcatttgtaaggaaacccatacataacctccccacatttgctggcaccacaatcgaccaaggtccgcttcttgaaaagggtgagcttgtggtgatgcgtctcggaaatatcaataacctctggtggtgggtactttgcacagtatagatccacatcgaagtcacatatctcacaacgatagaatagatccttgatgctcttgccacataaattacatatatggtgtggtttacattgaagcttaagagtgtgaacagagtgagatgtgtgtttaatatattcagaggactcgtcaacacatttcctatgaacaaagaagtcacagatttcgcagtaatatccaccactggtaaattctgagcgtccacaacaatcacctttccgctgatcatgagaaggcatcatgacatgcttgtggatcaacggtagtgacactccctctgattccatggtcgcctactacaagattgagaagaagaagaagaagaagaagaagaagaagaagaagaagaagaagaagaagaagaagaagaag

SEQ ID NO: 5049 - DNA, 826 bp, Arabidopsis thaliana
agttacatagatatataagcaaactttgtcagcaagtacagagagaaactgaaaaaggcaacgtttttaaggtcaaagcattaaaagtcaacgaaaacagaatctaatcaagagatacataaatgttttgcaataatgacagagagagagaagcaaacctcgtcgccggaagcaaaagaagaattaagataagcctcatccatccagtgatgcaaatcaccaacccatatggttttattctcaccattaaaagcgttttgatgcttattaccacgagattgatggtgaaggtggtggtgattcggatactgatgataaggtgggaacggcggcggcgcgtacatcatctgatgagggattatcaccgttggtggataccgcatccagtgtggcggcggagtcggagatgtttttggttgattctcctcttctttcgccggctgttgcggcggcggaggcggaggaggtggttgattgtcgaccactggatgagaatccgaggattcggattcggattgaatcttgacgtctgccattaaattttgcggctatgaggtgttttgtgatgtgaagtgattgctatgtgatgtgatgtgagattagggttagtttcggtttcggaccaaacagggcaagttttgagagttgtgtttgagatatctattaatggcaaagtttaggtcgaaattaggggttttaatccggttattgtggtaactggcaaatacgggtcgggtttatgggtttctgtgtgtgttctgctaggttttaaagatacggtttagttctgacctagtttagtgaaaaccgttggattgtacggaga

SEQ ID NO: 5050 - DNA, 234 bp, Arabidopsis thaliana columbia
gtaatgcttatatcctcggcttttacagggaggtagtttgcatggaaagtttgtagatgcaacaccgtttcgtgatgcagtaaaaaaaacaaacggagaagaggagagcaagtccagtttgcttgttgatgatcttggctccatgttaaaggaaaaagggttcaaccattatggtaccgagacattgtatagtgggtatttaggagtagaactgaagtgtgagatatttatggg

SEQ ID NO: 5051 - DNA, 558 bp, Arabidopsis thaliana columbia
cgtcaccacccggaattttgacaagctcattttcagcagcaaccttagacgacccaatgtcaacatctttgtttgcaactgatcctgaagttgtcagatcaccaggaacaggatgaggaatatctgataccagtttatctgccttgctcaggttatataaagcttcttgattcttaagaccagaagaatcctctgccttgtgggtctcaactgtgtgcaaattcatctcaccaggggattgtgcgtcaggcacatttgttctcgttgttgcagaaggctctccaactttatgttttaatagggaagtctctgaaaagatctctttcatgactcgagcaacatcagttacatcagcagtttgtttcctagcagaaccaccagtaccagaggtgtctcttctaatttcctgactcaaactaccagaagagtgaatatcgggtgcaactgactggctgaagtggggttgttctttggcaacagcatcaaacttagctttggtgcctgataaattaccaccttgacctctatttgtggtgttaacctgtactcttgcagaag

SEQ ID NO: 5052 - DNA, 513 bp, Arabidopsis thaliana columbia
cattcttgcctttctacaaaaatttatcactgttgtcgtttatgttctgccattgctcctgtagcacttcttcgatcgagtttaagactggattcctatgtcttcgccttcgacgtgttctccacgcattcgcaactgacatctttctgcttattcccatatctatgactcctctctctccggcgacctcagcaagtctacccatatgggaccatgagtcgaaccagaatgaggtcgactctccattccccacttcaaccttacagtggcagcatctctgtacttaattatttttctccaaatccaagaacccatactcgcactctctttgactgtctagaacaactcttgtttgaggaggtacatttcaatccatttaacccagagtgagttaccatgagagagaattctccataccaactttaagcagcacacgtcgtttatctctttcaagtttcttaatccaagaccccactctgtttttggtttgcagacttggtcagaagagagttt

SEQ ID NO: 5053 - DNA, 545 bp, Arabidopsis thaliana columbia
  unsure (1)..(545): unsure at all n locations
nnnnnnnnnnnnnnnnnnnnnnnnngtgatttccttatggtttgtggtgtacatgtcttaaaccaggtgacatacatgggcaatatagtgatttgttgaggctatttgagtatggtggcttccctcctagtgccaattatctatttcttggggactatgtggacagaggcaaacagagtcttgaaacaatatgtctcttactagcttacaagatcaaatacgctggcaacttttttctactaaggggaaccacgaatgtgcttctatcaataggatatatggattttatgatgagtgtaaaaggaggttccatgtgagagtatggaaggtttttactgattggtttaactgccttccatgttgcggcgcttatagatgacacaatattgtgtatgcacggtggactttcgccggatcttgaccatttggatgagattagaaacttgccgagaccaactatgattccggataccgggcttctctgtgatttgctctggtctgatcctgggaaagatgttaaaggatggggaatgaatgatagaggt

SEQ ID NO: 5054 - DNA, 856 bp, Arabidopsis thaliana
tatcttgaaacaaatgttttttctagaaaatcaaataaaaaagaacagagggagtataattttggttccctatttagctatataacaaactaacccatttctattttactaattatcttttaaaaatatcttacatctaagcttttgaattttaatttggttaaaatcctaacaaacaatttgatagaaatactaaactagtagtaataattaggtatatctaacttgtgtagtaatttaagaaaatatatatatgaaattgggaaaaatgaagtaaatggtaccttcaactgaagggtgagcaaatgcttcccacaacataacttcaagatcctctcccctaacatattcattactcgaagagacatcaagctctgtgaaccaaatgggacgaccaagaacagagagcatatcaagagcagaacaaacaatagctccaacaggactatctatatgtccttggatcccaatccctcctacagttgctccttgagcttccaaatcaagtacaagttttatatacttctcgggagacgaacgcgggtcatccccgtcctcaacatgataatcgttaacgaaaagcaaaggagatggatcaagcttatgtgcaatattgaacatgagtgctcttacaccttttccaagtctatcttgatagaaagaaccatgaagcatctcgttgttgacatcatagtgcttgaatttacctttgtaccgcgtcaaaagatccgtgagacgcttttgtaccgcgttcataagatcggttttgttaagctggcgaacccatggctgaactgtggattcaacttccagaagatacaatgtcctctaacgtttatgttgttccaatgcagag

SEQ ID NO: 5055 - DNA, 605 bp, Arabidopsis thaliana columbia
tttttgttgttttcaaaattctctaaccaaaataaagagttttcaatttgaccaacaaaaacataacaggagacactgagtatctgattatgatataaacagagaaagagagtaatagggcattgagataatgaaatgggtaaatgattgtttcacaccaaagaaatatgtacaaaaaccatgacctgaagagaagtaccaaacacattcacacaccagacatccatgtttttcgaccccaaagaagctactcttgttcttatcgtcatcatcaaagtaattcacctttttgttttgatttaacggtcgttttgggcgctggctcggatgaatgaatcccgccgctgtcccccgacaaatgcttgttttagtcgagagattggccccatcaatcttccagctttctgcaaccaaagagtgttgttacatagttaagactcacatcataccatggaggttcgaagaatagtgatcctaaactaaatacctcgtttccaatgcttgatcccacttttgctgcaaaatctgccactctcctgttgccaatgttgccaagaacacaattccattacactgcggctatcagatggacaaactgtattagt

SEQ ID NO: 5056 - DNA, 532 bp, Arabidopsis thaliana columbia
  unsure (1)..(532): unsure at all n locations
ctnnnnnnnnnnnnnnnnnnnnnnnctaaagtgccagcgtttaacaatgctctcttcgcgatagtgggcaaccagcagccaggcaggattgaccgccagcagttgctccaggccgatggacggcatggacgcacccgccatcgcagcgggaacgttcagccccagagaggccagcacgctgccggtccaggtctcctgagtatgcaggttgaattgctgttcgcgtgatgtgccaaaggcacgcgtgtccctttgggaagctggctggcccactgcgccatcctctctttatgttgttccagacgtgcctgcatctctcgctttttacccaccatttcgccgatgatagccgcagattgcaaattttcagcgtaggtttcgttgcgggacttaagcagcagtaccggcgcgatttgctgcaaggcgatgtaaaccccgcatggcgactgctgtcggcaatgatcaggtctggtttcagagcggcaatggcttccaggctcggctgcgcgcgcgttccgacggactgccacgg

SEQ ID NO: 5057 - DNA, 594 bp, Arabidopsis thaliana columbia
  unsure (1)..(594): unsure at all n locations
gaggatccctcaccgtttcataaactcttacaaaaggcatagccaagaacatgacaagcgttggtactatggccaggagaagaatgaaagtagcggggttaccttcaccaccgcagaccgcatggtacaactgaatcagaattgctccacttagtcctaaaaatccctgatgttcaaagataaacacaattagaggaaaatgagtcagtttttggatacatcaagctgagagagtanacaacaaaaagactcaagtgaaacagactaatcaccatctaggatgcaaacaaagctccaaataaaaaaatgtgagtcttttgtcaataaaggtgaagtcttttgagacttctaaacacacaagatcgaccaaattgtgtttcaacttcacccaatatgatgagtctttaacaaagttacaaactttttacctgcataataccaacagcagtcccaccatattgagaaaagttccgagcagccgtcacaacattagccgtattgaaaaacggcaaggagtgaccagccaagaacacgaacaagcacatcaacggcacaggcggcggcgaatcaacccaaccacgaagcccaaataaa

SEQ ID NO: 5058 - DNA, 810 bp, Arabidopsis thaliana
catatgcagaagtttccaatcgccgtaagaactttctggaaatgtccaacttggtttgtgctgtcgactagatgagccgctttaccgaagaaagtatggactccagtggctatcacaaccgcttcaatctcaccttgcttgcaggtagaaccggagaaaacttcttcccctggacctttcgttgcgggaagagattctccggtcaaagcagattggtcgacttttaaaggatcaccttcaagaagacgtgcatcagcaggaatgatgtcaccaagcttgatgctcacaatatctccaggaacaagaatagaagcttcttgctctgaccatttgccatctcttagaacctggtcataacaaaacaaatattattaaaagcttgtaatgaaattatatgtaaaccaattacttatgccaaacattttcaagttagacaactactaggtgctaagaatctaattatgtaacatagttaaactcgcgtaattcgtatgccaagtatacagtaaacatacacgtaaatgctaatgcaaagaggagtatttgaagggagtttataaagagggaccttagttttgggagcaagaccagccataagagcagcagcagcatttccagcattgttttcttcgacaaaactgatagttgaattgataaccacaagacaaacgatacctgcaaaatcttgccaatccggtggctttccacagcattagccaaggcaatagccatgattgcagctgcttccatgacccaagagagagggttcacataaacccaagaacttgagtacttgctttctatttattg

SEQ ID NO: 5059 - DNA, 570 bp, Arabidopsis thaliana
  unsure (1)..(570): unsure at all n locations
nnnnnnnnnnnnnnnnnnnnnnctaaagaggataagtcgaaggtgagaatacgcgccattagccgcgtcccgacatctgcacccagcacaatgaccagagccggtgcgagggctaccagatcctgagcgacaaacgaggtcaccagcatggtggtggcattactgctctgtaccagtgcggtaacccgatccccgcgcaaaaggcgagcggctttttttcgacgctccggctaaggacagtacgcaaacgcgcgccgaagacgcgcattacgccggttcgaacaatatgagtcccccagaccagcagggcgacggcagaaagcaggtgaagcagcgttaacacgagttcaggttctccttatcgttatatgttcctgaagcaattgaatgaccaaaggaccggaaacacgctgactggcatctttactgtgccttttgacattcgtttttccggctaagattatccagcctgttccagtataagtgttcatattaataaagagcagggcctcattgagcgcctgtttgttgtaggaaagtgcagattgtgaacagccgcgtcatcccaga

SEQ ID NO: 5060 - DNA, 637 bp, Arabidopsis thaliana columbia
aaaaagctgaggcgcaagaaaagatcgtgagtacattttttgaactgaaaattccttatctctctatttctctttcactcatatgttttgtgagtttcaaaacaagcaggacaatcagcatggggttgtaaccagaggtatttgcctgtctgaagggcagattgtcaatagtgtaagagcttatagggggtaacacttacttgagactaaaactagattggattcatgactttaactctgctctggtccacatatacaggtctttaaaaagccaaccatggggccaaacggcgagctagtaagcttgggtacagaacctcaaaaggttgttggtggatgtgaggtcactgcaattctcatcctatatggacttcctaggtacaataatcttttttaagctcatctcatccttctaagtaatctcacgcaaatagactaaatcaaatctcttttcggacacaggttactaactggatatatcttggctcatgagatgatgcatgcttggcttagactcaatggtactactagtacccaatttgtatttgccaatcaatatggagagagtctcaactaaaagtgctatttggtttgatcacaggttataggaatcttaagttagagctggaagaaggaa

SEQ ID NO: 5061 - DNA, 370 bp, Arabidopsis thaliana columbia
  unsure (1)..(370): unsure at all n locations
nnnnnnnnnnnnnnnnnnnctaaagagaaatatagacgaacctggtgaaaagccatgcgcgatgaagaccaaatatagggatcaacacgatcaagcactgaatcaacaggcaacgttgacgttctatattcgctagaaatatctgcacctaatacctaagctaccaatatccccaaagaaggtgtagtttccagcgtctcaacgttatcaatgttgaaagtatcaggggaagcaagaagtcacgtctcaccccgaaccatcaccatacgcagtacagaactcaagatcttggaatactcagagatcatatgtctccattgcgtcgtactcaatagcgagtatcaagttatgagcagccacaagcgagtca

SEQ ID NO: 5062 - DNA, 665 bp, Arabidopsis thaliana columbia
tgttcttacgatgactgcaatgattgtcaacatatatttcaacgcattgtatccgtgtacggattctttttcttcgcataatctgcgtatgactgcaaaaaagtgaatacatgtaagttatagattcggatgtgacagaatcagtgaaggcagtaataaaaaaaggaagagattgaattgtgtgaaacctggaggaagcggacgcagtagggtataacagcaacgacaaagtagaaggcattgtaaacaccatgactatgacacttgttttgcctctgcaagtattctcctaagccatagtagcaaatgaatagctcaaagctccttatggcttgtatctgaacttatcaaaacaaaaaacatcagtctattattctgatcatttattgtcatttttcagcaaacattaatgcaaatatataacctgactggttaggtggtccccaagaaaaaatctggaagtgtgacctgtgataaaggataaaatcatgaagatgaatattgaataacatccaggagtcaatttaatacgattacctcgtagaggggggcacatatacagtgaaacagtgatcgtataaagaaaaactgacttgagcggtatatgatgttgaaaggacaaaaaagtatgaaaagaacaatctgcgaaaaaaaaagagatgttt

SEQ ID NO: 5063 - DNA, 1836 bp, Arabidopsis thaliana
gatgtatctgttgtccaagatgacccaaagccttctgcttccatgatgaaaccaacgggactccgtgtgccatcgccaaaagttggctactttgacggagtaagttcccaaattcatgaaatcctttacatatgaactaggaagtaatcagagtaacatttgacaaagaaatatatctaatccttatctatgtggaatctcattacgtatatgaatatttgttgttaacaggcgaggggcagcgttgcacgaacacccacgggatcctgtactggtccggtaagtggcttgtcaaaacatggagcttgtagtcccgatgaatttactccaagtagaactgcaaagtcccaacccacaatgtctaaagcagcggttcgtccagtttcaaggagttcaaggctgattgtctcggcttcaccaaagcttaccaacaaaaggtattcaaaagtcagtgcagaggaacaacttggataatgtagctacagttatgaagccaaataacttgcaacttgttataatataccataagcttttaggtaaaagaccacatggactaagtgctttgtcatgtatagctttgagattcacttgcagtctggtttgtaatggattttctaaagtaaacaataccaactgataatatattttagtttccaatcgtcccattaatttgaaaccttgttttggctattgtatttttcataatatgtactaactaatatagtactgactactgagtaacaatggagttcagcttcataaatgttgatcagagtttcagctagtcaatagaaagaaaaacaaaagtagttcacgataggcaacaaaaacatgtctacacattgaaacttagggaaaaaaacaagcgaatattacagacaatggttgtttgtttttcctgaacttcaatggatcatttctgacttttcttcagtaacacaccaattttcttcagcatacttccattcttcttctttggtgatgacaattcatcatcagtttcacccatataaggcgacatgttgacgtttctcctcctcaacggactctctaacgatcctgttctctccacgtacttcccgttactgttattgttgttgttaccaccagagagcatagtagctgcggcttcagctgctttcctccattgatcacactgaaccttgagtctcctcagctcagcttctagttcggtgttggtgacttgtgccgcccctagctgttctgtcgcattttcggctctcttcccgctcttatctgcttcctctgtcagactcccgagctttgctaaggcctcgtcgatagccttgttcttctcactctgcattgtctccatttcgctcctgagactctcgtattgcgacattacgctctgtagctccatctccttgtccattagatttgctctcaactccatcacatcggattctagcttcttgagttcaccggtatcctcaggctcgttctggttcaagctgttctccaagtttaagtatacttcttctttttctttgattttcgagttcagtatctcgttttcatcgacgagtatcctgagcttagcttccttatccatcaaccgttcatgcaaagaatctctttcagctttggttttcttcagttcttcccccaactcagcctctctctgtgcatatccggattttacttcatcgacttgttcataagcagttctgatctgcaacgtgctctggatatactcttcatggtaccttctctctgttacttccactgcagatttcaactggctaatctcttgccttgcaacatttatctcttccttgagctcttccactgatgatgagtcccgttagcatt

SEQ ID NO: 5064 - DNA, 542 bp, Arabidopsis thaliana
ctgttgcagctccatgttgtagtgtactaccattgacaagagatacctgatagacacatgcttaacaacaggtgagaagatttcattataatcaactccttctttctgtgtaaaacctttagctaccaatctggctttaaatcttggtgcctcaactccaggtattccagcctttctagtgaacacccatctacaaccaatcaatttaaccttttcaggctttgttacaagatcccaggtgtgatttttactcatcgacatcatctcttctttcatagctgcattccacttttcccaatcaggatccaaaagtgcttcctggtaagattttggttctggcttaccatcatcttctgagtaataagcaaagccaaccatgttcgactcattgtactttggatttgctttaatggttctgcgaaccctgtctctgaccaactgataagtactcagatcttctactgcatcagaatcttcttcttctgattcttcttggtcttgactgtgtgtaggtgagttaaggactggattatgacttgtag

SEQ ID NO: 5065 - DNA, 602 bp, Arabidopsis thaliana
cgcaaaaatgggaagccaacaagcggctgtttcgttcctttccaatttggcgaaggctgctttcggtcttggaacggcggcgacggtgctgaatacatcgcttttcaccgttgacggcggagaaagagctgttatcttcgatcgattcaggggagtgatggatcagactgtgggtgaagggactcatttcttgatcccgattcttcagaggcctcacatcttcgatatccgcacgaagcctcacacgttctcttcaatctctggtactaaggatctccagatggttaatctcactcttcgtgttctctctcgtcctgaggtataacgcataacggttcttcatttttgatctagactcgtttgatttctctgaattgaggtttttcagattcatttgcgaattggatttagggtttagggttttgatgatctatgattttcaaaatttgtttcgaggactaggtattgtagaatcgttattaatttggtgtgtttatgtgatgtgaattgttgtgaaggtgtcgcgtctcccgtacatcttccaaactttgggtctagagtatgacgagaaggttcttccttcgattggaaatgaggttttg

SEQ ID NO: 5066 - DNA, 1526 bp, Arabidopsis thaliana
gtaacccaacaaagaaagattgaatttttgttacctcagcatgaggctgaccagctttgaggatgaaacccttggccaacaatgtcaccatctttgacaatgacacaacctaccataggattaggacttgtacacccaattgctctttttgctagctccacacactttctcatataaaacgaatcatcgacttcaacatcttcttctcttctcatggcagccaaaactggattgctgaaaccagtctgagatttatgtaatcttttgaagaaacagtgatttgggctctgaagtgaagtgaggttgaaaatgcggcgaggatttgaggagagtgatggtaagagtggaattgaggttcgaggagtgatcgaaggaatcgaaattgggagacatgagatctgcatatcactattgaatcttgttcttcactaaaatcgaacctcgaagattaaattgcggattcgggccgtctccgtcagcagcggtgagaatacagccgaaaccctaacatcaacggtggtagagaaatagagacgacgacgacgacgagaagattggatttgtaattgaaagagtcggttaagactaaccggaaaccgtaacagtcataaccatcggtttactaggctattttaaattttgttttagacagttatacatatccggtttaagaaacaccaatgaattggggtctcaagggccaacagacttgtctcaatagagataagaaataaagaaacccaaaacgcaagaaacggaaaaaagcatacattgttgattgtatttggggtctcgcccttctcaagaattggggtctcgcccttctcaagaagctcgttagctcgctcctcttcgtcaagctcttcagatcgcctttaagctcttcaagctcctcggctcgtcctcaagctcctcagctcgtcatcaagctcctcagctcgtcttcaagctcttcctcagctcgtccaactcctcgtctagctatcagctcatccctcgaaaacaaaactcatctacctcctcgcctagcggcagttcgtccattgactgcatagtccacctatctcgtcgtccagctcgtctagaccttcagcaaacaactcggtttatccaactcgtctctctaccacggttcatccagcttgtcgcacatctgccggctcgtcaactacctgccgacctacctccaatgacgagcctagctcacttattctaatatgaactacgtgtggtttgacccctttctaatatggactacgtgtcgtctcgcttgactatcaccgagacagcacattgtcagctcgcccgtctcacgaagatcgtccgtctcaaatagctcgtcagctcgtccttctcaagtagctcgtcagcgagccctactcaagaagctcgttagctcgctcctcatcgtcaagcttatcaactcgttctcttcattaagtgccccagctcgacatcaagcgctccaactcgtcatcaaggcgtgggcgataacgaggtcggtacaatagatgacgccgagtagt

SEQ ID NO: 5067 - DNA, 595 bp, Arabidopsis thaliana
tcaataatgcatactttattagcatcaaaatacacaccgcaaggattagtcatcacatagtttggatactgatagaagggacttttgtatatcaggacatactaagacctcatttagtggaagagtacctgaatcagaagaaatggtggtggatccaacatgtgtgatgggtaagtatgctccatcgccaacaagaactgtgtcactgccgttgtagggtgatgcagcttgtagattatttgtggaagaagtcacatgagctgtagctgcagaatcaggtacccactctttaccagaactgtctgaaacccgcagagaagagaaggcctgggcagtatcaacactttgatagttgtgatcaaatctgttgtaacattttagagctgtgtgtccagtccgcccacagatctgacacactggacgctctcctgtgttattggagtttgtctgatgctgagagaaccccttccacgcgtagagtagcacttctgccgcgattttgaccatagcctcctctacctttacacaggttgccggaagtgtagttgtctgtgtatcactacgttgagtgttgaaagcatgtgaggatggcagt

SEQ ID NO: 5068 - DNA, 1516 bp, Arabidopsis thaliana
accgatgtcttaacccagccttcttcaacatctttgttctggaaatttccattgctggcggtatccagaagcattctgatccgtggtagaactcctctataaagtgtgctgagcagagaggctttcttgaagccatgatgagggcattggttggtgtaacccttgaaacgctcccatgctctacagaagcgttccaccagtcttctgtgaaaagccagagatctcattttctgagtcttgcagttctggcgttgaagaaaaactttgctagaaaagccttcttgcaatcatccaaggtggtgattgagtcatggggcagattcttctcccagatgtgttcttttttcgcacaagaagaatggaaacaaacggagcttgaatccgtcttcactgacaccattgatttttgttaggttgcagagcctatcaaattcatcaaggtggtcgagtggatcttccactgggagaccatggaatttgttcccctgaatcatcgagatgagaccactcttgatctcgaagttgttgttctggatagcaggaggtgcaattcctttcctctgacgatggtcccgtgtgcatctccagcaccaatgtttgcagggccattttgtttattttgttcgtcagccatttcgagtggttgctgaggtacaaagttgattgtgtttccctttctttgagttcgcgagctatgcggtcgatgttgtcgttgaaaaggaggttctggttgcctgttgatcgagttcacatacagcagaggtgtacctggatcaagaagacaacaagaaaaacacacagttagtaactgaaaagaaaattgaaaaagaactagatctaagcaagtctgaaatcgccaatgtaacaaacaaacacccaatcggcaacggcgccaaattgataataggttttttagtcaattatcctaaaacaccaatcatgtcgttgtagtattttaggttgtcaatctaaatgggtgtgatgctaacaatcaagatgtgatcaaaagtcactaagtcaagccaagcataacaggttttggtgtgttctagcagtcctaagtgaacatgcagaaaacagaaaatcaaacagaaacagtaaaacactcgaccaacacagctctttgcagagcactgggtgaggtcgagtgacaggtcgaaaatgaaacagggatactcgactgcacagtctgttgccagacaactgggtggtcgagtaccaggtcgagtaacagttaaagaattgcagaaactaaacaacagatgacaggatgcagtaaacagcagtaaagtaaacaataaaatcaatcagacaaagaattcctaaggatggggtaattgagtagtttcgtttcctcagtttacaggtgattgacatgctcaataaattaaccctagacaacaagttcattcaccaaatctaagtgccaccgcaacagagattctcaagctaacctagtctcagactcaatcaccattgacaagacctaacctaacaagcattacgaagcaacaag

SEQ ID NO: 5069 - DNA, 565 bp, Arabidopsis thaliana columbia
ctcggcttgaagattttatgaagatggtggaacacgaggcgtcttcgaaggtatctcagttcaatgacagtttatccaataatcttttatatttcgatagcagttttagctaaccatttgtttgtttgtttttttccttaaaaggctggaactccgcatttccgtaaccgtaccaacaagtgggaggatggttcagtgtcagagatatcaggcgtggttgatccagacaggaccagtttcatatcagatgggacgtcaacgcctctgtcgactgcaagagctcatgttaggtctcactctgatgatgatctggaggaggaaatgtcgcccaggcattcaggagatcaatcagaagaatactgcaaagaggtacaatgcattgagatggaagaatcgaccagagacattaataacgacagtgaagaaaggacagacgcagaaacacttttgggacacaatgcagaggcaaacggtgaaacaggtagtgctcaacacaggatcccgtcaagtgttagaagtgtcaggaggaggaagagttggagccgtggagataccatgacaggca

SEQ ID NO: 5070 - DNA, 1305 bp, Arabidopsis thaliana
gggtaaggaggtttccccccgcgaaactgggattcctgcccaggtccccatagatctgacaggtaccgtctccccgaccgatcctactccgagaactcgtctggatttcgcctttttacaggcacctgcgaacgctctcgtcgaaaacctggcaacagaaaacgaaacaagcacaacgcctgccttcccaaggctaccggccccacctttattaccgatgggctgttcgccccctaggtacacgtgtactagaaaccaaacaaccgcatccagtttccgcattcccgggaactcaacgcaacaacggacctctatcgctaatccgccatctgttcctcagataccaggaagcgacttccttaacagtccccaagcaccggtcgatccgcgtaacgtcgtggatatggaaacattccgcaattacgcagctcaaacaaacgcgaacatggctcaaatgcattctcgaatgcacctagctgtgagcgatgctcccgacatagatcgcgtgatcgaagaaaccaggcgcaccccgttcacggataggatcgcttgttttcgcctccgagatgtcgagagactccgtttcccagaatacgacggaacgagcgacccaaaggctcatctgagatccttccgtttcgctataacacgagcgtacctaacagacgaagaaaacgaagcaggtcattgccgtttcttcgcagaaaacctcgtaggtcacgccctcgaatggtttgctagcctcgaagggaactccattgataccttcgaccagctcgccgccgctttcttaaaacaatattcggtacttatcgaacacaggacgtctgaagccgacctctggagtctcactcaacttcagaacgaatccctgcgatcttacgtcaaaaaattcaaagcaatcaaatcgaaaattgcaaatcgaaaactgcaaacctaaacgaagaggtagccattgcagcccttcgtaacggcctttagttctcctctaggttccgtgaggaactcactgttaggcaaccagtctctttagacgatgcccttcacaaagctctccacttcgccaaagccgaagaggagcttagtgtgctggcccttacgattcaaagaatctaaaacgcaaaacgctccccttgcaattaagaagcccttcaaaaaggaaaaccaaacgcaggggtagcataccttattcgcaatagacgaggcagctgagaacgagagtccagaacttgacctcggaaaatattgcaagtaccacaagaaaagaggatattccaccgaggagtgtcgcgccgttaaaaaggg

SEQ ID NO: 5071 - DNA, 1419 bp, Arabidopsis thaliana
tcaaatattttttctgcaatcgagaagaacgataagatgaacataaatgaaattggtacttctgaaagtattacttatgaaatgtgtgcaatttcctgggacaggtaatagtaaatacatgtgttacaccactgtccctcgtactcattgaagttctgatggtccaaccaacactcaccatagtccttgaactcccaggagtttttgtatgtccattggcgacgtggaccaacctcgttgatatggaacattagtttatctgcaaataagtcgacttcactaaatttgtaacaccttcgcttgtactaaatataaaattccacagaattgatctagcgcaactatggagcatgatgtaaagtagaccagcatgtgggataacgtcctttatgccatccaatatagcaattgactcctggagctcaaacatatgaaatgccagcactaacctctgaagatatagggcgtacggattttctgcggtgaggcatttggtataaaacatgtgataactagacgattcttcagccatatgaataaaaaagggggctagtcgaacagaagaaagagtttcacttgaaaaaacagcggcttttccatctggtcctgattgaatccaagcctttaacatatctacaccgtcctcaaaaactaagctgactattttagcagctacgtgatcaggcatgtggaaatcagggaacggaggaggctgagagaaaatgagtaccaatgttaacactaaattttggaggctatatacgaattcaaaactaaatttcgcaatttttggatcaatttcagtctatataaaatgagtgcctcaattggattgagaatttttttgagtaaaccttacctgtaggttaaaatgaaccaaaggttgactaagaggctggacggcaaattgatttcccctaacaggggcaagggcgcttgggggtcgccagtaatgtctagtaagggacattggtcgagggtggatacattttcctttctcgcagacgatttttggcatttttgcttatcgaataggatagtattgaaagtgaacaaatatcgatctaagaaatttgaagaaaccccgataattaaagaggagcaaaccaggctgaagggaaacggatttgagatcgtgataaaatgggaaccctaatactctggatcaatgaagagggtggggtgtgggggagcgatgggttactgaatataattagtgggtcctacaaatattccaaaaaattgttcatggaaataagtataataaattagatatgtccgtattaacacgtccaagaatatatatacgcatggtcgataatatattatatagacgtgctacagtgatttgttacagccaattcaaccgggattcatttatggggatttaggttctaattttttttttcatttttttcg

SEQ ID NO: 5072 - DNA, 543 bp, Arabidopsis thaliana
ggagaaagaagagttgcagaggaacaccgcggcgctggagaaagagcggtacatgaaggcggtgaaagaggtcgaaaccgcgaaacgttgctcgcaagagagttttgtcagcgacagatcgcggaggtgaatgctttaaggacttacttggagaagaagaaagtgatcgatcagcttttagggactgatcaccggtacagaaaatacacaattgaggaaattgtaacagccacagaaggattctcgccagagaaagtgattggagaaggaggatacgggaaagtttaccaatgtagccttgatagtactccggcggctgttaaagttgtccggctagatacactggagaagaaacaagagttcttgaaagaggtatcggttaaattatgtctggtttcggttaactcttttgatttgatccggttgatttattttcggtttggtaatatttctctataggttgaggttctaagcaactccgacacccacacgtgggtctcctcctcggagcttgtccggagaatgggtgtttggttacgagta

SEQ ID NO: 5073 - DNA, 1456 bp, Arabidopsis thaliana
taaaattataaaattattgacaataattgttgaattaaagatgaacccaggaacaaacattaattgcgaacgtacattgatgctcaagaagtgttgatcttgtttatttccgaagtttggagccaagataagcattatcgtgtaagtaatgaagttttaaaaaatgtttttgttataacacactatgatcttcaattgtgttcgaaatcaactttgttttttatagataaacccagaaatattttattttcaattttgttggttgaaaatgataaatgtgtaaatatttatgttttaagtgtgtatattgaaattctatttgtttttgtagatataatcatgttttcagttgcatttactgggtttctcctgaatttatgatgttgttgggtaatggatattcccgtattaattatgatcggtgagtggagatgcaaagaagaagaataaaaatttaaactaaaggaatacatgtttggtcgctgtgtacgtgttaaggaaaacatgacgtacacggaatttgtacgtacactaagcgaggctttcagtttgaagtccacagagatcaatcccataattagttactggatgccgggagagatgttagtgatgatagatactaaacgccctcctgtctacattgacagtcaagtggggttgaatacgttctttatgattcgtggtaggtatccttctctcaacttgtttgtctcttttattacaaccgtcaagacactcaagaataatgtctctaggactcatggtgacgatgctgaaagtgaccgtgtttcaaatgttgatgaaaataatgaggccgtatatgagcaagacgacgttgaagacgataaaacagatgaggatgaaaaggatggggataacgaagatggtgatgggtatgatgattatcagggtgacgatggatctatggggggaagtaccctcgatcctactattgatggtagtgaaagtagtggcgaagattatgattacaacaagtggaacgatgtaattgtagaagaatatggaatagggaatgttgaggagaacgtcattctcacaccaggggaattcagtcgtctgttggcagagtgtacgtacacaagtcagcgtgtacctgacggagataacatttctcactcgggtgaccgtacatcagttgtgactccaagaagtatgtgtcaacatggtttgtaccaatgtacgtacactatagattgggaagtatttttaagaacagaaaaatcatacaacaaacaatgtcttatctcagccactgccaatattggtttaatattgtatcaataaatttttcttaataatttaatgtacaaacaaagatgtacgtatattattacacatgtacatacattaatttaccaacaaaaatgtacgtacattatttcaccatctatttttatttaattattatgtatgtattgagattattgagatataa

SEQ ID NO: 5074 - DNA, 435 bp, Arabidopsis thaliana columbia
gaactagtgacaaatattggagtagatgcaagtattttttgggtatagaagtggcaagaagtaccacaggaatttatatctgtcaaaggaagtatgcgttagatatcatttccgaaaccggtttgttgggagttaagccggcgaattttcccttggaacaaaatcataaacttggattgtcaacatcaccacttctcacggatccacaacgatatagaagattggttggtagattgatttatcttgcggttactcgacttgacttggcattttcagtacatattttggcacggtttatgcaagatccaagagaagatcactgggctgcagcattgcgtgtagttcgctactgacagctgatcctggtcaaggggttttcttcgacgttcgggtgattttcaatcacaggatggtgcgactcggattgggctggtg

SEQ ID NO: 5075 - DNA, 564 bp, Arabidopsis thaliana columbia
cgcgtttcaatggaggagtgatttcatcggcggagaacaaggatgatggaggagagtagtcgtacggtggtgaagtgagacggaggagagaaagatcaatgtcgtcgaggctgagattgttgttacgctcttgaagttcttcttccattatcatcttcttaagtcttcttgcttccttccttccttctctgattgtcaataatttctctggaaaacgaaaataagtttgagagaatgtgaagaaagacttggaagttgaaaagtatatatagactcggtttaaagattccggttcaattgcggtttaaagatttaatattttttactttttaaattttgtcaaattaaattaaaccggttcaatttcggtttaaaaaccactccggcgataattgtgacatcctaacattgaattatcaccgccggactgatgagtgtcgccggcgatcaccgttttagtcttcctctcccgccggtactcttattttctcttgctctcacgaaccccctgatgtgtgagctgaattactaatcttgctgctctgtttccactattcagaagtg

SEQ ID NO: 5076 - DNA, 1352 bp, Arabidopsis thaliana
ccggtaaaagtaggaaaacatatataattgcatcacatctcttcataattagaatcaacgagttggtgttgtgtcgcaatcatattatgtatcaattattcgatttttgttgtgttttcattatattgcaattggtcaacttgggggatccatcaaccttggtaaccacaaagactaatatatttcgatcgtatatttataggtgtttagaatctttattatcgtgttttacttatcatatctctcaaacctaattaaattttagtatgtgacacttttaattgctggatacttttctgtttttatttttgatccttaaaataggtgaagatatacaagatggaagcaactatgggaattgggatcatggtttcctacaaaacatggaatttggagagttttatgaagactcagtcttctattattaatgtggaactgtaattaactacgagtccacgactaaaaaagaaaaacaggtaaagcaatcctagccgaaccatggtcgccacacacccaattacatggaacgacaatgtttctatcaagtcacctatgaaatatccaccgcgacaaacgaatatccaccatccgtcatattgaaatgtgtgaagagtcatatggtttgacaattcctagaggcaggaatcaagaagttttgaaccaaagttctagatttaaatatgttcatccccaaagttctagagttttattcatccccaatttgttaactatgaacacacttagtatatcaactatacgaccattaactaaaatgttaatggttaacagattgtgatggttgaataacagattgatatgcacatattaaaataattgacattttgtaaaaccataatgaaaacgcaattttcggtttccttctaaacgtatgttttcattttctatcaatcaacttgagccacaaagactaatatatttcgattgtacattatcgtattttttaatcacatctctcgaaccttaatagatttttgtttgatacacttttaaaagcagactatttcttttttatccttaaattacattagaaatacaacaacatggaagcaaatatggaatcatggattcctacaaagttacaaacacatggaattgcgaaagttcaaacttctgagaagaagacttagtcttcttttattaaaataaaatggtaattacgatttaaaaaaaaagaaacaaaggaaaaaggaatctgaacagaaacatggtcgccacatgcccaattacatgaaaacgacgcatttctacttacttatagaaacgccgtcgatcaagtcaccgatgaatcttttaaccgcaagaaacgaagatccaccgtccacagcttcttt

SEQ ID NO: 5077 - DNA, 965 bp, Arabidopsis thaliana
gcctgaagcaactttaaagctgttggagaagccctttgtagttattgtgtgttgttaactgtcttgtcttcactgcttgtgttttatttgttgctatactcaattgagcatccgtgtataccttttatttagcaggctgatatctttccagagggtgattgcgatcctagtgtcttggattatattccgaccatccgggtctggaagctttgctgatattgggccaaagagaaacatggaagatgaacacattcgcatagacgatttatcttctcaagttggttccctttttgagttgccgaagcctagtgctttctatgcggtatgtatcgttgcttccttataatctgatgctcttttaagtatacattctgacttgactttcctctgcttaggtttttgacgggcatggaggaccagaagcagcagcatacgtacgggaaaatgccattaggtttttctttgaagatgagcagtttccacagacatcggaagtgagtagtgtttatgtggaagaagttgagacttcattgagaaatgcgtttcttcaagctgatctagctttggcagaggattgcagtatcagcgattcttgtggtaccaccgctctgactgctcttatttgtggaaggtacgtgtttcattcagttttgtttagttctcaatctatctttagaatcttaagagatctcttgcgcatatacgaagatgtgcacaaaggtaaataaatctattgttaggatcttaagagagctcttacatatactagattgtaagtatataacgtgtgacatgagcaatattggctatggttttatacttttggttacctttgtgttgttgtctttggggttaactgtgatttctcatgggatcttatgtcttgtcttttcagctcttaatggttcaaatgcggagactcagacggttctatcaggaaagcagacgatagcatgctgagccat

SEQ ID NO: 5078 - DNA, 484 bp, Arabidopsis thaliana columbia
accaaaataaaagccgaaaaaatatcaaaatcaccatcacataatgtctacgaagatatcatataaattctagaaaagcttgtatagacacaaatgaagaactcagagatcaaacctgtaaagcaaatgagcagggctatatggagtccgatcaccagaaaacatagcagagaagataacatcaagatcacaaggcaaacacaacaaacccattgttcttctaggacaaagatcacgattatgttgaccactcaaccaaaagtttctcaaaggaggagcatgaacaagtgcttgcaacacagcattcataaaacaagtgcttcccagattgttcaaacctctcaaccccaaaggaaacgtccatttctcccttcgatctcgaggtgagaccaaaaaattcgaccctatgatcaattgcgagtccaatctcctcttcttgttcgatctaaccgcaacaacatcagcccctgatttaacagacata

SEQ ID NO: 5079 - DNA, 513 bp, Arabidopsis thaliana columbia
tgtggtaccatgaccacgcggcagggttgaccagagtcaaccttcttgccggtttgttaggctcttacattctccgtcatagctcagtcgaatcgcctcttcggttacctaccggacgcgaattcgatcgtcctttggtcatctttgaccgatcttttcgtaaagatggttccatttacatgaacgctacagggaacaatccaacgattcatccacaatggcagccagagtatttcggcgacgcatcattgtgaacggtaaagcatggccgagattaaccgtccgccgccggaaatatagatttcgaatcacaaacgctagtaacgcaaggttcttccggttcttcttctccaacggtctcgacttcattgtcgttggttccgattccgcttatctagcgaaaccagtatcgaccaaatctgttctcctagctccgtcggagattgtcgacgtactcgttgacttttcaaagtcaacatcgaaaacggcaattcttgcaacaatgcaccttat

SEQ ID NO: 5080 - DNA, 560 bp, Arabidopsis thaliana columbia
cttcgtccttatcatctccttgctcttctccttcctcgtctttcctcttccgtgaactgctcctccaattgttaccttcgttaaccgaggatgagttatcatccaccgcatcctctccaccagaaacagctgcaccaccaccacctcctctatgttgctgctgctgtctctcgccagtctcctcaatgctcccagaatgttccggtacactccattcacttctcctcttcctaactacatgctgccatatgttcttaagtgcctccatacgtacaggcttgataaggtaatcaaccgcaccgtgcgttactccctttagaaccacactctttgaatcatccgcagacatcactagttaaacgaatacaagatcaataatctataagaaaagattcaaacttagatgagatttgagggagtaaaaagaacgttactgataacaggtaagtccatctctagaccaacatgctcaagaagcttgaaaccgtccatgtcaggcatatgaacatcactgattactatatcgaatccatgtctgttcttccggagcagagacaatg

SEQ ID NO: 5081 - DNA, 492 bp, Arabidopsis thaliana columbia
ccggtggatacctaggcacccagagacgaggaagggcgtgatcaagtgctgtttttgctgaaattctttcggctggattgtacttgagcatattctgcaattgtacaaacataagctcaatcagaaagatttaaccaagcaattcagcttaggaaaaatagagggaagcagaagcaagaggtaacaatattagagcaactttgcaacaaagctatggtcatcagggagttatgtaccgtgagaagatcaactccttgaggtgcaagagaaggaacagcaagagttaagtcttgcggctcccacttagggtaaacatgccagtcacgcagtgtggagacacacggccattgctgctcagatggtgacatagcaacctccatgcaacaaataggaaccattagtaaagatcatagtctctattcaagaatgctaaatccattgaataattggtcaaagaaacctggactatatagaatcagttgttcgcaattg

SEQ ID NO: 5082 - DNA, 589 bp, Arabidopsis thaliana columbia
  unsure (1)..(589): unsure at all n locations
nnnnnnnnnnnnnnnnnnnnnntaaagtgtgtccggcactttcacgtactgatcagcttcgtcgccgaggatctctttcgcatcgagatcccaccacgcctggatgccatcgacttcaacgcgttttgccacttcttccatcagttcaagggtacgcggatgcagctcttccgtgtctttgtgcacgaacagtgacatcggtacaccccaggtgcgctgacgggagatacaccagtcaggacggttagcaaccatcgactcgatacgcgcctggccccagtccgggatccactgcacgcctttgatctctttcagtgactgcgcacgagacctttctgatccatgctgacgaaccactgcggcgtcgcgcggaagatgatcggcgttttgtgacgcagcagcacggatagctgtgctgcattttctcaacgtgcagcagcgcgcctttttcctgcagcagcgcaacgacgatgtcgttcgctttgaagacgttcacgccatccagcgtcggataagtgcccggcagataagtgccgtccgggccaaccgggttagcggtttccaggccgtatttctgaccgatcacata

SEQ ID NO: 5083 - DNA, 594 bp, Arabidopsis thaliana
atatatcaacttgttggtgtcacaattttttgaaaatatagctttataacgaaatgattaaatgcagatacacgtagagcacatgtgcagcaacgctctagcaatgatcaagaacatgactgatactgacatagccaacttcgagcaaaaagctaaaataacctcaaacaaccgtaagctcaaggaggagaatcaggaaactacggtggctgtagatatcgccggagccggagaactagactcggagggatggccaacttggttatccgctggagataggaggcttcttcagggttcaggtgtgaaagctgacgccaccgtggcagctgacggtagcggtacatttaaaactgtggctgctgcggttgccgcggcccctgaaaatagtaataagaggtatgtgatacatataaaagccggagtttacagagagaatgtggaggttgctaagaagaaaaagaatataatgtttatgggagatggtcggacgagaactattatcaccggaagtcgaaacgttgtagacggtagcaccactttccactccgccaccgttggtaagcattttaattacttaactttttgacaaaagat

SEQ ID NO: 5084 - DNA, 512 bp, Arabidopsis thaliana columbia
gctctgaacttgggaggatatggatagtctgggatccttccatttcagttttggtgtttaagagaacggatcagattatgttttgcagcattaagattccttctcttcttcaatcttttgcggttgcttttgtttatggcaggaattctgagttagatagaagatctctgtgggaagacattctcgtgctgtccaggacttctcctctttctgttactccctggcttttgttgggagattttaatcagatagccgctgcttcggaacattattctatcaatcaatccttattgaacctgcgtggtatggaggatcttcaatgttgtttgagagacagtcagctttcagacctgccttctcgaggtgtgtttttcacttggtcaaatcatcaacaggacaatcccatccttcggaagcttgacagggccttagctaatggtgagtggttcgcggtctttccctctgctcttgcggtctttgatcctccaggtgactctgatcatgccccttgt

SEQ ID NO: 5085 - DNA, 1236 bp, Arabidopsis thaliana columbia
tatacttgcgtattatgcacttccggtccagcattatatgatgagttgaagatttcttgggaagataagagatgggcgtttcgttcgtgggagagaaatggtattgaaattgaataagctaaagatacctttaaaatgggagcatgttaccaggattgcaggcaaggatgttgccccgggtaggatgcatgtagcccgagcgcttcttgaagcaggctacgtggagaatttgagacaagctttcactaaatatttacatgatggtggacctgcttatgctacgtaagttctagttcttcactaggttacctgatttttttgaaccttgcgggatttaagcgtttatgattatcttatgctagtctagtgcttaccttaggtgggttgtagtggactttacctctgttgacagctcatcaactatattagagaaactagagagtagagatctaacatgctaaaagaaagtttagggaaaatgagtttggatattgtaggattggttttgcatattgctttgggcagtggttgatagttagagacttctattgctaatcagttttcttatttggtgtagttcgttggtacttgtttaaaacctgtcagtatcacactgacttttttctatgtgaatggttgcataaccttattgcagagggactgagcctatggcgaggaagcagtaaaacttatatgcaaaaccggtggtgtagctgtgcttgcacatccgtgggcgttgaagaatcatgtcggtattattaggagattgaaggatgctggacttcatggggtcgaggtttataggagcgacggcaagttagaaggtctctcactctctccctccctcgttccctctctatcagtctatctatctatttgagttcactgaattttaatgttgattgaacagtgtttagcgagttggctgatacatacaatctgctaaagctaggaggatcagattatcatggaaaaggcggacgcaatgaatcagaattggggagtgtaaaccttcccgtgacggcattgcaggacttcttgaacgttggacgtcctatatggtgtgaggccattaaagcaaccatgagagcattccttgaccaaccatcagattcaaacctctccaatatcttaaggttcgataaggcaaggattctgaaaggaaattcagcttggtcctgtggtaaggagttgatggacagatgtttagcgatttggttgacagtgatgagagaa

SEQ ID NO: 5086 - DNA, 543 bp, Arabidopsis thaliana columbia
  unsure (1)..(543): unsure at all n locations
tcttggtcaagatagcatcaggcgcattcgccggggcgttttccactgcattaactaaccctgttgaagttgttaaggtagatgaaacctcaagtattggttttattctgttcattagatctctttttcggtttttaagacacatttcattttgcatttcgttaggtaaggttgcagatgaatccaaacgcagttcccattgcagaagtgcgggaaatagtctctaaagaaggcataggagctttatggaaaggagttggtcctgccatggttagagctgcagcactaactgcctcacagcttgcaacatatgatgaagccaaacgggtcatattctaagactactattttccactttttaaaaaccatgaagtaatttccatgatctgttttgaaattgagaaattgtcaagtaatcctgcttctcaaccatttattgattctaacacttcagcttctaaattttcttgtaattgcagattctggttaaacgaacttctttagaagaagggtttcatctcatttgtggtnaagtttagcagt

SEQ ID NO: 5087 - DNA, 614 bp, Arabidopsis thaliana columbia
ctttgaatgttggcttgtacctccgctcgtaagacctaagtagcaaggtgtgtgcgcgagaaccgtccccgagtttcttgagagacaaaacagctgatctaagctcacctcctcttgtagaaggttggctaatagcttctgccaattgatcagccaactcttgtctcttttctttgattgcattgttcagagaaagaagagtggtgggactgagagtccgtttctcatgtgcttctacggccacacgacgcccttcttctaacgcagccatggattcctcaactctcttctcagctaagagaacttcaagtctatcgaaaaactccacaacccaattctcaatattcgacagctgtttgttatccatatcgtacaagtcttcgtctcttaagtcgtcagcgtcatcagcgcataaggaactaatgtgaacaccatcagctaaaccgtgaacaagagctgcttgagcagagagaaggtttctcatagaaagaagttgtccttcaagagctgaaatctccttagatgttctgcatgcacatcatcaacaacaagtaacatgcatgacagaactaactaacaacaaataacgataattaaaaagatacacacacaca

SEQ ID NO: 5088 - DNA, 619 bp, Arabidopsis thaliana columbia
aaatcatatctaaggaataaaaatttcatcatatataactaaacaatctagtcatgaaaatggaattgcataagattcagtgaacatttcatacgaaattttttatttaatgataatcatctactaaagccagagaaattaattgttatacttcctctgttttggtgttcaaaaaaaaaaagaaaacgaaaatttcctctgtttcatataaaaggcaaagaaaacgagcgtgaccaagactataactagtttgcttagtagaagattttggcaatgtttccaaaattgtcaaatagacaacatgcgcttaagattcacagtttcaatgctagatcgttcctaatgtagctttagttttgtgtttgtgtagtgacgagggaacttatgtggtaggagtggaggagctacaaagagagctgatgccaagacatgtggcagtgataatggacggaaaccggagatgggccaaacgggctggattgctgacgtcacaaggccacgaggctggagctaaacggcttatagagtccccgagctttgcttaaattggggattcaacagtttcacttttccttctcacagagaattggggaaaccaaggtgtgatattcagactatg

SEQ ID NO: 5089 - DNA, 586 bp, Arabidopsis thaliana columbia
agaagagaaatagacctcaggattaacaggcgattcgaaaccattggccattggagacctcgaatacctaaagccattagaattcctccgatcagtgccgccattggtggacccataaatggtgagatcttcatcatcatcttcgtcgtcgtcatgcacatcgtgcgcaatcttgttcaaattctccttcaaattggcaaccgaactccacatagctcaactcgcccgaaggagtcagagattcctcctactccgagaatttatcaaagagacaagaatcttcctctgtaagattattatcgtagatcggagtaacaacaacaccaatatgattttcatgatttcaattgtcgggtcaacttatcggacgggtcgggttacatgtggctctattttataactaaggcccaatctcactcactgagattcattgcacaaagatgggcctttagtaaacgtccagatcaaacatatgggcctagtccgtatccgttgatttagaattctaacggctatgattacgtctcattaatgcatgctctatctaaacttcacgaaatgatacgttagcttggagacaaagtga

SEQ ID NO: 5090 - DNA, 1123 bp, Arabidopsis thaliana
ccctttttgaatatcctcgaacaaagttaatattccccattgtatttagttcttttggggaactgtggcaatcaaacccacttaacaacgcatgctctttaatggaatacctaataggtactccatttaccacaaaccaagcctcctcgagcaaatttgtcttcactatgcgtaacataagcacccacatgcctgacgattaacgttctctaccccttcttttagaattgtattcaccatttcctcctcctccagctcctccccattcccgtctttcgcttcttcgaattgttgaatgacagcgtcaattagaggtttcaaagatgtacctgtctgatcctcttcaatttcggcggttcctttaggagaagcctcatcaccatcacgcggttcctccatagccttttcaatcttagcggtttcttttgtagtatcattcgccgcaacatctcgtgctgctggttcggtcggaaccaagtcgacggcatctccgtcgttctcaatttctgaagtaactggttctgatgtcgaaactttaccggacggcttgtcgtcgaagtaactggttctgatgtcgaaacttcaccggacggcttctctgtcgaatcatatacagggccacctttaccgtctccggcggcatctccgtcgttttcaatttctgaaggaactggttctgatgtcgaaacttcaccggacgacttctccgtcgaatcatatacagggccatcaataccgtctctaacacgagtcatcaaactattacacgaatcaagaattcgtcggaaaattgtgaaaggcgagaaattatgaatttgattttggaaaatttgaattgaatgagagtagaaacggtttgattttagaaattagggatttcgcttaagtgtttggaatgggttttgggttgctaggcatggatcttaattggatcggatattttgttgggtcgtctgagtttttggtcttttgccaattatttggattttctctcatttatctttaattcgacaaaaattgggaattagaagagtggcattcctggttactttttcgcagatagtggcactccagacatttgaacttttatcacttatgccacttttttgaaaaaactgatctg

SEQ ID NO: 5091 - DNA, 1294 bp, Arabidopsis thaliana
tgcgggattcgaactcagacttgggtgagttagataaaaaatcaacccaaaactaaccactagactaagacaacataatcgcaatcatattaaaagagatttgtatatatatccgtaaataacatgagttatgttttaaccacagttagtagttccgttatcaaaactaacagtcgttaacttgggagcaggaaatatccaacatttaaaagactaagatttttgtagacaatcgaaattaacttatgtatttttcttccaattttaaaagtacaggtattaaacggccaaattaaaaataaaccggggtttttttccgcttttttcccttttatttagtacgttatacttgtgaagcatggaacaacattattacaatccacttttatatggaattcgactttcttttagccaagtttctccatctaagagcttggctacagtgaattctgtagcctgtttaggatctttcataactttaaagcccgaccacttcacccttctgctagtcacagctcccggacccctattttgatattcgcggtagtggagagttgacagaccagtttctccttcccaaggagtccagcctgcgggatcaactaaatcaccgatgaaagactgcagaaccgcgactgttgaaaatatcctccaaggccttccaagatacgtttttacggttgctgtatctagatccgaacttgctgtgatgttgcagttttgaattgagaagcccgatttgtcgtccttagtctcgcgtgattgagcggttatgaaattgctttgcccatattaggctgtcttgctacaatctggcagaattgaaataccgccgctgcgtttccacaaatgaaatctacagtaccggtaataaagcactccctataaaactggcggtctatgtgaggatacaaggcatcctgatatccctcgacacgacatctgtaaatgacggacatatcaccactcacacggagggcaacagctggtccttttgccggcccgaccgtgtttcggaagcacatgtctactccgatgaatcctttaccattagaagcttcaaacatatttttagtataattagaattgtctttaagaatgttatagtttggtataaagaagagaaaactataaattattcaagaatagaacacaaactcttaccaaaagttgcagtgtagaacgttcttctaacattgctagcgcttaaattgcccgtgatgatggttgaatcttgaccatcacctataagagttaaattgggtttcgtatgctcaatggcgacgatttcatc

SEQ ID NO: 5092 - DNA, 1498 bp, Arabidopsis thaliana
accaacttactcggccacacccagtgtctggcaacagactgtgcagtcgagtacagttgtctcgtttcctatctgttactcgaccacacccagtgtctggcaacaaactgtgcagtcgagtatagctggttcatatcctgtctgttactcgacctgttactcgaccacatcctacttctggcatcaccctgttgtggtcgagtgattttagtaattctgttattgtttctgtttctgcatgttcgcttaggactgttagaaaccccaaaactgttattgcttggcttgacttagtgacttctgatcacatctcatctgtttgcatcacactcatttagattgacaccataagtactacaacgacatgatagtgttatatgattaattgattaaaaacctattatcagttagcatcgagattaccaggaagaaaaccctcttgtctcttgatagattgcgtagtttgagctacctgtacatctagcttcttcaagtgagagctcagattgtcgatcttcccattaagatctatgtagacagcatcaaacttgccattaaactccacaacgagctttggttggctctctagaatctgcttcagcatcgattccattcttatctcttctgagggtggaggggggggggggcttggtaagctgaattaccataggtcctctagaagttgctctgaggaaaagtcttatggaaagcaggctttgagtgtagttggaggaactctgattccctgtaaacctgttgggactgaagttgccctgtggctgcccaaacttcctgtaaccttgtccatcaatgtagaagactccttcctctgactcaggctcaggctcaatagtctcatcttcagctgcaaagtggacatgcttcttccctgtaagcaagttatgaaccgaatccagcttagcatttacctctaccatctgatttcctgaaatagctccagcaatcttcttcctctcaaaattagcatttttggtactgttgctgcaagcgaggttctctatcagggatgtagcatcagttgggtaacgtgtgttgaagttaccatttcttgctgcatctagagccatatggtatctccaattgactcctctgaagaaagtacctagaagttgtacgtcactgaaaccgtgatgtgggcagtcccgttggtactcattgaaatgaaccacacagccttttaagatttagctggaccctgtgtgaaggtagacagcttgtttctcaactcatcaaacttaggatcatcgtagaaattgttcaagaaggctatcttgatgcttctccaagtcttgagggaacctgctttaagttgtttcagtcaagaagctgcttccccagcaagtgaataagggaagagcttgcaaagtaggtagtcctctgagactccattagtcttgatgcttagaacaaggtcctcaaagcgctctatatggtccattggctgctcatgagataagccatggaaagggtgctgacc

SEQ ID NO: 5093 - DNA, 406 bp, Arabidopsis thaliana columbia
agattaaagtacacaagtttatgttgcgcacttcttcattgaaagatgagagatttctacttgtgggacatgtaggaggcgtcgattgctttagtgtaaggaattgtgggaaaggtgatgacggttatctaactcattatatacctcccataccgttcacggttcacagttctttgcagagtggtccgaccagcatagttcccaaaactgtggtctaattcttgtggaaagacatttaacagtaagagatttttgcttctgagtggatgggttaaaagagaaagggtttggtggtctgtaatggagtgtaatgttacatcattttgatacagcaggaagtagctgggattggcatgttcatgatttgcatagtattggattgggaaagtggttgtctgaagatagt

SEQ ID NO: 5094 - DNA, 1510 bp, Arabidopsis thaliana
gtttataactcactgtattcattttcattgagttttgaggtaaacaaattcgaactccataacaccaacttagtattaccagtagtactaatatgaccacaaattcgacagaaacagacatgatattacttgttataaccaatattacaaaaaaacaatagaaacagacatagtattacagaaaggggaaatacagtattacatagtaagtccataccataaaaacaacaaatcactgcagaaacaaagtaaaaaactcagataggcgtattcccaaataataaccattgacacgattgccttggacgccttttgttttgcgtcctttgtcgttttggctgcttttccccggttgatggaaaccttagcatatttttgcttcctttcttcggttttttagacagcggaactatcttcaacgcctttacttcatctggtacttcccactgcgacctatccggaacaagataaatagtcctataataggccaatgcccacaactccgcccaataatattttgtaaccaaatcatgtaactccaaacctcttctccgatcttcatcatccataatgttaatgaaagcggctaatgcatgaatacaaggatatttttggatatcgaaaaccttgcaactgcaagttttcaaaagcaagctcaccgtataatctattcctttgtcgcatgtgactacatattcacgctcgaatgagtttagctccaccactttcagcttctcggcaaaaacccacaaatcatgcaaataattctcgaccaaaggcaccatcttattttctaaggatccagacgcggcttccatccgatgttcattaaaccacccggagatttttttgatgatcgcatcaaccattggtattaacgagtatttccttgcgtttttaaacacattgttcaaagattccacacaattgcttgtgtctaagttgtatctttctccgggaaaacaacaccttgcccatttttctttcacggttgtatcctctaaatacttggtcgccttaggatatctcaacttaaacccgtcatacgctcggttgaagtccgccacgacgtagacccgacttaacttctgaaacttccatgcgagtacgtctcggttggtgtgagtagcatgacctttcacattttgggacaaatgccaaatacaatacccgtgatgagcggcggtatacacgttctgtatggcctttatgaggcttgcatttctccgtcatgaaaaccaattctgaagtatcgggtacaaccgtttttagcttctcgaaaaaccactcccaactagcatcattctcaccgtcgagtacggcaaacgctatgatgtaatggtgacggttaggatcttgagccgacgcaaacactagcactccgccatatccgttcttcaaatgtgttacatccacaattaaaactttcctcatcactctaaaaccttcaatgctagctcccaaagctacgaatacgtactgaaatttatcattcttatccaatttcaga

SEQ ID NO: 5095 - DNA, 509 bp, Arabidopsis thaliana
gcaacatacaaaggatactcgtgaggcagagctcttactcttcactagcttcatcatcttcttccttagactccaaatcccaggttttgaattctcttcattcttctttaaataccctattcttcttcttctctaaaaccatgcacttcaactacactaaaccaactcctttttttaactctctccaatggaacccaaacctttctttctctgcattatctttcttctattttgttcttcttcgtcagagatcctgcagaagcagacttacattgttcagcttcatcctaatagcgaaaccgctaaaacctttgcctcaaagtttgattggcatctttcttttctccaagaagcggttttaggtgttgaagaagaagaggaagagccttcttctcgacttctctactcctatggctctgcgattgaaggatttgctgctcagttgactgaatcagaagccgagatactgagatattcactgaagttgttgcagtgagacctgaccatgt

SEQ ID NO: 5096 - DNA, 427 bp, Arabidopsis thaliana
cgacctctgcaatttctttgtcccctttcttaagaataccatcatcgttctggaccgaaagtaatctgttcttattacgccttgcctttgtagtgtggtgaaagtaacacgtgttccggtctcctgtatgtagccagtgatttcgactttttaatttccaataagtctcctcctccaagtacgcttcattcaggtttctccgtaaggttgcgatatcatgggtagatgtatttccggttgcaatagcccaatccagttgagccttgatagatttgattctagtctcggagttggttttgttgcttcgcttccaggctgaaatactcttacgacagtgaacaattttggagagtaaaataccctcatcatgacgtcttgtgcctctccaagctcgagtaaccatctccttgaaaccgtctttgtgaag

SEQ ID NO: 5097 - DNA, 524 bp, Arabidopsis thaliana
aagctagatggaagtatccctcctgcgctaccgatctcaacagtttaggatacttgaatatctcatataacaatttatcaggtgaaatccctttcaaaggccatcttgttacctttgacgagaggagttacataggcaacgctcatctctgtggacttcctacaaataaaaattgcatctcccagagagtccctgagccaccaagtgtgtcaacgcatgccaaagaggaagaaaatgaagaagaaggtaatgtgatagacatggtgtggttttactggacttgtgctgcagtctacatatctacatccttggcattgtttgctttcctctacatagactcacgatggtcccgagaatggttttatcgtgtagatctatgcgttcatcatattctacagttcaagcgttcctcagtctgcaactgattctgtggattaccaaggtatacaccactggaatacacagtctaacatgcttcttagttgatccaagttagatgagaaaacttttgtatcaaaatatat

SEQ ID NO: 5098 - DNA, 1257 bp, Arabidopsis thaliana
ccatgccctattagtaggcccaggatagtagaaaaagtagaaaaacatttcaaaaacaaagagagttaataggcagaacccaaatggctgggttttgggatcatactgaccagcaaatacagctgagcagcatccaaataacaaaatgagcactacataaaaaaagtaaaatccttctagagggaaaaccaactgaaccaacacgaaaattccaaaaaccactgatatgatcaaaacagatgctgcaagggtttggaaattgaagacagtaaagtagatgatggtcagtatgagagggataacagttctcacccatcgatgtgctctgtgaactacttgagaaggacaagctacttgagacggacgagctacttgagacgggcgagctactctttgtctctaagtgtcctggccgaatccccctcgtgacaggacatgctattccgtatttatagcactatgcgtgtagggcattcatcgaaggatttgacgaaactacccttcgccttaatactccttggtttggaacttattttgggtttttgacttgggtttgggcattgggccaagtaggcttaatctgtcgtccgaagaaaccaaagatgtcgaaactattgattccgtcgaaacggtgcgagcgcggagctcggcttaatctgtcgtccgaagaaaccaaagatgtcgaaactattgattccgtcgaaacggtgcgagcgcggagctcggcttaatctgtcgtccgacgaaaccaaagttgtcgaaacttccgtcgaagcggtgcgagctcggcttaatctgtcgtccgacgaaaccaaagttgtcgaaactattgatttcgtcgaagcggtgcgaggagctcggcttaatctgtcgtccgacgaaaccaaagttgtcgaaactattgattccgtcgaagcggtgcgagcgcggagctcggcttaatctgtcgtccgacgaaaccaaagttgtcgaaacttccgtcgaagcggtgcgagctcggcttaatctgtcgtccgacgaaaccaaagttgtcgaaactattgatttcgtcgaagcggtgcgaggagctcggcttaatctgtcgtccgacgaaaccaaagttgtcgaaactattgattccgtcgaagtggtgcgagctcggcttaatctgtcgtccgacgaaaccaaagttgtcgaaactattgattctgtcgaagcggtcgaacgcggactcggcttaatctggcgtccgcgaaccaaagtttgcgaaactattga

SEQ ID NO: 5099 - DNA, 2131 bp, Arabidopsis thaliana
tgagttgatggagtctgggggcagagtcttctcccagtggtgtgtcttggctcccaaagagaagggaaatagtctgagcttaaacatatcttcagtgacaccattgatcttagtaaggccacagagcctatcaaagctgtcaagatggtccaggggatcttccataggtagaccatgaaacttgtttccttggatcattgagatgagaccactcttgatctcaaagttgttgttctgaactggtggtgacactatcccttgtctttggtgatgattccttggggcatcactgataacactgtattttactcattttaggtgtatgtttatcatcatttagctttgcatttgctcattgtataatatcattttgcaccattttagcttgttttgcatacttaggcatttcggatcatcttgcattcgcattgcatgttttggtgtgttttcaggtgcaaaaggagcttaaaaagactctactcgatccattcactcggtcctggcagctacagaagaggcatcatcctactcgacctctttactcggtccaggatgctacaaaggaggctgcagtttactcgaccctcctactcgattaaggcaacctcagatgaagcagcagattcaactactcgcccctcctactcgatccactactcgaagcatttactcgaccaagggtgaccatctctacaagacttgttgagctatcaaagcgtcttcggatcctcctcattccccactcaaccagacatctgagcatacaaataggagaggatgaagcatctcctcgaccaattgatcactcggagcatagacacaaaggcgcagactttgcagcaccctctttacttgatccccaagatcgagcatccatccaaaccgcctcaagtctcttgtcttctagtgaatctagggtttccaagattttagtataaataggttctttggggtacttaaagcctgccttgctatgtttcatcaacgagagttgagattaggaagtggtatagttatgaggatctctatcacgagagtggatatctggttttgaatcatcgtctagggaatttgcctttcgcatgttagccattagatgaaccctagaattgcccttatcaatgaatccatccttaagacttcttagattcaccccctgattgcacttttattcacctgttatttgtatcatcttgttgagttaccttttattgcatttcagtacttaaatttgttgcatgtatggttctggtggaccttgtgatcgagtagggcacttaaagttcttatttttgttgtttgaatcttgatttaggattgttactagaaacccaccatcattataatctggcttgacttagttgcttctgtacacatcttgattgctagcaataacagtggactagattgacaccccctatagctgcatcgacatgttagtgtttaaggggagttgaactgtaccatgataagtgtgcattttgcctgttttgagtaccatttgtcacactttagcatcatatcacactgttttatacatttctcatcatttgtcacactttgcatgtcatacttacttttcatgtagtgcatgttgcatatttgtgttgttttcaggtgatttggagctgttgacgagctaattggaagaagcgttcctgatcatgtcaaaccactcgacccccaggtcgagtagatgcttcacgacctcaacagaccactcgaccccctggtcgagtagaggacttcaccacttcacctcaccactcgaccccctggtcgagtctcataacctccaccacctgaccatcactcgatcacactactctaccacatggtcgactaccttcatcaccttcactcgatcactctaccacctggtcgagtatcatcacctccacacttgaccatcactcgatcacaccactctacaaggaagtcgagtgataagtggtgaacctatcaagaagattaagaacagaaagagatagaatcggatgaagaagaagaagaagatagagtggataaaggatagaggagagtaataataggaagtttgattaatactttgataccttaaccctaaagtagagttcaacatttatagtagttccctatggaaactcacaca

SEQ ID NO: 5100 - DNA, 2086 bp, Arabidopsis thaliana
aaacacaaaacataataagaatcaaaaataaaagcatagttaataagcgactcccccagacttaaatatcattgtccccagtggcattcaaatccgaagagagaagaaaacataaaccaaaaataaaagaaataaaaagaaaaaaaatcataccactcggttccctctcactaagcgcttaattagagtcaataggttcacttggaggagttcaggacttggatggaggggtggaggacttgtgctgcattcgcgccttccaaggcggtatgtagacagatcggccttgtacagcagttggtgtcgatcgacacagttgtttgtgtcgattcgatactctctccgtttcctgcaagatcaacagaaaaattagctttcgggaaactcgatgctcgtttaccggtgaagcacacttcgaacaatataaagaaataatcaaaggaacagtaagagaagagatagtgtagtacctatcacagggaactgaaataggtgtgggctctaaaggaggtgcagaagcatctatcgcgatggtgtcaatcgacaaggggtgtggtgtcgattgacactggttctctgcaaatctcatatgcgggctaagctgtaggggtctctgttgttggctctaaaagtgaagtctgagcagccagagaagacttgttcttgttggtggcaatgctactgataggcgatgtgaattctgaaccatccatacccaactccatctccttatcacatatgtggagagatatcctacccttcttcacctcaatcctagcaccagctatagctaggaaagctctaccaaggatgagaggatccttaagttctttatcatatgccaagaccacgaaacaacaaggatgaggcagttaccaactttcacagggacatcctcgaggataccttcatggatttgtttggaacgatctgaaaagaggagagtaatccttgtatgcttgtagatggtcatgcctagtctctcaacaacaaacttgggcatgaggttaatgcttgatcccagatcgcacaaggagtggctgaatctgtagtagatatcgagtagtcaagaacaaagctaccaagatcgtggagcttctgggatctctgactcggagtgatagtacggatgtcccagcaatgtcaactctccttggcttgtcctttgtaacctcagatgatttcagttggcacaatatcttggagattattggttttctccataattgattcctttttgacaaaccatttgtttctgttcaaaaaatagatatgtgaagtctccgaagcaaaacaaggattggttgtcaatatcttttccattgcagcaatgcacttcttattgtcaagcttagaaagacgccttggagttgataaaatatctggaaagtagatcggtgcgagctcctcatgttgtgtttgttctgtttagtgtcgatcgacactagatgagtgtcggtcgacaccgtcgcgtgacgaacgatcctctctattcctgtttgacactgtctcgtcatctgattcgtcccagatcgggttgccttgtgttgatcgacactgatgtgtgtcgatcgacaccaactctgcagcagcgtgtcctaactcgtctatagcagcccactctctacagctttcctctttaatgctgaccatgatagcattgcagctcttcctaggattagcatcaggggtgccaggaagaaacccttcttgtctcttaatggattatgcagtttgaggtatttgaacaactagcttattcatgagaaagctcagattttggatcttcccattaagatatgtgtagatagcatcaaacttgccatcaaagtccataactaagttggactgaccctcaagaatctgttcaagcattgattccatcttattctcggctgagagtggaggggagttttggtaagatgaattaccataaatactctagaagttcttctaaggaaaggtcttctagaaggaaggttttggagtgaagcctgaagaactctggttccctgtaaacatgttgccactaaagttgccatgtggttgtcctacttcctgtaaccttgaccatcaatgtagaaga

SEQ ID NO: 5101 - DNA, 1200 bp, Arabidopsis thaliana
tgcggatctgtttgtcggagatacttctccactaacgacaagtcaaggaattccaaagattcgggcagtctaagcttcacgcgcaacaatctcagaatcacgcttctcattgtaggctgcctgctcctcaatcttgcgttgcgatttcttcagccattcttctaaatctaggaaggaagatgatgattgtccagggagattgcagttggcacagcctaatgtgtctttgagactgccaagtccataaggattgcctctggaatccctttcggtggactgaaaagaaataaagaagagattagtgaatgaataaccaaaaactcaaagtcaagaggtttagattgcaacattttacctggagaaagatggttgtcaactcctcatttgtcagcagaagcttccgcctctagctgtgacaatctatctctcacattctgctcataagtttgagcaatcatctccgccttccgatcaacatacgtaccatccgacttagtatgagtctctacaaacacctcaccaagagtgactgttcttcccaatttctcctcctgcactgaaaccaacacagctcaaatactcaaaaacttacatgtgaggtaactgaaagaggtaacagaaaaacttactaattcgtcttggatttcctgaaaagactttggcccagagaagtggatgtgaggaccgagaccgttacggtcagagagacaagctttggaataggtccgactccgtttttgtgctggttcggtgtcccagtaagcgcacataacagctgcaccctagttctccttgcggtgctaaccatgtctttcaagcgccgtttacaaacctcattgaagtaatactgcacagtctctgttattaagggatcccaactgtgagttttctacaaaaaattgtagcttgagttagtgaaatttaaaagattaagctggaaagttaagaaagtaagagaaatgcatgacagcttaccgcaaactcaagaaataacctctctcttttattcactggtacacatgaccagttatagtagggagcatttgtgtaaaaatccgagtgatctttctaaccaactttgatcccctgtcgcgagtaaacctccaaacacatgaaacaatgaaagataaaaacatgttacattagtgaaactactcaacataaagaatagcaagtcaccacaacagaacacaagagagc

SEQ ID NO: 5102 - DNA, 477 bp, Arabidopsis thaliana columbia
taacgggtaatagatattgagcaacagtcacggtggccaataggcagcgccatcgcggctgcaggttcttgagctccgccgtgaaattcatcctccatgtcggcgtcggcttaagacttccggtgattatctgattgtctcccaataaaagtggatcttccattatcagcttggagatctttagttcttgtcaacgatcctttcttgaccttggaacgtgtgagatgagaatgcacgacttcaaagaacagaaaacagagacatcattataatatactagaaaaaatctgacacgtgttgcgtgaattatattcatacataattgtatatatacaatcaattttgcatggttatattcgttattttagttttatatatatatatatccacaacctcatagttaatacatattaatatcttctaaaatttgtcatttacttattcgtaagatatatatttgccttattaatagagagt

SEQ ID NO: 5103 - DNA, 1366 bp, Arabidopsis thaliana
ctcttagaatgatgaatcggctgcagtgcataggaatcactccaaaactgatgttataggagagattcaggggggaagaattactagaaacgtgaaagtagactacagacaactcgcgggcaagcgacaaactacctcaccaactaacgcggaaatagttcagtttgcatgttttgtttctagtgtcgaaccgaaggatcataaggaagcattgatcgaagagtattgtatagcagcaatgcaggaagagctaggacaattcaaacgcagcgaagtgtgggacttaacacctcaaccggctgattcaaatgttgttggtacgaaatggatattcaaaaacaagatcaatgaggatggtctcgtggtcagaaacaaggctagattggtagctcaagggtactctcaagtagaaggcgttgactttgaagagacgtttgcaccagtggcaagactgaagtcaatcaggtttctgtttgggatggcatgtgcattaaacttcaaattacattagatggatgtgaaacatgcctttctagatggtgtacttcaggaagaagtatatgtggaacaacctaagggttttgaaaactctaagcatccaaaccatgtttacaagcttaaaaaggccctttacggattaaaacaggcacctagagcatggtacgaacgtctcactaccttcttggttaatcaaggatatgttcgtgggagtgtagacaagactctgtttgttttgaaggatgacaatggtctgttgattgttcagatatatgttgatgacatagtgtttggttcaacatgtcaagagtatgtcgaaaggtttgtttaaagtatgaccaaggagtttgagatgagtctgtgtggtgagctaacctactttttgggtctgcaaatcaaacaaacagaacatggtttcttcatatctcaaagaacgtatgccaagaatctggttgagagatatggtttaaaaggaagcaaaacagctagaacaccaatggatgtgactgataagctgtccaaagacgaagaaggagaggatgttgatgagcgggtatacagagggatgatcgagagtttactctatctgactacaagcaggccagacatctgtttagctgtgggagtatgtgcaagatataaggcaaaacccaaggcctcacatatgttggcaataaagagaataatcaagtatgtgaacggcactgtgaacctgggcttgtactacaccaaggatactaccagaagtttgatgggctactgtgatgctgactgagccggatcgctggaagatagatggagtaccagtggaggatgcttctttatgggaaacacatggtctcatggcacagcaagaaacagaagagtg

SEQ ID NO: 5104 - DNA, 1585 bp, Arabidopsis thaliana
aaagcctcttcgatacgtctctcgtataagtctttcggaaaattccatccaatatcgatccatcaagtgcacttgcatctgatgaggtccacctgatgaacctgcatctgctgaaggttcacccgatgtaggcatatttggtataagtccaccaatcatagatccacctgttgaaggtgcatccgatgagatccacccgaaaaactttcacttgatatatctccactaggtaaaggtccatctggtgtaagtctactcggtgctggtccacccggtgttggtccagtcattgcatctccacctggtgaaggtccacgcgatgcaggcccacttggtgcaggaagtctcggtataagtcctctcaatattcgtcgtctcggtataagtccttctggtataagtccacccaatatcgatttgcctgttgcaggtacatctattggaggtccacctgatgaaggtgcatctgatggaggtccacccgatgtaggcccatttggtataagtccaccaatcatagatccacctggtgaaagtgaatccgatggagatccagcaggaaaacttccacttgatatatctccactaagtaaaggtccatcttgtgtaagtccactcggtgttggtccagtcattgcatctccacctggtgaaggtccactcgatgcaggcccacttggtgcaggaagtctcggtataagtcctctcaatattcgtcgtctcagtataagtccttttggtataagtccatccagtattgattcgcccgttgcaggtacatctattggaggtccacctgatgaaggtgcatctgatggaggtccacccgatgtaggcccatttggtataagtccaccaatcatagatccacctggtgaagatgcatccgatggagatccacccggaaaatttccacttgatatatctccactaggtaaatgtccatctggtgtaagtccactcggtgttggtcctcccggtgttggtccagtcattgcatctccacctggtgaaggtccacttgatgcaggcccacttggtgcaggaagtctcggtataagtcctctcaatattcgtcgtctcggtataagtccttttggtataagtccacccaatatcgatttgcccgttgcaggtacatctattggaggtccacttgatgaaggtgcatctgatggaggtccacccgatgtaggcccatttggtataagtccatcaatcatagatccacctggtgaaggtgcattcgatggagatccacctggaaaacttccacttgatatatctccagtaggtaaaggtccatctggtgtaagtccacccggtgctggtccacccggtgatggtccagtcattgcatctccacctggtgaaagtccactcgatgcaggcccacttggtgcaggaagtctcggtataagtccttttggtataagtccacccaatatcgattggcccgttgcaggtacatcttttggaggtccactggtgaaggtgcatctaatgggggccactcgttgtaggccattcgatatgccgttgtaggtgcactgatggagatgactcgaaaaacttcacttgatat

SEQ ID NO: 5105 - DNA, 586 bp, Arabidopsis thaliana columbia
tgtgatggcatctgatttcgcaatgggacagttcagatttttagttccgttattgctcgtccatggacactggaattagcaaaggatgggttacatgatactatataatttctatagaaatgcagtttttgttctaattttattttggtgagttagcatcttactatgtgttgtactattccgtcttaaaacaatgaccgcagactaacactcaccaatttcacgcaggtacgttttgtttacttgctacaccttgacaactgccatcacagaatggagcagtgttttgtactcagtcatatacacagcaatccctagaataattatcggtattcttgacaaagaccattcgaaggcagactcttcttgatcatcctcagctctacggtgttggccagaggggagagggatatgccactacgctcttctggtatacaatgattgacacaatctggcacagtgcagccatctgcttcattcctatgtttgcttattggggcagtcaattgcacgtcgacctaggagactatggcgatactgcagttgtggtggtaatctccttggcatggatgtgatagatggactg

SEQ ID NO: 5106 - DNA, 534 bp, Arabidopsis thaliana columbia
tgagatttatagaaatttggattgactgatgtttataggcatcaagagaaagcgtggtgaaccaaatggaagaagggaaagctctactcacagcatcaagcagcgcaacgtcacatgaggcctttgcgttgatcattgacgggaagtcgctaacctatgctcttgaagatgatttcaagaagaagtttcttgatttagctacaggatgtgcctctgttatttgctgcagatcatcacctaaacaaaaggcattggtaatgtcttttcctatggaagtagctttttatgagttctactattgcggtttcggtttagttaatagaagattgtgttttgttaatagaagattctgttttcaggttacgcggttggtcaaatctggaaccgggaagacaactttagcgattggagatggagcaaatgatgttggaatgcttcaagaagcggatattggtgttggaatcagcggtgttgaaggaatgcaagcggttatgtctagcgatatagccattgctcaattccgttacttagagc

SEQ ID NO: 5107 - DNA, 466 bp, Arabidopsis thaliana columbia
tatctactcgaactcagagatcctaaaatactttcgccaaactctcttagttgtaagagtattagcagtaataaccagatatatatagaactagatccacaggtttcattatgttcttcttaggcatgtgaaccaagatagttgcattgatattttgagaacgttgagatatgacatcatatgcttgctagtgaaattatagttgcatgaagcacaggatattagaacataccagatttgtaagtatactgagcctcaaattgaaaaagggttactttgttgtattgcaggagaataagcatggcaggtctaagttcgaagacagtgcctcatcttgccgatgctatgcatgctgcagtgacccgcctcggctaaattagcgaccatacattgttgtgctgtatctacaaataaaatgggacaacaaaaaagaacaccgttattgttggctcatatactatgggtt

SEQ ID NO: 5108 - DNA, 763 bp, Arabidopsis thaliana columbia
tgaataagcccgcaacaatgtcatcaatgtgtgttgttccttcacaatgatttgttatgtaacttattcttctaataaaaaactccgctagttcatatcttgttaagtatttggttagcctaagaaattatatagcttgaggtttcacattttcaatattttttaaaaataatttgggtcaatattgatgttggaaatgaaatcaacggttgaattattgtcgtgtgctgcttgcaccatggtccatgctagatggaccgaccactatttttccaaacagtgcctatcctatcaagtagatattttctgaatacgtagataattgtagaatacaagaaaagaaatatcctctgtggaataaatgaataatatacttttgtcagaaacgttacaagttaaaattccacgactgattgccacgtgtaagcttatctcaaaagggccctacagtaccatgatgacgtcatctcttacaccactctctgaaaaattcctccgccttataaaaaaactcgattatcgtcttcacttagtagccaaccaccgaccaatccgccatgaatatatctcagattattttcttcgcgtccctgcttctacggcttcacttatcaacggcggaacatcaaaattcaaacgctggtgatggagacaccatcatattcaccactctaggacgatcgcactacgaatttgacatattcgccctcgtcacgactcaaccgccgtcagtttccggagagctccgaatcaccgatggggg

SEQ ID NO: 5109 - DNA, 461 bp, Arabidopsis thaliana columbia
tcaataccccccccccctcttcaaaacgaagcttgtcctcaagcgccaatgaaggatactaattttgtaatgccctgaaattttcccaagagtcatcatagctaggcagacccttccaatgcaccaaagcttccaacacaccatctgtgttataacgagtatctaacactgtctcaggctcaatgatcacctccttatatgcattattcttcatcaactgttgagcatgaataagatgatctttaatctatcctaacatcctatctctttccttaagcatctcttccaactcggagatcttagtagactgctcttcaaaacgcaatatggcaggaggatcacgaccatatagaacttttaaaggagtagttttcaaggatgtatgatatgaggaattgtaccataactccgccacatgatacgtactgatgccacgtctttgggtgtgttgaagcgaaaca

SEQ ID NO: 5110 - DNA, 583 bp, Arabidopsis thaliana columbia
agatctggtagattctttttcttattggatgatattgaaatagaaaatggtagattactctgtatccaacttgattttaaacagtgtagattttttgaggattggaattgaatttttctgaaaagtaagtagaaaaagatcattactttagcacaaatggtataatctcctgaaatttgtcaaatgtctgattcattcgttagtagagtgaagcaatctgaataggtttgttttggttgcaggattggtgtggtttcagggaaagctattttcgggcctccgcttgatcagtactggaaagagaagctcgaacgagaagaagctgttgttgccaaggaagaagtcattgaaaagagctcagattcatcgtcaacctaaacatgtttgtactattttatgagcagagtgatgtaaatcataccgtgatttaattacggattacaacgaagagcttggacaaaatgtttgcacggaagcattgttaatttattgtacaaggtgtgatacttacagaaaggcaaaacagtgtaacaaatgtagtaagtgcttgcatttcacggttttcaaattgttggagataata

SEQ ID NO: 5111 - DNA, 539 bp, Arabidopsis thaliana columbia
ccccgtcaccgggatagctcctcggcatccggtccttatcaaaatcatacagttcaaaatcctcgtcttccatatacatttcttggcttaacttaccacgatccctcttcctatcaacccgaggcacgtattctaaatccactatctcagttaaatccttgtggttcgccatcttcttcttctttatattcttcctattctttaaaacttcttgtttattattcactgcgttagtactcatctcccttaacgtttcagtcatggaggcatcagctaaagatctcttctgcgtttcccttcccatgttttcttctccactgctatctttctcagtgatcttcgaattcaccttcgacttatttctctttatcaccgcttgcatttctgccaaagtcatcatcccttcatcctcttcatccgacccctcaaatacattaatagcttctgctgcttcctgactcatctcccctgtctcaacttcttttatcagactttcaccatcgctatcaacaggcctcttcctcctactatatgttatg

SEQ ID NO: 5112 - DNA, 575 bp, Arabidopsis thaliana columbia
aagtatcaaagttattgaagaaactcgcctgccttgttaagaccaggaccaagaagacgaggaatctgcttaatgacagactcagaagccaagaaagcatggtaagacttagcaagcttcttaacaagcttcttgttcttgttaagctttttcaaagcctcaacatccatgttactaagtcccattttctctgcctatcaaaacaaacatcaaacactttgtgtcaatcaccaattcaaaccaaacaagatacacaaaaagtatagagatttcaatcacctcctcaacatgctgagcatctccaagcatacagatcttcatttttgggcgaggaatatgtgggagcttcacagatccactgaaacgcttatccttttgtgggtcatagttcttcagaccaatctgaagctccactgtctcaacaaagttacgcttcttctcctcagattttcccttgatagtcgttatggcttctctaacagcctcactctgaagcttactatataacaaaaacaaaccccatttcaccaaatcaggtaaagcaatctactttaccattcatttgaaatgatatg

SEQ ID NO: 5113 - DNA, 612 bp, Arabidopsis thaliana columbia
gggattcttcatggtatgtataacatctttatgcacaaggcagtgttttctaagatatgtctactgtatatccttaaagagttagtgaattttcaggttgataatcatggaattgataaagagttgatggagaaagtgaagaagatgattaactctcactatgaggagcatttgaaagagaagttttaccagtcagagatggtcaaggctttgagtgaaggcaaaacctcagatgcagattgggaaagcagtttcttcatctcacataaaccaacttcaaatatctgtcagatcccaaacatttcagaggaactcaggtaaagtaattaagaattgaatagtaccaaaggctctaccatttttacctgtttgcttatttaactaaacaatgtgagagggtgaaattgatatttgcagcaagacgatggatgaatatgtttgtcaactgcacaagtttgcagagagactctccaagctcatgtgtgagaatcttggtcttgatcaggaagacataatgaatgccttttctggtccaaaaggtccagcttttggaacaaaagtggctaaatacccagaatgcccacgtcatgagcttatgagagggctgagaga

SEQ ID NO: 5114 - DNA, 536 bp, Arabidopsis thaliana
gagagagcttgaaactaaatcaaaagttaggagaaatccaccattaagacgtggaagagtatcgcctcgtcttcttgtacctgatcacattccaaggcctccttatgttgagtctggtgtattaccggatatatcaagtgagttccagattcctggtcctgaaggcattgcgaaaatgagagctgcttgcgagcttgctgctcgggttttaaactatgctggaactttggttaaggtaagattttagtttccttgtggatcttttgttttcctatgttatggatatgtggtctgagttgttgtttatatggttctgcagccatctgttacgactaatgaaatcgataaagctgtgcatgatatgattattgaagctggtgcttatccttcacctcttggatatggtggattcctaaaagtgtgtgtacttcagttaatgagtgtatgtgtcacggaataccagattctcgccagctacaggtcctcatgtgtgctttttactgctttaagctgaatagctttgaaggagtcatttg

SEQ ID NO: 5115 - DNA, 931 bp, Arabidopsis thaliana
tagctcactctctaatcgcttatcagctgggaatgcgcctgatgtctctttagataactctgttactgacgaacaggttagagattcttcggattctgtagcggctaagctatgtactaagcctctgaagcttgtctcggggtcgtgttatctaccgcatcctgataaagaggccactgggggagaggatgcacattttatctgtgctgaagagcaagcattaggtgtggcagatggtgtggggggttgggcagagcttggtattgatgcaggttactattctcgggagcttatgtctaactcagtgaatgcaatccaagatgagcctaaaggttcgattgatccagccagagtattggaaaaagctcatacttgcacaaagtcgcaagggtcttcaacagcttgcatcatagccttaaccaaccagggacttcatgcaatcaatttaggcgacagcgggttcatggttgttcgtgaagggcatacggttttccgttcccctgttcaacagcatgacttcaacttcacctatcagctggagagtggaagaaacggcgatttgccaagctcaggtcaggttttcactgttgctgtcgctcctggagacgtcataatagctggaacagatgggttgtttgacaacctgtacaacaacgagatcacagccatagtggttcacgctgtgagagccaacatagatccccaggtaacagcgcagaagattgcagcattggcgcgacaaagagcacaggacaaaaacagacaaactccattctcgacagcagcacaagatgctggcttcagatactacggtggtaagcttgatgacattacagttgttgtctcttatgtggcggcttcgaaagaagaaggaaaacattgatgaagagacaatacagatgtgtcatgtgttgagttataaagtttgtgt

SEQ ID NO: 5116 - DNA, 659 bp, Arabidopsis thaliana
caaacaaatttgtttcttctgtatagttgcttattgagttgagtggttgtcagtcaccaaccctcttcagatctcaaagccacaataaaatacgttaaattaataattaccaacctcaaaactataatctatatatatatatatatataatcagcattttcttcagtgtctctctactctctctcagatttgcatttgtttttttttggtttggttatggagcgtgcaaggagacttgcttacagagggatcgtgaaacgtctcgtcaacgagacaaaacgccaccgtaacggcgaatcctctcttcttccgacgacgactgttactccctcaaggtatgtctcctccgtctcctcctttctccatcgccgtcgtgatgtctctggatcggcttttaccacctccggtagaaatcaacaccagacacgatcgatctccgtcgatgcgttgaagccaagcgacactttcccgcgccggcacaactcagcaacaccggatgaacaagctcagatggcgaattactgcggattcgataatctcaacacgttgattgattcgactgttccgaaatcgattcggttagattcgatgaagttttccgggatatttgatgaaggattaacggagagtcaaatgattgagcatatggcacactggcg

SEQ ID NO: 5117 - DNA, 513 bp, Arabidopsis thaliana columbia
ctcagtctccaatgcacacaaaaagcttggcaacactgaatcaccaggtttgattacatattgtagtgtgttttatgtaggccttcaattgtatttctcaaaaggcatttaaaaactggttgatgtgcagttacttcgaaacaaactcgtggcagctgcgcgtaaatgcatcagaaacaatgcaacaattggagaagtctatggaagcatggaagaagcttaccaacaaatgcagagcctctgatacaccaagagccttctcgggtatgttggtatcatctatatattagtttataatttgacctttttaactcatccctgatcaagcacggtgcaatatcagattcaaggactcaagcagtcacatattcaaaaggcttcaaacgccgatgcactggtcgatgaaacagtgttcgatatagagacggaagtggagaatattctgccagtagaagtaaaagaacagagagtaagcaacttgcttcaagctatgatggtggctggatgtgttgc

SEQ ID NO: 5118 - DNA, 895 bp, Arabidopsis thaliana
cccgttgcttggggcagcaagggaagtagtgaaagccgactaggagctgaacttactaaggaaaaatactgtagataacttaaggtggaaagcattcagtgcgaaggacggaatatggacccaaacattaaaggtaaagattagatattcttactcttgattcttgaagtttagatgcctataagtgtgaatgattggaaaatcctgaactcatgaataacttgagaggtatctttgcaaactggtaccacggtggtatccgtggtaaactggtagcatgaggttgtaattgatatggaacttgaaattctcttaagttgaggggtattgcatatcacacgaatctacagctaactaacaagggaagaacggaagattactacaccacctcttactagttaaaacaaatgattagttcaggaggtgttcatcttctgcctgggtctaactgtacaaataaatctcgtaggtttaagaggatcattctttattgtcaatatggtgattaatggacttgtcatgtgtgttatttaggcacgcattgacatggaacgttcgagaagagaatttctgtgcgactctgcacttgcattgaaaatgcacagtaatttcgatgctaccaacgagagagagtgctgtatatgcttctttgatttgcacctgtctgctgctggctgtcgttgttttgcggagaagtattcatgtttgactcatgtgaaggagttgtgttcatgtccatgggttactaaatattttctatttcgctatgatatcgatgaacgtgaatgttcttgttgaggcagtggtaggaaaactgagtcatgtatatagatgggcgcgtcaagatgtatgattggcattaagtacagacgtctcaggaagcaagatggagata

SEQ ID NO: 5119 - DNA, 172 bp, Arabidopsis thaliana
  unsure (1)..(172): unsure at all n locations
nnnnnnnnnnnnnnnnnnnntaatcatcatgaaatagtaatccacgctttgtccaggtaacgcggtttgagccagtggtgaatatgctgctaatatattgactcctggagctgttatatcaggctacatatatatacatctcaagacatcagtcaatccaagtaccaacaaa

SEQ ID NO: 5120 - DNA, 567 bp, Arabidopsis thaliana columbia
tagtaacgtgcgccagtgtgctgtaaagatcatcctgatctgattgcggcggcaaaggcgggaatggattctcacggtttcggcatggcttcggtgcgttttatttgcggcactcaggacagccataaagagcttgaacaaaaactggcggccttcctggggatggaagatgcgattctctactcttcctgctttgatgctaacggtggcctgtttgaaacgcttctgggtgcggaagacgccattatctccgacgcactgaaccacgcgtctattattgatggtgtgcgtctgtgcaaagctaaacgctatcgctatgccaacaacgatatgcaggagctggaacacgtctgaaagaagcgcgtgaagccggtgcgcgtcatgtgctgatcgccaccgatggtgtgttctcaatggacggcgtgattgccaacctgaagggcgtttgcgatctggcagataaatatgatgccctggtgatggtagacgactcccacgcggtcggttttgtcggtgaaaatggtcgtggttccatgaatactgcgatgtgatgggccgggtcgatat

SEQ ID NO: 5121 - DNA, 555 bp, Arabidopsis thaliana
cgcgagattttccggcgtgatttcgatcgtggcggtggtgttgcagtcgtggagatgcttttcagatgcaatatattagccctagttggtggcggacctgatcctcaatatcctcctaataaggttatgatttgggatgatcaccagggccgatgtatcggagaactctctttcaggtccgatgttagatccgtccggcttaggagggatcggattattgtcgttcttgagcagaagatttttgtctacaatttctctgacctcaagctgatgcatcagattgaaaccattgccaaccctaagggtttgtgtgctgtttctcagggtgttggttctatggttttggtatgtccaggtttgcagaaaggtcaagttcggatcgagcactacgcttctaaacggaccaaattcgtcatggctcatgattccagaatagcttgcttcgctctcacgcaggatggccatttgttgccactgctagctctaagggactctggttcggatcttcaatactgttgatggtacttgcgtcaagaggtcgctttttatcacaga

SEQ ID NO: 5122 - DNA, 1962 bp, Arabidopsis thaliana
gtcaataattgttcttttaaatcttcaaatttattatccaaaagatgtttttgcctcttgaagaaacgcctcaattcgaccgcatacttatcaaacgcttcgtctccaaaaccatcaccaccactgggtccaccttccccatcatcagagtgggtaattttcctttttttgttttcaacaggatcaagcacccgtctttgcctcttcaaaataactatataaaacggtttaatcatgcattactactcttagaagaacctaattctgatataagttatacgatgaagagaaatggttacctctctctcctgttattgagggccggacttgcttcttaggctcatcatcgcctccaacccacattttctcatcccactcctgcccagatttcaacatccttaaaatattatcaactcttgggtcctctttttctttcctccataccaaagattttgggcaatcattgtctgctgggtccacaatatatgtgatatccacctacatagataatcattgttaatttcagagtgtatgtacttcatctttttataccaatgtatgtacaacaacaactgtacaaacctgctcagtagcctcgcacgccaatatggtggatgtcttgattggacgcagtttggaaaggtttttaatagtcctctccgtaaagacggcggtatcttcttcagaaggtaggagactagcaataaactggatagtttcgaaagcaaagagttagagtccaagtgggaagccatggagtgcataagattgttgcttgcaaccattccggagtttttcaatgtcggtctctccttctttgaaacttgtgcaacgatccaaagttaggagaaatgatgtccttctccagggatatttgcagaagaaattcaggttcttcgtcagctcaactgtcatctcatttggtctcaggggaggagatgtgtcacatattagcaccccatccacaataataattagggcgagagctaatttcttccatggaggcatgtcagtttcagaaatcaatctatcccttaaatcttcaacttttggattagcattagcagatccaaacagagtattccaaactgttttttcacctgccttccgctgcataacagtttctatagcactatttttaagataggtttcacattccaaaccagttatacgtgccaattctcttaatcctaacctaataggatgaccactgaataccatccacatctcataacatttctttgtaactaactgatggcatattaacccaagaacaagtttaccagaaaaagatgccttgttagtagggatcctaaagaggtcaccaaatggagactctagaaggaacgtcatttctggtgtgtccttaagcgcagctgctatttgaccaatgtactccggtctggagtatgcatttatcttcgccttggtagggtagtggtcgagtgcaaacaacctctgtggtaattcacccggatccttagaagtacttcctgaaagttgaaaaagacgaaaaagttcttaacacgtacattatatcccaataccaactaaacataaactcgatattcatatacacgtacacctaaacttttatactcaatcaactgtttttggcgttaaacactaaaaaccctttgtcaattgaaaatttctgagttgaaatctctaaaattaacctagattttgcatcaagacattctccaaacgaagttagggcaaacttacccaaattagtcgtcgccgtcgatgactcattaacatctgaaactcctcgccgccgactactcttcctcgtctccgccatttgagtttttctatgaacagttaatcgataaacccgaaaatcgtcttattgttagacactttaacacgaactcgatcgaaatttcctccacttaatcaaagactcgaactcgaatagagcctcaatcggaataaggtttaagtttcgtcggaatt

SEQ ID NO: 5123 - DNA, 600 bp, Arabidopsis thaliana
acccagaaaaactctcgttgctgttccctggattctctgggtaaaccaagctagtgaagccaagttctggaccggtgtacattgcttgaccctgtaatacaattaccaaactcacactaaggcacgtatcatcaaacattatgttgtgaaaaaaaaattatggtgttgtatatatcttgttgttaccaatatcagtttattgttcccaagtgtgataggtgtgggaaaagatcggtctaaagtagttgcagccactgtcaaaatccatggagccgtgtttcccacagtctgagccgcaggaccagagttacctcccgaacaaacaactgtgataccctttaaaacagcatggaatgctcccgtggctatcacggcgcgaacatcagtttctgggaagtaaggaaaacgatagccgatagacaaggacaaaacatcaacaccatcatgcatagcttcatccatagctttcaagatatcagcagatgaacatgtatttatgtcaagacgatctagataccaccgagcattgtacatcgctatacgagctcatggtgccccacctctcaccgtcgctccagctaacccctcgtagcttatgcg

SEQ ID NO: 5124 - DNA, 485 bp, Arabidopsis thaliana
ccaacagtctgagccgcagacccgcattaccagcggcacaaacaactgtaataccctttaagactgcatggaatgaccagtagctatcccatctcgaacatcggtttctggatacagaggttcaaagcctagagaaagagagagaacatcaacaccatcatggattgcctcgtccattgctttcaagatgtcagcggatgagcaagccgctatgtctaaatcaagataccaacaagtcttgtacactgctatgcgagcacgtggtgcccacctctcacagtccctccagctaagcccttgtagcttgtattaggcacgtatgaaccgcccgctatggttgccacgtgtgttccatgaccattgtagcctctcggagaaatgaagtcaagtgactcactggagttgaagctttcgtgtgtcgcaagaaaagcattgatgaagtacttggctcctatgagctttttgttgcagtgagaggagttaaa

SEQ ID NO: 5125 - DNA, 1565 bp, Arabidopsis thaliana
gtaaatgcctcaaccacctagcatattgagaattctacactactctaacccatcctcagaaacctattcactactcagacatcattgcagagaacataaacgttgaaaaggatgaaaacatgataacaacaatgtaatagcaaaacgataacataatgaacaacagtaaacaaaatcaagaacaaatactgaatgctcaatattgaatagataaagagaaatccggattacaaaaggtgtagaacacagtgtttgcggaataaaactagataaaaacttgttctcgaaaatgtaaagtacatggtacttatagcaaaatattccaaaaccctaatacttaaaacgacgcagtattaggacggattaagaactgtactcgacccaggtggtcgagtgagaggtcgagtgataagctggagtcttcttttcttccttgtgctcgagtgtctggttgagtgcggaatggagaagactctgaagctcgccatcgagtatgtagtcaagtggttgtgatggtgatactcgacttcaaggtggagtggtgcgatcgagtgatgatcaggtagtggaggtgaagacacttgacctcgaggcgagtgatgtgatcgagtgacggtcaggtggtggaggtgaatatactcgaccagagcgtcgagtggtgagttgaagttgtgaagtcccctactcgaccagggggtcgagtggtctgttgaggtcttgaagcttctactcgacctggtggtcgagtggtttgatatgatcaggtccgcttcttccagttagctcgtcaacagctctaaatcacatgaaatcaacacaagtatgcaacatgcatgcaaacatatcctaaacatgcaaagtgatgacaaatgatgagaaatggtataaaacagtgatgatatgatgctaaagtgatgacaaatggatgctcaaaacatgcaaaatacacacttatcacagcgcactgatcattcaccccctcttggatttggaatacttcttcagaggcaaagtcaacatgcttctgctgcacttggaggagtttgttgatgcgtctgtaaagcgggttgcaaggtacctaaaacacaacgacaaaaaaggcacaatgttagtaacttgtgtaacaaaaacgaacttgatcttaacgtttctaatgatctcaaatatagcaaacaaacaccaaactggcaacggtgccaaattgatagtaggattttactcaaattaatcctaagaccactctctcaaataagagattgattgtagtactttagggtcgaattccacaaagctctctgatcacacaatagactaaggtttcgaattcagctaaacaaatagattataaaaaaaaagacaagacaagaaagcaataaaagagattgaaggttcagatgattaagacgtcgggtttagggaaattctcaggttatatcaaaatagtagatctagtaataaattaagaatattatcgaaccattctagaactcaaatcactaatatagagtaaccggtgtgttcggcgaaactcactatgcttaatagtattgatcccaactctcttg

SEQ ID NO: 5126 - DNA, 526 bp, Arabidopsis thaliana
ggttatgacaaggaaatttccgtgtgggaacaaactgatcacatcttatttcaaatgtggatgttcagtttctgggagaggggtttttgatgggatgtcacatcgaaatgtcatcactttgacagctgtgatttcgggtctgatagagaatgagttacacgaagatggtctaagattgtttagtttgatgcgtagaggattggtccatcctaactcagtaacttatttgagtgctctagctgcttgttctggttcacagcggatagtggaggggcaacagattcatgcccttttgtggaaatatgggattgaatcagaattgtgcattgagagtgcgctaatggatatgtactctaaatgtggaagcattgaagatgcgtggacgattttcgagtccacgacggaagttgatgaagtttccatgactgtgatattagttggtttagcacaaaatgggtcagaggaagaagctatacagttcttcattagaatgcttcaagctggagtagagattgatgcaaatgta

SEQ ID NO: 5127 - DNA, 2150 bp, Arabidopsis thaliana
ctacttttaagaaaaatcaaatgagtactcatcctaccatatctcaagagaggatgcatagtatgattcaagcactgaaaattcaaccattgaagatgaggacttctctgttcctctcttcaacctcttttctgactaagctctataagagtcaagcttagtgacttaaaacaagctcacttgggaggaagtcccatgtctatccatgtacataactatatattttccttgttatttttgatgtttttgtttaagtgtttcaagtttatttcattgatcattatggagtcaacggtcgagtaaattcaaaccaagtcgagaaagatctcaaccgttgatcgagtagaatgaggaggagtgttttgagccgttgatttgaatgaccaaatgagagaagcatcaccaccgtttgatcgagtgatttcttgcaattcattctgatccgtttgatcgagtgattaaagatggagcattgctcaccgtccgatcgagtgaagaaacaaagacaccctctttgtagacaccgacgcctcgtgacccgcctccattgaaaagctggtgtccctttgtcttcttgtcccccccataattactttggtccccccattgcaattcccgaactcaacaacctcatctctctacctcccataccaaagcattttcgaatccttataattctctctatttatctccttcacttccctttcttatcaaaaacttttcgcgattcatttgtatcctccattgttcaatctcctaacctactgaattttggttttgagtttctcccacttttgttctcgaagacaagcaggcgctcgcttttgtcaaggattcgaaacaaagctctctccccatcgaagaggtacccaacaccttcttcgcatgcaccagcttgaggacttttagaaccatcacccatgggtcgagcaggagagaacaagcaagtttcaagatcgaccacagtgaaacaagccaacaggaggaagtgatgcaaaaagaagaaactttcagctctcccgctggaaatactcgatcccgaaggtcgagtaagtcctctgcaagggaattctcgaggaacaaggcagacatcaccctcgaggaaagaagcccgtggggaggaggctggaactggtagatgaagactccaaaaagaaatggcttcaccagaggaagatgatcaaactgagaaaggaggtggtgatgatttggaatcagagaagtgtgcaactcgaaacgagtactacaagctgctgaagcgcaatgagtttttaggactttgataccctcatcccgagaccatggagagactcggcatctatgatgatatagactatatgtttaagtagttcagcctgaatattcatatgtttcggccaatggaggggtatgaggaagagaccatccagtttctttcatccgtggaattcttcttatatagagagtcaaaggacgatgaaatcaggccagacggaagtttgggatacttggagttctgtgtgtatgacgtagagtttcggcttccaatagagcacctcgagctgatgtatggatttccaagcggaaaagacacaaatcatcgttttgacaagagaaagcttcagtcattctgggccacactagggtctaagcaaggattttcattctctaggaccaagagcaacaagataaggagtctggtggttagatactttcataggtccttggctagtgcgctatttgcaagagaaaggaatggaaccttcgtcaatggagaactagagctgatggagacagcgctgcaagagctgcttggtttagcatcagacggtacaggtctagctggagatcagacagacacttccgtctcattcttcctaatcgagcacctgctgagttacagaggatggactaagggacttaagaaaccaggaagaatggttgtgggaggagttgtgaccccaattctaagagcacgcaatgtacctctacattcaaagtcgattcctccgagatggattgatatgcaacaccttatcaattccaagagtttttggtcacagcagaaaaatggcctatataagtataggttcgatcatcctacagcaagacaatctatttttctcctcccaaccccgcttcacttcgatcagagatggtgacacattgag

SEQ ID NO: 5128 - DNA, 519 bp, Arabidopsis thaliana
cattgtcaaaatgaccaatgttacagacaatggcattgttcttcatcttcctcatgtgatcaaccataataatatctttgttaccagtagtggtacagaagatatcagcttctgagacaacatcctcaagggtcagaacttgaagaccttccataagagcctgaagagcacagattggatcaatctcagtcactatgacacgagcacccgcggttttcattgctgcagcacaaccttttcctacatcaccataaccacagataacagcaacctttccagcaatcataacatcagtagccctcatgagaccatcgggaagcgagtgtcggcatccgtacaagttgtcaaactataaagcaaacaaatcatcagtgaaacagagaaatgcagagcagaaacagagcaaaaaacagagttcttgcttccacctaaatggatccattaacaatatcattcatatttaggtgattcaaaacattgtattatcccaaattaggcaaaacaatatcagatctagtg

SEQ ID NO: 5129 - DNA, 387 bp, Arabidopsis thaliana
ggagaaacagttagattgttggagggaaaacccttcgtggactgatcagatcccagtcgttaaggtgagcaagagatgaactttacaacatggttttgtcagagtctttgagaatcttgttatatgataaataataacaagatttctttacaggtgggtattccaaaaggatcgctttgcaatcttaaagccgaggtgaatgttggtttacctcctgatgcagtctataccattgtaattgaccctgccaatggaggagcctcaagaatatccaggtacgtttcctatagattagcctggtctctctgttacagttttaagctcctgtgattcaatggcctcggaattacaggaggttatgtcgcggaaagtattggtagatgacgg

SEQ ID NO: 5130 - DNA, 487 bp, Arabidopsis thaliana columbia
gctacgaagggaatcttaaacttgatctctacggctttcccgtcgtcacgttccatttcgccggcggcctgagctggcgttagacgttgagagtttgttcgttagtagtgaaagtggagatagcttttgcttggctatgactatgaacacgtttgatgatatgagcgttattggtgccatggctcagcagaattataatgttggctataatcttcgaaccatgaaggtttatttccagagaactgattgtgagattattgattcttaacacttcaatattttttttttaagatttgttctttctgcgcaaaatctcattagaatctttacatgtaattaagttcaagattagaataaaaagagttcgaaccatgcaaagaacgtttaaatcacatttactccaaaaaaaatctttcggaaaaaaacaagattggtggttagagtaataacagaagctaaacagaggatttaatgtttggacatatgt

SEQ ID NO: 5131 - DNA, 1241 bp, Arabidopsis thaliana columbia
taactatctgtgttttgaaagtaaattttgctaacaattatataatcagtcgaacggatgtactttattggtcgaaccatttggactacttagtcgagccatttgaacttttagtcaaaccggatgaactatttgaactaatcagtcgaaccggatgaactatataggtcgaaccgtttgaactaaccagtcgaacacatttgaaccatttgaactaatcagtcgaaccaaattgaaccatttgaactaataagtcgaaccggataatcctagtgttgaactatctgaactatccgttgtgacatagtaactttccagttgaaccatagtagatgaaccaaaataaacagttgaacctaaaagaccaattacaagccaaatgtttaaaatttcacaaaagtaaacatcattacaatgcaaatcaagccaaacatttttaaataaaccaattgttccacaactaccattaaactgatcaatctgccttccgcattctcttacgcttcttatcatcccccacaaacggtgttttaataaggcgggatgctccccttgttcgcttctttccggtttctattacaggtggcacctcctgcttcttcttgcccccgccattcttcttcgcttttcctttcacctctttctccgtcgtgtttgtctccttattacctgcacacattttaaaacaaaacctaagtcatatattcacatttttatacccaactgacattaattattatacttactgttttctgcaacctctggagaatgttctctgtagatcactacatcccgttgttgcatcctgccggtggtcacaaaaccatctggcgaagcaaataacacgtcatcgtctgttgcatgcccatgttgacttgcctcctctgtttgcttcccatgttccctttccttcagatgtgccacaaataactcaatagacttcactctcacatcaatgacatcaatcttatcttttgtttcatcaaagcctttggtcatcatctgcgtcagtgaggttatagatgtcacaactgtatctaaatcagggaatcgaggagggacaacagtcggagggacatctttctcggggagctcattctcaatctcatggacttcctcatctgaaatatcatttacaatacatcgagaagaaatgtccatctcacacattcctttccaccatatcctcttcttctctactaatagtcgctctctctaactgtcaataacaatatctattg

SEQ ID NO: 5132 - DNA, 2155 bp, Arabidopsis thaliana
tgtctccttatattcattgttgtcccattgcatagaatacatgaaaagacactaaaaagactcgagaaataacataaagactcaaaatcctatacctaaaacatagataaaatcggtgaaaatcgggttatatcaactcccccagacttagcttttgcttgccatcaagcaaaacacaaaagtcaaacccgtggaagaggttttgaaaacattctttagcctattgccatgatcattcaaactaagtccatatgcctaacaagtctaatcaagtcctaaccagcatgtacttctctgtaagcttacacaacattctagattccatggctaagttccacaaatatacccgccaggctttcatcggtgttctttctctccccagacttattctttttagagagtaaacaaaggggaactcgcatactggatcgacaccctcggcatttttccaacctttgtaattgatcattcaaataatgtataataatagggtcataggaaacattcctacccctatacactatctgaatgtcgtctcaatctcgcattatatttttctttttataaggggagaggaacatattctttttatcacattggtctcaatatcatgtatgaacaaggagtcaagatctatgaatactaaccgcttgaagaggtaaaaggaatagcagtgagattagctccagccttagtggttgagttggaaactaggatatcctcaagtctgttggtttgctatctagattttccaatagtctgattgactcgaacctgcagcactcatcaatcaggcaataaacatgggaaataatggatcatgattcctaactaaaataaaagaaacattttttagtgttgtattttttagactccataaactcaaaaacataaaagaataagattcaaaaataaaaccaatattagtaagaacctcccccagacttaaacgacactgtccccagtggcattcaaatccagagaaagcgggaaaaataaatcaaaaatgaaagaaaataaaagaaagggaaaagaaaaatcaaacagagggttggctcccactaagcgcttgttttgagtcaatagcttgacttggcggaattcaggatgtgggtggagtggtggtggaggattgctgctgcctcctcgccttccaagacggtgtgtaaactgatctggttggagcagcttctggtgtcgatcgacactcagtggtgtgtcgatcgaactcttctcgtcatctgcaaaaacaacaggagaaacaagctttcgagggactctaggcttgttatcttgtgaagcagtcttcgaataatccaaggaagtaatcatagataaactaggagaagagatagaagagaacttatcacataggtcctcaagtggtttgggctgaagagaatgtgcggaaatcctctgtctgtgagacccgtgggtgtcgatcgacagaggtagtagtgtcgatcgagactattgccctacaactctcatttgtgagtcgagcagatgggagcgttgtgtgtggctctatggtgggattttgatcagtctggggaggtatgactatgctggaagcaatgcaactgattggcttagtgagccatccatgccaaactccatatcttaaccacaaaccttgagagagatctccctctcttcacatcaaacctagcaccagctgtagttaggaatgctcatccaaggataaggggatccttgggttccttctcatagtccaggaccacgaaatcagctgggattatggagttatgatagtaggatttttgtcaattaatctctaaaacactatcttgtcgttgtagtattttaggatgtcaatccaatccggtgtgatgcaaacagatgagatatgatcagaaagctctaagtcaagccaagcagatagttggttggttctaacagtcctagtatgcaataacagaaatgaaatgaaactaaaagcaggaatggcaatagcaggcaagtgaatgacaaagcagaaatgataacaggcaatcaaatggataaacgattcctaaggatggggtaatcgaatagtgtggtctacttaatctattcaggcggttgacaaaacttcacagaagctatccctagacaacaagttcaacaaaagattaattcactcccgtgatag

SEQ ID NO: 5133 - DNA, 2414 bp, Arabidopsis thaliana
ggtttggttattagttagatacgctctttagattgctataaatataatgaagtggtcttctctgtatataacaatacataggtggaagtgaagtcttcgaataaaagcagagcttccacatggggaatgaatctcattctctgtaactcacatatttcaatagttaaattaataattcaaatatgacaataatcatatatatacaatacgtgaagggaatttttttttggattctaagaattaaagtgtcacggaattttggacgattctttagataataatataatgcatcaattactggacaaaaattggttatcaattatttcccaatagcaagaccagtcgacatatgtctgtttgaaactaatcaacaactagacttcgaatactaacagaaatataatacacacaagtacactggtacatatgtaagcgaaagttctacagaggatcctgacaacaagaaaagaccaaaaattcttggttggtccgctttaccagtctggtttcttttattttattctcagttttaaagatgtgagtgaggttatgtaagtgatgttttgtcaacgactcaaaagagtaaaatatacctttgattcaagtttgttactctcttagtcttatggttaagatttttggacatttccttcactccaccatgcttggcccaataacatacgtatgtgcaacagcttagggtccataacttttttaaaaaaatttggtggtcaacaaaggtccattactctagtcatacagtatctgatagtcatcctatatgcttcaaagttaaaaccattcctatgttttagaagatttgttttctcgaaaccatatatttcatcaacgaaaataaaggagtaggaatattcgtcgaatataaactttctcaatttgtatcgcaatatatgtaaactttagctgcaaaaatataaaaataaaaataaaaataaatgtcaatcttatttccactaaaccctattcgtacagtcgtaacatatttgtacaaaataaagttccacagaccataaacatcaaaaaaaaaaaaatggccatcttcgatccgtttaagctccaccataagccgccgtcgatttttccggcaacaactgtaaaaccaagccatgttctttccctcgtcgctaagttcttcttcaccatatgcatcttcatctccgttgctatgatctccttctacataatcttcttcggttgctccgattgccaccacatcactggcctccgtcgcttaggtcctgaaaatgtaaacttaactaccaactcctcagcctcctcctcgactatccgccggccgaatcagtcctcggaggctactgatatctcccacatagctttcgggataggtggctccattcaaacgtggagagatcgcagccgctactccgagctctggtggcgtcccaaagttcacacgcggcttcatatggcttgacgaagaaccgcctcttaatatgacatggctctcaacttctccaccgtaccaagtctcggcggatacctcccggttcagttacacttgctggtacaaactatttctacttctataacatcattatttcaacgagatgatcttagtcaagttaagtcaagggtcaatgtttaaccattgtgaaaatgtatttggatgaatacctaaccatacaaaacctataattttattcattcgatttccactttttgttttaaggtatggttcaagatcagctatacgaatggcgagaattatcaaagagacttttgagctagggttaacggacgtgagatggttcataatgggtgacgacgacaccgttttctttgtggataatcttataacggttctaaataagtatgatcacaatcaaatgtattacatcggaggaaattccgagagtgtggaacaagacattgttcactcttacgccatggcttacggtggtggaggaatagcaattagctatccattggccgtcgagcttgtaaagttactcgatggttgtattgatcgttacgcatcgttatatggatctgatcaaaagattgaagcttgtttaagcgagattggagttcccctgaccaaggaactagggttccatcaggtatattcacattttcctttttgtttttctcatgattactggaaattcacttattttgacctaatcaataaatggaaatttactattaattggtttctagtttttagctgcaaatactgaatttccttttatttgaaattttgaatattcagttttaaatttcaaatcgttcaaaatttttatcccttgccagatttaagattaaaataattatcaaaaaaaaaaaaaaatgtttagacgcttcaatgctcagatttcggtgtcctgtttttacaacgatttactcttactatgtgaaatctaaatttttag

SEQ ID NO: 5134 - DNA, 1652 bp, Arabidopsis thaliana
gttcaatcttgaatgtaagtatctatggtctttgctcgaagtattacttgatcgagacgtgggcattggcatattacagaacgatttatgtggtgccgcatcaggctcactggttctttcctcctgattatgtggagtaggtcgcaaaaccgccggattacactccaaaaaaaggaagggatcaagagacccggtttccatccataggtgagaagcgccgaaagaagactaataacaaagctacgcgtggcatcaacttgaagaggtggttgcagcctgaaaccaatgatgattgacgttaactcgtcaactagtacaagaagttcaactacgataaagtctctgtgtgtaaatttgtgtttctcggaattgtcaaatattgttcgacaggttcaattaagaacaatcctttgtgtttaaatttgtgttttcggaatttttaagcatagtttagttttttagttcaacataattgccaaacatagttcaacaggttcaactacgaaccagtcgttgtttggcaaacctagtacaacaagttcatctgggtcaactataaacacgggtggcatcccattcaacgcgttagttgaaatattagcagtgacaggtggcactgcgagtaccaatcgtcgcgttggttggaatattatttaagacaggattacaatcgattttacaccattcatatttcatcctatccaaaaaaaagagcccaccccactaataaaggaagccgtcgtttgccaacatggatggatatcattctgtttccgaactttgtccgactatcagtggatggactatttgcgtttttgttgtgatggagttcaagaagtttgtggcaccggatgagttcgacttgggcctcatattggcagatcgaacggtaatatattgcgaatatgtttaattttgtttctttcacataacttgcaggtatatagttaaaattatttggtgtagggtccccgttcccgaatcaaggctaccattcctcgtcgccttgcatcattttactttgatcgaatacgagaatatgagtatgagtggataattatcactaatttctcggtccgaaacgacgctgagtctgtgagagcaacatcccatgactaccagatatggtttatggaacagactattgctactaaagctttgcgaacggatgcactctcgttttggaattttactcctttcgacaacatcatagagaagacagttaacaagtatgtgttggtcggtgagtttttttgacaattttatagtattttctttgagaaattgtacgaatacttacttctattattatacacaagatgcggtaggtgcgattatttggcagggccgattgaccgaagcatcgacggtgtgaagttttctttcaagataatgaatcaacagtaagtgcctccatcttcacttattataatgaaacttggttactattttgggattagttcaaatggttcaaatgatatagtttaaacggttcacctattttagttcacatggtgcacctattctagttcaaatggttcaaatgctttagttcacatgttcacctactctagttcaaatggttcaaattgctatagttcacatggtgcacctactctagttcaaatggttcaaattgctatagtcacatg

SEQ ID NO: 5135 - DNA, 1423 bp, Arabidopsis thaliana columbia
cttcttgtaccgtacacgagacagaatctgacgtggacgcagcacgcgtttaacgagagtatcggagagattcaggggattgcgacggctgcgtttgagaggctcaaaggacggtgggcttgtttgcagaaacggacggaggtgaagcttcaggatctgccgtacgtgcttggagcttgttgtgtgttgcataacatttgtgagatgaggaaggaggagatgttgccggagttgaagtttgaggtttttgatgatgtggcggtgccggagaataatatccgatctgctagtgcggttaatacgagggatcatatctctcacaatctcttgcatcgtggacttgccgggacaagaactctataggctctgtttttcaccttttcttattttgaaactgattttttattgcaaattctttttccaaattaggaataaaaacattttagggattggttggatacagaaagaatagttgaattgagagtagaagtggctgatgatattgtttgtgttacttattagcattgtgtaatctttagttcatgtattttctatacaaattgaatctgaaacctcttaagtataagcttcttctctttcgatttttcacaaaattggtcgactagaaaaagaagaagcaattccacttttattacaagctcaggctcagacagaagtacaagtgtacaaccatgaataaatggaagttgtacttaatctgtttcgtttgcaggatcttccttatctattgatgtgttgagctctttgagaaggaatgcaaatttggaagcatgttttcctttgtcattcattatttgtgggctaaatgatacaaagaggaaagccatatgaacatgttatttactgtcacatggcgcacacagaggaaaagccatatgaaatacaacatttgaatatgaaacttgttggaacttttttgacaaaacttttccggtgactttccggccaaattccggccaaacggctgaacggaattgtagggtcattagtgcattggaaagttagtaaagagtactacaaaatggtatacacatacgtcaaaaatgaagttgtattgaatgagaaataaaggtgtaaagtgggacacttgggccaaaccggaccgaaccgaaccaggctgcgggttgtcgggacgtcccgtcgtcggctcaagggctttcagacttgcgaaccgtcatacttgtgagttattgagtttgctgagttgaatcttatggaaatattctcaggatggtctcaaaatattctcaagatagtttcaaaatatgtcatgtttatcctgagaatgttctgcaaaatcttatctacttctactatataccgccattcaacctctcattatttctcacactctcaaacacaaaacagtctaacttctaacatctctcctctctcttgcttt

SEQ ID NO: 5136 - DNA, 575 bp, Arabidopsis thaliana
aaatgttgtctgtggttgcaggagtatggcctgaatctgaagtatttaatgacagtgggtttgggcctgtgccaagccactggaaaggaggttgtgaaacaggagagaatttcaactcctctaactgcaataaaaagctcataggagccaagtatttcatcaatggttttctagcggagaacgaaagcttcaactccacaaattcacttgatttcatttcccctagagaccttgatggtcatggcacacatgtttccaccattgcgggtggttctttcgtgcccaatataagctacaagggcttagctggagggactgtcagaggcggggcacctcgtgctcatatagcaatgtacaaggcttgttggtatctggatgatgatgacacaacgacttgttcatctgctgacatcttgaaagctatggacgaggctatgcatgatggtgttgatgttctgtcaatctctttaggctccagcgttcctctatatggtgaaactgatattcgcgatgggataactactggagcgttccatgcagtcttaaagggtatcactgttgtttgttccggtggt

SEQ ID NO: 5137 - DNA, 1702 bp, Arabidopsis thaliana
actcatccttcagcccgtagactcctcaacacagtctcgctccctatccatttatgaagtggtcaatggacattgtcagacctttacacgtgtctactcggggtgtacgcttcctactcgtactgacagattatttctcaaagtgggttgaagccgcagcgtactccaacataactcacgtccaagttcggaacttcatctggaaagacataatttgtaggcacgacctgccttatgaaattgtcaccgacaacggatctcagttcatttccgaacaattcgaagcgttttgtgaagagtggcgaatccgtctcagtcattctacacctcgttacccgcaagaaaataggcaagccgaagcaatgaacaaaacaatcatttcaaaccttaaaaagaagttaaatgcctacaaaggagcatggtttggagaattgcaaaatgttctctgggcagttcgtacaacaccaagaagagcaaccggtgaaactcctttctctctggtctatggaatggaggcggtcatccctgctgaaatcaaagtcccaagtgcaaggagaattcgcaatcctcagaacgaagaggcaaataacgaaatgctgatcgatgtcatcgataccattgatgaacgacggaatcaagccctagttcggatgcaaaattaccataatgctgtggcacgatattacaactcaaacgttcgtaatagatctttcgaagtgggaaccctagtcttacgtcgggttcagcagaacacggcggaaaagggagcaggctaattagggatcagctgggaaggtccctacaaaatcacacacgttgtacgcaacggagtctaccgcctgattaacatggagggataacagttcgcagggcatggaattcaatgcatctaaaacgtttttacatttaaaagcattttccttatgtaaatcgaactacgttagacttgatccccacctttgggtacgtaggcagcccgcacttcgggtccagtctctataatcaataaaatcaaactttctcgtaaatcaagttgtgtttggttttcatatctgaaactgctccgggtggatcactacgcatccaaccctatgcttcagaaatactcgaattaagttgataacttaagttcgcggtcttaagtgatatccgtactaacttacaaagccgagctccgcttgcaatcggatatcatctttttgtcaaatttttatgcgatataagccgagttttagctcgcacttccacagacaaatttggcaaggagaaacttttttttcaaaaaactaagtctttacgactcccgaataaaggtcaagtaaaaaataagcctctgtggccaacaaaaaattaaaagcatttgagtcttaaaaacaaacggggggccatttcgggccataacaaccccaacagacgataatgttttgaaattttttactccgcccttccggagtccttctcaacatcaaccgggaacatggcggcaattcttgcttcggaggcagagcacttgttagaccctccctcgtcgataaccaccacttcggcagagggaatactctccacgactacctccggtggcgtatcggcaaggagcgaaatgagttcagtagggtcaggatgaggagtcttcggttccgcagcctgtctagcaaacttctcctcgtcagctcggaccgattcaagctcctttgagagatca

SEQ ID NO: 5138 - DNA, 511 bp, Arabidopsis thaliana columbia
aggcatatgaggtatttaggaactccatgtgtttgtgttggtgaaagagtaccgatggagctcaaacacgagttttctagtgaaagttaggtttacgtgtcgtgatcggacaaatgagaggtcggtgtcgtagctgaggccagaaaggattacaagtacattagggtttgcttcgtgaactgcttcggcccttgttgcatgtacctacatgagacaaataaaatataaatcttccttaagtttaatcaaatctagcacacatatatatattgacaaaaaaatatatgttttaaaaattacaaaacaacatatttaaaacaaaccacattagtaacatattaatatgtgcccagtgaatcattgctaatttttgaatacgaaggaattaaatatatacagtataatctaaatataacacacaatttttttttacttagagtcttttttggttagacgacgtaagtaatcattgggggctggtatagactgttgctataatattaagaatttt

SEQ ID NO: 5139 - DNA, 1934 bp, Arabidopsis thaliana
ctaaggttctgtttttgatctctattaagcttagggctttttacccttctttattagctaacaataacccaatctctttctttaacaatctcaaaccctttactagactttttctaacttctttagcttacttctcctagaattcttttcccttttcttgtaaacaatgaactcaaccctttttctcttttaaactcttcccatcccatagaataagtacccacctagtcctatctagtccggatagcgcgaactagaactacatgagatactatctttgtcgttacaaacctaacactttctaccaagcttagtcgaaaatagacctcacaaacactcacaagtgatatatggcttgaaagaaggcttaggttagggtatggggaaactgctttaaaagtgagagacagctatttggatcaacaagagtggtgaaacgaataagaagatccaaatattttaagggtaccatgagtttacaagcaatgcatagtatgataattaaaagtcaaatttatggttcaaattgatagggaatagcttcaaatcacagcaagttttgactaaggaaagatcaagtatatgaattcaaaagatggtgcggttttacttcaagatcaatcggttaagcactagacaactaacaacaagggtattgacactatctagtgaacattgcaaatttacaaggctatgatcatcattatcccctatgcaagtgcaaaatgcaacaacctatatgataacattcttaaaacagccctattaatgcaaatgcaaactacatgacactctatttttttggaatcattttcgaaaattttcaaatttttatgggttttctattccttagatgatgcaaaaatttgaataacaaaacatgaaacaatgttagatacatcttgaaccctcccccaaacttaaattacacagtcccttgtgtaataaaaattcaaagaagaattcaagagaaataaccacacaaagcaagaaataaaagaaatgcaatgatatgtacagtgaaatggagtgatacctcaacatttagacgaagaggttctggacaaactcgtccaggcggtcttgtgtgtactcaggatcacgtgtggaggtgttggggttattggcgttgtactcggttgaccggtcgagcatgtatcccgagtagtactcctctcggcttgggtcagcgttcagaaccaactggttcactggaccgggtgggcggctgttgaaacggcaatctgaaaaggtggagctcctcccgagctcgtagtttgaggctcttggctggtcgaaacgagcgtcccttcgcggcgccacacttgttgagttacttctcctgaactcgggtcgaggtggtggtgatctctgtcttcgttgcagctcctgaatctgaaccgccatgccatccattgcttgcttcatctttctcaccttcttcttcaacccactgaacaacttcctctgaaacttgcccagacctttgagcattcccaacttcttgtgaacttgaccgggatctctctatggatcggactcagcataatcctcaaagaaaaactgctccgctgcagcttcgcacgaatcttcttgttcatcaaactgttcagcttgactgaactcagcttgctcaaactcgtcctggccatactcggcctgctgaaagttactcggccgagtataagcttcctgctcagcttcttcttcattccactctgctccttcttcttgagactcacttcctatgctcggctctgcttgtagaggcgcaaggacattgactaagatcgattgaggagaatcaaagtcaatgttgttcccaatcctaatggtggtgaacttcttgcaagggagtgctagcctagagagacctagcgtggagtgcttgaacttgaaatagagttgatcgctggagcagacctatccaagta

SEQ ID NO: 5140 - DNA, 489 bp, Arabidopsis thaliana
ctatggttgtctcaactatggttcgcttcctgatacctagaatggaacatgtctaagcacccaagacatgcattaattggattggaacaatgcacaagaacttcaatgcaaagagcaattatgtttcatggggcaattgccgtcctgcattgtcctgattcaaagcattttgtcagaaaacgcgaggtatgttaagaaaaatcattttcttctgcctggatgttttcatgtcatatcaaatcctcttagttacatggcagatgatcatttatttgtcataggtaattattgggagatcatctggtggcctgaatgttgacattgacttgggtaaatataattatgggagcaagatatctcggcgtcaggtgatcctcttcccctttcccaaattaaatttagtttcctccttgctaattagttgctaatgtgctatacttttctgtctccatgttttgaacaaggcattggttaagctagagaactacg

SEQ ID NO: 5141 - DNA, 594 bp, Arabidopsis thaliana columbia
gatgccactttctttatccgatgcattggttcattacgtcactagtaacgtcactccacaacaaacatttgatgaagtctctgtctcaaagagagtcttggacaagaagtctccttgtaacttccttgtctttggcttaggtcacgacagtttaatgtgggcatctcttaaccatggtggtcgtacctgtaagtactctgttttttcctctgtttcaacagatctaatgaaaactttctgatttctcattaaggaagtttttaaatttcagtgtttattgaagaagaccaagcttggattgcgatagtaactaagaagttcccaaacttagaatcttaccacgtagtttacgacacaaaagtcaaagattcagacaagctgatggaactaggaagatcagaagagtgtagatctgtgtctgatccgagaaactccaaatgtgatcttgcgttgaaagatttcccggcggacttttacgagacgaaatgggatctgatcatggttgatgcccaactggttaccatgaagaagctccggggaggatgagtgctatttacacggcggggcttttggctcgtaaccgtgaagatggtg

SEQ ID NO: 5142 - DNA, 925 bp, Arabidopsis thaliana
acatcccattgatttcgagaactacagtttgtggagattctctcaagattttgagacgagagtggttttcttcttcttcttagccttcccctagacttgaccaaatgtcttccagtttgtgaaaatggattcttgttttgaaaggttggggaacatgctgcggtgttgggtttcgttggagcgccttggacaattgcaacatatattgttgaaggaggaacaactcgaacatatacagtcataaagaatatgtgccacactgcaccagatgtattgagagctctattatctcatttaaccaaggccattaccgagtatgtggtttaccaagttgagcacggagctcactgcatacaaatattcgattcctggggtggccaactgactccggagatgtgggagcgctggtccaaaccatacattgaagaggtacaattaaatgctttcaacttgattacttgaaagttgaaacattttcttttcgcgttttaacgttttttttttctgccatttgggctcgccagatcatacatgctgtaaagaaaagatgtccagatacgccgatagttttctacatcaatggaaatggtggccttcttgagcgaatgaaaggaactggagctgatgttattggacttgactggactgtagatatggctgatggaaggaggcgattgggaagcgaggtaagtgtgcagggaaatgttgatccagcttacctattctctccgcttcctgctttgaccgaagaaattgaaaggtaggtcactttgttcagctgaataaaaaagtagtgcttataattcaaattaagaaactgaaagaaatgtatgttttgtgtcagagttgtgaagtgtgctggaccaaaagggcataatctcaatctaggacacggtgtcttggtagggacaccagaggaagccgt

SEQ ID NO: 5143 - DNA, 328 bp, Arabidopsis thaliana columbia
gaatgattctcggtttcagtttttctttgagactgaagcggatctaaagaaggtcctgaataaacgcccatgtcatttcggtaaatggtcttttgctctcgagagatgggaacctaatcttagagctgctttcccaaactcaatgacgttttggaccagaacggaaggaatacctccagaattttgggaagagcagatcttaacaataaagtggccactctagaagatctgtttctccagctagtgatagaagaataaaggggaatctctaattcattctgagatacttgttacgctgataatagacactaccaagagggcccccccc

SEQ ID NO: 5144 - DNA, 560 bp, Arabidopsis thaliana columbia
cattgacctattgtgtgtgctccacagccacagcgcaatatcacgtgcctttttaaatggagttttgacgctgttagtgaaacacataagctgttagatgtgataatcgagcttgttagccaacccccagatatgtctttaccttaagcacatgtcgtgaaaatgccgacggatatcatcacacatgaagaagttgttgatgaaatcacaaatggccgtgaatgcaaactgactttctccatcctcaatcctcacggaaagtgaatgcatcaaaacccataatccgcagctgcagccaaaatattttgataagagttcaggagcttctgcttgaattatatgatatatgacaacagattaattttgcagaagactacctgaatcccctcgtttcgtttttgctgccacggcaaaacctctgccaaagtatgattacgtacagaaagcaggagaatcagatttctgtgtttaagccacgaaaaaagaaagtggttggttgggtggcactcacgtagtatcacgcggaacatccttccacatatatggaagtttcgaaggga

SEQ ID NO: 5145 - DNA, 156 bp, Arabidopsis thaliana columbia
caagcacctagagcgcagaactcgcccagggaatcccaccgcagtagtcctcagcgacgaactgggcgacatgcttgggcgccgagcctccggaccagtttcgaacaagccgccaccggccagcagtgggacgaccgagagcatcttggcactagt

SEQ ID NO: 5146 - DNA, 1371 bp, Arabidopsis thaliana
caagaaaaacgattaaattgtcatgattattatatatatatctagtttggatatgttgatgtgtgttgttagttgttactgtaaaatgttgggatgcatggtttgaaattgttttatatattaacgaataagatgacaaaatatataaaaatgtcacataaaatcatcatgatcgtctgattcttcttattgcatacatctttctatacaacatttgccaaccaacgtttctttaaaggattggacactgagattagttctataatattttttatgcctaccagtgttggttcatcaaccactggtcgtaccaaaccctctctttatgataatggaggagagagtgaccacggtttttaagagccgccgctgctacaatgggcctatctcgtagtcctcataaaccgggctagaactacgggctacggcggcgtggcccaattcaacaaataacaacaacagtagcatatcatctaaatataatattatacgatactatacttaaaaaagataaaaacaagatcctctgggacccactttcatgaaaattagccaattgggtaagcctttgatccttcatctctcgctaaaccatatcttcaaacgtcaactccccaaacttcgtcggcgattcaccggaggctatggcatcaatttactcctctttaacctactggctcgttaaccacgcctacatctccaattttacttggatcgaaggtgaaaccctaggctccaccgtctttttcgtatccgtcgtagtctccgtttacctctccgccacgttcctcctccgatccgccatcgattcactcccatcactcagtccacgtatcctcaaaccgatcacagccgtccacagcctaatcctctgtctcctctccttagtcatggccgtcggttgcactctctcaataacctcatctcacgcgtcttcagatccgatggcgcgtttccttcacgcgatttgctttcccgtcgacgttaaacctaacggaccgcttttcttctgggctcaagtcttctacctctcgaagatcctcgagttcggagacacgatcctcatcatactcggcaaatcaatccaacggctatccttcctccacgtgtaccaccacgcgacggttgtggtcatgtgttatctctggctccgaactcgccaatcgatgtttccgattgcgctcgtgacgaattcgacggtacacgtcatcatgtacggttactacttcctctgcgccgttggatcgaggcccaagtggaagagattggtgacggattgtcagattgttcagtttgttttcagtttcgggttaccggttggatgcccgagacacttattcgggtcgggttcaccgggatttggggatggtg

SEQ ID NO: 5147 - DNA, 562 bp, Arabidopsis thaliana
atgctacttctcttcatttcagtgataattcaagatactcacaaggctcaatagaaaatatatgatccaagtaaaacctttccccaaactgattagatgcagttgatcttttaactttaaacttaaaaagaacttactccaaggcggtaagatccaaaagtgaaaatgacagcatttgcatcctccaccatctgatcagtatagcccctctgacgagttaactgtttcacccagtgttttacaatctatacaagaagtttaaggaagaagatgtgttagattagatagttagtactgtaaacaaaacttgaccattatgcatttcagtaaacaccactgtgagcctctttgacatcgaagagaaagcagctaacccaaaatctacatttcagtaaagcagagtaaactatcaaacaaatgattagcgcctataagtcacttgtgttcacatggcaaatgagccaataggattaatagaaggactagactacatattgctacaatcatcttataattacggcatagaaatcgttggtctacacactataaaaagaaaatgtga

SEQ ID NO: 5148 - DNA, 576 bp, Arabidopsis thaliana columbia
ttaaagcacaagtaagaaacgtttgttaacctgtttccaagctgggaatggagatcaatgaccatcttctcttcgtaatcagagagaagacctctcttaaggtctggtctaagatagttagtccaacgaagtctgcaactcttgccacacctaagaagaccagaaagcttaggaacagctctccaacaacattgtccattggtaaggatgaagtttatgagcttcctatcctcttctgcagtccatggtcctttcttcaaccctactttgtcacagcatggttgtctccccatttctctctctctctctctcgttctctctgaattggttctatgacaattctctgtttttatctatctctctgtctgtgtctttgtccaaagagagtaaatgttatggcaagttgaagagagatttgggtaagccttgcaaccacctatatatatgcatactgatgtatgtatgtgtgtatgtctctataggttatctataaagagagcaaaaagaatgtaaggataaagtttgagcactaagattttataattcagacttttcatatctggttcacacacgggt

SEQ ID NO: 5149 - DNA, 514 bp, Arabidopsis thaliana columbia
tttctcttccatctccttcatcaccttaattgcaccactcacatctccacacttcattagactactcatcaaagcattataagctccgcaatcaggtgttaaacctctcttggaaatttcatcgaacagttggcgtgctttgatcttgttcctagctacaccagacccatggatcaatgtagtgagtatctgtaccgtgatatcaaaatctagacgatccatatcttcaaagagcctcaaagcttccccaaagtttcgttttttgcagaacccatcaattctgataccgtaagtgacggaatttggtttaaatcctcgtttcaccatttcatgataaaacagctccgtggccgtaacatcaccagcttccttaaaccctagaagtaaaatgttcatcgtcttcacatctgggttaaaccgagaatgcaatttttcgaaaattgatctcgcttccttcatctctcgctctgtgcaaaacgctcgtagaagaatattgaactcatcgacaccaaat

SEQ ID NO: 5150 - DNA, 569 bp, Arabidopsis thaliana columbia
cttttcgctcatttaaccacttcgtgtgttcttagggtttagatgttggtcttttagggactctctttgaatacttgtttattgcactttaagaatgattcaatttatcttcgacagagagatatgggttctcatggtaagggtaagagagatagaagtggaaggcagaagaagcggagagatgaatccgagtctgggtctgagtccgagtcttacacttctgactctgatggctcagatgatttgtcgccgcccaggagttccaggaggaagaaaggtagcagcagtcgtcggactcgacgccgtagctcaagtgatgattccagtgacagtgatggtggacggaagagtaagaagagatcttcatctaaggattactcggaggaaaaagttacggagtatatgtctaaaaaagctcagaagaaggtaaacttattgttgtatgttattttgttttttgtcctttttttgtgtgttttaaccttgtatttgttggagctggttgctaactttatgctacttgttaaattctttgtaggcattacgtgcagcaaagaaactgaagacgc

SEQ ID NO: 5151 - DNA, 968 bp, Arabidopsis thaliana
tccagcccattgaacacaggaagcttcttcttgttgcacccttcttaattttatgagtccaccatctcgtcttgaatctcattaggagcaataagcccaggaattgaaagcattctttgacgttctctctctctctgtgcagctgcttcctcagcatagagatctttgttatcctgaaaaataagtattcaacaaattggcttcggctatttggttttgagttcttaaaaccaatttgaatggcttttgcgaaagacaggttaagtacctgagcggaaaactccttagactgtacaaggaagtcacgaatgttattcttaaatccagacgggtcatttctagactcgtatagtccattcacaaattgtgtgacctgtattatttgttgatatcaatatatcaggatacgaagtaaaaaaccaacatgaaaactgtgaaagtgaaacttctggttttagtttttattacctctgctgcagtcatgtttgggaatgaagagctcagtagcttaatggtgtattcgcgaacaaatgcaacgttgtccggatacgggtaaggaacggttgtagcatcccacaagggttctgtcaaagcaccgctctcaggctgaaatatataattatcaaacggctaagtgcatagaactacccattcccaagtaaatgattacttaagctatcaaataagaaacaacaagagaagagatggttttaccaggcaaaacagttgctgcagcaccaacacatgtagcttgaagccaggcttatggaaggtatcggtcaaaacggcaaatatttcttgctcgatttgcataaagtatgaccggtagaattgattacaaaattcagattgctgtcacaatcagagtaaagtgttagagcaagcgtaatatatgccacaaccactgagctaaaagaaggaaaataaacaccaaacctgaaagtttttcagcatctcaagcaaaagat

SEQ ID NO: 5152 - DNA, 569 bp, Arabidopsis thaliana columbia
ccctatgtgtgaatgcgtgtctgatctgttgtgttgtgttgtgctattcagacagagatcaattacttggggcaactgagtcacccaaatctagttaaactgatcggttattgcttagaagatgaacaccgtcttctagtctacgagtttatgcaaaaaggaagtcttgagaatcatctattcagaagtgagtcccatggatcatctttatctttgattaaatctgttttcttttgtttttggttctgatggaaaatggttttaatataggaggtgcatattttaagccactcccatggtttctacgggtcaatgttgcgcttgatgcagcaaaggggcttgcttttcttcacagcgatcccgtcaaagtgatataccgagacattaaagcctcgaacatcttacttgatgcggtatgtagagaaatatacacattcaaagaattagatgtcttcatagtactttcctgatgactttgattcccttaaacaggactacaacgcaaaactttctgactttggactagctagagacggtccaatgggtgatttgagttatgttagtacaag

SEQ ID NO: 5153 - DNA, 674 bp, Arabidopsis thaliana
actactataagccatacaaactaggcaaagtaccaatcaacaataagatagaaaatagggggcggtcttcaatttttttttgttttaggcgtaattcaaattacttcatgtagacaacttagtcatgatgtctcaatgtctaatcatgccaccgggaactaggtaacctgcgaaaaaatcacaaacatatgaaatgtataatctataagataccacaacctaataactttaaacttatatactaatgaaatgaatgtattaaatttgcaaaccaaattacattgaccgaaaaaaaaaacaagagaattgggacttacttccgcattgtgagccaggagcaagtggacggccacaagcagccgcgacattgactagcttttgcatatcaatggcggcttcgatttccttattgatgacttcgcatacacattccatcccgatgattcggacaagagtgcaacaaccttgggatggtcttggcggagttggcagctccttgtcgatagaatctggacatcccctcagaacttcgatgcctgaatcattacatctctccccctgaatttgagatgatgacaacaacatcattacgactaaaaactgacaaaatatctgttctttcatttttctttatttttattcttctattgtcttctttcttttacgcattatat

SEQ ID NO: 5154 - DNA, 409 bp, Arabidopsis thaliana columbia
tcacagtcaaagaaacatatggaatcgctaggtttggccaatatatatcacgcggctctgcagcccattcggttaaccattcagttgggtttcgggtctgcgtggtctgagcgcaaacagcagcagcccaacgggttttgaaagagacaaaagatgctggcatgactgacttttgatcattcaccacattctctctctcttcagcaatctacaaacaatgcagattttaaaccaaaaaaggaacattaagcatatggcacacaaatggaaaccagacagaccacaaagctgacctcttttgatgttttatctacttcagcaatgtaatgttcgattgcgtcaactttttgtccacacaagccaaggcacccaagctgagtttgttaagaagatgcgagatgacagttat

SEQ ID NO: 5155 - DNA, 520 bp, Arabidopsis thaliana columbia
aaacaaaaataataattaaaaactgacttttttctttttgtaaattgtaaattgagattttattcgttttcatcatccaccaccgtcaccggcggatccggcggaccaagatggaaaacttccagcgaagaacaaatcatctcgatctctcaccgctaaatttggtatcaaaagatcatccacgtcatcatcatcttcttcttcttcatcatcttcttccacttcttcttcctcctcttcctcttccatgttgacttcttgaccaaccatatcttcatctccattcgtttcttgaacgtcatcgtttcctttcaacggtgtcgtcggagaaagatgaatctcttcttttactgtatccgataaaggagatgtgtccggtttaggaaccgggttaacgggctgagatttgttacgagtacttccggcgagagagttccggtgagtaggacgtggatgagtgtgtctccggtgtaagtaacgatgaagatattaggatctaaattacttctttcaacttgtt

SEQ ID NO: 5156 - DNA, 694 bp, Arabidopsis thaliana
gacacactacagtgtaaatccaacggctgagatttctcaaattaccatcaaagcttttagggtttggtgaaaccttccatatataaacactgaaacctccaagttgtctttcctctttgcagttttttttcatttgagcttctctctgataaggtcacttcctctgacccttttatctaagctcaacgctgcaactctcgccgtcggttacttccccattttccttccttcttccgattcaaagactcaatttttattctccggcgttgaggattcatctcctaaaaatctctgctttatcttttgatttgagctgatttggagaggagaagaagatagatagataggtaattcggattgatatctcgaaaaatggctcagattcagcatcagggtcaaaatgccaatggtggtgtagctgttcccggtgctgctgcggctgaagctgcggcggctgcggctggagctgcggcggcggctgccggagctgcgcacaaagggacgacgtctttatatgtcggtgatctggatgcgaccgtgacggattcacagctgtttgaggcgtttacccaagcgggtcaggtggtttctgtccgtgtctgcagagacatgacgactcggagatctctaggctatggctacgttaactatgcaactcctcaagatggtaactttcttaaggcttatctgattt

SEQ ID NO: 5157 - DNA, 585 bp, Arabidopsis thaliana columbia
ctttaaactcaatttatgccaaaggtaaaacggttcacatagttcagtgatcaattataaagagacaagtaatgacaaatcttaccacaaacaatccctgatagactaactcattattgaagcaagggactggattttctccagagtagcaacacgaattaccaagtatgaaaatgtttaaagacagtggaaatgcgttacctgtgggcaaggcctctggaccaagcaaaaatagaggctatgctgttggtgcttgtttcaccacctttctggtgaactctgtagtggcgtgtaactgtgccatgagctgcttctgcttcaatggtctttccatctggacaaacctgtaatatatctcaaatttaatacataacatataatgatgcgcaggaaacatgttatcatgataaagaccaaaaactttggctgaggccgcgtcatttcataccaacaccgaagtcatcattcccagagatccatatcctgcagcggagagcagaaactttgtttcataaggagaaataaaattgaagtttctgtccccatttagatcacaagtaaagaacaaagaactatgatacaaga

SEQ ID NO: 5158 - DNA, 552 bp, Arabidopsis thaliana columbia
tttgacgctgctgcatgctttcttactattggaatggctgtcattctatcatcatggacagaaaactatggagatccatcagaaaacaaggacttgcttacccagttcagaggtgctgcagtggccattgcctctggtgagtagaaaatcttgttgccccttttagattttacttcctgttttgcttctctgtctattgtgatggttctgtgttttgtttctcattgtcctcattgaagaatgtatgatggtaacaaaatttttgtatcttttatcagatgagaagatagcactattgggtgctatccagtcgctctttgaaggatctatgtatacttttgtattcctctggactcctgctctaagtccgaacgatgaggagattcccatggtttcatttttgcaacatttatgctagcttcgatgctaggcagttcccttgcatctcgtctgttgtctcgttcaactcccaaagtagagagctacatgcagattgtttcctagttccggtgctgactattgctccaatattaatgctgtaagttaataaag

SEQ ID NO: 5159 - DNA, 556 bp, Arabidopsis thaliana columbia
ggccccagtttgatggacaaaacgtgataagatattccttggcggcaatgtgaccaaaggaggaggtgtctcgtaggcataactgtaatagttgggacaagcttctttaaacaacatagagtacgtgtttcttttgcacttttccggcgttccatatgcattccggcaacaaaatctgtcgttatcaaacgctaaacatgcactcttgcacgccacaactcgtccctcttcgttcaaaacctattaaaagagaaaattgtattcaaatgagtataagtagatctaaggattaaatatacacttataacgggtttctgtttaccccaactctcaataactctaactatgtttcattgtatggatccaataataaagcaagtcgtagttcccaaattgatatttgatttctagacaaaagatcaccagaagatgaagatgcaattctcttgacgtcatatatatggttttgagctattcatcattatgatgtagtgagtcgaactacctatccatctactgacagaatgtactcagttttgagatacgagcattttga

SEQ ID NO: 5160 - DNA, 515 bp, Arabidopsis thaliana columbia
cagctttttcagcagccttcagattctgaagtctattcttttcttgctttccaactctcttcttcttatcatctagtctcgtggcaaaaggatcaactcctggttctgcaattaaccaaaagctttcataaatagtagaatcaataatgtaatgcaactccctatccttgactgcaaacgcaaagagattagatttccacattgtctctaacaacataatctaagatagttgtttaccataagacttaccatctgattcttacgcctcaatgatgggaacatcattatcatcgctaacacggtcataaccatggcgacgcttaaactgattagtttgttcatcccatacaactttttcctacgtgcgcttctgcatacctaagaaacagaaccaagaacaattccaaacgatataaacattagtaccttcgaactatagaacacagaggtcgtcgaccatccaaatctgaacaaaatagagcttgcaatccttaaaacaattacgttaacagctt

SEQ ID NO: 5161 - DNA, 510 bp, Arabidopsis thaliana
caatctgttatctctttgcacgtaagtttcttagcgccaagtctacgctttgtttaacaaagactgtcgtctctaactatatgtctgactcaattctttgttgtagatatttgcgagtccaacatatgagtacatggacacaaagtatgggatcaaaggaaacccatttgcgataaagaacctgctgtttaggatcatggcgagaggcgggtacatagcggtaagcacgcttatctcagcgctgttgccgttcctcggtgacttcatgagcctaactggtgcagtgagcacattccctctcacattcattctagccaaccacatgtactataaggcaaagaacaataagctgaatgctatgcaaaagctatggcattggcttaacgttgtcttctttagtttgatgtctgttgctgcagccattgcagctgtcagactcatcgccgttgattcaaaaatttccatgtttttgcagatttgtaattcattatattatatagtcaattgtgt

SEQ ID NO: 5162 - DNA, 507 bp, Arabidopsis thaliana
aagtttgtctttcttactaaatggtgcagcccaaggatcagtcaaaccacaaagaggcataagacaaggggacccactgtcgccctatatctttatcttatgcaatgaggttttctctagtttatgtcagaaggcacaacagaatggggacttacttggagtcagagtggctaaaggcagtcctagagtgaatcatttgctatttgcagatgacaccatgttcttctgcagatctgaccttcaaagctgcaagaatcttcttctaatctgcaagaatcttcttctaatcctgcaaaagtatgagaaggcctcaggacaaatgattaacaaaaacaagtctgccataaccttctcaaccaagacaccagaaatgattaaagccgaagctatgcaagttttaggtatacaaacagctggaggtttgggaaaagaccttggcttacccgagctctttggcagaaagaagaaggacatgtttaacttgatcatcgaccgcatcagtcagag

SEQ ID NO: 5163 - DNA, 616 bp, Arabidopsis thaliana
atgaattacaaatctgcaaaaacgtggaagtttttggagtcaagggcgatgagctgaagagctgcaatggcggcacgaacagacatcaaactgaagaagacaacgttgagccaatggcatagcttttgcaaagtattgagcttattgttcttagccttatagtacatgtggttggctagaatgaatgtaagggggaatgtgctcacttgcaccagtgaggctcatgaagtccccaaggaacggcaagagtgctgagagaagcgtactaactgctatgtacccgcctcttgccatgatcctaaacaacaagttctttaatgccaatgggtttcctttgatcccaaacttggtgtccatgtactcatatgttggacttgcaaaaatctacaaaaattgagtaagaacggattgactaacacataattcttttctcgaagagaaacttacgtgcaacgagataacggattgaaggatagcggagatgttagcaagggctttacccaaagtggaccattaacgttgtttagtagatagggcgaggtcgaggatctgtaagccaatacccgatgaatcaactgcaaacatcggtaaacaccaccgtgaattgaaagtatag

SEQ ID NO: 5164 - DNA, 810 bp, Arabidopsis thaliana columbia
ctattattcttaaataaaactccaaaaaataaagtcaaattagatatgtagtgcaaaggcttgttgtttattaactttacttgggccaatatgagattacccaaagaaacatacttggtggtattaataattacaaggcttttagcaaagatgtatatctaagcgcattgaatatacaatgatttggcccaaaaggaccattaatcaaaattatggcgcactgaatatacaatgatttggcccaaaaggcccattaatcaaaattattgcgcaacgaggtcaattttttttttggcttaattgcgaagagaagcaaaacagaacaaacacaaaagtcttcgacgaccaaagaacaagatcatcctctgatttttcagacacatatttgtaatttataaagtttgtagctttttccttagcttgagattacacgaagaagaagaagatggatgacgttaaagataagctaaagggattcatgaaaaaagtcaatctctcttcttcttccggcaaattcaaaggccaaggtcgggttctcggatcttcttcttcttcctctgcaccacccgttaacccgattcagaaccggtttaactcttcccaagctcccaatccgactcctagacccaaacccaatccaaatccgttgcctgagaaacccttatcctcctccgatcagaagattagtgggtcaacgagaaacccggatcatgacccggttcgtgctccacaagatgggtttgacccgtacggtgctttcataacgtcttcgaacagatctcagaacggatattctctgagcatgttcga

SEQ ID NO: 5165 - DNA, 422 bp, Arabidopsis thaliana columbia
gaagagcgtggagatagatccatggaacgaaccttttcaagatcttcatcaacaaatgagaccctgaggaagttgttgatatacttggagtaatgtcgaagcacacgattagaaacattcacctccggtccagagaaatagactcttgctggtggaacttgaactcgatacatataaacaagtccatcatcaagagatattgtaggagacagtggaagctttcctttcgatatccacttcttgtactcatcgcgaagcaatgagcaggctcatagcaacattctccgaggtgatagagtttttcaagacagtgatctatgagagctctatcatatgtgttctgattaagcaaccgataaaagtcaagatcaagagctggcccggagagacacgcgttctgcaccaatgtgttaagtttaagc

SEQ ID NO: 5166 - DNA, 865 bp, Arabidopsis thaliana
gtctcttcctgatgaaattaatgtttggctcctttttagtcaattaatgtttgtctaatagtgtatgtaagggaaaaaatgatatgtataacagtgtctactacaatgtacttagcttactttaataaataatggatacaaatattttgctcttagtaatattatgtttcgatcatcatcttcccgatcgaaaccgagttatcggtgaggtcgtttcgaagtttccgaaatttctaatttctaatttcaatactatacttttttttcatctatcatttaacattctcctcaaaatatttgctaaattagaaatagaaaaaaacattattgccagaaccatagaaaaggaaactaaaccgtcgaacgaaaaaaagttaaatggaaattcgaacaattttttttttggcaaatagaaattcgaacatgaaaatgggaaattcgataatgtaaacaacacaacgtaaaatggaaattctcatatcgctccttctatatatacatggctttgctcatcataattttcatcaagcaaaaactcttactttcctctgtctttcaaagttcgttctcttaaatttttcttagcgatctttcaaaagtttccacaatggagatgttacttggtggacaagcaaccaatggagctcttcgttcaaagacgaagatagtttgtactcttggaccagcttcaagatcggtggagatgattgagaagcttctcaaggctggtatgaacgtagcccggttcaatttctcccatggttcgtcactcttaccatcaagaaactctcgataatctcagaaccgccatggacaacactggtatcctctgcgccgtcatgctcgacactaagagtcctgtgat

SEQ ID NO: 5167 - DNA, 548 bp, Arabidopsis thaliana
caaaaaatatttacaagcttttcaaataaatcaaacatattccgagaaaacatgtaattcaaacattgatatgtgaatagtgtgctactatttaaaatgatggagataacaaaactaatagtaaggaagacagagtaataaccatgtcggaagcatcttgtcttgcttctcctttgctctacagtaagaagaactctcttgttacttatgtccaattcaatcccaaaaccaccaaagtgaaatgttttttttttttttggtgcagccaattctggaatccattctgattctttctacgcttcgcttattgatagtgccactcataaagctcagctgaagcaaatccacgcacgtttacttgttttaggtttgcagttcagtggtttcttgatcaccaagctcattcacgctagctcttcctttggtgacattacttttgcacgccaagtgttcgacgatttacctcgtcctcaaatattcccttggaatgctataatcaggggttatcaaggacaatcacttcaagatgccttccatgtatccaatat

SEQ ID NO: 5168 - DNA, 584 bp, Arabidopsis thaliana
tgagcgtgtcaagagctttagagtcaaagtctttaatgacggactcgagcatcgctgataagcctcgagccattgcttctccgccgccgccgcattgaccatcttctgcggtggtggattgacatgagctagtagttgcatcagcagaatcgcggtggtccgagtctgatagctgctccatttcccggcgaggctctcctaaagtttgttggttttttaaggttttcttcaagaggaaaaagagccttgtgtggataatgacgcaaatagccctgagaagttaatgtatttccgattcagatattttagggcttttctacaaatgtgtgtgtgtgtatatatgtttaacgacgccttcatttctccgattcgattcagagcgacaagatgagagccaaggtcagttttttatctacaactttagctatgcttctgtaggttttatcaaaaatgttgtgtgttgatctttaagtatattgggaattttgtgaattgctgtttatagaatcagtcgagtgagattgaaacattggtttagtgtacacgacctgtaggatattgacatctattgattaggattgtga

SEQ ID NO: 5169 - DNA, 495 bp, Arabidopsis thaliana
ggctaagtcgtaacatgttgaggttctttaacttactgcaatgcctttgaagctcctaatgcaatatttatacgtacattccaagtgagcttcttgtgcaacttgcgatccaaatgtagtgcatcttgaagtgatccattaggacagtactcatacacaagtaacctttgaccaaactcgttacagtaaccaagaagctccaatatatgaccgcgtttaagcttcaacacattggagactagattgaggaattcgccgtcactctgtgttctgttgatggtattgctcagcttcttcaccgcaagaaactatagatcacaacgtgtcaagacgtaaataagaatgcacagcataaaatactgtaagaccagatgacaaataagaggaaagtgtcacacctttccatgacgaagctcagctctgtagacattaccaatcgacccttccccgattatattctcttctgagaaattatttgtgtattgctgaagtgaa

SEQ ID NO: 5170 - DNA, 444 bp, Arabidopsis thaliana
gttgttttcagctttttctcaaaagcatgtcacgtatgagcattaacacccgtgtggaaaaatggagccaagtgagctaagcattttagcttcataaaacaaacacaccgacgtcgttaactcttcatcttcatttttttctgtaacttctcccatattttttcttcccaaaaatatactataaaaatgagaacacttcttctaacgattttgatcttcttcttcacagtgaatccaatctcagcaaaattctacactaacgtctcttcaatcccaccgttacaattcctaaacgcaacgcaaaacgcatgggaaacattctccaaactcgccggttgtcacatcggagaaaatatcaacggcctctcaaaactcaaacaatactttcgccgtttcggttatatcaccacaccggtaattgcactgacgatttcgatgacgtgc

SEQ ID NO: 5171 - DNA, 513 bp, Arabidopsis thaliana
ggtcgcttgttggaattccccatgctactcgcgtggtccgcgagctttagaattttcattccgggtaggcagttggaagttgcgaaaccgaatgagatatgggttttatttgccggcactcctattcgcttttcgttgagagagttcaagatagttatcgggttacagtgtggaaaatatccgagcttgaagatgaagaggaagaaaggcactgcggggaagaggataccattttacaataagctgtttgggcttgaagaagatgtaactgttgaccgggtgattacaatgttgaagagaaggattatctcagatcccggcatgaggatcagatgtgcttgtttggccattgtcgacggctttcttgtccctacctcgcactatcccaagattgttaaggctcacgctgaaatggctgaggatgttgaagcatttctctcttatccatgaagccgtttcacattcgagatgatgattaagtcgattaaagagagggaaatttacaacttgcta

SEQ ID NO: 5172 - DNA, 482 bp, Arabidopsis thaliana
cagcaattgacattctaaacgattctttctaaatggttatatttcaggccttctgggatgttgtaaataagaagcagctaggaagtaataaagccgagtggtctgtgacaagtgaatggtctccagacgggcgttatttcttgactgcctcaacagcaccaagacgtcaaattgacaatgggtatgttaatacttcttccctcataattgagtgatacaatgagtactatgcatcgtgcatcaattgtttgttttcatacccgcctattttaatccatcacttttgacttatgaaccaaccagtcagagatggtattattctttttttctccttggtttaaagttgtgttctatatctttcgtctttgtcctgactgaaggatgaaaatcttcaactacgacggaaagcgttattataagaagatgcttgagaggctgtatcaggtatgtgtctctaaacagctttgaaaacatacattgat

SEQ ID NO: 5173 - DNA, 655 bp, Arabidopsis thaliana
ggacttctctacactttctctggtaaaaataattctgattgtgttccttgcaccacactctttaagattttgttccaattctaatctgatgtattttgtgttcctcgtagcttggttacaagtaagtaaaggaaaggctcctgtgaaagcagttttcaagaagaatggtgaatataagcttgctggttcggttgttgctgaatccaaatgctggtccatgcttaagggtggtctcactgttgatgaatctggtcctgccgaactctattttgaggtatatttttctgtgaattgttgccagtttctgcgttccgtgaatttatttttcagccatgcttagtcctgtttcattgttcatgtgtagagtgaagacacaactgttgagatttgggttgatagcgtctcgttgcaaccattcacgcaagaagagtggaactctcaccatgaacaaagcattcagaaggagagaaagagaaccgtgagaatcagagccgtgaacagcaaaggcgagccaataccgaaagcaaccatttccattgaacagaggaaactcggattccgattcgggtgcgaggtagacaagaacatcttgggacaaagcatacaaaactggtcactcaaagatttcagtgcaactttcgcgacgagatgaatg

SEQ ID NO: 5174 - DNA, 579 bp, Arabidopsis thaliana
ctgttgcttgaatcctctttactaataaatagtacacgagctaatacatattttctactcatgaaaggttcttcgcctctctgcggcaacacaagatttaccaaagtctgttgtatgcaatgtccatggtgtcaatcccaagttccttatgattggggagaaaattgctgaagagagatcccgtggtgaacaagctttctcaaaaggtgcatacttcttaggaaaaatggtgtgggctaaaggatacagagaactaatagatctgatggctaaacacaaaagcgaacttgggagcttcaatctagatgtatatgggaacggtgaagatgcagtcgaggtccaacgtgcagcaaagaaacatgacttgaatctcaatttcctcaaaggaagggaccacgctgacgatgctcttcacaagtaagttctgaaaaatgtgctttgcttttaaaaacttgttaaggtttcgctctttgattgtcttcccacatcttgatgaaggtcaaagtgtcataaccccagcatcacgatgtctatgccagcaacgcagaacactagcatggggaagttgtggtgtgtcag

SEQ ID NO: 5175 - DNA, 997 bp, Arabidopsis thaliana
tgtctgggctcaaattccagttgatcagaaagcaataggcatttagaacaactaatccataagggatttatcaatcaatactcaatcacctagcatactgagaattctacactactctaacccatcctcagaaacctattcactacttagacatcataacagaaagcataaacgttgaacaagttgaaaacatgataacaacagtgtaacagcaggatgatgacagaatgaacaacagtaaacgaaatcaagaacaaaagctgaatactgaatactgaatagataaagagaaatccagattacaaaaggtctagaacacaaggtctgcggaaataaaactagataaaaacttgtctgcgaaaatgtgaagtacatactacttatagccaaatatcccgaaaccctaatactcaaaacgacgcagtattgggacggattaagaactgtactcgacccatgtggtggagtgggaggtcgagtgaatagctggagtcttcttttcttccttgtgctcgagtgtctggttcagtgcggaatgaagaaggctctgaagcttgtcatcgagtatgcattcgagtggtggcgatggtgatactcgacttccaggtagagtgatgaggtcgagtagtggtctggcaatgggatgaagacactcgacctctgggtcgagtgatgtgatcgagtggtggtcaagagatggagatgaagacactcgacctggtggtcgagtggtgaggtgaagtggtgatgtcttctactcgacctgggggtcgagtgatctcttgagatctcgaagctcctactcgacctctgggtcgagtggtttgtcatgatcaggtccgcttcttccagttagctcgtcaataggtccaaatcacttgaaatcaacacaaaaatgcaacatacatgtaaacctatcctaaacatgtaaagtgatgacaaatgatgagaaatggtataaaacagtgatgatatgatgctaaagtgatgacaaatg

SEQ ID NO: 5176 - DNA, 969 bp, Arabidopsis thaliana
catacatgttcgttggaaagtgatcttgttcttattaattttttttattttgttggtgtagtgtttagagaacccttataaaccacagtacaatggaggaatcatcgtgaatcctgagctacaaaatggttcacaaggctggtcaaaattcggaaacgccaaagtcgaattcagagaatttggtgacaatcactatgttgttgccagacagaggaatcaatcttttgacagcgtctcacaaacagtttatttggaaaaggaacttctctacactttctctggtaaacataatttcgtgtttcttggagcatactcttcagaattcatttgatttttttattactattcttgtagcttggttacaagtaagcgaaggaaaagctcctgtgagagctattttcaagaagaacggtgaatataagaatgccggttcggttgttgctgaatccaaatgttggtctatgctcaaaggtggtctcactgttgatgaatctggtcctgctgaactctacttcgaggtatgtttatacacaaacatactcctggtcctcctctccattgtttgtctgcgtttatgaattttgcaagctgctttaaattttacctatgacaattcttatttccctggtcatgtgtagagcgatgacacaatggttgaaatttgggtggatagcgtctcgttgcaaccattcacacaaaaagagtggaactttcaccaagagcagagcatttacaaggcgagaaaaggagccgtgaggatcagagccgttgacagcgaaggccagccaataccaaatgcaacaatttccatccaacaaaaaagactaggattccattcgggtgcgaagtagaaaagaacatacttgggaatcaagcatacgaaaactggttcactcaaaggttcacagtgacgacttttgcaaacgaaatgaaatggtacagcacagaagttgtaagaggcaaagagga

SEQ ID NO: 5177 - DNA, 817 bp, Arabidopsis thaliana
ctcgtgaaacgttgcatataccctccaatcacactttttatcatcgcacaccgcaatgactcgtgtcttgtcggacgcttttatacggaaattgaatagccttttcatagagtacatagttaatgttttatgcaactcgactttgttgttgaatacccacccgatatatattgcatcgccacccttcctaagattcatattagctttgtcggaagcaaccccggctgcgttgtccttgaacggaacggcatctctacacatcaacatctcgtcccctgctaattcagtaaatatagtctctccgtctgatactcttctcgacatgtcctctgccagtgcccttgctgtattatcatttctcgcactgtatgtattacgaacctctacatcacattgtccttcctcttcagctgcacttgcttccaacgcagtcactacaacgtccactagtcctacttatcctccagattcagggaccaaatcacacgtatccagcgtctctgttattgaatttgtcctcatagttggccctgtcctctgccccagttgtatagacattctcgtattttcctcatcattctcaccttctacatcagcgtctgcgattgttgtaacctcaacgtccactatacctacccctggcaggctttgtccacgcacgttgttcaaacaactttgacagtccttgtcaaacgattcttccaatgttgtcgcttgcgtatccgttaattgagctctcattctactttgccctcgctgaatcgacatttctgcactctcatcgcccattccatctcaacaacttctacttcgacaa

SEQ ID NO: 5178 - DNA, 795 bp, Arabidopsis thaliana
ggcctagacgacagtcattaaccacgtcatcaggatcagaagaaagaattcgcccctcaccaatgatatcctcaggaccagaccaattaaccaacagacattttgggtttgttcttctgtttacactctacaaaagaaggccaaactttaataaaaagaagtgattccaaaactgatggaataaaggaagaaggaatcacttaccctggcagcagcagagttttcacccacttcaggttcttgtctctgctttattctggtaagttcatcttgcagctcattgaccttcttcattaaaagaacttgcttctcttccatgtcagtcatgcacttgctcttgacttggaggcaagctagttttgttttactcatgcctctacccattgctctcagcctacccggattgtctggtcctaaaagttgagagaggtgatcttcttctggatttgctgacgttggtggaccatcatttccaaccagctcagccgcctttctctacagaatatgaaattgtgtcatctactaatattgataactgaaatcatgatcagtcttgcagtgattacttacaatcttttcagcagcattagtgttcaccggcgtaccatcctttttggtacgagactttacccagacctttagccttgtcacttctgatggatctccactttcaagtttctgtgtcaaaaaaaaaatttcattcaaatatatgagaatgcattcttaccagaagagacaacttacatgtcaatttacttaccatgtcttctgctaatctcaccattcctgtacgac

SEQ ID NO: 5179 - DNA, 561 bp, Arabidopsis thaliana
gttatactgttgtaaattaaaacttagataaggaaagaaccttgttggtgaccactgatttcagaaggtctatggacttcaacactgtgtcatcattcagatttttatgcccatgtataagagtcatgcaatcttctaggtcggagaattcaaatgtcggatgtgatgctttttcaagaacatctcgtactgcacataagcatagttttgtagtgtgagaatctccggcgtctatcaccaaacgttcttcacatttatcgcacagaagagatgcatatgtgttccattgatcttctggaacattttttctcctttcatcttcgagtatacataagtttttggcgtcaataagtgctgcatcataattcaggatctgcaatttctttgcatatttggttccaaagtcgcacaagtgaagtgaatggctcgcagaacagccacacatatttcaagattgtgtgctctgatagatcggggaaattcaaagctctcatctatcaaagggtagtcaagtaacagggttatggtaccgtcaccctgaggatgtgctttggtgaagtg

SEQ ID NO: 5180 - DNA, 2547 bp, Arabidopsis thaliana
ttcacgaatccagaagcctctccttctcttgcttctcttcttcttcttcttcttcagcagcttatcttccttcactagaagagtacccatcagctaaaggtgactacttttgtttaaccactgtttcaacttcggattttgagttaaagtttgctgaggaatgtagtaattatctatctttaaggttctgtgaagagagatgataaccagaaggtggtcttgaagggtatgacttatgcttcgctccaagtacgtcccttttgcaattctcaatcttttcttcatttggtttatgatctttgaggtggaattggggatattttcaacttgtaggaatgggttcaatctcatgggtttagaccaggacaggctttaatgttgtggaagagattgtacaaggacaatatatgggcaaataatgttgatgaacttgaaggtttgtcttctgatatgtctttgctcagaagtttttgtgatttagcaatgaggattggttttcatttatgtgttcattcttttaggtttgaacaaagatctcaagagaatgattagtgacatgctgagtttggggcattatctgttaaggatattcgttcggcttcagatggaactaggaaggtgaatagatcgttgtattttttcgtctaatgatgtggatgagtcaatgactgggaagtggttatttctctttatgaggttttggggaatcttctcattgattcataactcgcaggatgttgcagattctgttcacgttggatgatggacttgtgattgagactgttgttataccttgtgatcgaggcaggacaacagtttgtgtttcgagccaagttggttgtgccatgaattgtcagttctgctacactggcaggtaagcatatattatcttgagccacttttttcaggtcttgatttgtgtttaatgtatgtttgtactgatttcacaggatgggcttgaagagaaatctcactactgctgagatagttgagcaggctgtttatgccaggcgattgctttcccatgaagttgggtcaattacaaatgtcgtctttatggtatgcatgttcgttagacaaacaaaaaactcaacatagatcacatttaaggtctgtttatactggtgtctccagtttctcatggagctggatgtgttttgtagggaatgggagagccatttcacaacattgacaatgtcatcaaagctgcaaacataatggtagacgagaatggacttcacttcagtccccgcaaggtcacagtctcgactagtggccttgttcctcagctgaagcgttttctccgtgagtcaaattgcgctttggcagtcagtctgaatgcaacaactgatgaggttttttcatgctctctttaagccagtcatcattcatgaggtatgatctgacctcattgaaccgtgcaggtcagaaactggattatgcctataaacaggaaatacaagttatctttgctccttgagacgctcagagaaggactcagttcaaggcataagtacaaagtgttgtttgaatatgtaatgctcgcaggagtcaatgacaggtaagtgataattcagtagagaccgctattaagctctctgtttctcaatttaagtctcctctgttaaaaatggttcaattctgaaaccatcatgaactagaaactctttaattgtgcagcatggatgatgcaaggaggctagtggagcttgtgcaggggattccatgcaagatcaaccttattcaattcaacccacacagtggttctcagttcatacagaccgaggaagacaagatgatcaagtttcgtaacgttttggctgaaggaggctgcactgttctcatgcggtttagccgaggcaatgatcaaatggcagcatgtgggcagcttggtatgattggggcggttcaggcaccagtgatgcgggtgccgagcagttccgcaccgctttaaaagcatcagtttgatctgtcaaatgttggattagtgaaaagaaaacaaaatccccaccttgttgtaacgtaactcttattagatgccaattttttatgcttcttctgagattctttaacaatgaaattttgtgaaactacaattaaaagttcaaaggtattttttttttttggattacaacattaacctatggagtctgtagccattttttaatttaacttttggcccaaataatacttctgccaagtctatacaagaacaaaaacttgaactctgttagagcggtgagaaatgtcttgatttgaagctgcataatctgtactggtttactctgtctggtcactgacacggaatagctcgatgagcgtgtttcggattttgattctcagagcagaggcttcatcgggtctaaaccacttcttgtcgaactggatacattgaggacacaagtttagacaagagtaagaagaagatatgtgattcggtatcaggaaaagagtttgagattactcaccattcccaggtctttccttttcagcctttgaggcgcctcttcaatgaaccgtttaatgaagaagagcacaaacggacca

SEQ ID NO: 5181 - DNA, 1287 bp, Arabidopsis thaliana columbia
aactaacaacaagggcattgaaactatctagtgaacattgcaaatttacaaggctatgatcatcattatcccctatgcaagtgcaaaatgcaacaacctatatgataacattctaaaaacagccctattaatgcaaatgcaaactatatgacactctatttttttggaatcattttcaaaaaatttcaaatttttacgggttttctatgccttagatgatgcaaaaatttgaataagaaaacatgaaacaatgttagatacatcttgaaccctcccccaaacttaaattacacagtcccttgtgtaataaaaattcaaagaagaattcaagagaaataaccacacaaagcaagaaataaaagaaatgaaatgatatatacagtgaaatggagtgatacctcaacatttaaacgaagaggttctggacaaactcgtccaggaagtcttgtgtgtactcaggatcacgtgtggaggtgttggggttgttggggttgtactcggttgacccgtcgagcatgtagcccgagtagtactcctctcggcttgggtcagcgttcagaaccaactggttcactggaccgggtgggcggctgttgaaacggcgatctgagaaggtggagctcctcccgagctcgtagtttgaggctcttggcgggtcgaaacgagcgtcccttcgcggtgccacactcgttgagttacttctcctgaactcgggtcgaggtgttggtgatctctgtcttcgttgcagctcctgaatctgaaccgccatgccgtccattgctctcttcatctttctcaccttcttcttcaacccactgaacaacttcctctgaaacttgcccaaacctttgagcattcccaacttcttgtgaacttgaccgggatctctctcttgatcgaactcagcataatcctcaaagaaaaactgctccgttgcagcgtcgcacgaatcttcttgttcatcaaactgttcagcttaactaaactcaacttgttcaaactcggcctggccatactcggcatgctgaaagttactcggccgagtataggcttcttgctcagcttcttcttcattccactctgctccttcttcttgagactcactccctatgctcggctctgcttgtaggggcgcaaggacattgactaagatcgattgagaaggatcaaagtcaatgttgttcccaatcctaatggtggtgaacttcttgcaagggagtgctagcctagagagccctagcgtggagtgcttgaacttgaaatagagttgatccgctggagcagacc

SEQ ID NO: 5182 - DNA, 1192 bp, Arabidopsis thaliana
tcggttcaggggcttccatctctgttcaactattgacctatctttaaaagttcaaaatctgatagatagccggtcaaatttttggaacattgatctcttgaaagagctctttgacccggatgatgtccagctaataagtcactgcacttggatgcgtcaacaagggaggatttttcgggttggcatttcacaaaaaacggaatctatacagttaaatccggctaccatacagcacatatggatatcttgggaaataactcctcttctattggcccagagatcaaagttatgaaagcacaagtgtggaaagtgcaatgtccgcctaagttgcgccattttttatggcaaatattagcaggctgcgtgcaagtaacagagaatttacggaaaagaggaataaattgtgattcaggatgtgtcagatgtggcactatagaggaaacaataaatcatactttttttcagtgtcatctggcaagacaaatatgggctctttcaaagattcctacggtcccaggggtttttcccacttcttcaatttatgcaaatttggatcatttattctcaagaatcccttcagaatttgattcatccgcatatccatagattatttggtatatttggaaagtaaggaatgaaaaagtgtttgaaaatgtggataaggacccgctagacgtgttatgtctagctgaaaaagaggctcatttatggcagttagctcaagtagagttcaatactaaaagcctagtctccatatcaatcggaaaaccaactccgggtgagggatatctcacaagacattgtgtactgtggctttcgttgttttgtggacggttcatgaaaagaaaacgacaagttttcatgtctaggttggttttgtacttcatttaatggaggtacgtcaacaatgggagctgctaagctacgtagaagtctttctcctctcaataccaaagtcgaagctctactctgggcaatgaagtgtatgattggtgccggcaaccaagaagtagcttttttaacaaagtgttcagacctggtgaagatggtgtcttccccaaccgaatggccagcattttcagcgtatttggaggagtttcagagcgacaaagaagagttcacttctttttctttatctttaatttctcgtaatgtaaatgttaaggcggacaatttggccaaaagttgtctg

SEQ ID NO: 5183 - DNA, 1059 bp, Arabidopsis thaliana columbia
taaatattctttcggttgttgttttcgacagaggaactgatccgaggaacgagatgatgtgctttcttaaggttgtttctcgtattaagacgccacataaggttctactcactggctcactgtacaaaaacaacattaaggaggttttcaacatctttgatgttgctttccctaatttctgaagcataaccaaattggtaaaaatttcagaaaattccttaatgttgaagctgatggacctcaacgaatttgaagatgcccttgtttgataaattggaagaagctttgcttagtcaagattctgatcatggagacaagatttgttacttaaccgaactaaagatgttgacaaacaaggttatctacaatcgcaaaggagagtgtgttggggtcggattccacccaggtaagagagccaaccatgtttcaacgcctcgggagacgtcgaagagttatctcgaaccgggccacaaaacacctcggagatcgcatcaagaatccatacctaggcgatatcgagaacgcttcggagcgttctcgtgaaatggtccccgacccaacctcggaacgcctcggacataaaacctggcaattcatcccgaggcgggctccaagatgcctcgggaacgcatcctcgaatatcacggtctgagcagcccgagcacgacccgaggtcagctaaattccggctcggaggaacttcgggttagatgagaaaaccttcaaaaaaggacttagccaatataagatcaaacatatcatttccgaaaaccccggaagagataatcttcaaagatatcaccgaatacagaaattcccagaatcttcggaagataaggacaatctccttcaccaacttaaagataaagagaaatcttccgagaatattgcgagaggcgatattccaaagctctataaaaagcacctcgaaggacaaacaaaggggacacgcacaaaaacgctctcaacttcaggctatcaaaaacgctctgattttgaaggcaaaacacttattttccatatttctaaacacttgtacgatcgaatcctcattatttc

SEQ ID NO: 5184 - DNA, 513 bp, Arabidopsis thaliana columbia
tagtgattaccagttgggatggtgaaatagcatgtctttcaaaaatgttacttgtatgttttaatatatgtttggttaacagatcaggcatccgagaggtgccagtagagcggtggaccaagtatgtagccaatcatgctgagggccagtaaagctagtcccaccttcaacgctgccgtgtgcttcgccattcgagatccgctgatctgggtttttacaaaagattccaaatttgagctgttgcagtaaggagaattggatttgagtctctctgatggagagtatggactcttgcactcagattatggtgtcggtggagattcaactggatggttttctatacttaggtatgggaccaatagaacaaagtgtaagttgagacttgagttaatgggtggactctttttactcggtgatgtttgtgacttacagatactaattttctaactacgttgaatcccgaagctgtgtagagacatatctatgaccttatgtactgactattgaggatgt

SEQ ID NO: 5185 - DNA, 405 bp, Arabidopsis thaliana columbia
ctttgtaatcatggtcatagctgtcgatagcaagttacaaattctgtttcggtaggacatgtatttctattactatgaaattcataaataaaatagttaatcgtggggttaccattctctctttttttttttcgttatctcgcatgtggtcctaagaaaagggaatttgtcgatttttcggggtcttaaaggggcgtggaaacacataagaactcttgaatggaaatggaaaagagatgtaactccagttcctttggaaataggaagatctttggcggcagattgactggtggatcgtatcatcttgacttggttcttatttctgtatttttttaagtttcagaagagtatactgtatgtcctaccagtcatggataatctgagtgttgctagggacttcttcat

SEQ ID NO: 5186 - DNA, 1522 bp, Arabidopsis thaliana
ctctagactcctaatcagcgtaatcgttactctctcacaatgaaaagctttgcacttacttttctcaactatcacggcctagtctaacctgagccttagcacctgtattcatactatcgaggtctttggtcttctaggttagccttcgagatcctggatcacaccaaatcttcgcgcgaatatctcctctccaaactgaactcatcctgttgtgatttccacgtcattcgttcatttggcgatatatccacgtcagcatcaattacttgatcttcactttagtcttctgaaacagcttccagcttgttccagcaatcagcactccttctggtctgtcctgatagagggtgcactaacaatctccccctttttgatacaatttgtcaattcaagcaatcctgcaagaaacccctaaaagaaaactcacaagcacacatcaagtcatagagataataagcagcggaaataaccaatagagggtctcatcatagattgcataaataagtttttaagattcaaaaaacatcattcattacttagaagaacaactactaaaatcaaaatagcatgattaacaaccaaagcttaaaaactcccccttaatcctaaactcccccacaactagacctagacatcctaagaagattgagtatcttcatatccttcttcgttgtcaacatcaagagagttccaaacgaatcagagttctcaggggaccaccttcatcaactggcggtacatagtcgtcatcggcttcaggttcaagaccttgtgcctcaacatctgcattcacaccttgagaactgtgagaggaagacgaaaccaacccataatctccccctgcttgtatgacataattgatcaaaaactctatctaacacactaacaaggaaagcagacactaagtaaaagactggaaatcataccttcaatgcgtgttgctattgttgttagcaaggtagagacatgccttaagtctccaggtaaggacgtgccaaacaaatactctcctcgacgctttggatgttcaatcccaccacgaacgtctggattaaacagctttgggtgaggaccaggcttctcatagttttccagtgttatcactcgctgaaacatcaacactctgtagatgagatttggaaatggcaggatgttctgaatttgtccaggagagcgagcagctttttctacttgatcatagactagctttccaaaattaaaaggaatccgctcattcagaagatacagcatcttagcacgatcaacagtgacattcgagttattcttcgaaggaatccagttgatgcaacaaatcaaatatagaccagcgagatgagtaggcatgaccggagtgcgaagatccttccaagtgacgactttcccatcagataggtacttagcaagagcatgtttggacatagtcactctctcgaattcagccttggcatgccacttaatagccggagatctgaacgtcttgttaatcatctgaggagagaactcatacattttgcctctaaca

SEQ ID NO: 5187 - DNA, 1170 bp, Arabidopsis thaliana columbia
acctcggacatggaaatccgctggatctcaaggaggttcctaaagtgagcgagcgtgatgtcgatctcagattcgtaagtttgcaccaaaattccaagcagatgtatcaaggatcgcgttgtaatctgagaaagggcaatattgtacgatttcacgtactccaaagtgtaccggaagccatagaaaacagcaatagaagaacccctcgtacaaagtgtagaagccctcgaggggattatcagcacgctatatataaaactcttaaaggcgcgtcggatcagcaataaatgacaaaacggattggaggcgcgtgggctcgacggaaaggaaaacgcccgagtgaccctcgagaataagtaagaaacgtttccacttcttaagaaagagtcggctgcatgcagcggaagtttgaccgtccgggaaggcgaaccgccaaagtcatgacagggaaagatgaatagtcggctcggatatctactcgtgaagctcatcgcctcccttgccggagtcaataagctgggggcaaactgttggggtcggatttcatccaggtaaccgagccgaccaggattattggctcgggcatcactccaaagaatcatcccgagccgaccctaaaacacctcggacgtcacgtcaaagaaccatcctgagccagcctcaaacgcctcaggcatcactccaaagagcctcccagatccggcctcgaagtgcctcagataccaactcggaaaatcatcccgaggcgggtctcaaagcgcctcgggaaaacgtcattcggctatcctgatccgagccgcccgaccacgatccaaggattaactcgacctgactcgggagaaacttcggaccgagccagaacacctttgtccgaggaaaagacttgaccaatacaagatcaacatatcatttccggaaaacccggaaaggatagtagggaatctccaaggatattatcaaatatagaagctcccgcaaaattctagggataaggacaatctccatcacctactctaagataaacggaaatttcccagaatatcgggagaggcggtttgccaaagccctatataaagcacctctaaggacaaacaaagaggacacgcacaaaaacgctctcaactttaggctatcaaaaacgctctgactttgaaggcaaaacacttattt

SEQ ID NO: 5188 - DNA, 850 bp, Arabidopsis thaliana
actagatgtcatcaataaagtgatcacaaactcatctaggattctcggaaacaccattcatcatcttcatcaagggctgtggcgcattggtcagtccgaacggcatcaccacaaactcattgtggccataatgtgtccggaaggccgttttccgaacatcccttggatctatagggatttgatggtatctcgaggctaagtcgagtttagaaaaccacttcgccccttttaattgatccaatagctcatctatccggggtagaagatacttgtttttcaccgtaactctattcaatccccgataatcgatgcatagtctaaaactaccatccttcttctctcttaaagtgcccttcttgcccgcaatgataacaagtccttggttcatagccgggagcctttggtttcccgtgatccatccttgggcaactttgaatcgcatggtccttgcttccacaccggccacatgcacctatggccttccagcaagttccgctatgattctttccacaagtcggacattcctcgcgcttagaattggacttggtgttatctaccttgtctcacttccttttcttgtcagtggacttgcttgccaagtttgagcggttcgaatcttttcctgattcatgagtttctcctccattcatcggtaacgatcgaatcagaacttcccatgaaatgccttgttcccaacttcgagacgtgctcaagtaagttcaaatagtcttccctcttcctcgaagaatgagatggtggaatgactccacaactcccaatcaccatccctcggattttcaacgcttgtgcacatgactggcacaagggatttagcaatgtggcaattgtg

SEQ ID NO: 5189 - DNA, 1775 bp, Arabidopsis thaliana
tcttggcctgttttcaggtaattctttcaactgcatgtcaatgtcctaaaaataaacagccaatattatcatcttctccactattatggacatatgttgatatcttgtaaactttttctacagatgggctggtggaaaagatgataaatactttgccaagcttagcaaaaacactatctctgtctatgagactgagactttcagcctaatagacaagaaatccatgaaggtagataatgttgtggatatttgctggtctcccactgattcaatcctttcattgtttgttcctgaacaaggtggtggaaaccaaccagccaaggtatgtttcttttatttcttatgtaaatgaaaagccctgatacctcaataatcttccgtttctctgccagttgttttgtatttacatgttgatatcccattcttcaggttgctctagtccaaatcccgagtaaggtagagctgaggcagaagaatctcttcagtgtgagcgactgcaagatgtactggcagagtagtggagagtatcttgctgttaaggttgatcgatacacaaaaactaagaagagtacatactctggatttgagcttttccgtatcaaagaaagggatattccaatcgaggttcttgagctggataacaagaacgataagatcattgcttttgcatgggagcccaagggtcacaggtttgctgtgattcatggtgaccaaccaagaccagatgtcagtttctactcaatgaagaccgcacaaaacactggaagggtttcaaagctcgcaactttgaaggccaaacaagctaatgccctcttctggtcgcccacaggcaagtacataattcttgctgggttaaaaggtttcaatggccagcttgaatttttcaacgtggatgagctcgagacaatggccacagctgaacacttcatgtgcacggatatcgaatgggacccgactggaaggtcctactgtcttaactaaaccagtcctttggttgtttctatttgttccaattgctgatgttgtttgcacttttttattttcaaaggtacgttgcaaccgcagtgacatcagtccatgagatggagaatgggttcaccatatggtctttcaacgggattatgctttaccggatattgaaggatcatttcttccaggtatgtaacaagaaaaactcggtcttaaacgagcatcgtccattccgatgtctaataaaatatttgtgtatggttggttacacagttggcttggcgtccaagacctccatcattcttgactgcagagaaggaagaagagatagcaaagaccctgaagaagtacagcaagaagtatgaggcagaggatcaggacgtgtcgttgctgttgagtgaacaagacagagagaagagaaaggcattgaaggaagaatgggagaaatgggtaatgcagtggaagtctctgcatgaagaggagaaactcgtgaggcaaaaccttcgggatggtgaagtaagtgatgtggaagaagatgaatatgaagccaaagaagttgagtttgaggatcttatcgatgtcactgaggaaatcgttcaagagtcgtaagatactcggtctcttttgttgccatctgtttggatcccttagacaattttaaatcgtgttcgctatacttggaagataattgttggtccttcgatgattgaagatttcgttgttagttgatgaagtatggtgcttacgacatgtaatggtactaaatggtagaaaaattccaatacaatatagcttgtagtgtacat

SEQ ID NO: 5190 - DNA, 482 bp, Arabidopsis thaliana columbia
ggaggtaatgtggaagtatgttggtattgtcagatcgacaattcggctcaccactgctgagaggaaaatcgcagagctagaagcaaaatgggaaacatttttgtttgaacatggatgggaacagacagtggtagctcttgaagcttgtgagatgagaaacttgttctgttgcgctaagcttgtggtgagcagcgcgttacgtagacatgaaagcagaggtcttcattacatgacagactttccttatgtggaagaaagcaagcggattccgacgattattctaccgtcttctcctacaacagctagttggagctcaaggcggttacagaatataagtagcagctcacttattgattgctaaaactgcaggagtttttgttctaatttgaaccaaacctctctgattattgtatcaatttgaaaaaatttggatctcaaaaggaatctgtgattctgacactctgtaatacaaaaggaaataa

SEQ ID NO: 5191 - DNA, 565 bp, Arabidopsis thaliana columbia
catctatggttattacggtagataaatcaaagtctcgacgaggtcctgaacagaagaaggagctaactgctccaaaagaagggcctactgcgcatattgctgcacaaacctttactttccgagagttagctgccgccactaaaaactttcgaccggaatgtcttcttggagaaggaggtttcggacgtgtttacaaaggtcgtctagagaccacaggacaggtgaagttcgtaaattgaatttaatgtttcataatcaagattcgtcttctaattggatttaatattttgcagatagtagctgttaaacagcttgatcgaaacggtctacaaggaaacagagagtttcttgtagaggttcttatgctgagccttctgcatcatcccaatcttgtgaatttgattggttattgtgctgatggggacagcgtcttcttgtgtatgagtatatccactaggatcattggaggatcatctacacggtatgcttagtgatattccccactcttaacatggaatgcattattttcataagatagaaaccttgcattttatttgaactacat

SEQ ID NO: 5192 - DNA, 545 bp, Arabidopsis thaliana columbia
gggtaccgtactacatttcctaatcacagggatctcgtcgtagttgaaaccaaagcctagatctaaacaacctttgagaacttcgagatcgtcatccgtcaaactctaggatctcgtcagatcgtccttttgatcatccaccgaggaagctgcagtctcaacataatcttcctattattcttttagttctgtttctgctatcaccagaagtcaccgcaagaacacttcccttgacggatgtaatgaaaccggttattgtctcttagaatgatttctctgttgtatactttggatgcaaattttgcaaatgaatgacaatcagagcatactcttaggttcttgactattcggattgttgtgcctttgtttgagctaatgagtccataggccattgcaagtttctcgctgtgtctgctaagcataaagatcttctctttctcatcaacatccataagaacattactaagatcaggtacatggcctaagtgactcgctctttgactaacttcatctagcattgcttctatgtttggcattttagggtg

SEQ ID NO: 5193 - DNA, 814 bp, Arabidopsis thaliana
agaagcatccgcaccagttctgattcttatgagaagcaccatagggaaatgaaagccatgaatgacaaactggacaagctactccttgtacaacagaagcacattcattttctgggtaatgatgagctgttccaagttcaggatggggagactctgcagtcagaagaggtcagctatgtgcagaaccaaggaggttacaacaaaggtttcaacaacttcaagcagaaccatcccaatctgtcttacaaaagtacaaatgttgcaaacccgcaggaccaagtctacccttcacagcagcaaaattaacccaagccctttgttccatacaaccaaggtcagggttatgttcctaagcagcagtatcagggcaactatcagcagcaacttccaccacctaggttcacacagcagcaacaacaaccagcttcaacaactccagattcagacttgaagaacatgttacagcagattctccagggacaagcagcaggagcaatggatctcgccaaaaagatggcagaaatccataacaaggttgattgcactttcaacaatctgaacattaaacttgaggcactcacctcaaaggtcagatacatggaaggacaaactgcgtcgacctctgctaccaaagtaacaggacttccaggaaagtccatacagaacccgaaggattacgccaccgctcacgctatcaccatctgtcgtgatcgagagttgcctactcgacatgtctccacatcaatcaccaaggacagtgatgttcaagacggggaggtttctactcagattgaaatttcagttgttggactcg

SEQ ID NO: 5194 - DNA, 435 bp, Arabidopsis thaliana columbia
ctttaaattaatttctactctatataccgctgagtagcatttctctcaactaatctgcaagaccaatcatcatcatgcatatgtcacacatccaaagacgacaacactaacagccaatctctcattacaacaacagaccattaacccattaacgagtaatacccacacaattccgaagacaaactgtaccaaaatctccttaaatttgacaatgactaggatgagatttggtcatcctagcctcaccgaccggttcgtcattatacatcctcttaacattctggtaagccgcacacgcgatgacatagaagataacaagtatgatcacaaccacgatgttgatcaccgagacttttctcgaactctttttcaagctaccaagaacactggctttacaagagctgcattggtaacagagtagtctctggtcattgt

SEQ ID NO: 5195 - DNA, 500 bp, Arabidopsis thaliana columbia
caacgtatttactagtcggtgttctgtaacgttttgggatcatggctcgcgttagtgttgcgatttcctcacgaccttatgtgagtcggcgtttgatacaattcctgttagtagcacctcgagttgccacatctggttgatgtaaactaaaaaaatgtcagagtgggcgaggcatggaacacaaatgtatttttaacaaaacaaaatgcaacatataaaatatgaaaaaaacttcgagttaattgatcataccctatcttcaaaacaatgaaccattaattacactaaccagttgattttttttttttagacctacaagtttataaattatgaatggtcactctaatatttcgttgataattatggaaatgtaatcaagatgaaacctcaatgtaaccctgctcattggggtcgagctcttccatgatcaaagaagcataagacgcagcattcttcttcagattcacgagcctgttcgcggatcacttaagactatgact

SEQ ID NO: 5196 - DNA, 471 bp, Arabidopsis thaliana columbia
gtgattgaactatacgtctgcctaagattcattttcttctgcatgcctacttctaactcaatctataaagtgtgggatcaaactcaattctaactagctcaacaaatgttcacaacgaaaagggtccaagcgacgacccacaaagctaacactgggtgacagtaattaacaggaattggataagcaagatacatattctgaaggaagatgctgaaaattccttaaacaattttctttttttaaaacatgaacttgtccataccagctgttgcagaaaccaattgtctccatttttcttgatgctcgcagaaacgtccaatcaatctctgtgaaatgctcttcagggccgactctttttcagattttgcttgtgatagctcttttaataatttctttatggtaggagtccaatatcgagagacaccctgaaagagagtaaaaagtaagaagatctcatgtttaaaattaagg

SEQ ID NO: 5197 - DNA, 440 bp, Arabidopsis thaliana columbia
aacagatgggtaaaggttgcaggtctagaagaaaagttcctgaaacagaaggctaagcttcactggttgtaggttggggaccagaataataaagcttaccatagagcgatcatgacgagagcggctcaaaacacaatccgtgagattaaaaggccagatggtagtatcacgtctgaaaaggaggaaattaaagtagaagctgagagattttttcgagaatttctccaactcataccaaatgattatgcgagctagaaactttgatgacatttcgatgatcagaggaggataaaggtatgcttactactgaggttacaaaggaggaaatcaagagggttgttttctcaatgccagaagataaatcactcgggccagatggctacagaactgaattctacaaggcaacttgggatatcattggtgaggagtttgtcttagcg

SEQ ID NO: 5198 - DNA, 837 bp, Arabidopsis thaliana
cgtgttcttcctccactcctcctctcaattttggaaccacaatctctaaaactggtccagtcccatcaaagtatgcttcaatatttgcttcttccggaatccgattcggcaattgtatctccctcatgaattcccctggaggacaatgctcagccatctgatcaaccagcttgaaagtccggtcccgtctcttcacaaacgaagccctcgaagtgcttagtcccgtgaccttcacgattccatttgtgatattgttcctccatgaaaccttcacggtgttcaaatccacaaatggtagagttattacgaccagataagcttcttcgtcctcatagacggtttttgcagcagttacaggtccgcagctattcttcatcactcccgtgaagtcgtttacccaactgggcgggtccttggcgtggtgggtctcgatgttgttaacagtcaaacagcattcttcttcgctgcttccaggagatagaaactcttttctcttcttgttgttgatgactcctcctcctggagattgatcagacgagtccccattgctactgaaagacgcattgcttgtcaaatgtaagccggagccattgagaatcttcttggcgttattcggtgctgctttagtaacatgagctggtctctctagctcgatgtctgtgttgggaagatttcccatgaaccgaaatcactagcatcaggagggatagtgaacttcaaatctcgacccgtgagctccatccatctcttcttatcttcttcaccgacaccaaacaaactcggcgacgacaaactcaatcccgtgaagacactgaggattagagagtcacctgtaat

SEQ ID NO: 5199 - DNA, 599 bp, Arabidopsis thaliana columbia
cagagataaaagaggcgttgtttgctattcatcatgagaaagctccaggtcccgatggattctcggccagttttttccactccaactgggaggcgattggaccagagattattaaggaaattcaagctttctttgtcacgggaaagatgccaagtagggccaacgaaactcacgtgtgtcttatcccgaaaggtcaaggacctagaaaattggcagattatagacccattgcactgtgcaatgtgctctacaaaataatctccaaagttttatcacgccggttacaaccaatcttgtctgtgattgtggctgagaatcagtcggcttttgtccagggaagagcgatatcggacaatgttttgattacgcatgaggtgcttcagtttctcaagagttcgggagcaaagaaacactgctctatggtagttaaaactgacatgagtaaggcgtatgaccgagtggagtggaagtttgtcaattgtgtgctcaacaacttggttttcatgagcgttggattggctggattatggaatgtttgaccacgtttctttctccttcttggtgaatggttcccccaagggagtgtagtccgcaaagag

SEQ ID NO: 5200 - DNA, 626 bp, Arabidopsis thaliana columbia
tgccttctcttacaacgcacttctcatcgcttatacttcgcgtgagatgtatttcgatgctttctcgttgttcttgtcctggattggatcctcttgttactcttccgatgctgccagaccggattctattagcatctcttgtgtgttgaaggcactgtcaggctgtgatgatttctggttgggttcattggctcgacaagttcatgggtttgttatacgaggtggatttgattcagatgtcttcgtgggcaatgggatgataacgtactatacaaagtgtgataacatcgagtctgcgaggaaagtgtttgatgaaatgtctgagagagatgttgtttcgtggaattctatgatttcagggtattctcaaagtgggtcttttgaggactgtaagaagatgtataaagcgatgttagcttgctctgattttaagcctaatggagtcactgtgataagccgcttccaggcgtgcggacagtcaagcgatcttattttcgggttggaagtcacaagaagatgattgaaaatcatattcagatggatttaccttgtgtaatgctgtgattggtttcatgctaaatgtggtacttggattatgcaagacattgtttgatgagatgagtgag

SEQ ID NO: 5201 - DNA, 572 bp, Arabidopsis thaliana columbia
  unsure (1)..(572): unsure at all n locations
gaccatcaatagttagattgttttcaaatcgtatccatagttagattgttaaagatatcaaatggtatccatagttagattgttttcttcaaaatgttcaaatatataaaccatatctcgtttttttcacaacatgatgaaatgaatctcattgcaggtgctggcaaaccaggaaaaggagaaacagaagagaatggttttggacctattgaaagaatccagagaacaagtaggaaactggtatgaaaaagatgtgaaagatctcgacatgaatgaaaccaaccagctgatatctgctcttcaagatgtgaaaaagaaactggtaagagaaatgtctcaatattctcaagtaaatgtttcgcagaattactttggtcaaagttctggcgtgattggtggtggtaatgttggcattgatctttttgatcaaagaagaaatgcattcaactataatccaanacatggtgtttcccaatcatacaccaccaatggtttggatacaacaatgatggagttctcgttccgatatccacatgaactacatgtcaagttcaacttcaaccagagctaga

SEQ ID NO: 5202 - DNA, 595 bp, Arabidopsis thaliana columbia
tccactctaaatccatcattaaacaaactcaaaaggagttttgcttgacaacggttggtaaagctcacttccaagggtttgaacccattagtctctaaccactgtggccacgaagcaaagctctcgacttctgcatcattagcggtgatacgcgtcaaccaattagcaacccaaggaccgataaaaacacgctcaacaaagccacgggccgggttagcgattgaaaggcctgcctctagagagtcgaatatggctgagaactgatgtagcaagtccataaaacgatatagaaaaccttggtttcccatcagaccaacttcttcgtgaacaagcgtaacaagtttcgggtttagagttttagcttccgacaaaaaggaaatgactgaactgggtgtttggtgactaaaccgaggaagatgcaacatacaattgattaccactgcttctcctcttacaagtttcaaagatgatgtgctgaatgcattggtgtcaagtttacagtgttgatatgaaaatggctggccgatagaatcggcaaacgcagttagacgccgcccagtctcttggactgcagcacggattttttaccgtttgt

SEQ ID NO: 5203 - DNA, 562 bp, Arabidopsis thaliana columbia
ggatgagacatctttgatctggatttcaaatggtggagaaaaacgattgaagttagcaactgtatctaagattgttccaggacaaagaactgtaatttctcttaaaattcagctttctgttttgatgtagcagcatacaacgactgcaatattgctagtcttttgttagtaacatatgatgactttaatcatgtttatactatcaggctgttttccaacgttaccttcgcccggataaggattatttatctttttcccttatatactctaacaggaagcggactcttgacttggttagtgaatgaaactcagttactttctcttcaccgtttatatgatgcctctgtatatgtgaagtgaaaaggttgcgttgtttgcagatttgcaaggacaaagttgaggcagaggtgtggatagctggcctaaaagctttgatatctggtcaggctggcgctctaaaattgaccggctggagtgatggaggcctttctattgctgtaagtaataagtattcctaaagactatagatgtttcaaatgtatttctgaactttgtttttgtt

SEQ ID NO: 5204 - DNA, 530 bp, Arabidopsis thaliana columbia
tgtagcatataataaaagaaacaactgtctctcgaaaaaggagggctgcagatctactcttccaacaaaattcactgacctgaacccttctcgtagttggatcaagagttgcaaacaaacgattttcagcgagaacattagcaccagtcaattggttcaatagtgtactctttccagcgtttgtgtaaccgacctaaacacaatgggtataaaacatttaaatgtaaactgaagtgttggtcatttcctacaagtctaacatgctgtggtgtacttaccaaggatacaacaggtacaggtatagcaacacgcctgcttctatactgcttccgatgctttcttacagattccaactcctttttgagaactccaatctgcccaattcaatatgaaaacgttcagaagatgcttctatcttaatggaccaatacagaaaaatctaaacaaagacagaacttaagaaagcattaatcacaaactttatcacacaccatttctttacaaatgaagaggatatcctagtagaacag

SEQ ID NO: 5205 - DNA, 570 bp, Arabidopsis thaliana
gagtacattacttagatatatgaatttaagcagggttagggttttgagcatgatagatgatgtatttgctttctggcttgtgttcgtactcttactggattcgactaacagaattgagattccatgttatgttgttgttgcagaagcaaaaatgcccatattcacaaatgcgggcagacctccacgagaaagtggagaagcttgaaaatgtcgatacagtggttaacctcagcatagcagtgatggtactcgctgtaatggtctcatcatctttactacgatgaagaactgatataatcatctgcacttcacttaatctatgtagtctgattcactgttgcagcttcacacccattttgtaattttttgcacaatgctataaaaaaaaatcaccaaaatcaagaaaatatcaactctcatgctcgaacctcagaaattgtagccagttatgctgcagtccacagattaattggctacttttcaagcctagatctaaggttcatgttcattcggcaatagttaaatctgcataaaacaagggaaacacaagatttaaggttcagaaattat

SEQ ID NO: 5206 - DNA, 1613 bp, Arabidopsis thaliana
ccttgtcatttccataattgcttgtctgtttggattctattgtgcggaagttatgatttatattttcagattcatattttcacttaggaagctttagttggaatcaaagtggatgactctgattgaggatttcaatgatcgttgttagaacctttcttgtagttggtggattgtatcaaaattgatatgttcttaacttctggattgagagtcagaagttggaaaaatgaattcaattcatttgtattaagaggttttcgaataagagatcacagttatagtatagtattaattggatatcacaatctattcataatattagctagttagataaaattgtgtttgatcttggcaagaggtgttaaaatagtatcatgttgacatgttggtatgactattagtcgtaatttaagtttatgtatatgtcttgtaagaaatgtccatgtatcataataaatacaagtgtatcgagtttttgtatatatagaggtctatgatttgggaagaagaacacaacataactcaccacaaacacaatctaatccaaaaaatcaaaagatgaatgccacaaagtttcttgtgcttctcgtgattggcgttttgtgtgccattgtcaccgcaaggcaggtcaaagatttgtccacagagaccaaattaggggcctctcttccaaaaacgactaccaaaggcattggagctcagctttctgcaactggctcaactttcagcagcagcagtgtcgttagctatgctaatggttttaacaatcccaaaggcccaggggccaatgcattcgaaagtggctccacatttaccagcggacaagtcactgccaagggtcgcaaggcaagagtttcttctgcaagtgcttctaccgctacaggtgaggctgcagctgcagtgactcgcaaagctgctgctgcacgtgcaaagggtaaggtagcttccgcatcaagggtgaagggttcctctgagaagaagaagaaggaccgcaaaggaaaaaaggattgagcgtgaggtcatctcatattctcacacatgcgtattcctcaaacctacatattaattatatcctaaaaactacaaactcacaatctctttcttgttcataaataaaaccagagattgtcacctctaaatattattatgaaatgctactctttctcatgtaatggcttttttaaaataaaataaatgcaataaatatgatcttatagtataatcttcttcagtaatggtaaaaaaatgtttataacacttaatattcttgtggaagagaaacttcacgaacatgtgaatatggtgactctcataaacaacagggtgatgtgaatgtgaatatgttttccttaacatcacataagataaatcctctagtcatttctcataagatccactgtttctaaaatctacttgattcttttgtctttaaactttggtttaaatttaatcactcactacgaaagagaaaactggttgagactggtaacaaggtttcttcttcatcttcgcatgcacgtaaagacttgggatttttttaaagtatttcttcctgaatatagttgtcatgaaatggtaatgtttctctatctctgtttctcctcttcacatca

SEQ ID NO: 5207 - DNA, 509 bp, Arabidopsis thaliana
ggatacccaaatttgggttgaataacgagtttttgtggacgaaatctgaaaaatatgatctaggttttctatattgtgttgaatttttagtttatgatctaatttagtatgaatcttgcggttttgattttgtttatgatgaaattggttggaaggggatctaaggtttatctaatttgagtattcgattgcgtctctaacgaattcttcaatacaggcggcgaggaaatcagcaccaaccaccggaggagtcaagaagcctcaccgttaccgtccaggaaacgtcgcgcttcgcgagagacgcaagtaccagaagagtactgaattgttgatccgcaagcttcccttccagagtctcgttcgggaaaaacacctggagtcaaggtaaaatttatactcattagcggcggattaaaacttatcaattaggttatgttatggaattaggtatactaattagggtaaaatttgcagacggatctgaggtttcagagtcacgcggtgttagc

SEQ ID NO: 5208 - DNA, 646 bp, Arabidopsis thaliana columbia
caatgttgatcgagagtatgtacattcaactttggttgatttatcttggtttgttgaccagtgttagttcttttgaatcactgtatcttctaggtcccttgtgcaattgtgtttataggttggtaacctgagtgagtaattaagtaatcagctgggtaacatctggttgtgaaaaagctttcttgtttaatgtttttgcatatagccatatagaaaatagaactgtgtggtcgtgcagctttcattaggttaagaaagcagatgggttggtttggtttggtatattatttttgagatcctgttaacgcaagtctaatctagtaatgtttcctttgtagaaaatgggagaagttaagggatgttggaaattaggacgaatgctttcaaaggataactctgcaaactcctacaacgtctcccttctcttatctcctgttgtttctgtttgggattgtattgtccgtaaaatgaggtatacctacatacctgagtgggtgtagtagtcattgagatcatcgcgccttggtgtagtgagtttggtagaatcaaagtaaaaggaaacaaccaactaaaagaagaagccagttaacaaaagcaaggcaaacaaagacttgtagcaatcatggatagcagtagctcgatgtgc

SEQ ID NO: 5209 - DNA, 790 bp, Arabidopsis thaliana
gattactactacttcaagcagccaagtttttttgagttttaacaaactgatttttctaactaaaaaaaaaaagaatcagataaagttatattaaaacggttaatcaaatcaatcatccactgagaaatccggctcatccggtttaggcagcatcggtatttcgacatccttgagcttatgagccgtccttcttgtgttcttagcaaacctcgaagcaagtatggttgcagcgaaatgcggtttcacattagaagtatgatggcgagctttagcgccgctttgtgcttctccttcatgactcatttcctcggttgcagcaaccgcaacagcttcttcttcatcataagaagagaatgactcagccaagctaagactcttagccaacttctttctcttataccgtctccaagcgacttgtacaaaacaagcagcccaagttctccactgatgggagtaataacggaatgtatgttgcagcttcttgctatgtaaacgcctgaattggttagccacgaatttgagatcacctgcttgtaaagcaaaggcttcaacttcttccaaggctcgcaccgttcttgttgaggatggtaagtttactgttgattttggtagcaatgcccatgcaagaagctcttctccacagaaatctcctggtctcagtgtgattgagttgaagaaaccggttctgcctccattagtcgtcgagctttcgagttttcacggatgatgaagagcatttccgtcactggataccttcacgtacaatgtagttccttgtgtgcttagagat

SEQ ID NO: 5210 - DNA, 564 bp, Arabidopsis thaliana
cgttccacacttgcacttaagaatatcagaaccggcgttacacataatacgattacgagcattacctctagtagcaagacctttttggttcaaatattgaagtttaaattaaagctgaagaaatccgaaattcaaaccctctagattttattaagagaatgaaagtaacttaattaattagtaataagctgagaatcagctctcacacgcacacttgtcaatacgttcaaggaaggccaccgagtccgccaccggctcctcccccaaagccgcctccaccgaggagtccaccgccaccacctccgagtccaccaccgcctccacctaaccctagtccggctcccgcgccgatcccagccccaatcccaagcccaccaagaccagctcctccaccaaggccaagccctaagccatcaccgctgccaccgcctccgaggaaagatttttcatccttgaattgggtatcttcggagataagtttcctagcaccgacattggcacaaacaagtgcaatgagaaggagcacaagcaagttagtgaatgtgctttcatgttttgctttgt

SEQ ID NO: 5211 - DNA, 307 bp, Arabidopsis thaliana columbia
attccgcaatcgtaaaatattgatacatatacgcatatgtaatatatgaatcgacgcgcatgtatttatttacaagttattcaagaactttcttattaaagtgtaatatgtttgcagatacatgtggtttcatgaatagatcgccggaacatattttcggatcaccggagattgattactccgacgtctccacaggttacctcgaagacgcacttatcgagtccggtgagagaggcaaaaggagacgtctcttgttcgaggatccgtccaaatcttttaacgatgatgattcgcaggtttattggat

SEQ ID NO: 5212 - DNA, 467 bp, Arabidopsis thaliana
taggaaagtaggtagaagcaaagcagaaagagaaaatctcgatcaaatttaaatttccagaatattaagtgtgtagagcgattcatcaaacctctttggcccgaatcaggacatcactggcaggcatcaacccagaagaaggtacacgtggttgctgaatcatcgctgtgacataatgaatcaaacgtatgagaggttctgattatcaatggtgagccatagaagcggccagaatgcagtcgaagtctatacctttggcatgtggcatcataaaccgtttacccttggttcccgcagaaagtaatagacaggcctgacctatggctgctcccacacatactgtatgtacctgcacaaataagaaccaacatgctcacatgaaaaataccgtggagacgaaaaagtgtttatctcggtaacagatcaagtagcttgtgcaatctctagcaaaacttattacttacatg

SEQ ID NO: 5213 - DNA, 506 bp, Arabidopsis thaliana columbia
tcttggacctccactagttgttggaattgctgcagtagaggcaccctagcatgaagagacatttccggtaactgccaccactgttccaaggcaagatcaacacctttcccaactatgttttcagcatctccgacaccatttgcatttttttcatgaagggaaaaacaagcttgaaccaaacgaagctttggcgtctcttctacttgtgctttgggtatcacatgatccttcaagtatgtccaatctggagctttccaaagactatcaagcaaaatttcataattctcagtgctttttccaaagtccaccagggcatcccacgtgccaagttgagtggcacagtggagccattgctcctcccacaggcacatttcagtcttaggtacggtgttattgtaagtgccttgggttgccttaaccatcgcctgataaaaaaggctctgagcacgctgccaaaaaccatgttgaaccattgaaaatccagctctcgattcggtagtgatgga

SEQ ID NO: 5214 - DNA, 1823 bp, Arabidopsis thaliana
gtctatgctcaagggcccattgttaaaatgtttggatacttggttgtacaaaatttatatgttataaaagattattttcttataaagagtgggtttcatgcgatagtagtcttatccggactaacataactcacgatcatggcaagggttaaaaatccttaaccgtgtcgtgagggatggttcatgtgggtaatccggctaagggtataaatttgtttggaacctaagttgggtagtctgtgtgagctatcatcgtagcgtttttgggttacccttggcttgtttggccatagagcgattcgggggcgttacaggtagtcccattgatactatttgaaacgaaccaaggcttgccttgaaagcttctgtcggaccttgagtaaaggtagacagcttgtttgcagctcctcagacttagcatcatcatagaagttgttcaggaaggctaacttgatgcttctccaagtagtgagtgaaccagccttcaattgcttcaaccaagaagcaacatccccagtaagtgagtaagggaaaagcttgcacagcaggtagtcctcatagatcagctactcgaccaatcactctatcaaggcagccgcaggggaagcaacaaacatccactcgaccccctactcgatccactactcgaccaatcactcgaccaaggctaaaggattctaccttacttgttgatcgatcaaagcgcctttagttcctcctcatttccccactcaaccatacggatgagcattagaagaggagaggaagaagaaattactcggagcatagaggcgaaggcgcagactttgcagcaccctttttactcgatcccgaatgtcgagtatacatctaaaccgcctcaagtctcttgtcttctagtgaatcaagggctttcaagattttagtaaaccccaaaggaccaagcttttattatgtagtttttctttgtgttttataatcttgaaaccttaattactcttaatctatttcatttttgcatttatttatttgagtaaagttatttatcttgtttagatctatattttgatatgtttagattatgttgcttgagtactgattggggttcttgaggatggattagattagagtaatttctgagttagtgaggtggttaagattaggttagctcccttctggattcgttgagcataatgcttatttctctcagttcagtttggaattcgacccaaggtattccagcgtctaaaagacgtttaaatagatgccttatctacgaattccagagatttgtagattctagcccaaaagattggatgttgagactgcttattaactttaataagagaaagaaaatttcaccaaacttcaaaggagaaagaatttgctaaggaatgaaagccgagaagatggacatgaacttggccgagtgatgggaaacaaaacgtcgagtccgaataatctagccgatcgatagaatttgtcgatcgtgaattctgccgatcgagagaattctgccgatagagagtctagccgatcgatagaatctacttatcgtgaattccgctgatcgagagaattctacagatagagaatttttgccgatcgagaattctgccgatcgagagactctactgatagagaatttttgccaatcgagagatgctgctcaaggatgcacgagccggttgacttgaagcccaagcaaagtagcttggagccgaatttatgtggagtggagccaaaatccaccacccttggagctgaagtttcccattccacgtgttaccacccattaaggctgcttgcgtgtcatcacaggcagatgacaggtgtccttgatg

SEQ ID NO: 5215 - DNA, 1273 bp, Arabidopsis thaliana
tgaactctttttccaaagtgaagtgcagatttccttgtgttgaccatctgccccgaggctctttcatactgagttaaaatgtccttaatagcaagacacgacttcatatttgcttgaaaaaagaatagtgaatcatcagcaaaaagaaggtgactaacagggggacttttattacttatcttaatccctttgataagaccttgagcttcagcctttttcatcatgtggctaaggatctctgcacataagatgaataaatatggtgacaaggggtctccttgacggatgcctctttccggttggatgaatccatggggtgcgccatttatattgacagagaaagttggagttctgacaaaagtcattatccattcgatccaccggtagtcaaatccaaacttaaacattgccgcctgcaggaaatcccattcaagtcgatcatacgccttggtaatgtctgtcttgatcgccatgaatgaattagagcatcgtttcttcacttttagggcatgagttatttcatgagcgatgattacattgtcggtgatcacacgccccagaatgaaggctgcttgttcttctgagatgatgttagcgaggtgcttctttaatctggtgacaagtatcttagagatgatcttgtagcttacgttacacaaagcaatcgttctatagtcactctcgtgtcgaggattttttggttttggaatgagacacaggtttgtgtgattcattgtcttatcgaagatgcccttctcaaagaagttttgtacctcctgtagaatagtatctttgatgtcctcccaatacttatgataaaaagctcctgtgaaaccgtccggaccaggcgccttagatccgcttattgagaaaacaacttctttgacttcttcttctgttacattcctgattaggtcagcattcattctcaaatgactcgctgctggaaaccatttaacacatggaaatgattattctgtggtgtgagctcactttgaaatagtttagtaaaaaaatcttgtgccacttcccctatgcgattggttcccctgtgtttcgttccgtcatcgtcatgaattgagtacatacgattccttgccatcctagttttggtagaagcaaagaagtactttgtatttcgatccccacctgctagccatgtcttacgacttttgagacgccaaaattctttttcatttgcataagcctttgagagttgcagtcttaaatcccgaatagtgtgagttgtataaccatccgtggggattttcta

SEQ ID NO: 5216 - DNA, 1663 bp, Arabidopsis thaliana columbia
ggatgtgttgggactcctttaagaacgttttatggtcttttggatgttgtgagatgatgtgagattgtgagattgtgagatgatgtgagattattccaaaggccttgggcgtcctcctttatatagggggcgaatggatgcttcccgaagcatcacatccgttccttgcacccttccgaaaggtcacatccgttccttgcatccttccaaaaggtcacatccgttccttgcatctattaggcgatgcaaccgttcgttggtacccgctcgaccttacaccttttggccgagacacctcttcacccgtgagctaccacagtccaccagctcgagtgtcagctgaccggaccacccagctgggtcagtacttgatcagctcaccgagctcagttgagctgtcggtcagctcacctagctgagctagctagtcttacagctggtttagctcacctagcttagctagctagttcatctagcttgtccagctcacctagctggttcggcttgaactttctcgttcttcctactaagtattttggtccgttcctcgaccatgatttagttttctcctaaaacaaaccggccttttttatgaacgcgggacgcggtcgttacaggtatcctagcctattcggatggttaacaagcgcaatcaagctatcccttgacaacaggttcaacaacagattaattcactcccgtgatagaaatccttaagcaaagctagcccagactaattctcattaacggaatctaactatgtaggcaataagaaccgactgataaattcaactaccgctctaaatggccaatcccttgggatagagacgagtatctcaggaactagtggatcaagcattccatcaaacatcttctaccaagcatttcatcgaacaccttctaggtgcgggaatgctttggatcgaattccagttgatccgacagaaacaagcagtaaacacaactagtccagaagggattcaatcaattctaaaacttaaccattctacagactatggattccacaaccattctatcccatccttaagaattctaagtcactactcagacaacatactcaaagacataatcgtagataaacaagtatattgcataagtaagaagataaagagtagagaaacaagatgatagacgaaatcaaatgcggaatctgaataacttggaaaaatctcgaattacaagttgcagaagcaaagcggcgcaacaagagtaaactaggtaagacataaataaaaactgaagcaaaaactggatgtaaaatggatgtcctgggtcaaaaccatcaaaaacctatttatacaaaatgataggagatgggccgggaatccaatcgaccggcccatagaatgataatgggccaaactgggccttgtgatcgggtgaagctccgggccgcttccaaacacttcttcttctcctcttctctgccttatgctcagcttgtctgtttgagtgcggatttgagaagactctgaaggtgtgatcaagtgcttggtctagtgatttgatgggtggtgagtgatgatactcgacaagggggtcgagtaatgtggtagagtgaatggtcaagtggttgtcaagtggtgtgacaaagtgttgcttgcagatgcggtcgagtggtgtcacgagtacctggagtgtg

SEQ ID NO: 5217 - DNA, 1788 bp, Arabidopsis thaliana
attttttaagccatggactttggatattcatttacttttggtcatttacacgagaatatgtgcatagatatgattagatatgcatatatatgaagactaattttcatgccttgatagtgttttagagtaaatgttttcaaattttcttttcaaagtaattgttgctagctataacgctgttatatatttataatggtcctttgttctcacattgttctagtcttgttttgtttgacactattactctcatcatacttaattaattacatatactttgtcatggttaaagaaaacaagtagttaggttattggcatatataagaatatcattatcttatagaactctcgtcatagacttgcttaaagcatacagtttgattttttttaagccatatgtactcaaaggcattggtctgtgacatgttatgctttgttcttcatattttacatgcttctgagttgattagtagttagtactataagaatttataattgtgtttgttcgttgttttcaataacagattgttgttactcttcttaatgatttaactcttcacgtaattatttgcagatcatgtaatctgaaaagtcttggaatttcaatctatgaaccaatgacgaacaaaggagtaatgaacggaatcgagaaacttccactgcttgaaactctcgtgatcttccactcctcgattaaactggatttaaaagcaataggccatgcatgcccacaactaaagacattgaagctaaactccttaggctcagagctggcccatgacataagccaggtaggctacattccccttctcgaatgtgatgatgatgctctagcaatcgctgaaagcatgcccaaactacgccacctccagcttatgggtaacggactaaccaacactggcttgaatgccattcttgacggttgtcctcacctggaagaacaccttgatgtacgcaagtgtttcaacattaaccttgtcgggaatcttgaaaagcgatgtatgaagaggatcaaagagttgagacggccccatgactcaactgcggattacccgtatagtatcagtgtgtcaatggtggttcagatgatgattacatctcgatatcattgaacacatcgttgcttttgatggtcttgtcaacttatgaactcgttcatgtctcctcttttctctatgatgccagtgactattattggtattagatattgaaattttctgaacaatgcagagagcatgtggtttctgttggttgtgtcaacttatgaactccttcgtatctcctctttttttctctatgttgttggtagtacaaagtccttatttccttctaaacttattaagctttgaacgcgtgattttaagctattaacagattcgggcaagcctctccggattttgctatgaaccttgaggacaaagttacgtttggacggcaggagagtgaagaagacaccattgcgagcatgtgaaaatgtaaaaaaataaaaatagagaagctaaagtaagaaggtgaaaggtttcacaagaagaagtatttaagtggagtcacgtgacttctatttctcttcaattgttgctgagtcaattatacgtaatacgtggcatgaatcttaccgtatactacaacgaccaaattttcaatgagagacgcaagctcaaatgtccgaaactatacacttcacttcttattcactaatttgacctaatcttatcctcaaaaatgacagcctcctcgaaaatgacatcctccactacgttgctgtcgttgtcatgaaagaagatgaagaag

SEQ ID NO: 5218 - DNA, 2057 bp, Arabidopsis thaliana
ccgtcagtttctgttttggttttcagcaggactgatcagttaatggtctgctcgattaaaattcctgatattgcttagtcgtttgctgttacttttgtttatggaaggaatactgaggctgagagaaggtctctttgggatgatattacaaggttgtctgcttcctctcctctttgtaattctccatggcttgttgttggagactttaaccaaattgcttctgtcacagagcattactctctcatgccgtctaatatttccttacaaggcttggaggacctgcaagcttgtatgagagacagtgaccttgtggatctaccgtgtaggggtgtgctgtacacttggtctaatcaccagcaagataatccaattctaaggaagcttgatagagccattgttaatggttgttggcttgctaccttcccaacggcgtctgctatctttgaccctcctagcgactctgaccacgcagcgtgtatggtcattctcaataactctccgcctctttcaaaaaagaaaagtttcaagtacttttctttcttatcgacgcatccggattttatctcttctattttggctgcgtggcagaaggagatagctgtgggttctttcatgttttccttaggagaactcttaaaagaggctaagaaggcctgtagaggtctgaatagacgtggcttcagtaatattcaagctcaattgatgtccaatccgtctgacttcttattcagggctgaacatgttgcccgcaaaaattggaatttcttcgctgctgctctggaatccttttacaaacagaagtccagaatcaaatggttaaaggaaggtgatgctaacacaagattattccacagagtggtgcttgctcattaggctcagaatcttattaagtttctcagaagggataatggggatcgtgtggttaatgttgatcagatcaaaggcatgattgttgagtactattctaatcttttgggatccgaagatagtaccaccagaccttactcgcttgatagaatttaggagttactgataagtgtgtattttgcatgttttgagcatccatttgtcatcactttagcatcatatcatcactgttttataccatttctcatcatttgtcatcactttacatttttaggatagatttacatgcatgttgcatatttgtgttgatttcaggtgatttggagctgttgacgagctatctggaagaagcggacctgatcatgtcaaagcactcgaccccgaggtcgactaggagcttcaagatctcaagagaccactcgacccccaggtcgagtagaagaaatcaccacttcacctcaccactcgaccacgaggtcgagtgtcctcatctccatcacctgaccatcactcgatcaaaccactcgaccccgtggtcgagtgtcttcaccttcattgccagaccactactcgatctcaccactctaccttgaagtcgagtatcacatcaccacaactcgactacatacccgatggcaagcttcagagccttcttcattccgcactcaaccagacactcgagcaaaaggaagaaaagaagactccagctattcactcgacctctcactcgaccacgtgggtcgagtacagttcttaacccgtcccaatacttcgtcgttttgagtattagagtttcgggatatttggctataagtagcatgtacttcacattttcgcagacaagaagttttttatctagttttatttccgcagaccttgtgttctagactttttgtaatccgaatttctctttatctattcagtattcagtattcagtttctgttcttgatttcgtttactgttgttcattctgttatcatcctgctgttacattgttgttatcatgttttcaatttgttcaacgtttatgctttctgttatgatgtctgagtagtgaataggtttctgaggatgggttagagtagtgtagaattctcagtatgctaggtgattgagtattggttgatagatccttctggattagttgtcttaatgctattgcttctaatcactggaattgagccagata

SEQ ID NO: 5219 - DNA, 1595 bp, Arabidopsis thaliana
ggggcgttgagttgggatttatcgctacgaggcgtttgcttaggcggctcgtgtctttttgatagtcgttccatttcttcttcatgggaaacgtaatccgagactcggtgcaaggaatctcggattgtctgtggtttggacaagtttagctccttttgaaatttgaacttgtaccacagtgctttcctcagagcagagagagccgctacgtcgttgattctttcgactttggctagggtagatcggaatttcgcgaggaagtctcgaagtggctcattcggctgctgaaacaatgaccacagatcggcgtctgacttgtcgggatcaattagcaccgaatattgctttaggaagagcgtcgatagctcctgaaaactctccactgaatttccctcgagtcttgagaaccaatctagtgctggtcctttcaagtgttcgacgaacaggtgacagagaccggcgtctctttcgtcgggtctgaatttggctcgggccacagagattatgaatgacttcaagtgtcctttcgggtcggaggatccattgaagtattcaatccttagctttcctggatctgagattattgcgttggagatcctgcgtgtgaaaggagtgttgtgggactcctccagaatgcggtcgatgtttggggccgaggagaccgcgttatgcatttgggatctcacaattttcatctcgttttctgccttggctagggagagcttgatagcgctttttcgtgttttgtggcgtattcctcagcccatcgaacgttctcttctgaatcttcatcgtccgagaccccaatctgatcggcctcggcaatttctgcacggggaagagtgagctgcggatcgtttccttctgttcggtttgtcgtgtctcgatttcccaatattgccggctctgctcagtctcttccaatttcctgcgcggttcgggggatgggccctggtcgggtgtagtcacctccaccacctgaccgtcactcgatcacatcactcgacctcgaggtcgagtgtcttcacctccaccacctgaccatcactcgatcacgtcactctaccttgaagtcgagtatcttcatcaccactgttaaatgccgaggccgactcaaatcgtaaaacgagatgaaattatgaagtccctactcgaccagggggtcgagtggtctgttgaggtcttgaagcttctactcgacctcgtggtcgagtggtttgacatgatcaggtccgcttcttccagttagctcgtcaacagctccaaatcacatgaaatcaacacaaatatgcaacatgcatgcaaacatatcctaaacatgcaaagtgatgacaaatgatgagaaatggtataaaacagtgatgatatgatgctaaaatgatgacaaatggatgttcaaaacatgcaaaatacacacttatcaactctcccaaacttagtatttgcttgccctcaagcaaacaattaagaacaagctggaggtgaagtttgaaagtggggactcagagccaaagcaccaaataaacaagatgaaatcaatgtccaagttgaaagttctaagctgcaatatgatcgaatcctactcctctagagta

SEQ ID NO: 5220 - DNA, 1741 bp, Arabidopsis thaliana
caaccaatccattattaatcataaataaacaaaataaccaataaaaaactccagatttctcactcatcgtgccgcaaaattgaatcgcgacttcagccatcgtcgaatctccggcgtgaatcaaatcgaccaagctcgccgtcgtttttcttccgttattcaaattgagctttaccattctcttcttatactttggacatcttaattcatctagtcttgtgttgttgtgtttgtactttgtagatttcaattagatttgataggtttgaaattggtatttgaaactgatggatattatgttggtaactatgtattctcggtctattaagacattttaatgtactgtaatggttgattcgtagttaatttaggcagattaatgcttttagtcgaagaatcaattttctagaacagaataatttaggtataactgagaaacgtggtatagctgtttgaagtactatttatggtataactggtatttctgaaaatgagcgtggtatagctgtttcaatagtataactggtatttctgaaaatgagcgtggtatagctgttcgaagtacaatttgctagaacaggaaaatctaggtatagctaacgttttttttttgtttttttcaggataatgggcataatcatatattttgattatgatggatattattcaaaaaccggagaagcatatcaatggaatccaagagtagttggtttgtatggtatattgtttaggacatcatcaatggaggagattacttattcgtggttagtggataagatatgcacaaagatgaagatagatgaatctacgatgaagctgaaattgagttacattccaacgggtgttaaacctcctacatatttatatattagggatgatgatgatgtatatgtttatctaaccacgttggatgaagagaaaagtagaagtgtcttgcatgtagaagtcggtaatgagttggaaatggttgacgtaaacgagcaacaatcgagagtacaaggaaagagttcagttggtgtgaattatgaagaggagaattttggtggtctagataatgatgatagagctaatgttggtgctataactctttacgcaaatgagccactaggagaacaacttgctgagcctttggagacattggagcctttagagcctttggagcctcttagagatgtggataatggtgttaatagtaatatgagtatgagtaaggagaatgatggtattcgtgaatatgttgaggaaccacgtgacagccaacattctaagtttaaaggtccatgggatgatggtcttgatctagtaataggtcaagaatttgaaaatagcgatgatgtgacaggagcaaataggaattgttttggactaacattactcaactcggataagaagcggtatgtggtaaaatgtactgaataagggtgtgaatggtacatacgatttttgaaggctaaggattcaactcgcttctcggttcgaacatataggaagttgcatacatgagtacggtcgaatactgctacaagcattaaaaggagaggtacaccacgtttagttacaaccgtattgcatgaagattatccaggtcagtacaagaccccaactcctaaaagtctcattagtcttgttcaggaaaaacatggtacaactatgtcatactcgactgttaataggggaaaaaaactagctgttagtgatattcttgccagtccagaggagagtttcaagatggtttagggga

SEQ ID NO: 5221 - DNA, 583 bp, Arabidopsis thaliana
ggtcctacaatgccaccaccacctatcaatgtgaggaatacgatagaccgggcagactggagtaatcgccaaccaactacaacacctggaagaacaccgaccagtgcaacaccttctggaaggacacctgctctgaagaagccaaaggaaacgaaccaaataaaagagatatgacgtatgaggagaagcagaagcttagtggccatttgcagaacttgcctccagataaactagatgcaattgtacaaatcgttaacaagaggaatactgcggtgaagctacgggatgaagaaattgaagttgatattgatagtgttgatccagagaccctgtgggagttggacagatttgtaaccaactataaaaagggcttgagcaagaaaaagagaaaagctgagctagctattcaagctagagcagaagccgagaggaatagccaacaacagatggtatttgcacctctcccgataattttactctctttttactaaaattatatgctcatctttgttgtttttaccttaattgcaggctccacaccagcggcacatgagttttctagagagggtggaacacaggtaat

SEQ ID NO: 5222 - DNA, 1239 bp, Arabidopsis thaliana
tattccttaaagtcaagtatatgcttattttacataaatagaaatgtagatatggttagttgataaaatcaaattgttgaaattctcatatatttcggaatgaatgtatattatcgataataatggaaagttttaatggcaattgtttagcgttaatcgttttgtaaatatacatttttggatttactaatcaaaccgaatttattgttgtaattgataacagaagaataaattttggtattatttcattagcatttaaaactataatgattttcgaatctaagtgattatagatatggttagttaggatttagtatcaaatttagtaattaggaattaatggtttgcgaatttcgtagagttttagggattgatttgtgcaatttattagggtagtagttaacaatatctatgtttaggcaagtagttagtgcaatatcttaattgttaatcaaaaatttggtcattgtcctaaagaaaatatcttgtctgattgattttgtaggaactaaacatacaatatcgaaattgaaaaaggatttttcgacacaaatcgtccccaaaaatgtatatgtagattatcaacaatattatactctgaagcaataaactaataagtaaagccgaagcatacacatgagccagaaaatatgtgtgcctcatctgtcatagcaatgtcatatctagtagaagatatacatttccccgcgtacgagtaaaagaaacaccctttgcagccttgactgtacgtgcaacggccaacatatgcttgtgtgtgcacaaacctccatgaacgttgccagagacgaggtctttcggtgtgaagctggcttatgtggtacatcacaagctctcccactgcatgagctgcctcgactgtgggggtcatctctcagaacatatcgccgattggaaggaagtgcacatgtttaccagtacatgttaggaacaacctattcgcgaagcaggcatatgatcggatggtgagacataattgacgagagtaagagcctaagcgacggtgatgaagttgttggcttgccaaacaccttctaggtatatcgtcagaatcgatcccctatctagcaggagcccgaagtatggacggaagggataatctggttgaagcaagtgcggccaagtcatgaactcgtccatcgctatggcgttgatgtcaccagcattgaccatgttccaaagtgtctcgatgggggtctggctcacgagaaggtagtttac

SEQ ID NO: 5223 - DNA, 601 bp, Arabidopsis thaliana columbia
tccacattataaaaccacatatttaataattttttgaaaactgttatttttgcaattcaccctaataaaaataactttctgtgaaaaaaaaaaaaaacttgttaaaaaaaaaaaagtctgactaaacgtttgcttcttcttcttcacacaaaactgtagggaagaaaaggaataatggagtttggattagccacttcgagttttctgggtactcaactaatcccggccactctgtttagcaaacgagctcgagctttgtctctcaccgtcacagcgaccggtggcagcagaaacaataaggtttacacgaggcttgattcttgtctagtgattcctcctcctcctaaattcaagaaaccgcgtgctattgttaaattcttgggaggtgccttcgtcggagctgttcctgaactcacttacaggtactttgattctccgagttcatcaaatttcacataacctaaaagatgttgttcctttgtctctgtgtgatttgtagttaccttaaggagctactggcaaaggaagggtatttgatagtatctgtgccgtacaatgttacatttgatcatgaacaagctgctaagcaagtttatgagag

SEQ ID NO: 5224 - DNA, 568 bp, Arabidopsis thaliana
tattaaaccgaagaaaagaagtaactagtgacttctcctaggaacagcaatagccttaagcggatgtttcatgattacggtaaactcgaccttctcagtcaagtcaacttcatgaccttcgacctctttccattggaattccctcaccatattcgccacataatactcgaggtgcagcatcgctagcccaatcccgggacatatccttctacccgctccgaacggcatcatctttatccctctgcttccggttatgtccaccgcttcttcttctcccataaacctctctggcttaaacgccattggttcctcccacacctttggatccctccctatctctgccactaagaagttaatcgtccccttcttcggtactttgtaccctcccaagacagtgtcctccgtgacactgtgcgggacacagtgtttcccggagggtgtcgtcggagagcctccatcactactgcctttagatatggcatcttctgcgtgtctttttcctccactacctttgcttcttcccgactacgtttgtgatctcctcgtataatctctcctggatttcttg

SEQ ID NO: 5225 - DNA, 590 bp, Arabidopsis thaliana columbia
aactcaaaaggaaaaaaaaaagtcaaaccttgatttctctaaatgggatcataagacttctctcgatcttcgaatccaaacccaggattcgagatgcatgacggaagtttctgtttgttgcagctaaagcattcatggtttcttctctataaaaaattcgaactttatggaacaaaaaaaaaaaaaaaatcaacaaaccaaaaaattcaaagtgatcggaagatccaagatatcagaaagtgaaatttgtatctcgtgatcggagaaatttaccgattgtaaatgggaaaaaggtaagaacttggagtttttgatttgttgtgatgaattgaagaagaaagaattgagtatttgtaggggaaagaagagaaagcgtaatttgaatgagatcggatatttttgacgtatcctacgtcagacggagactaattatcgactgcaatgactcttttaccccttattatttatttggatttctctaatcttttttttggctatctcatcatttttaactcctttttaagcaaacatatctttagaagattaacattcgtttaaaatttactaaaaaaatattggcttgagttgga

SEQ ID NO: 5226 - DNA, 492 bp, Arabidopsis thaliana columbia
tgaaggtcctcctgcctgaagaagataattaaacatgcttattaggtaatattaggtatttttcactggcggcccagcccatgagataggtccacagagctcaaggtcggcctttaggtatcgtaatttcttttgtttgattatgttttatgaagaaagtgttatgtattaccaaagacacagaggcctctgaggcaagagctaaaatgtcagagcaagaaacaatgcccggacaagcattctcgagggctgtcttgatactatcgacaacattgaatcctctagttgagtttgcattggcaggagcgttcttctcgctctggatgcttgaagtgtcgtcaagcaagagcgacccatcgcaacccttttccgatgtaaaaaagcaaagtagcggtttagtgtaacaaaatttagaaggatttatgataaaatataaaaaccaagaagcttattatacattaacaaaacagtcgtgaaaatgaaggcggatta

SEQ ID NO: 5227 - DNA, 924 bp, Arabidopsis thaliana
gaattccgctgttgtgtcatgttgtatcacaaatgcttttactctttcgatttctcccaacaaaagtatcaacaaccatcaaaatcccacacttttctaaatcatctagtcactaaacactagaaatcccacacttttctagacctatgtacctttcttgtaaaaacactcgtcataaaagattccttttaatacaaaataaaaggattgttgtttctatcatttattccaaggtacaaaatgtactttaataaaaaagatagttccatagttgacttcagctaacaaaatgcccataacttcaattcttcatacatcacctagtctttggtgaatactaaactgaagtttaagaagtagacaactagtgacttctcctaggaacagcaagggccttaagcggatcttcatgactacggtaaactcgagcttctccgtcaagtccacttcatgaccttggacctcctgccactcaaactccctcaccatattcgccacatagtactcaagatgcagcatcgctagcccaatcccgggacatatccttcttcccgctccaaacggcatcatctttatccctctgcttccggttatgtccaccgcttcttccataaacctctctggcttaaacgccattggttcctcccacacttttggatccctccctatctctgccaccatgaaattaattgtccccttcttcggcactttgtatcctcctaacacagtgtcctcagtgacactgtgggggagcacaaaatgtcccggaggatgtcttcggagaccctccatcaccactgcctttagatacggcatcttttgcgcgtcttgttcctctacttcctttgcttcttcccaactatgcttttgatctctcatataactcctctgaatctcgggttttcacaaggttcgcatgatcat

SEQ ID NO: 5228 - DNA, 563 bp, Arabidopsis thaliana columbia
ccggtaccgagctcgaaaacatagtttatctgaaaaaccgtacaaattgtagtgggattccatattctatatatgagatgtaagatttcatttgttgttgtccaaaaaaaaaaatgatttcatttgttaaagagtcttccattgaatgttgtcacatattgcgtaacacaaattcaagcatatgaacaaataaggaattaagaggttaaaagaacacaatgaaatggagtaaatatgattaaatatgaataatccaatgatacatgaacaataaaattcttttaagaagttatgcgctacaatctcactctagcacgaacggacggagacagacgcgaacctcatgctcctctggtcccattcggtgtttaggcactaaaacctctagtgttgttcctgtttcgtcccggtaagcttcaagcttggcgtcatctggaatcctgttcggcagggagacttcgcggacaaattccccggtgggcaatgctctggtgttggatctgttagcttaaatgttctatcatgtctcttgatgaatgctcacatgctgtacttcacatgat

SEQ ID NO: 5229 - DNA, 648 bp, Arabidopsis thaliana columbia
tgattatagtcgaaacataaacctgagtaaaggcgtccggatcatgaggaaactcagcaactacttcaatttcattgatcctatgggagagatccagagaagaaccagatgattggccccagctattgaatggcataaagaataggaaaacggcgccggagaggagagcaagaggaatcatcatcgcgaacctcttccgagaaatgaatcggcggcgagatgatgcagaagaagaagctggaagagactgaatcatggatcgcttcgtttgtctcttataaggcgatctagtcgccattaaacttcattcgcagtcgttggattggaaattgcagtctgtcaaatttgatttgtagctctgaccagactttggcaacgtaattttgagaaatgcgttaaagtgtgttgttgactcatttgtgtttttgctttttatggaaaaattgaattcttttttagaaaactttttttaaatcgatcgttcaatattggaagcttattaaactactgttctcaatccagatgtgaatattaggaacttccatggtacaagaacattgtcgattacggtaaatttgataaacaagatagatagatccactaagttttaacttaggacaccacgaacacaggttatcagagtaaaca

SEQ ID NO: 5230 - DNA, 584 bp, Arabidopsis thaliana
caccaccgttgctattgatcatgctttgtgattcatgagtgttgttaactagctggtcttgcggtgaaatgaagagtttccaaagtgcatgtatgtagtatcagctagctgagattgacccgggaaacttgaagccggactctggttgtatgctgaaaaacccaatgaatgactgttaaattcggttcacaccaaaacttaaaaagattcgacatttgtggactgaacctctaccttcaacagttacgtctgaataagatgtagatggttggcttggaactgaaactggcatagagtaatcaatatcatctgttttgctaacttgattgaagttcataagtgacttgctgtcatactcaataacctgttcccagttttcataggctttcctcaccagtccatcgacgtaaccctgcatcatatatataaccttttactattttccgagtatatgatagaagaatcaaatctgtatctataagaagcaagaagacccaacaaacataccttttgattgtcagaaagagaatcagcaggataatactgctttcctgatataagccactaaactcgtatatattgtt

SEQ ID NO: 5231 - DNA, 898 bp, Arabidopsis thaliana
ttacaacatctttcagatcatcttcgtgttaattctgtccgatctaaatcaagccggacttatcctcctcctactcaaccaaacgctgtcgtttctcccgagtttcttctcccttgtggacttcctgttacggatctgcttgaacctcaaatcgatccttgcttgaaattcgttgatttggttgagaagatggctcaagtttatcgtaggattgagaattgttctcagtttgagaaatctggggcttatttagagcaatgcgctatcttccggggcatttctgatccgaaactgttccggcggagtctccggtcgtctaggcaacatgcggtggatgttcacgcgaaagtcgtgttagcctcgtggcttaggttcgagaggagggaggatgagttgattggaacgacttctatggattgttgtggcaggaatttggaatgtccaaaggctactcttgtttctggttatgatcctgaatctgtttatgatccatgtgtttgctctggagcttctagatcagagatgatgaatgaagatgaatgttctacttctcaagaagtagactatgatatgtcattttgtattggtgatgaagaggttcgttgtgtgaggtacaaaatcgcgtctttgtccagacctttcaaggcgatgttatacggtgggtttagagaaatgaaacgagccacgatcaattttacgcagaatggaatctctgttgaagggatgagagctgcagagattttcagcaggaccaacaggttagataacttccctcctaatgttgtcttggagcttcttaagcttgcaaatcggttctgctgcgatgaattgaaatcgcgttgtgattcgcatttggcacatcttgttaatgctctggatgaggcaatgttgttgattg

SEQ ID NO: 5232 - DNA, 566 bp, Arabidopsis thaliana columbia
cgaatctttctctctctctctcttttgcccttacgtcctcgagctcaaccctttaattgcatctacgacagtcgtaccttttgctaggttatcgtcgtcatgatgcagcagccacctccagcttccaacggtgctgcaacagggccagggcagattccttccgaccaacaagcttacctccagcagcagcagtcgtggatgatgcagcaccagcagcaacaacaaggtcagccgcctgcaggatggaatcagcagtctgcaccgtcttctggtcaaccacagcagcagcagtatggtggtggtggatctcagaatccaggatcagctggtgagatccggtccctgtggatcggtgacttgcagccatggatggatgagaactatctcatgaacgtctttggtcttactggcgaggtaattttgaaaatcctgttgatttctgtttttagtctctcgtttttcttctacaagtattgaaagtttcatcctttgtggttgcaggctacagcagctaaagttattcgcaataaacagaacggatattcagaaggttatggctttattga

SEQ ID NO: 5233 - DNA, 577 bp, Arabidopsis thaliana
tgcggttgaaggagttggtgttccagttgatccgctcgctttcgctggtcttttgggtaaacttgataacttttgttggtttacattatagtttcttatcatttcctaaacctcattttaactcttttcaggtatggtagtgacttcattgaacttattaccatgtggaagacttgaaggaggtcgaatcgctcaagccatgtttggaagaagcacagctgcaattctctcatttaccacatcactccttcttggtatcggaggtctcagcggaacgtccttgtgtttagcttgggggctattcgcaaccttcttccgcggtggcgaagaaacacccgcaaaagacgaaatcacacctgtaggggacgataggttcgcttggggtatagtccttggactcatttgcttcctcactctatttcctaacagtggaggtactttctccacttcattcttcaatggacctttcttccgtggtgatgatttctaaagaatgtatagattaagatgcagaaacaagcattgttcttatttattattaatggtgttcaaaagcattgtaaatcttgtggaattg

SEQ ID NO: 5234 - DNA, 398 bp, Arabidopsis thaliana columbia
cgcagactcctcctgactgggaagaaattttgactcacttccgcgggtcagaacttcaaagctatttcatccgagtagtagaggaaaatctaaaggttagggtccaaactattcatgatatttattctaaggcagcagctcatgaagtgagtctgatgccccttgattgtatgacagactgctataaagcgacaacatgttgactacataacagaagttgatcgtggtaatcttgggaagatgcttgagaagctggacgagagaggagtgatggaagagatttgtgctgatatggagttgaaccaggtcctggagcgtgaagcaagacaagtatctggtggagagctaccgaggtttgccattgccgcagttttcgtgaagaaggctgatatatacat

SEQ ID NO: 5235 - DNA, 553 bp, Arabidopsis thaliana
gaggaagaagacgcgcaaaagatgccgtatctaaaggcagtggtgatggagggtctccggagacatcctccgggacattttgtactcccgcacagtgtaactgaggacactgtgttgggaggatacaaagtcccgaagaagggaacaattaatttcatggtggcagagattgggagggatccaatggtgtgggaggaaccaatggcgtttaagccagagaggtttatgggagaagaagaagcggtggacataaccggaagcagagggataaagatgatgccgttcggggcgggtagaaggatttgtccagggattgggctagcgatgctgcatcttgagtactatgtggcgaatatggtgagggagtttgagtggaaagaggtccaaggtcatgaagtggacttgacggagaagtttgagtttactgtagtcatgaagcattcgcttaaggctcttgctgttcttaggagaagtcactagtcgtctacttcttcaccaaagactaggttatgtttgaggttatgtgcattttgtttggtgaagtcaactatgg

SEQ ID NO: 5236 - DNA, 560 bp, Arabidopsis thaliana columbia
cgatcatggagaatgaatattaacacacaaaagcaaatctagatcgagaaaatgaaacgcatcttcagagaatgtttttttaaaacaatgaagagagttcttacaagtcctcttgcgagcagctgggtaagcacaagccgagcaacgactcttctggatgtggaaactacgacgaccacatctcacacagagtgtgtgactcttgttcctcctcttaccgaaactccctgttccctttccctgcaatactcaaaaagttccacaataataatatcagagatggttttcatggtcaatcgacgaaagaggaagaggagagatcaccattggagcgagtagtgtgcaaagaaaaccctaggatacggcttcagagaagaagaagctcaattttatgacagcttatttatatcaacgttttctaattctagggttgtacttaaaagcatgggcctttgtttgtatttgtgggcctgaatacgatcgtaatttattttgccattatgaaggttagatttttatttttaggattgaagtgaatttatgggccattatatgtgaca

SEQ ID NO: 5237 - DNA, 801 bp, Arabidopsis thaliana
tgatcagtttacgaggaaacagctggattgacagttaatgatcccgttcttcgaacacacaaggttcgcgagttatttatcttggttttttctagtgttgttcatctgcagctaacatataatttgtcctgaatttactacagccactttctgtggagctcgggccaggaatattgggaaatatctttgatggaattcaggttcagttggatttataatcttgctagacatgattttttttacttttatgattcgttttatgtggcttcttacgattctttggtttcatttctttaaatgtcacagaggcctttgaagactattgcaagaatatccggtgatgtgtacattcctcggggtgtgtctgttccagctcttgacaaagattgtctttgggagttccagcccaataaatttggtaatgtggtttactccatatgcctgtctatggaagtgttcatttggttttaatcttgatggtcaattgaattcgttttgtttgcagtcgagggagacacaataactggtggtgacttgtatgctgtaagtttattggtctcctctttaatctgcttttgacaagggaatctatttacacagttaccgtggtgtttcccttgtttacaatgggaatagtttgttctgaaagtcaaattaaattttggaatgcagactgtctttgagaacactttgatgaatcacctcgttgcccttcctccggatgccatggggaagatacttacattggccagctggtcaatattcgcttaaggtctgactttaagttccctcaaacagtta

SEQ ID NO: 5238 - DNA, 531 bp, Arabidopsis thaliana columbia
caccgcgaaggtgcatacctcatctccgtccaatgttatcaagttctacaaatctcaaaacgttgcgaaaatcaggatattcgagccaaacaaagacgtcctaaacgctttgcgtggaaaccgagatattggagtcaccgtaggcatcaagaacgaagacttggaggcacttgcagccaacaaagacgcagttaaatcctggttctccactaacattgatccttacatagccgacgtgaacataacattcattaccgtcggaaaccaagccatcccgggcgacaaacatggccctcacgtgcttcctgtcattcaatctctcaccgacctcgtcaagtcaagaaatctccagatatcaatcagcaccacggtcactacgacgagcctcgccaggttgaaaccgccttctgcaggagttttacaccccaagcacgtcaacagcttgtccccgtgctgagattgttgtctcaaacaagtacaccgatcttcgtcaatatctatccttactacttccatgcctccgacccaaag

SEQ ID NO: 5239 - DNA, 547 bp, Arabidopsis thaliana columbia
ccgcaagatgcaacacgattcgcagttgcatgattcgaaaagctaagttccagaaactttccaaaagacaatccccatgctgcatcagacataactactctacgagtagcaggtgggactccatctacatgtgcacatcttaagcaacgatgccacatccatatcttcccatcttgttcaccaggaagcttcatggaagggagacgtctaacattgatagtaaggtttccattctgatgagaatagcagagtacatgcgcatcaaccagctccttacaggatctacaactagaagtctgtccagaaatggaacagaaaggcattagacttcaaaatttaagaaagatgaaaaagtggattaactaactttatagatgaaagagctaccttatcgaaaagatcatctttcaaatatcttccgagaggtttatcaaaggatccatagaacttaatccgcaagagtcgtgaacgttcacatactgattctttcaaaacacaacggcttgaaaatgagccaatatgctctgatgagagtcgcagcagagaa

SEQ ID NO: 5240 - DNA, 591 bp, Arabidopsis thaliana columbia
tgatattgaagactgatccaaagaattcgagttatgtagccgaatcaggtgcaacttgtgtttatgatcaacacgaggaggaggagcaagccgaggacggtggggataggatgagttctttagagaagagaactttggtttcgaaaagagaggttgatgtaatggctgcacttgatgagatgaaatctatgaaatctagacgcgtatcggtgagtgtagactctatgcttgaggatttgagtaaaagacacaaagaagaagaagaagttgcaaaggaggaagatgcagcgttgataaagtctaccaaatttggtaagcagaggaggattgtcgacgaagaaactgatgagatggagaagacgaagaaagtaagaatggaggcagtagatgagaagaaacctaagactaagaaacttgcttgcattataaccttgaagaagaagaagacaacaagtttgggactcgcatcactatgccacaactatggtgctgatgaagaagagtgaatcaggtctgttgaatcaaatcaagattcatgttagaactatcttgtagagattctatcatgactatttttgcatattgaagtat

SEQ ID NO: 5241 - DNA, 626 bp, Arabidopsis thaliana
tccccatccctataaatattttccaatggtagttttatcatatcgaatttttcagatttgacatgaaagctcattatacaccaaacacgcgtatgataaacataggctatataatatacaacccccttaatgcatcttccccaagtatcatttgtagaacggtgcttatgcttagtttttaccgttctccatgatttttgagctgatcccaacgttaaaacctgacactcgtcgcaagttctattacgaggcagacacactactttgtgtttaccttctattggatcgtatcctaaaaagactgttagttccttccagctttttcttggtttgggtaaggttaagaactgtctcatgctagggttccaaacaataaccgttgctaacacatgaaagcagatcaagccgtggacagattccgtaggggaggggtaactaaattcttgtgggagtttcactgaaaacgatcaatagcggcctgagaagaagagtttgaatcgtaatgatgttttggaatcgacaaaacaaacaacttgtcactttgtttgaagcagaataaaagactctgccgtgttgaagactgagtatcgtacgtcttgatgaaatatggatcggtgatgattgat

SEQ ID NO: 5242 - DNA, 1013 bp, Arabidopsis thaliana
cccaagcagccttgaaagcttctactggaccttgtgtgaatgcagacaacttgtttctcaactcctcagacttagcatcatcgtaaaaattattcaggaaggctattttgatgcttctccaagtcttaagggaacctgctttaagttgtttcagccaagaagctgcttccccaacaagtgaataagggaaaagcttgcacactaggtagtcctgtgagactccattagctttgatgttcagaacaaggtcctcaaagcgttcgatatggtccattggctgctgataagtgtgtattttgcatgttttgagcatccatttgtcatcactttagtatcatatcatcactgttttatacaatttctcatcatttgtcatcactttacatgtttaggataggtttgcatgcattttgcatatttgtgttgatttcaggtgatttggagctgttaacgagctaactggaagaagcggacctaatcatgacaaaccactcgacctagaggtcgagtaggagcttcaagatctcaagagaccactcgaccccaggtcgagtagaagacatcaccacttcacttcaccactcgaccacgaggtcgactgccctcatctccatcaccaaaccatcactcgatcacatcactcgaccacgaggtcgagtgccctcatctccatcatcagaccaccactcgacctcatcactccacctggaagaagtcgagtatcactttcaccaccactcgactacaccctctatggcaagcttcagagtcttcttcattctgcactcaaccagacactcgagctcaaggaagaaaagaagactccagctattcactcgacctcccactcgaccacttcggtcgagtacagttcttaatccgtcccaatacttcgtcgttttgagtattagggtttcggaatatttggctataagtagcatgtacttcacatttttgcagacaagaagtttttatctagttttacccgcagaccttttgttctagaccttttg

SEQ ID NO: 5243 - DNA, 550 bp, Arabidopsis thaliana columbia
agacgcggaaaccggtctgtcagtgtcactcatgtatgtgtttgtcgcgggtgattttgaatattttttttgtcgtgtatatggaacatggtcaacaaaattcaaaacattgaaattcggtaatatcgattgaaacaatcaaattccaaaaagcaaccccataacgtaaatgattattgtaatgatgaaaaacttaattaacgacgagaagtacaagagggtaaaacagtaattaaatttttagcggtggcgtgagagatggagaacgtcgagaagtgaagaagcggcgaggaggagaaacgcgaataaggcgaagacgatggagccagcgagatggtcacagaagaaaccaagagatttgcagaaattaggaagaggcatgtgtctgattcctgttctgttcatattcgtcactcctaaagctgcagatcctccactcaccattgcgtatcctattatctgatctgcaacgaagcaaaaccatgcttgtgttcttgtcggaatcaccggagattttctcattagtcttgtccacttataatcagttgaa

SEQ ID NO: 5244 - DNA, 1207 bp, Arabidopsis thaliana
tgaatcaaaatgcttacaaggctatctcatcatcatcccctatgcatatgcaacaatcctaaatgaaacactctagactcgatcctaaatgtgatgcaactacatgaacactctttttttgtaaaatcattttctgaaatttttcaaatttttttggtttttctatgccttagatgaatgcagactgaaaaatatacacaatgcaacacacacttcctgagccctcccccaaacttaaatcacacagtccactgtgcgaataaacttcagttgaagaatgaacgtagtcgatctagcagtaggagtactcaggacaaatctaatcacagaaacaaaaaaaatgaagaaacaaatcacaacagatggtataatacaatggtgaagtgaggcgcttacctcagtcgaagaatgaacgtagttgctcgtcaatggctgcctgcgattgctcccaggccatagacgaaccaccttgttctgtatcagttccagcaggtggtactcaacctcatcagctttgtggcggccagcaccgctctgaggaaactcgacctctctccttctgctacggccagcaccgcggttgcataaactacgagactgcagaagtcgtccgctcctactgttagatcgagtgagtgtggtcctcctcttcctcccagattcacgaggctcgaatgatgaatgcctcgcagggacatgcagaatctcctgctctctaggctcagcctgcgccgacttggctcgggcgcgtcatatctcctcgaaggcatgtcctgagggagatgtccctgcggaatagctgtagtggaagaggagcagctgagcttgtccttcagaaacttgatagcccttaagcacttggcgagtaacttgtcatgtttcttgcaccacttctgcagcttgctgttgttcctgtgagcttcgctcaaacttttgctttccctcgcaggaggtatatgctcactgaaatgatacatgctcgtgtcaaactccggctcatctatatcatccgtctcatcaacatcttctgttgtagctccttcggtgtgactaaactcctcggttggcggactgccctcgaaataaagattttcaagcgcaggcttgaagtcaatgttcctgccctcaagaatcctagtagcgtcaatgcaagggagaagaatgttggcgattctaatcgatgaatgctcgaacctgtagcggtgaa

SEQ ID NO: 5245 - DNA, 412 bp, Arabidopsis thaliana columbia
cattccactcgtcaccaccggattactatcacagttcgagtgttctttcatatcgagggtcacgttgaaatctccaaaaattaaccatggcttactactaattattggagagtccttgtggtcttgtagttctgcccataagtttatccgttcttccacaaaatttgaagcatgaacaaacgagcagaagaattcctctagttgatcttctaacttaaccgaacaagttatgagttgaccacttttgatagaaaggggtaagcctcacgttacttttccaaagaacccaaatcctgcctctcctattaaattcataattagttaaaaccgagcatcctggaaacaacttctcactcagctcctgcatcttattcatctggacccgcgtttcaagtaaacaaccaaatcgaaa

SEQ ID NO: 5246 - DNA, 1523 bp, Arabidopsis thaliana
taaggctgctgagaagaaaggaaggaaagtaaaacttttttgtgacaaaaagaaaacgaaattgcatgagagttagttgtcactcatgatcatcctcttcctaagcctgtccctggcggcacgagtactgagcgacctcacatgacctttcctggtgattctcttctccttctcacgaagagcaatgatgagatcgacgaaagcgcttagtatgaacttgtgtgacttcttgtcgttgagatccagatagcagaagagtagctcttccatcaagtcccaatccacttcgctttcccgcatccctaacttggactccatcatctccaccatggactgcctgaaatcctcttgcggctcatccgtgtatcttaacaccgcgatgcagttctccggcagcaccaaggtggatctcgattgcctctccgacgatgttgacgttgtttccatgctaggcctgccctccgaagatccaggcggaggagatagcctctctgttctcagcaaatccgggggctgtttcggggagtcgtagacggcatgtccccatgtcctctcgaatctgtgacgatagtcgtcgtcatcgtcaacggctccagcgttgtcggaggatgactgtctttgagtaccgatccatggcatctcttgagatgcatgggattccaaggccgtaactcagggactccgttgataacttttacgtgcttatagacgccgtcacgtaccacctcggtgattcgatagagaccttcccagttagttcccagttttccagcgtttactctctcgtgttgctgaacacttttcgtaaaacgagctctcccacttcgaatctccgaattttgatattggagttatagtagcgggcggcacgttgttgataattttaaactcggatcattgcctgatctctgcgttcatcgatgaaatccatgttttcccgtaacatttgcgtgttcaggtccgagttagcaggactggcggtccttctcacgcttggtactatggtttcgacagggattactgtttctaaaccataggcgagagagaacggtgtttcttgcgttgatttgcgaggtgtagttcggtagccccagagaactccgtggagtacgtcggaccacattgatattttggaattaagtcttttcttgatgttgctaagtatagctttgttggcggcttctgcctgtccgttaccttgtgggtaacaggggtggatatggtaagacggatcttgcacttgtcgcaaaatgctttgatttttcccgaggtgaggttagtcccgttatcggtgatgatctcataaggtatgccatgtcggcatacgatattttcccataggaagtcctcgacttgtttctcggttacctgttagaagctttagcctcaatccatttggtagagtagtcggtgaggaggactagcaggttttttagtttcttcttcccaccggaggcttccatgggacctacgacgtccatggaccacttcataaacgggtaaggagaagatatcgaggacat

SEQ ID NO: 5247 - DNA, 1811 bp, Arabidopsis thaliana
ggtcataggttataaatatcacagggtattgatgttttattggtggttcatggtaatttatcgggtttaggattggtatgtaccctatctaatgatgaggagccaataatgggcgcatgaaccttcgacgaagcctaacatgtttatatacagaagtggaagcacttgtgtagggtatgagatatatgattggccaagacaaacgagaagtgagttttctcaaagacggctcggacatggcgaagatggtgtttttccagatagagtggccagctttctcttcttatctataggcgatagagagcgacaacaacgagttcgacttcttttttttatctttgattccaaaatgagcgaatataaaagcggaaaatttgaaacaacccgacctgttttttattttttaaacataattatgtgaagaactaacttgtttcttattgattcaaatgaggttacatcacatatatatacatacttgaggaggttacatgtttaatgggctaggttacaaaagcccataactacttaagtatatgaccgacctatgtctagtttccatgggccggacctacgggccggaccaactgtggcttctttccacgggccgggccgacagaccgacgggccgatggaccggtggactggtgggccgactggtcgatgggccgtcacaccaatgggctgacggacctatcctccaaggacatgggccacggttatggagtccatccaacaagtggtttacaacactcccccttggatgacataaccgtgtagatgcctacgagatctcagtaatgcgctagggggatgctgcctcattaaaaccttactaggaaaaccctttcgggacaaaaccatagtgaggaaaaagagtacagcacgcattactcccccctgaattggtcatccctgtaagtccttaagcctccgcatcccaatctgatgcgcgacttcctcaatgtcgttgctggtaatgccttggtgaatagatcggctgaattgtcgcttgaacgtacttgcaccaccttaacttcaccatccttctgtaggtcatgcgtgaagaagaacttgggcagaatgtgcttcgtccgatctcccttgatgtatccttccttgagctgagctatgcatgccgcgttgtcctcgtacatgatggtcggctccttgtcttcgccaattccacaatcggctcgtatatgttgagtcattgacctcaaccacacacactcgcggctggcctcgtgcattgccaatatctccgcgtggttagaggaagtggccacgatggtctgcttcattgatctccaggatatcgcggtcccaccatgcgtaaacacataacccgtttgtgactttccattgtgcggatctgaaagataacctgcatcagcaaaaccaactaaaccttctttgttatggttagtataatataaaccaaaatcaattgtcccttgtaggtatcaaagcaaatgcttgattccttcccagtgcctcttggttggacaagaactgaatctaaagaggaggttcacggcaaaacatatgtccggtctagtgtggctagacaggtacatcattgtcctatggcactgagatatggcatttcaggaccgagaatttcttcatcgtccttctttggaccgaatggatcactatccaatcctaagctcctcacctgcattgggctggtcaatgggtgagccttgtccatattaaatctcttgagtactgtttctatatatgccttttgatgcacaaggattcctttatctacgtactcaagctgcaatccgaaacagaacttt

SEQ ID NO: 5248 - DNA, 1127 bp, Arabidopsis thaliana
tagcattaagacaactaatccagaagggtatatcaaccaatactcaatcacctagcatactgagaattctacactactctaacccatcctcagaaacctattcaccactcagacatcataacagatagcataaacgttgaacaagttgaaaacatgataacaacagtataagagcaagatgataacagaatgaacaacagtaaacgaaatcaagaacaaaagctgtatactgaataatgaatagataaagagaaatccggattacaaaaggtctagaacataaggtctgcggaataaaactagataaaaacttcttgtctccgaaaatgagaagtacatgctacttatagccaaatatcccgaaaaccctaatactcaaaacgacgaagtattgggacgggttaagaactgtactcgacccacgtggtcgagtgagaggtcgagtgaatagctggagccttcttttcttccgtgtgctcgagtgtctggttgagtgcggaatgaagaaggctctgaagcttgtcatcgagtatgcaatcgagtggtggtgatggtgatactcgacatccaggtagagtgatgagatcgagtagaggtctggtaatgggatgaagtcactcggcctgggggtcgagtgatgtgatcgagtggtgtcagaagagggagatgaagacactcgacctcatggtcgagtgaagtgatcgagtgatggtctggtgatggagatgagggcactcgacctcggggtcgagtggtgaagtgaagtgatgatgtcctctactcgacctggtggtcgagtggtctcttgagatcttgaagctcctactagacctctgggtcgagtggtttgtcatgatcaggtccgcttcttcgagattgctcgtcaacagctccaaatcacctgaaatcaacgcaaatatgcaacatgcatgcaaaactatcctaaacatgcaaagtgatgacaaatgatgtgaaatggtataaaacagtgatgatgagacacctagagtcttctaccttttcttatcaatgaatcaacccctttttttcttttaaacacatcccaacccaaagtataaacgcccacctagtcctatatagtccgaaaaatgcgaactagaactaca

SEQ ID NO: 5249 - DNA, 1225 bp, Arabidopsis thaliana
ccgataacggttcgcagttcatctcgctgtctttcgaaaatttctgcgccacgtggaaaatacgactcaataagtccacgccacggtacccacaggggaatggccaggccgaggccacaaacaagacaattctctccggtctgaagaaaagactagacgaaaagaaaggagcttgggcagacgagctggatggtgtcctatggtcctaccgaacgacgccccgaagtgcaacggatcaaactccattcgcacacgcatacggaatggaggccatggcccctgccgaggtaggatactccagtcttcgaagatccatgatggtgaaaaaccccgaactcaacgacagaatgatgctcgatcgactcgacgacctggaagaaatacggaacgccgccctctgccgcattcagaactaccaactcgccgccgccaaacactataaccaaaaggtccacaatcgccacttcgacgtcggagatctcgttctccggaaagttttcgaaaatacagccgagatcaacgccggcaaactgggagcgaactgggaaggatcataccaagtatcgaaaatcgtccgacccggagactacgaactcctaacaatgagcggcacccgcgtgcctcgcacctggaactcaatgcacctgaagagatactattactaaaaaaaaaaaaaaaaaaaaaaaaaaacaaaaaaaaaccgaggtgcggttgaaccacctcatcactttgtaaatgtgaactacgatcggcttgatccctgcaaagggtacgtaggcaagcctcgtttgacggggcgcagctgtaatattaataaaattctatctgttgttcatctcgagacttacctaaagtagagcgaactttcacatcattgccttggcccggcaactgatcgataaacacctccgagttcgcccgggcttgataaaacaacccgggaaaaagcttactcgcgaaggtttaaaagccgagctcaacgcttgcaaaacgcgaaacctattccaaagtcgcccgggaccgatgtcaatcgtcccgacgatctaaggaacttgcaaaatcgaacattattccacttcggcaaatctagctgagcaatacgcaagcaatacgaaacgcacgaaacaaaaaaaaaaaaacgatccgaaatacttaataaaataaaagccaacaggagtggcataggttcgatacagcatgaggagtagtgcggagacgctttgag

SEQ ID NO: 5250 - DNA, 586 bp, Arabidopsis thaliana columbia
gtataatatacacaagttggaaataacaattaagattgaataatataagagacattaagttataagatgtttaaccattagctaaaagttcatttataagatcgttgtagaacttcaccccctcctcgtttacaccttttttaatagttccatctgcaaattatatataaattttcatgagttataaaagtaaaaagaatcattacgtcattgcaatatagatttaagttagagataatatgtgtggtctggtaaattaactgtaaggacaatgagattgacttacaaggcaagatcctggtccatgagattgaaaatctgaagccattcgtgttcaactccttcattaattttatatcatcctataacgtcacatcccgcccaatcgtttcaatttaattataggataaaaaaaagactatcatttactatatatgaaatcatatacacccataataaataatgacgtaccttgtaaagggtatagaagtcgactccctcatctccatcgccattttgttgaacctctctgaaagatgcacaatattggtgatcatttcttttagaaaagttttggtaaataaat

SEQ ID NO: 5251 - DNA, 561 bp, Arabidopsis thaliana columbia
atgcctcgtcccgcttagaggcaacaccgcgtccgagtccccactatacaaataattcaacacaaatatttctattacaaacctcacatctaaagtaagatgtaaaatatacgagtctgccaattgattttgagtaggaagcttatgaagtttaacatacaaaaacacacatatatatttagtgattatacctgaagatccaaatgcggagatgagcttgaagaagattcttgatgataggaagcatggacttaggtgagtctttccaattctttcttatcacacgactgcaaggtgtccaaggagtactgccgttgagacgggcatggaaggatttgtgcacattgggatcgttcatatacttgcgtgtgtatccacaacacactcatcgttccctctataccgccatgcttgcatccactcatttgatgatgcatgcgtggtgcatgcagggctattgatgttgtaagggtcaatgtcaccaaactcagacaaggcttggttcagagcagcgttgcagtttagttttggaaataggatggagtcgttgagacaccattt

SEQ ID NO: 5252 - DNA, 1013 bp, Arabidopsis thaliana
ttgagatgcatcattattatctagggtttattagagaagtaggcagtttttagattttttttttgagaaatagacacttttttttagaaataggtggattaggtggtttttattgggcttgtgagatagaaaccatgtgagatagaaaatttgtggctaaagtccgaaagaggtgtcaaatactattgtagccttgtgttttaaaaacataaatttcgtctgggttcgaaaaaacaaagactaatgggtttaaaaacaaattcgagtcccatttactctatttcgttttaagtgagcccaaatattgagcccgaatgaaacaattcgtttttattcaggaaattattgagcccgagtttattgtagggattgttttactttactcttcttcgttatcacaaaccctagccgactgtggtgtacaacaaatcgagagggaacgagtttgataagagagacatttgagagaaacccaaattcttatggcgtcaactagcagggaagcctctgttgggaagcctctgttataaggtggaacaacaatttcaaggggatctaggaactcaagcttatcgtctaccattctcttaaaggtgacaaaaagattcacagaactttcagaccttagaagagacttgaacattctgaaagaccaatcatctttgatttcagtcggaggtgtttcctgaccattgagcctcaccaaaacgtcgttagcccagtatgacatctcaacaaacacgtcgtgaccaaccatggagaatcttcgtcggataacttcttcgagggatttgaaagtgtcaattttttcgcagttaatagactttcctggcctagttttatcaactttgaagtcccaccaaccattcgggtagcaaatccagcggccgaccatggagacgcaggattcgtcccctgagaaaaacgaaaacaaagtcatagtaagcgtttacagagtcatagtaaacaaaaacgaaaaattcataaactttacaacgttttatgaaattcat

SEQ ID NO: 5253 - DNA, 1429 bp, Arabidopsis thaliana columbia
  unsure (1)..(1429): unsure at all n locations
tcccctattgtagctgtatggttctgtagagcgtatcgatcgacaccatagttatatcagtcgacaccatcgtaaaaatctgccatgaaaatgtgagtctcaatctgaaggtacctgaaacacaagagaccaatagacaaagaaacacatgaataggtggtagaaaagtaatatttagacttaaaagaacacctagtctaatggtgaactaaaagagaacttcggcaacgacgccaaatttgatatagctcaaattgccttaagtttactccctcaaataagagatcgttgttagcacttaagggtcaaattccactgagctcttgatgttcacacaatagacttatgatgttgtttaataagctatatgaagtaattcaatattaaagacaaataagcaagtaaatgagttgtagatttaagtgattaaagcgtcaggtctaaggaattgtctcgggaaatagataaattgtagatctagctagtattaggattgttatcgcaccggtctcgaactcaaactatgattttagagtaaccagtggcattctgcaaaactctctatacttagagctaagataaccggagaagccgagaaatcctatactaaatcatgcattattatcaagttttattagttcacctagtatctaaaccagagcccttctatgagcctatatgttctttcttaaatgcataggctcatctatgatagttcaaataacaagtacctatggtgggtatacctattatctaatatcaagttctaggtgatcaatctaaaactagcaataagagcaatcaagatgaagaactctaagaataatcctaaggggttttcgatctactaatcaatctaaatccctattgagactcccttcaccaaccaacttgatttctcatatatgataatagaacacaaatcaaagtctgaataagaaatcaataatagcaagagaaagagtgaaaaagatcttctccaaagggagtctccacaaggttttgatcccaaagtacaaaagagataaggagattagcctctccaagctgtcgaaacattgacctaaaaactatatatatatatatatatatatgtcttaaanacgtgttgcgcattgactaaaaataggagaaagttctgggccgaatttggaaattttcaagacatcaataagttgcgtcttcgaattgtcgtcaggtattggtgtcactccgacaccatgggtggtgtcattcgacacctacgcggtttttagtcttcggatttcctcagccgcataaattctctgttntcctccagaatgctccattatctccaaatgaatcccaaacatgtaaagacatgaaaaggactaaaaacactagaaataacaaatagactctaaaattaatacctaaatcatagctaaaagcagtaaaaatagggtta

SEQ ID NO: 5254 - DNA, 1338 bp, Arabidopsis thaliana
catttctacatttgcccaacaaaccagtgtacgttgtagtgtacgttttagtgacgtccacatttacatttctacatttacccaacaaacagtgaacgctgtagtgtactatcagtgtacgtccattcataaatatcaccatttatgagacaaaccaaagacctcatatgtttgcatgtgttattttttagtgtacgttagagttgatatctcatgctagtgtacgtccatatctagttttccgagacaaactaaaaacctttaagtattatttggtagatgcacgtgtacgtagttgtggacgcttagattttaatatccatttgaacccgttcttattaatacacttcttgaagtcgcccacccgcttggtaagtagatgcgtcagcatcatgtccaatacaatacatctgttgctaatcatctgttccccgttcttgtgccacatcaacattgccatcatttctaaatgctgaaatgttcaaaaaatatatatcagtgtacgtacacttccacgaaaaatttaatcatctatgtacaatttctaacaaggaatgtacgtatataaatgcaacgtaccgaactttcgacccattcaccaggtgttagaaggttcgcaaaaaactcgttgggcactttgcgaaacccgaaaagagtgtgaatcctgtaaatccagaaaaatatttgataacaaccttaagacttggaaaaatgatgattgagatattaaataatccattttaatataatgtacttacacagagggtcctttaatgatattgctgaattcctctacttttgaagggtcaaccatgtccagggggttgtatgagacatttccagccctgataacaacctctatctgttgagttggtacatcaggcaccaagactgtttttgccttaaaaccatgaggatgggcatcatcctgttcataaacaagttgccttaaaaaataatcgattttttttcttcttttgcttcgacaacagcagcattgtttgattcatcctgttaacaaatatgattgtcaacaacagtttcatacgtttttctatgtttaaaataggtacatacattatttttaggaatatcggtcttgtctgcttcatctgaccctgggttaggatcctcagttcctacagacccctcgacaatacccggctcttccatgactacctgtgcaagttaacgtacacaagtctatataatgtacacatataatcctatgcatgctattccgaaaataggaattgaaacacacaaattgttacctccacattagtagctgcagccaaatcaccaacggctttggtatctaactcccgtatgacctgc

SEQ ID NO: 5255 - DNA, 489 bp, Arabidopsis thaliana columbia
cgacggtacgcactaaagatactagaatgcatcaagtgttaccgcgattggtaagttaacttaaaagcttgaaacatgttgaatgtaacgggtttactgaataagagttatgttttttcttaggcgagggagatcacagtcatgcccgttctgcagagacagccttaaaagagtagattcaggtgatctctggatgtttttggaccaaaacgatacagtgaatctcactgcaatcgctagagagaaccagaaacgattgtttatgtacattgagaagttaccactagtggttccagatcaagtgtatgcgtcttctccttacgatttccatgtgagatgaaggcggaaaaccggttctggtaaatctttatctgtatacttggggaaaaggaggacttgttttgtaaatgtattagagttagtacaagtagtagtaatcagtcactttcttcaccattatcttgggaaggtccacttactacgtgcttt

SEQ ID NO: 5256 - DNA, 279 bp, Arabidopsis thaliana columbia
agtcacctctctatacccttccctacacacatggagacactccaataaactcttcttctgcctcctctgcccatttctcccaatctctctctattttctcagtctctctctcagataatggcaatgttgggcttggttttatctgttcttactacaattcttgcattgtctgaagcaagaatcccaggagtttacaatggtggtggttgggaaactgctcacgccactttctacggtggctctgatgcttctggaacaatgggtatgtctctctccctc

SEQ ID NO: 5257 - DNA, 836 bp, Arabidopsis thaliana
ccaccaccagctgtaccataactgtttcccatagaggattgttgttgctgtgaattgttatacattgaaccattaggaccagaggagtatcctttacctggatcttgaccgtataagaatccatctacatcaaaagcaaagatagtcagagagatgattcaagcacatagaagatgatcagagagagataaaggtgagatttttaaacctgatttaacagagaaattgggatgtggcaagtactgtgagtgattatagctatcaatgtttctctttttctttcttctcactaagaacacaacgcctataagcgccatgattgcgaaaccggctacagccataccaaccatagtcttcccttgatagccgccaccaccgccaccgccatctccattgccttggtttggagtaggagttcctttactaggggatgtgagagatggagacaccacaggtccactagaaggagttttgggtggtactgtggggaatgggctcggcggagcgttgggattagccggaggagaagtggctggtcctgatggttgtattgggggaggattggtagggtctaatggtgaagctggcggtgaatttgtaggatctgatgctggtggagctggaggagattgtaacggtggtgattccgggtttgtgggtcctacattcggcgacggcgacgatggaggaggcgattgaagatcttgagacggaggagggttgttgtcattggattcatttggtggagcaggtggtgtttcggaatcttctggaggagaaggagattcgtttgacgtcggtggcggcggagaaggggttgaatcaacgggtgagag

SEQ ID NO: 5258 - DNA, 888 bp, Arabidopsis thaliana columbia
cccagaaattatttgagtctttgaatatgtaaaggaaactgtatatgttgacgaataaacagcagatgaacagtcacttactctttaatcactggctgtgctctgaagacaatatggaacagacagaagctctatagcctgagacatctccgtcgacactactgaagatgtctctctccgtacgggctagcggctagcacggccatcgtttctagatggatctcctgcatcagtaagactaaagccacgtttacaacgtctcactcagacaatattttggataagagcgtttgaatctcgaggtctgatcagtgtggttgacttgaaattctggaggatgtggtgtacttctctgtggtgctgggcatagctggagctgccaaaatctttgtgatacaagagaggtagcgcatgcttagttttcagttttctcatttctgtgcagctctgttgtttctgaagttacagaagagagagacgttgtgggaaagccacgcagtaccttcttattctaaggtcgctcttttaactaaggcatctttgccaacatctcttcctcaagctctgaagtgcgttaagtcttacaggacgaactctctgagatgtcacaaactctgaattctttcgcctttttagtgtcatcggcagacgcaatgcacctttatgttctctgtccgggtttgcttagtgactgaagggcagaagttgaagctcgtgttaacaagtccttgttttttcttgtgaggcaaagttgttggttttaggttcagaatctagtgacatcaacggtcggattaacacatacagtgagatagtgaacaagtattgcagtttgagttgactaacttgtctggatttacctccatcatcaagcttttgccttttgat

SEQ ID NO: 5259 - DNA, 496 bp, Arabidopsis thaliana
tagtaacgtccgccagtgtgctctaaagcgtagcgctatagtccagtaaatgcggacttggctggtatgcctggattgacgaagtggtgatgatacttgcacctttcggtagcagggggatcgcttcctgggttagccagaacagcgcgaaaacgttaatggcaaaggtcttttgaaactgttcgctggtgaggtctgcaatatccggaatggcaacctgtttcccggcgaccagcgccataatatccagcccgcctaacgccttgtgcgcttcgtgaaccagcgaacgggcaaatttctcatcgcttaaatcgcctggcagcagaacggctttgcgtccgcattcttcaatgatctttttcacatcctgagcgtcttcttcttccacgggaagataactgatcgccacgtcagccccttcacgcgcgtaagcgatggcggcagcgcgacctattccggaatcgccccctgtcaccggtgctttagagcacactgg

SEQ ID NO: 5260 - DNA, 934 bp, Arabidopsis thaliana
taaaaagttaaatacaaaaagatggtaagaaaacaattgcaatttcatgtttagaggactctcctatagtttaaggtgagaaaaaaatcactagatttgattgataatatgaaagtcagtgattttgcgttttaaaacgtgattctgcatgtaaaatcgtaaggaaaggttagttgtgtctttcgtaaacatgattctacaagaaaagcattttaataaacaaattaaagaatcataaatttcatttagctttttttcattaaaccaagttccacatacaaatacaacttgccaaccataaagtgaaaggagttttatttagctagcctaaaacccattttctcattttgcataatgtgaaatagagtgggatcttaaacagagtcgtctcttgagaacgtggtctcgtatggtaggctctcaattttgacaagacataataatcatcgatctctccactataaaatcaaatttactttacacgacaaagagaaaaagagagagagaaagatggtgaatgagaagaagatgctcccaaaacgcatcatactaatgcgtcacggtgagtcagccggtaacatcgacgcaggggcttacgcgaccacacccgatcacaagatccctctaacggaagaaggaagagcgcaagcgcgtgaggccgggaagaaaatgagagccctcatatcaacccaaagcggcggtgcgtgtggagagaattggcgcgtgtacttctacgtgtcgccttacgagagaacgaggacgactttgagggaagtaggaaaaggattctcgaggaagcgcgtgataggagtgagggaagagtgtaggatcagagaacaagattttgggaattttcaaagtggagagaagattagagttgtgaaggagacgagggaacgtttcggtaagattttctatcgttttccccgaagtg

SEQ ID NO: 5261 - DNA, 369 bp, Arabidopsis thaliana columbia
gatttcccgcaacttgatgctcagacagagcgttagtcttttggagagcttgcaatcatgctggaaagaagatgttctcgttttctctgctgctggcaaatttattcgcttgaaattgcagcttcgttcgaggtttgtaaaaatagactttaatattatcatcaatattgatagacatatatctagtgaagataacgtgaaaacttgcttgtattaccttaatcgaagaagctttttcacgtttatggactttaggcccatatcttacgacataatcactttggaattttggatacttaaccattttatgttaggctcgtaactgacgacatgatcaatttggatacttaacgtacccatattgggttt

SEQ ID NO: 5262 - DNA, 503 bp, Arabidopsis thaliana columbia
cttctttatccaatctaaatatagaacaaaaccgcttctgcagatgaatacaatgtcagtaaactagagctactgactatttgttcaatgcaacaaaagcttaatgcacaaactcactataaagttcgcagtttcgatactcatataccaatttttgttgatctccagtttctcagctatgaacccaactgtctcactaatatccgaaattgaggctttattggcaaatctagatatttctacacaaatggttttgaaaaagctgattcagctacaatggcagaagctacaccaagaaaggaacaagaatctttcaggtttcaaatatatataccacgcatagtccgagtcatatcattgtctcgacaagcaatgtagatacaagcagcaaaaaggacgtttcgttcctttcctctggcataactctccactaccttaaagatctcattagcctgaccctgcagatcaagaaacacaccaattcaaactttatctgtgtatac

SEQ ID NO: 5263 - DNA, 423 bp, Arabidopsis thaliana columbia
caagaagaccaacctaagatcatcattgatcaagagcaacccaaaactctagaaacagagcaccaaccagaaccttcttcatcgtctccggatcagaagaaatggggtactcacgtgatgggagctccggcagctccagttgctcatcccgataaccaacaggcggcggcgtgggtcgctggagataaccagcagacgcagtaccaaccgtacgtcatctactctcctgtcgaacatccaacaactaacaaccctctcgagccagtcatcggaatgttccatacctggagtcgcaaggcagaaaccgtcgcacgtaacctctggcacaatcgtaagtctccttccacttaattggagcatttggacaaagcaagtttgagtctttgacgaattttgttggtcatttttggcttttttgcagtg

SEQ ID NO: 5264 - DNA, 1190 bp, Arabidopsis thaliana
caaactcagtatttacaaaaccaacaaacaaatgagataaatattataaactttcaatacgcaaaacaaagtatagcgatataaatttagtggtcattcttcatcatcagtgacatctaacaaatcaaaatactcattgagatgcaatgaacaagaatcgtttgatgttgttacacgacacccatcaacacgatccttttgatcatcaatcatatctttagacatgccccaatccaacatctcttcttcactgtggtgtatcgcgaaagtgtactctccgctcgcacccaactccatcactctgaactcgcagttcccaaagttattcaaccgctcgaactctgccaccgtccacttgaaccattttgttagaaacactcgagatgtcagtccgtgggacacaatcactaggtttagttcacttgatggatccacttgatgcctgttcatgtccacgtctctccacatagactccagaaaacctttgaaattaggtgagacattgatcgatcgatgttatataacatccatgatttaacatccatgaaatttcttaataaatgaaaatttggacattgatctcactttacatatactagtgttactagataagttgaacactgatcaaaaataaaaacttcttttttttttgtgaaatataaaatgttgaatgtccctacagtaattttatttaaagatacagcctaagattctacaaactaattctatctaaattagtctacatctacaactttcaccagttgcacaattttggttccgtaaaatgatttttcttaatacttagtttattatacgtggaatacttccccaaaaaaatcaacaaattcgaaaaccaatcaaactatacgtcttcttttctcatgtcaaaagtcctgaaagtagacttgaccaatataaaacttataatttgaatttcactagttttcttatattaaaaaggttatataattcaacgatgttattttaatgcaagtatccatatcaatactcgtattcatgtctactataataaaataatgaacttactagaaacacgatcgtagacgtcggcggcggattcaccttcgggaaaacgatagaaaaatctaccgaaacgttccctcgtctccttcacaactctcatcctctcttccacttgaaaattcccaaaagaggatcctcatcaacta

SEQ ID NO: 5265 - DNA, 958 bp, Arabidopsis thaliana
atgatgacgaatgagtcttttaagtttatattaacaaaacaattataccaaaaaaaacacaggagaaattgagagtccttagatacagacaaaacatgacttcatctttctatcttctccagtatccatattttaaaagattacagtaaactggaaattttgatttattttccaggcttcttagcctctgatgcagtcttctagaataataagaactgaaaatgcaagaaaaaaagtagagatattatttcgaatatagcaaactacaagcaataaagtaatcagtaatcagtcttaggtgttttgttttatgtgaatttctaaccttccgcttcttcttctttttcttctcgatgaaagccattatctcatgttgcctcgtcattgtctcgtctagtgcctaagtttttgaaaacagagcaatcacaaaacagagcaaacagagcaagagactagcgagagagaagaaaagctttaccttgttggtttcagacaactgaagctcgagctggtcaatacgacgaagtgcagcgtctagagtcttctccctctccatataaaacgcagcctgagcttccatggacttacatttctcctcaagatctgttatcttcttcaccatcgcaatatactcctgcttcgacataacagtcactccgtcctggtagacggcgctgccttcacggctataaacatttgcctcggtgagcctccttggcatgttcttggttagcctcatcactcccactatccccattagcaatgccatgacgctgccatataagtaccctttcctctccaacggattcacagctgagtacacatctgaatatagagtttcacggagtaagaaacttatacacaagcaagcccggtttggttgacgagaatactaacctttaaggtcggtagggtttttttcagccttgttaagctttgtaggccaatcagcagccgc

SEQ ID NO: 5266 - DNA, 1154 bp, Arabidopsis thaliana
caggatgataacagaatgaacaacagtaaacgaaatcaagacaaaagctgaatactgaatactgaatagataaagagaaatccggattacaaaaagactagaacacaaggtctgcggaataaaactaggtaaaaacttctttttgcgaaaatgtgaagtacatgctacttatagccaaatatcccgaaaccctaatactcaaaacgacgaagtattgggacggataaagaactgtactcgacccatgtggtcgagtgggaggtcgagtgagtagctggagtcttctttcctttcctgtgctcgagtgtctggttgagtgcggaatgaagaaggctctgaagcttgtcatctagtatgcagtcgagtggtgtgatggtgatactcgacttccaagtagagcaatgaggtcgagtagtggtctggcaatgaaggtgaagacactcgacctcgtggtcgagtgaagtgatcaagtgtttgtcaggagatactcgacttccaggttgattgacgaggtcgagtggttgtctgatgatggaggtgaagacactcgacctcatggtcgagtgatgtgatcgagtgatggagatgagggcactcgacctcgtggtcgagtggtgaagtgaagtggtgatgtcctctactcgacctgggggtcgagtggtctcttgagatcttgaagctcctactcgacctctgggtcgagtggtttatcatgatcagatccgcttcttccagatagctcgtcaacagctccaaatcacctgaaatcaacgcaaatatgcaacatgcatgcaaaactatcctaaacatgcaaagttatgacaaatgatgtgaaatggtataatcagtgatgatatgatgctaaagtgatgacaaatggatgctcaaaacatgcaaaatacacatttatcaactcccccaaacttagtctttgcttgccctcaagcaaacaatcaagaacaagctggaagtaaggtttgaaagcggggattcagagccaaagaaccagatagaccagatgaaatcaatgtccaagttgaaagttctaagctgcaagatcaaattctacttaaagacgttagccatgcctcattatcaatcaatccgactcatatgctcgacccacacatgttttcaaatctaccgagagtcga

SEQ ID NO: 5267 - DNA, 538 bp, Arabidopsis thaliana columbia
tctggatttgatttgaccaaataaataaggttgatgatgattttgattcttacattagagtgaagccataagttgtcgtaaccggaaagtttttcgtatgtttccggtttagttgatcttgaagatatatggacttcttttgtaacatttactatgtctctgcttatatcgactccgctcactgagcttccacctaataaattcaaacttcattacagattcatataatgatcatgagatctgatttttgttttttgtgtttacctgatctttaaattgatctggaattctataattgtggctgtgaatttgctttccaggacatgaatctatgcctggaaaaacaagttattacaaaaacttacattatttttgtttcaaaggagaggattttgttttcgtttttatgtaaaaatcaaacttacatgtaaaaatgagggaaaagattttcttacatatataagacaatgttttccctgattttacatgtaacattttcttttacatgatttggctttaaatgactttttttttagtt

SEQ ID NO: 5268 - DNA, 421 bp, Arabidopsis thaliana
cccaataaagtagcttgaagaagaaaaagacaagctttattatacacttacccagaaaaacaaaaaacaaaaaactgataatatctctctctctctctctcgttgagtgtgtccatgaaataatactctgccagagacagagagaaagactgtaacggaggatgtggtggcgaagtggccacactgacacactggtttcatgatggtgaaccacaacaatggccagcgacccactgatattgattctcgtctccgacagacagaacaagataagctcttgttccatgactttttaggctccaagaatcctactttagcatccacttccatggctgaccataggctaccaccggataataaggcggctaaagcggcgatgactccttccacggcttctgcttcctccgccggtggactcggc

SEQ ID NO: 5269 - DNA, 563 bp, Arabidopsis thaliana
tccctgatgactaaagagttaatgataaaagaaataagatgtttggaactgagacttgaatttgtttctattagcttttcttttcagtacaaaattgtaggcttttattggccaaagctgttaagaattgaaactctgtatttgatcaaagacttagataatgattctagtccatcttcgaaatcttgaatgcatgactctagggatcggaacgtcctccattttcgaagtcttctcggattggaactcggagtcaaccttggtgaattcgttttcttgtgcttcacatgtaattttcttcttgttcattagctttgagacgactgaccatttgctacaagtctttgatccagacatgtagctaaagagagaatcaaacatagcaattgtaacagcttctgcttctccaaacacagccaaagatttgtccttgttgtcttctgcttgtgcagccttgagggacttttgtactttctggaatgtcttcttgaaggactttcttgaggctaagtatttcttcacctctcctgatagatcccgcgctttcttcttagaatagattg

SEQ ID NO: 5270 - DNA, 503 bp, Arabidopsis thaliana
tgaataaaagcagcacaaagaacataattactagtaacgtcttcaggtgacaaaatatgtaccatcatcagagcctccggttgcaggccgtaaacaatcctagtggcaaagtaacaacacatggttatgggatctcagaagcttctttgattctcatagcaccaatcacaaggagagtcaaaccaacgactcttgtaccccaagtccttataacttcagtgtgaagcctatttcaatttcaaggtatagagcagtggataatctcaaggtaaactacacagaaaaaactacaattcacatagatagttcgaacaattactacaaacttgatatttacgatgtttcaacaattacttgatcatgaaaccatagactactagtaatgaatccaatggttcttgaaacaactgaaacctataaacattgatgcttcttcaaaaaccaccaatccagtaacttaaaccaaaaatagtcgcaaacatcgatataaacaatacactgac

SEQ ID NO: 5271 - DNA, 1506 bp, Arabidopsis thaliana
ctaaaggaaaaagaaaatcataccagtgggttgcctcccacgaagcgcttgtttatagtcaatagcttgactttgctggagttcaggaatcaggtggatcagaaggtggcagtaaatgcttcttagaagaatatcgcatcatccatggtggtgtgtgagcagttagcgcgtgagatcgaccattgaagtgaggaagatctgcagggtgggactcaagtatgggtggtatactcctctttcctgcaaaatcatcaaaagaagaaacaagcagtcaacgagaaactaactgtgaaacagtcttggaaaatttcaaagtcgtattgatgaaatctggaagtttagatagaggtgataagtaccttagccgtttaggaggttgaatgagtagtaaaggtgtagtgcttgacttgacaattcgtcctggacttacaacatcgatttcagtcttgagaaacaattctggagcagtatgttgtgggtgtcgatcgatactagaaggggtgtcgatcgacactcattttccaactcgaccatctatagtctgtctacaattcagatctacaatctgttccgagataaccattgtcttcgttttatcctcttgtttctatggagtcttgttctgaataaagtcggttacatgtgcagagatcatcatcacaccatgctcactattcaaatccttagtaaccattctcttaacataatgcttgatcatagggaaagacttcacaacatctataagtggcatctcaacaatcagcttatccatcatagctttgcatctagcatcatctagctcttgtttggacttcctaggactcatggggaaaggaatcttgggtttggttgccttttttgcagctgaaatcgggttttggaggattcgcaggtctagactgggttggtgtcgatcgacaccctgttggtgtttgtcaacactgtcgagttctgtagtgtctgcgtacgctggtgtcgatcgacacccagtagtgtcggtcgacactggtgtcttgtctgcaaaaactgcaacatcattctcttccaaattgacgagtttgatagcagaaagcttcctttgaagaaccggatttagctgttttccactccttaacttaataacactaacatttgctatgtttatagtcaattgcttgatccgattgttcaatacttgaatcttccaattcacatctttggataaagcatcaatttgtgatcaaactctttcgtttgcttctcttgacctctgagaatctgttcgagcatcgattcaatcgtcttagtgggcttgggttgaagaagcataagtcggagtaaagcttgtagattgctaaaccggcttctgatatgtagatttatgattgtatctcatgtatccctgttgatccatcttctctaaagtgactaaacagtcaacctgtgcaacatactgaatctgttggttatcaaatgtttcagcttgagttttcctttcattgtcagcgcttttggtgctactgcttg

SEQ ID NO: 5272 - DNA, 551 bp, Arabidopsis thaliana
cttgtggataatatgtttcttaagggatgtgttcctaatgaggttacttataatacgcttattcatggtctatgtcttaagggtaagttagataaagctgttagtctcttggagcggatggtgtctagcaaatgtatcccaaatgatgtcacatatggaacgctgattaatgggttggttaagcaaagacgagcaacggatgcggttaggttgttgagctctatggaagaaagagggtatcatttgaatcagcatatttattcggtccttataagtgggttgttcaaagagggaaaggccgaggaggctatgtccttgtggaggaaaatggcagagaaaggatgcaagcccaatattgttgtgtacagtgttcttgtagatggtttatgccgcgaagggaaaccaaatgaagctaaagagatccttaatagaatgattgctagtggctgcttgccaatgcgtatacgtatagctcattgatgaaaggatcttcaaaactggtctttgtgaagaagcggttcaagtgtggaaagagatggataaaaccggat

SEQ ID NO: 5273 - DNA, 530 bp, Arabidopsis thaliana columbia
cagaaggtgaacacaaaagactcttcaaatttgaaaaagccctactaccataatttgattttggaggtcaaaacttgcaggtttgtgatgaaatagagcatttaatggatgatgatgatgacatggctgagatgtatttgactgagaaaaaagaaagagctgaagctcatgcgtcagaggagctagaagataacattggtgaggactttgaatcttctggaatagtttcgaagtctgcgccggtttcacctgtgggctcaacaagtggaaactttgggaagcttcaaagagcctttagcagcattgttggctcacataaaagcttgttaagctcctctagcatcggagagaacattgatcaactagagatgttactagaagcttactttgtcgttgttgataacactctgagcaaattatcatcggttagattcttcttaatctttcttttaaactcaactacatgttgtttcatcattttgatcatgttcttgtgtttgcagctgaaagagtatatagatgatacagag

SEQ ID NO: 5274 - DNA, 922 bp, Arabidopsis thaliana
ccagaaagtaatgtagaaatcagccttgcatttcaaaggataaaaccagcaataacgagaccaatggtcaatgaagattacatagtacttaaacccctgatttgacaaaactggagagggtccccaaagatcacaatgaactctctctagtagtctagttgcaacaaactgagaatctgaaaaagaaagtctactactcttcccaatctgacatgattcacacatcctattggtgctcttattgatgatgatagctttagtactgactaactgctgcaggatcttactattcggatgtccaagacgtctatgccacacttcatctgaggctgcttgctgtctagatgaatagaaggcttgaacaggtggatccttcagcgtgtacagaccattcttattttgacccagagtgagaagcctctttgttaccttgtcctttacaatgaccccattagcatcaaattcaagagtacatgggtaatcggttgtgagttttgaaactgataacagagactttgcaatatcagggacaactaaaacatcaagaagagggagagtacctgatgtcgttggtaagagagcagaccctgtgtgagtgattggtaagaagttcccatctcctaccatgaccgtgtcagatcctgaataagctctactctgctgcaggtgatgaggtgagcttgtaacatgagcagtagctgcagagtctgcacaccattcactgcctgcttgatctgtgacatcagtgattcggagagcagcgagacacgttggcatatcttcatgctgatatgcattgtcaaagcgatgccaacactttagagccggatgtcctatttttccacaaatctgacacactggtctttcaacagactgacccgaagacacagaagaaccagaggagatttgctgatgaaacccc

SEQ ID NO: 5275 - DNA, 1402 bp, Arabidopsis thaliana
tctccattgacttgtaacaactagtgcgatcacaataagcatcactcttcagctccaattccttgtgctagcctcagtccggtgattagagcttcatactctgcctcgttgttagaagcactaaataataaacggaatgattgttcaagaatttccaatgttggagattccaactttattcccactccggatccttgttttgatttaaaatccatatacatgcaacttccaagtttgattatctggttgttctagtgtgctaagcactggtaattcggtcaagaaatctgccaaaacttgggccttcatggcgactcggctcttgtactctatatcatactcacttaactccactgtccacttcgccaatcttccggactgacttggagtatgaagaattgttcgaagtggctggttggttaacacttcgattggatgagactggaaatatggacgcagcttccgggcataggttaccaccgcaagtgcgagtttttctatcattgtgtacttggtctctggatctgtcttagacttacttatgtagtaaatcggtttttattcgccacgatccccctgtatcaagactccgctaactgcatggtttgacaccaaaacatataaatagagcttttcatccacttccggtttggacaatacgggtggagtgattaggtacgccttaagctgtccaaatgcttcttcacatttctcatcccaaagaaattctttgtttctttttagaatttggtaaaaaggcaaagatttatctgttgatcttgaaataaaacggttcaaagctgcaatccggccagttaaccgatgtacttcaaggcattgatttggttcggattggcttcaatttcccttttggtcacaatacaaccaaggaactctccggatgggactccgaacgtgcacttcgtcggctttagcttcatttggtattgattgagaatctcaaaacattcttctaaatgcttaacgtggtcctctttctttaacgacttgactgacatatcatctatgtaaacttccatcgtcttcccaagatgctcgtggaacattttgttgaccaattgttgataagtagctcctgcattttttaaaccaaaaggcattaccttgtaacaataaatacctctatccgtgataaatgacgtcttatcttgatcttcgggattcatcattatttgattataacctgagaaagcgtccatgaaagttagtaactcgtccaaagtggttgatccacaaggcgatctacatgcggaacggggaaactgtccttcgggaaagatttattgaggtttgtgaagttgatgcataccctgtcctttccattcttttttttaccacgacagtgtttgccacccaattcgggtattgcactcccttatag

SEQ ID NO: 5276 - DNA, 1469 bp, Arabidopsis thaliana
gatttatttcataagtataaatattacacaacatgttaccaaacatttaaaagttttatgaaggccatcgcgattactaaggttactcagtgagctcgggattccctgcaacagacattagtttaccccaacccgaatacccaacatgaaacacgcaacagagaatggcaacataaggtatcttgccgaagcaaactacaaaaacatgaacatgcattaagactccagtttcattaagtttttaagggctcgacatgctgccttccaacccaacaccaaacacacacactctcgtgatctcccgcattacaaccacaaaggtatgcaactggagcatcactaccaaacgctacaccgtcgtgtagacactcgggcaggatagctagcctcgtctctccaagttcttcgcactacatggcgatcaagtaacaacgttacaagaccccacgatagcacggttcactatgaaggtcagacacatcacgatcttggcacgcttatggtttttgcctcctaccacaagcaccacgtaccaagaccccaaagtttaagatattatgaaacatatggttaaatcaaacacatagaatcatcaatatcccaacaaaacctcccaaccataaataatagcataagaatctaaagatcacatatgcattccaatataaccatttacactattcatataactcacaaaatcaatcaagaatgcatgagaatatgaatatgaaacttaaaccattatccagaactcactcagtaaccaacagaaagtttccaacgattcgggtagagttttcggctatgggaccttaacttgaatcggacggacggtttcaacttggcagcctctcacttccactcagtttctcttcacaaaacaattggggtcgagttcggcttatataagcaagggaaaggcgattcagcatgcccacgtgtcaagtgcttgagcgagtcagcgggtcactacattctcccccccttactagaattcgtcccgaattccagaaggattagacggtccgtcttcatcctctgcgttccctggttcgaaaaactgaggctatttcgtccagaacttttcctcatcttcccaagtagtaaccttacaactgtgccttccccagaacacttgaatttgcggaatccttctattctttagctcccgcattcgtctttcaccaataccaagaggtccttcgggatatgtgagattcgttctcaactcttgtattggcttgggtatgatagcattaggatccggaacatgcttccttagttgcgacacatgaaaaactttatgtaatcgcatttcttccggcataaacaaacggtaggatacctccccgattttcttctcaattttatatggaccaataaatcttacagcgagctttccaatctttccaaagcgatcattcccttttaacgcggttaccttaagataaagcatgtcgccttcttgt

SEQ ID NO: 5277 - DNA, 1456 bp, Arabidopsis thaliana
taaatgctcggaaattgctttctcttcagctctgccaagcttagctttattatgattcgcgtcagtcgtcgactcagtgacggggttcttgagcttgtgtgctgccatgaagcagattcgagcatttttctgatttccccagatggttttcacgccattgctcgtgggaaatttcaggcagagatgatatgtcgaagcgacagctcggaattgatttaaccatggtgtatcgataattgcattgtaaacggtcggttggtcggtaacagagaaatcgacgatttttgttacccctttggctcggactggtaacttgatggtcccgagagtcatagtggtttctccagaaaatctgagcacaggtcgcggagatggtataatttgcgtcatgtcgaccttcatttcttgcagggttgtaagaaaaatgatatccagtgtgcttcccgggtcgaccagaactcattcgacgttgaaatcaccaatggttagtgtaatgactaaaggatcgttgtgtggacggtctaaaccgttggtatccctttcgtgaaaggttacttcgtcatttggcccattaaatggccgcgcccagttacgattcgcgtcggccttcctttgataagccttgattgatggcgccgtgtcttgacagaaagccgaatcccctaaaattgtaaaaatccttcctcgagcagcttctggctcatcgtcgtctcgttcgcgattacctcggcctcttttgggtctttcggggttcgccgcgggggctgcctgctcgggattggccacagcgttgacctgctcggttttacctttttccgcttctaagtcttcgatggtcaaacctccaccgatttctccggctaggaattttgctaccaactttgctccgaggctacgacatctggaagtatgatggccgtaactcttatgcaactcgcaatattcctgctcgtttcctgcgggttgatcctttgtccaagtgtaggattctcgaccgcgtcctcgaccgcgacctcgtcctcggcctcgggcggcttcgcctcggggtgtatcagccttgtaattatgggctccggagaaatttcgcccttcatggtgaacaaatgtccagccttgagcaccctttttgtgattcggagcactgtgttgggatttatcgatgcgaggcgtttgcttggagggttcgtgtcttttggctactagttccatttcttcttcatgggatacgtaatccgaggctcggtgcaaggcgtctcggattgtcagtggtttggacaaatttaattcctttcgaaattcggatttgtaccacagtgctttcttcagagcagagagagctgctacgtcgttgattccttcgactttggctagggtagatcggaattttgcgaggaagtctcgaagtggctcattaggctgctgagatagtgccataggtcggcgtctgatgtccgag

SEQ ID NO: 5278 - DNA, 1430 bp, Arabidopsis thaliana
tgacaactgagttcaggttgagtatggtaggcgaacttaagtactttctggggttgcaaatcaatcagattgatgaagggattgctatctcgcaaagcacctatgatcagaacctggtgaaacgcttcgatatgtgttccagcaatccagttaaaactcctatgagcactaccaacctctgcagctgctgtactaaatttctttggatgaaacacatgggtttggattacggtatgtcattttctgaccatttacttgttaaatgtgataatgaaagtgctattgccatatctaagaatccggtacaacactcaatcactaaacacatagctataagacatcattttgttagagaattagttgaagaaaaacaaattaccgtagaacatgtgcctactgaaattcaacttgctgatattttcactaagcctttggacttgaacatgtttgtgaacttgctaaagtccctaggtattggtgaagtctaactatcttcttgatgagtgtttatgctgaaacagggttggttgtacagtgagaagcaagttttcatatctattttacaaagtgtcataaccggttttcaaatcttctgctgtaaaaagttcaccaagagaaagagctaccctacatggttcggagatgcaaagtcagtaaagtgtgtgacagacacagtgtgtagagcattaaggaagggatgaaatgcagaaaggggcagaaaagaagcatttcatttcataagatgaagcatgagcttatctaagacacgggggacaaaggagaaatcttgtcactaacccgatgggaacaaaggagaaatcttgttcacctacactttggagagaagggatgtcaaacaaaaatattgagagaacaagtaataaagagcatcattacactctgcaacaagacaagagaaataaaaaaataaaaaaaaataaggggggtggaaaaacaagttctctcgctgacatctcgtctctctgtagaaaggagcagtaagaacaacaataagttctgaatacaaaagatcagactggtaattcatcaatagcctgaatgttgctgcacagtctgtcacactccttgttaaaaggactcgctaacactctgagatatgacgttgtgaagactactcttggagaatcaacagtctcttttgtgttgtgtcagcagattatgttctaaatttttgtgaatcaagtgtacaatgagcttagtattgtacaatcacctctgggacagttctggacctcagtatgagggagagatggttattactgtgctgatactaatggggacttgttctgtgtatatcgaagatggcttcagaaaaatgagttaattttcagtggtacttagttcaattctataagctaatttggggttgtcgattttgtttttatggtggttattgtgttttatgagat

SEQ ID NO: 5279 - DNA, 1075 bp, Arabidopsis thaliana
tttttgtcatcagatattatttaggactcaaacgagcctattttgaggaaaattgtttacaaaagtggtatgtagcggttccgcacaaatttttcgtgccaaataatctactttgacatttgcattgcgagagattaaagataaagaaaaagatgagaattcttgtttgtcgctctggaactcctccaaataagttgaaaatgctggccattcggttggggaagacaccattttcaccaggtctgaacagtctgtaaaaaaagctacttcttggttgtcggcgccaatcatacacttcattgcccagagtaaagcttcgacttctgtagggagaggagaaagacttatacacagattagcaggtcccatagttgacgacccttcattgactgatgtacaaaaccaccctatacctgaattgtttttgctttctttccatgaaccgtccacaaaacaacgaaggctagactacctattatcttgtgagatatccttcacccaaatttgtttttccgatcacaaagaaacatggttttcattgttgaactcaacttaagctaactgccacgattgtgcctatatttctgctagatataacacatctaacggatctttttcgatattttcaaatattttttcattccatgctttccaaataccaaattatccacagatatgcgaatgaatcaaattctaaagggattcttgagaataagtgatccaaatttgcataaatagaatctatgggaaaaactcctgggaccgtaggaatctttgagagagcccatatttgtcttgccggatgacactggaaaatagtatgatttattgtttcctctatagagccacatctcacacatcctacatcacaatgtatacctctttttcgtaaattctctgttaccggcacacaacctgataatatttgccataaaaaatgttgtaacttaagcggacattgtactttccaaacatgggctttcaaaaatttgatctctaggccaatgaaagatgaattatttgccaagttttccatctgtgttgtctggtagccggatttaactgtatagtttcc

SEQ ID NO: 5280 - DNA, 1520 bp, Arabidopsis thaliana
  unsure (1)..(1520): unsure at all n locations
ggaagattatttggttttcctagtggaaagggaactaaacccaagttcgagagggaagagttgaaggatttgtggttaaccattgggaacgatttggcgctcaactctgcaaggtctaagagcaaccagattcgaagccctgtgatccgttactatcagtgctcagtagcgaatgttctgtaccccagggaatctacgggcaccgtgtctaacacagacatggaaatgattgattctgcactcaagggcattctccggagaacaaaggggaagaaggtcctaaagggcgacctgaatgatacaccaccggttatgcttctgttgatccacctgtgtggatacaggaagtgggcgcacaccaacggaaagaagaaggtgcgaggagccctttgtgtaggtggcgttgtgacaccgattctgattgcatgtggtgtacctcttacgtctccagggtttgatccgaggatgatggatttagatcacttgcgtcgttgtgagtttctggagtacgacatggttggcgatttctatcgatacaaattcgagcactccctgacccgaacagccaacattttgcttccctgcatcgaggccacaaccatacttcagggtgagaacattgacttcagacctgcgcgtgattacctctactttgagagcgctccaccgactgatgacaatgtccctacgacggaagctacagaggatgatattactgagatggatgaggatagggaggaggagtatgatacgagcatgtatcatttcagtgagcacgtacctccagcgcgggagagcaagagcttgagtgaagctcacagaaacaacagtaagttgcagaggtggtgcaagaaacaagataggctacttatcaagtgcttcaaagccatcacgtttctgacggacaagataagttgtttctcttctaccacagctattccgcagggagagcgtcctcaggacatgccttcgaggagatatgacgcgccggggccaagtcatcacaggcctgagccaagtcaccataggcctgagcctaatgaccgagtagtaccaccagtccctgcaaggcattcatcattcgagcctcgggagctcgggagaaagaagaaggctgcactcgctaggtctggcagcaggagtacacgacttctccagtcccgtagcttacgcgtaccgcggtgctggccgcagcagaagaagagaggtcgagtatcatcagagcggcgtggcgancngaaggagcagaggtcgagtacccccagggggaagctgagacacaacagggagattcttcgatggcctaggagcaatcacaggcagctattgacgaccaactccgctccttcttccacctgaggtatgcacctcactccaccattgtaatataccatctcttgtttttatttagtttttgtgatgtgtttttgtcctgagtactctcttccaaattntggcacatagtggactgtgtgatttaagtttgggggagggctcaggaagtgtgtgttgcattgtat

SEQ ID NO: 5281 - DNA, 1610 bp, Arabidopsis thaliana
tcatcgcttgttcttgagagattcattcagttcataatacagtgaagagatcccttcttactcttatcttatttgctatctgtacagtgaagaattccctaggttatctgtagaattattcatctttgattatacttaatattagttctagagtaattatttagatcttgaatcaagacaatagatatgcccaccataggtatcggtagttggatctattatttgatgagcctggtttataggtgagtaataagaatcggcctatctactaaggtgaacaatcgaactcgtttagaatgcatgtttaggttaaaaatctctcgacttctccggttattcttagctataggcatagggagtttcgcggaacaccaccggttattccataattagagtttgagtttaagaatggttcggtaacaacctagctttgattagatctactaaccaatagtttcttaagaatactctgttcctgagaatactcgctttttatttcaatcatcaccttctagcttaatctcgacattcaactgattgtttgaacaaaagaactttgtggaaattgatccttaaatactgcaattgatctcttatttgagagagtagttcttatggtaatttgagtcttatcaaatttggcgccgttgccaaagttcttgggaatcaccattgagtttagtttagagatttcgtctaggttttacttttattttgttactcacgcgtttcttgttttcttcttatctgtgtttcaggtgtatgcctaggaaaacaaggagcacacaacagaaggagctgatcaacttgtctgttctggacttgggaaaacttgaacgcaccaaccgcaaaactcagagattagcaatagctgacagagtcatcagagctgatgcagaaggagttttgtgagatgaggatgggcagggcaagcgtacaatgaggctggtcagagattggatgataatggactcatcctacctaaggacgccaatgaggatcaggcgcgcttcaatgcgcaattagctgccagagacgcagcagggctcggtgtcgagcgacaccaactgggtgtcgatcgacacctttgggagcataatgtagacgcgattggtgtcgagcgacacaacagaggtgtcgatcgacaccaaccccaggttcttgtagctattcctccagctgcggaaccacgtcatactctcgaggatttcaacaggcctgacctgttctatgctaatcgatcagcgatcgtacccccacccttccagaggaacgattatgagatgaagccttgctactttgctttagtaggccagcatcctttccatggcttgtctcatgagcagccaatggaccatatcgagcgttttgaggacctcgttctgagcatcaaagctaatggagtctcagaggactacctactgtgcaagctcttcccttattcattgttggggaagccgcttattggctgaaacaacttaaagtgggttccctcaagccttagagaagcatcaaaatagctttcttgaacaatttctatgatgatgctaagtctgaggagctgagaaacaagctgtctaccttcacccaaggtctagctgaatctttca

SEQ ID NO: 5282 - DNA, 559 bp, Arabidopsis thaliana columbia
attcccacacctaagaaagcttgatgacaggtcgaggattctagtctatctcggaacagaaaccggctccaaggcttacagattactagatccaaccacgcggaaaatcatagtaagcagggatgtagtgtttgatgagaataaaagctggaagtgggctaactccgaattgattgaaagtcagaaagaaccaggaatgtttactcttgctcaaacagagtttcacaataacgaagaagttgagaacgaaatctcagaagaaacagaagaaaatgaagcagaggactcaactaatgaagacgcagaagacggtcttgatgaaccaagtgttcctgaacccaatcacagtgatgatgtaccagtctttacacgctcaggaagacaggtcataaaacctgcacacctaaatgattatgtgttgttggctgaaattgagggagaacgacttctgcttctgattaatgatgaaccctgggattttaaggaagcaaataaatacagagaatggcgtgatgcgtgtgatgatgagatcaagtcagtaataaaaaacagaacatgg

SEQ ID NO: 5283 - DNA, 913 bp, Arabidopsis thaliana
aagaaaaactagagagaaaggcgtataaggattcttcttttttaaaacccttacatgcattgtatgtgtctttccactgctagtaacaccgtaagcaaaaacggttcctgtcaaaattccaaccctgagtcagaaaatatgttgcaagcaatactacttgcggaccaattggtttagaggatatttctatataaaagatacagattttggtaaagctgaattttgcagcaatgttacttaccgttaacaccttccattgctgccttgactactggtctcgcagctacatcataaacgtcaatagtagttgcctgtggtccaaaaactttatctggcatcaaaacaaatttggaaaacattcactcaatgattacaagaaaacattcagaataattgagaggtgaaccaaataccaaatgcgtaacgtgtgagtgggttatactcgtgcctaaccaatgtatcaccatcagggtaccaagcaacttcatctcctctttgatactctctatcactgcaaacccacaaagataaaaacttgaatttgcaaaccccaataaagaattgactccaattgcatctacatgaaaactgtaatctctgcaatagatctggtccatggcgagatcagatctagcatacctcaacggacgaaaacgaacggtgacggagatactatcccgctcagagctaatagtatcgtccatagggtcaccgagaagctcctctgacgggtagggaacaggcgatccaattccaaagctgccggagccgataaggccggagtcggagaaggtgcgactaggcgtcatagatcgggaggcgattccggcggcggaggtaatcaatgaggaagcagaggtagagttagaccgaggaatgagacggttgctgagatgagaagaagaagtggaag

SEQ ID NO: 5284 - DNA, 567 bp, Arabidopsis thaliana columbia
tatagaactttgattgctctgctgcttcgagaaggatcttttcttcacaattgattcgccagacctgaatttttttaaagttagcaatcaaaacactatgttttggttatgtccacatattcaaatacattaatgacggtatcaactaagacatcgtcactacctggagatttcctgtaccatcaatgtatggcttcggttcgtctttagaagaagaagaagaagtcttaaccaggccttgaacgttaactccttgccgctgcaaaagagctggtgaaagaacaaaaagagaataagtatctcataattgaaagtctaaaaatttcagtaatgatcaatgtggatagtatcagtatactcaacctgcgactttgcctctgccttgttggggctcagctatggtacttgaagccggccatgaatcaaacttagatcggaacatcactgtttcatacccttccatcacactgaccaggtttgattttgggcggtcagacgaacggaaaaattcctgaaaaaatgaaaattaataatatgacagtgacattaagaacaaatcaaacaaga

SEQ ID NO: 5285 - DNA, 512 bp, Arabidopsis thaliana columbia
gactctagtccctatcacgcttgtgctttaaagcgctctacagccataatcagctttacggcgtctggcgcgtggttgataccggcgaagagccgcagaccacgcgagtattgcgggtaaaactgcaaacggctgacaaaaccattctgctttatagcgcctcggatattgagatgttgaccccggaacaactgatcacgcatccgtttttacaacgcgttggtcgagctctgctggatccgaatctgacgccggaggtagtgaaagaacgattattgtcgccgcgctttcgtaaccgtcagtttgctggattactgctcgatcaggcgtttctggctgggcttggcaattatttgcgggtggagatctctggcaggttgggttgactggaaatcataaagcgaaagatctcaatgcggcgcaactggatgcactcgcacacgcgttactggagattctcgattttcctcgctacgcggggcaggtggatgagataagcacatggggcgctg

SEQ ID NO: 5286 - DNA, 572 bp, Arabidopsis thaliana columbia
  unsure (1)..(572): unsure at all n locations
tgactttgcttatctacggcatagctatctacaaactaaagacaagcaaatatgaaacaaccactgaccatctaatccaaattgtgacgttgagtatacaacgccatccatggtatcctgaagggtgatctgctcttttgtactaacatgatgatcaacgtaattactgctagacaggaaaacaaggagcaacaaataaacaaattatgcaaattggagtaagagtggaatacgagtttgaatgttaaaacataaagaaaccaacccctgaaagatctcattgtctggaagctcaaagtcatcaagatcaaatgtctctggcaacgtaatagagtgatacggcgctgtagattcttcagggggtaggtcaacagcagcagagcgaaaagcttgctttaccttaagcaatgcctcactgcaatcatcaaagaggtaattcacctttctcgaatatatacgcacaacaccaagcagaagatgactagacaatcgcaatgcaatcggagcttccggaaagagaatagaatctgctcaganaaagaaattagttatattaggacatattttagatg

SEQ ID NO: 5287 - DNA, 1035 bp, Arabidopsis thaliana
tgcaaaaaatatttataagaatacaaatgaaaaatgataaaatacaaatgatttctcaattacctaaaaaatataaaaatgtcttactttattttcagccactgttggaaagtacttgcaatcatatcgtattttgaattataaaactcagaaacaattattttccctgaaaagttaaaacttttaataagatatttataaaataaaaagaatagtctagaccgaaaatggggtcggttgtccatccaaaggagtgctataaatagaaccctccaagttctcattaggacacaacaactaaaaccacatttatcattacagtctgatttgagctaagttctctcatcataaactctccttggagaatcatggctatttcaaaagctcttatcgcttctcttctcatatctcttcttgttctccaactcgtccaggctgatgtcgtacgtctttttcatcacaaactaattatactcaatataatacttatgttttcaaaaacatatttctcacatgtacaacaatattcttgcaggaaaactcacagaagaaaaatggttacgcaaagaagatcggtaattatatgatttttattaaacctaacgttaaatttagagtgagattaataatctgtgtttttctttcttgtatatatagattgtgggagtgcgtgtgtagcacggtgcaggctttcgaggaggccgaggctgtgtcacagagcgtgcgggacttgctgctacaggtgcaactgtgtgcctccgggtacgtacggaaactacgacaagtgccagtgtacgctagcctcaccacccacggtggacgccgcaagtgcccataagaagaaacaaagctcttaattgctgcggataatgggacgatgtcgttttgttagtatttactttggcgtatatatgtggatcgaataataaacgagaacgtacgttgtcgttgtgagtgtgagtactgtattattaatggttctatttgtttttacttgcaagttttcttgttttgaatttgtttttttcatatttg

SEQ ID NO: 5288 - DNA, 600 bp, Arabidopsis thaliana
tacatttggagttcttcgccattggaaccagtcccttcaatttctcctcctttcccttcatggtatttaccagtcatctgtaacatatttttctcctgcttcagcttccagccttcaactctttctttccagtcaacattaccaagcccataagagttcaagtcttttgacgggtccacgattcttacagggactgcaatttttagcgggagctatcagttacggtacacaaaatatatatgttgtaaaaatgaataggaatcacatttaacaaagaccacgtgcacaagggaaaaacatatgaataccaggttgccgtggatcaatatatggagatgaaatagcattcctgtcagaaggacccaaaggacctgatgtagttcgcacagattgtgtatcaggcgtgcgaatctctccagaaacctgtgtatagaaaaaggtcatgaatctattgaaaacagacacaactaacaacatctattattatttcttaatttggatgccatgtactatcagaaaaaaattctgttaagatttgtcacatataacattaacgtgaatagtaagtaataaatgaccactctagggatttattgagta

SEQ ID NO: 5289 - DNA, 500 bp, Arabidopsis thaliana columbia
gattcgtgatcccctttgaaagcgcaaaatggcaatgattccttagttttggaaaatgtgaagcatactgataaagcgaatcaccagccaatgaatgccacgagtccgaagtcaaaggcagctggatcttctggcccccttcatccgaagtgcagcagcaaaagtgttcatgaacaatctaattcccctccaggaaaatctcggccaaatgtttcggcaaaatcagcagtagttcgtcagcaagttaacaatggcatgcctgacctggacattgcaacggaaagcaaaacatctattcaaatatctgtaagtactttccagctatcttaagtttattagattcctcattttagttagtttggaatttgaagtaagcatgtatttggggctttcatcttctacatccaagagtgatgcttctctaatctttgagactgtagaaatgatctgtaattgtaaagatattagcatttaattaggagagttccgcattagatggc

SEQ ID NO: 5290 - DNA, 806 bp, Arabidopsis thaliana
acgtatctagaaagaaactcacttactagttttgagcttttcgtgtaacatagaaccatacattcattatagaggaaaataaaccctattatttcggataaacaaaagtaatcacaaatttcattccaaaatggatttttaaaattaataaataccaaagacaaaacaaaaaatcacgaattgtatgaaccttgatacccacctcaatgatcagaattacttaattagtcctattccaaaatccaaattcatattatgaactgcattatcatcataatcgtaactctctcaatctcaaagcccatcatcaaccatcaccacacgtgtgaaaccatctcaagtaaaaatcgaacttgcgaattccttatgaaaaaataaaaacaaccctttacgttggccgccacgcactagcccaaaccaccggctgatctctccaacaaaggaatattccggcggcatcaggacactgtaccatcgaccaaacaccttctttatatctcctcaacaaagctctgacatcatccgccacctcatcactataccccaccgctccaaacccactattcctcatcctcctcgaccacttcctcgctgtctctcgcctctccgtggaatccgacggctcacaagccacaagatcaacgatcgcacgtcccgctgcacgctctagcatcaacctctcgttgctcgtccttggaaaactctcttcccatgactcgaagcaaaccctaaaccatcgtaaacattctccaaaccctctcaagaactcatcatcaaagccaccttcttcttctccgacaagatca

SEQ ID NO: 5291 - DNA, 459 bp, Arabidopsis thaliana
cgcctcgtccaagttctttgcgttctctgtggcgtgacttgagctaagttggagtactccacagccgaactggagaagaagactctttcttcttctgtcaccttcctcagaaatttagctgggttgcctccccaaacctgcaaggaaaaccagaattgtaatttcaccagagcttaagcgaataacaaacgtttgagaaggtcaacatataagagcgtggctaagaacctcgccagaaggaattctagtgttctgcctaacaagagctcctgaagcaaccatggcatgtttttcaacatgagctccatccaagacagttgcacttgtaccaatataggcctcatcctcgacagtgcagccatgtaaaacagcactatgacctgctccaaattcaaattgctttatccattacctgactttaatattcacacttcaatttatgacagcaaatgtattgag

SEQ ID NO: 5292 - DNA, 710 bp, Arabidopsis thaliana
caagcagaggtttcttggagcgagcacaaatttctgttccttctgctccgtgacactacgaagagatttgcgccgagcttcagcgctttccaagtactcttgtattggaggaagagtgatcttttgttcttctccaccggcttttgctcgacgaatcaactgtccaacaatataaaggttaatgatctgcagttggtgtaacatttagccatgtgtagaagacgaaattccgttttaacctttgaagcccatgttcgttctgctccttgacatacatctcgaatatctctgcctgacattctgcgtaaccatcaaaagtcaatatggattcatcacaaattaatcaggaatagaaagatcgggtggccttgaagttgatcaaataaaaagtttcgaactttagtttgatatggtaaaggaaagttggaaactttacgcttctgtggcttgagcaagctggactagttcaggctttgagagttgttttgcgtattgagcgatgatttcttgacgagtttgtaaatccggtaagtcaaacatgatcatggaatcgaaccggctaaagatacacagatgaaaaacataggacactgatcaggatactgcagccacgaattgaactgggtttgaaatgtttaattgcttacctgatcaaagcgggatcaagatcttgttttctattggttgcagcaatcacagacacttttttt

SEQ ID NO: 5293 - DNA, 713 bp, Arabidopsis thaliana
tcatcaccattattaccaccatcatcatcatctctcttccacctctcacatttcacctctccatcaactatcacaaaaacaaattaaagtctttacctttttcatcaagattaggtcaaattaaacaatagtttaaagtcaactctagtctaacaaaagtcaataccatattcttcatcatcactagattcacgaccatcacaacgtaaacctgagccccattgcattcgataacaagtgttttgctcaatcactggtcttccactccaatcacctttaatcctcgggttaaaatgaagtatccgaggcggatcttcaccatccaccgcctttaatccttgtaactccatcatgaactgactcaccatcgccgtcttatcaccatctttctcaacgtgagcccaatgcggcgtacgacgacggtaatgtgagatcctaacgttaacccacacggcaaaaccaagatccgactccggttcacaaactccgactcagaaaccgaaaccatatccggacatttctcaatccgggtcttaaccggagctttcacgggttcaagaaactactctgcgagtccgtcccacatttttcgacccattgaaatcgcatgcttcgctgttttgtgaaagattgagaattcatcgctgaatccgccattgtcgaagaagctctcgttgacgaaaatctcagagacggacttaaattccctcatt

SEQ ID NO: 5294 - DNA, 474 bp, Arabidopsis thaliana
gttcagcatcactaacaatttcttccttaagaccagcaacaaacactccacgctgtacatcaagagaaagcaagtgaactttaacaactcttaaacaaactaatggagaagatatcactaatgaaactgatccaaaccaacctccaaatgctcatgaatttgcagtctctggttctcaacagctaaaagatcattaatttcttcgttgtaaatttccatgtacgaaacccggatgagaaactcacgatcagatatctaaaaacaaagaacaaaacacacacgaatcaaaagctgtactctttttcttacttcacagatcactgaataattctatgcactataccatatgtattctttcaaacacatctcgaacagatcttcgaataattccaggatcagtttcagagcccgtcatcgtaaacgtctcccactactagtttgccataagcaaatgcagtactaacaaaatcagag

SEQ ID NO: 5295 - DNA, 504 bp, Arabidopsis thaliana
agaggaaaatacttttttatagttagacctaataaattcctatttgtatgataaatcacaagttgtaaccaataggtaactcgatcttcgtcctctcgttccaacttccaattcatgttccatttgttacggttcattaaacttgcgtgtgtgtaactaaagaattgattaaactaaaacttgatttctcaaattattcactgatataaatatttatttatcgagcgttaatatatatatatatatattgaaaaaaagaagttgtttcaatacaattttacaaaagtaacaaattatatgaatcactcaatctgaccgtaccaaaccccttggatcttcacatcttttggtaccttagcacccaagtcagtatccgatggctgaagactctcgaacactccgatcacttcacctgtctccggtttgctctttgtgatcttcaaagtgatctctccgacggaagccgccgtgttcttgacgttttccttggatagctcttcctcg

SEQ ID NO: 5296 - DNA, 549 bp, Arabidopsis thaliana columbia
tccatcagatgggattttatcatctctgctttaaaggctattggtattccggacagatttgtttactggatcacgcaatgcatttctactcccaccttctctgtttgtgttaatgggaacacaggtggtttcttcaagagtaccagagggctgaggcaagggaatccactttccccttttctctttgttttagctatggaggtgttctctagtcttttgaattcaaggttccaggctggttatattcattaccacccaaaaacttctccactatcaatctctcacctaatgtttgcagatgatattatggttttctttgatggtggcagctcctcacttcatggtattagtgaggcgttggaggactttgctttttggtcgggtttagtattgaacagagagaagacccatttatacctggctggattggatcgtattgaggcttccacattgcaaggtatgattccctatttgaacctacctatgagatacttgggactgccttgatgtgtaggaattgaggatactgagtatggcctcttttggaga

SEQ ID NO: 5297 - DNA, 533 bp, Arabidopsis thaliana
cccctgcagtgatcttattgttaatttgtttgctcattttgcgtggtcactctgattccagaaaatcaacgaacctgaggttgctttctgcactaaactaacatcagctgataacgacatcaccaattcggttgacatctacaacgcacctaggtgattactaaacagaacatacattggttttcaaaaaaccaaaaaaaacaactcttctaattcttgcttccttaatccatgtagtggctcgttaagggttatgaccgcgaacaatgactgtactgtccggctatttgatgccacaaactttgccttgctcaacagatttgcctttcactggtctgtaaatgtaagtgcatctctttctcataagactcaactgttttcatctgctattgattcaaagtgttcataactaatgtttttggtgtgtctttgtagaacatctccaccagtccagatggtaagctagtggctgttctaggagacagtcctgagtgcttactagcagataccggatctggaaaagtgatcacgga

SEQ ID NO: 5298 - DNA, 569 bp, Arabidopsis thaliana
  unsure (1)..(569): unsure at all n locations
gaaagaaaagcaagtcatttctgttttgtttcgtaaacatatataataacaactatcgaagttcctctcttaaacaaaaaaagaaaaagaacaaaatctatcgacgttcttaatttgtattggcctatttcattcgttgtgtcatgacgcaggtgtatatagcttacatgggagctcttccatcaaaaatttcttactctcctatgtctcaccatcagaatatccttcaagaagtcatcgaatcaaggttttaatataagactctcaaatctcactaacccagatcttgttgcttgttgtttacgttttctctttttgatcggcagttccgttgaagattatttggtcagaagctatggaagaagtttcaatggttttgcagccaaacttactggatctgggaaagataaacttactggtgagttatatagttatagaagataatgaaactcgtgatcatgatggtttatttgatgatgtcttgtgtaatttgtaggcatggaaggtgtggtttcggtatcccaagcaccgtttataagctttntacgacaaggtcttatgagttcatg

SEQ ID NO: 5299 - DNA, 526 bp, Arabidopsis thaliana columbia
ctcgaattcgtaatcaagtatctcagataagaatcttcgccggttgctcgtctcaaccacgcagctccccatagcaactcgtcctatatatatgaaagaacatgatgattatatgaaattaaacccaattaattttcattgtacaatattcgagatatgttcaagatgtaccttatatccattaacactacagtaaaacgggcaaacggcttgcttgattcccggattatcggtgtaagaacctcgatgtgaatctgcgtactgaaacgtttgtacggctttattgagtaatattgcggaatacttaggatttgcttgtttgaatgcaattgaagcggctgctaaagctgctgcgatttctcccgctaaatcggaggctggatatggtgcatctaaggcgaaacgggttcgtggcgtgtccatatcttccggtcttcccaacaatcgtggtccggttgtactcaccgacctatacaatattaatgttgtgttgttggtgtgtcataatagaagatatcttaatatt

SEQ ID NO: 5300 - DNA, 510 bp, Arabidopsis thaliana
ccaaccaagcctcctccgtccacccctaaacctcccaccaaacctcccccgtccacacctaaacctcccacgaccaagcctcctccgtctactccgaaaccaccccaccacaagcctccgcctacaccatgcccaccaccaacaccaacgccgactccaccagttgtaacaccgccaacaccaaccccacccgtcataactccaccaacaccaaccccacccgtcgtaacaccgccaacgccaactccacccgtcattacaccaccaacaccaactccacccgtcattacaccaccaacaccaacaccacccgtcgtgacacctccaacaccaacaccacccgtagtaacaccaccaacaccaactcctcctacgcctattccagagacttgcccaattgacacgctgaagctaggcgcttgtgtggacgttcttggaggtttgattccatcggacttggacaaagcacgccaaggcagaatgttgtctggttttaggaggtttacttga

SEQ ID NO: 5301 - DNA, 468 bp, Arabidopsis thaliana
aacgattggagtcagatcagaatattggaatcaacatacgagtggtttcgcttcctgttaaactccaacaagctgccgtacgtacgatcagctactcccacgaacagtgcctccgtgtcggggctaaacgagattcccgctatttctccaaacagatcaatctcttgacactgactgtaaccagcttccgtgtcaaacaagtgtacaaagtccgctggctcagccatggctaagaaccgtccatcagacgtgaacctcaaggctctgatagctcccatgtttcctttcaagactttgagtgattgagacaggttccttacgtcccatagtctacaggttgtgtcttggttaccgtggctaagatttgaccgtttgggtgccatgctgatgaaaacgagtagtcgagatggccttcgagtccgtggatcacttttccagatccggtatctgctagtaagcactcaggac

SEQ ID NO: 5302 - DNA, 468 bp, Arabidopsis thaliana columbia
tgattaaaaggataggggatttgggatccattagaactttcgaacacactgtttccaggcaagtaaatcaaatcgaatgcatataacaacctgaagctgctgccggtgtgttactggaagcgacacaaaacatccttaaagtgaacagccgaggaaggcaactgagctagatgagaaacaagccgcacagctacatttcttaactcgaggacttcctggtattatccataaaacaataaaaagaagacatttaagccttaagagggagcaacaaaatttctaatacagaatttacatgtcgggctaggaatggaacctgagaaacgccatctgaagtcttagagaagacgacaagaaccacttcaagacaaaggctcatgaatcccttctgaagttcatctgtaattgagtgtgtctgaagtagcattatgaaccgcaagcattcaccagctatgaccaccgattccg

SEQ ID NO: 5303 - DNA, 555 bp, Arabidopsis thaliana
tgctggaattgttctgttttaccttattcgcctcccaccattcagttctgaaaatcagaagctccagggcggtcagtttgatcatgctgatagactcttcaatagtattaaagatacttggctaagtgcagcaggaaagggaaatacttcagacgtgaaagaactaattcctgaattcttctacatgcccgagtttttggaaaatagattcagccttgatctgggtgaaaaacagtcaggagagaaggtttgtgccagttcaaagtcattcagtggtgtttaaatttacaactttcctctcatgttgacatgatacacatatatttgctgcataatttcaggttggtgatgtctttttacctccttgggctagaggtagtgttcgtgagttcatcctcaaacacagagaagcgttggagtcagactatgtctcagagaatttgcatcattggatagatctcatatttgggtcaaacagagaggaaaggtacattacacaatatttccctttgctgctagtcaagtagaatgcagaaatcaaagtattgttatgtt

SEQ ID NO: 5304 - DNA, 611 bp, Arabidopsis thaliana
ggatttgtcgctcataaaaaaactgacttagtagtattaaattggtatatatcgagatcccatttgtgatattttattacacatctcttccagtctctcactctttgtccctctctctttctctattactctgtctcctctgttccggcgatgttccaacacgcgccttcttccatttccctcatcatcatcttcctcttcaccattctatcacccgtttcacctgaaccggtcacagtccagccattccgggtcaaatcatccccacccgcaaccatacccgctttcccggagcaatccgatttctccggctgcccactcgatttaccagaagacctcttccacggcatcaagtcagcttgcagcggcaaaaagctccacaaaggaaaatgttgccccgtactaggcgcgtggctctactctgcttactcaaccactgctctaagccgttcgatttccgccgccgcaagaaactcatcctcctcctccgccgcggtaacgactcctgaagaagatatgcctttgcttcccgatgactcggagacttgcgttgacggattagggaaatctctgaggcagagagggattgagctcactagaccgaacgagac

SEQ ID NO: 5305 - DNA, 312 bp, Arabidopsis thaliana
ggtcttgaagataaactaaaatctggcatcttcactatccatatttagatcaattgaattcataccaggggaaggtgatgactcggtattgattagtaatgatgaagatgacgtaacatcaagatcttatccttggaatgcatcgggtgtcatcatgttatcattagcaaatttctcaatacctttaagaataggccatacatgatcacattcgaatacactcgtgtagcgtacagattgagttaatagcatctctgctcggtagaactacttacatcttgatatgaaacatctccgcataagtcagcatgt

SEQ ID NO: 5306 - DNA, 571 bp, Arabidopsis thaliana
cctcttctcatcaagtgcttttgatagttctagaccagaattcataggaacaagaattgatttacactcattaattccagcttcttcaaggatctttttagcatatctttcttgttttaagatgatcccgtcttcttcttgtgtgacctcaatgccaagataatatgtgagccttcccaaatcgctcatttcgaagttctttgacattcctttcttgaagtcatctatcagttttggactagaacctgtgacaagtagatcatccacatagactgcaactataagaagatgcttaccctcttgtttccgatacagagaaggttctttagagcacctttcgaataacaacttctaaagaatctcattgagcttaatgttccatgcacgtggagcttggcgcaaaccatagagagccttatgcagcttgtagaccttctcttcacttccctttgtaacaaagccctccggttgggtgacataaacattctcctttaattcgccatgtaggaatgcagtcttgacgtctagatgatgcacttcccacccattagatgcagcaagagcgatgatg

SEQ ID NO: 5307 - DNA, 521 bp, Arabidopsis thaliana columbia
gaccacaatgcaagaagcatgggtcatcgatgaaatctcgttcaatgtccctggcttgtctatagattgcttcattccaccttcagaactcagatttgattcccacgttgaagacttatctcaaggccccaaaattaggacattgcacggccataaaaatggttgatgtgaagaagcaggagatcaatgtgtataactcattcaaaaacaaaccctagaccggttattttacttttgctattgtcgaagctaaaattcttgtaggaagtttcgttgaagttgtaaatagacagcaggagaagttcgttctttttgccgcataatgttaggaatgtgtagtcttagtaaggtcagtccaatttttagtttataatattgtttcatatactatgatagaagctcccatctatttcacctaatagcatatagtataaagaaatattacttggtcatccataccaattggaactgatgaatacgatcttccttgtacgtgatacaataaattcatagtgtgagtg

SEQ ID NO: 5308 - DNA, 463 bp, Arabidopsis thaliana columbia
acacaaattaattactctcatgacaacaacatggataccatacacatcaaaattttccaaagtaccaaaaaaagctagtgctcaatttacgagagtagatgactttctgccaaattcatgtcctcctttaactgtgcttgttgtgttacttgcactctagcaccaaacaacaacacaaatattaatatatgcatcaaagtgacatagatattatctaaagcggacttaccatagtacatgatcttctgtttactccctgtacaggttcatcaacaaagtctatgtctattctatggtcaggccatgctatctttgttttaaatgcatcagacatcacaaaatattcgggacttggtctccacaaacaagcatcaggtttaaggactatgtcaactttcaggataactgcattcacacccaaatgtatgttatcgatcaattcattgttgttggttgaacagat

SEQ ID NO: 5309 - DNA, 571 bp, Arabidopsis thaliana columbia
caaggaagagtcttgagccgtctggtattgtcctgagcgctgcgacatctctgtggctaccagtgactcagcagagactctttgagtttctgtgtgatggtaaatgcagaaaccagtgggatattttgtctaatggtgcttcaatggaaaacacacttctcgtcccaaaaggacaacaggaaggaagctgcgtctctcttcttcgtgctgctgtgagtttataatctattctgaatctctctattcattaaactccaaaaagatctctgttcttggttactgattagatcgatttgcaggggaatgatcaaaatgagagtagtatgctcatcttgcaagagacatggaatgacgtttctggtgcactggtggtttacgcgcctgttgatattccatctatgaatactgtaatgagcggtggagattcagcttatgtggcgcttcttccatcggggttctcgatattgcctgacggatcatcatcatcgtctgatcagttcgataccgatggcggtttggtgaacaagaaagcaaaggatgtccctgactgtaggattcagacttagtgaca

SEQ ID NO: 5310 - DNA, 512 bp, Arabidopsis thaliana columbia
tgtaaaaggaagtagcatgttacattaacctaaaaccatagtaaattataatttctaactactgagagcaaatcctctaccaaaaaatatcctaaaaacctaagaaaccccacaaatagtacaactgttacattacataggagcagtgcaagttgttctgaaatggcctgtctgattacaccgaccacaatgaaccacacgcctcacacggtcacgatcctctgcccttactctcctcttcctcggagcacctttcatagcctttggtgtttttattacattttcactgtctctctctgaatcattttctttccactgaactttgtctgatattggctctagagtttctgcataagctcttctgtaattctccactgtgaaacaactctctgtgtatctataaacgtcctcttcgcaagacaagagagctccaacggcgtggctacagggcaaaccataaacctgccaccgcgcgcataaacaagaacagttttcgatatttcaacgacgtt

SEQ ID NO: 5311 - DNA, 1089 bp, Arabidopsis thaliana
tgacaataaggtaaactggttctcactttaatttttattcacatgtaggacttgtcaccttgatttctgcagtgtctgaatttggtgtttaggggattgaatgtaaggacgaaacaagtgaattaggtttttttctctctgaaatattggcaattctaaagacacaatggtctcttaagattattaacactttggaaaaatatactaatgatcttgtggtttagagaatttaaaagagcgatcactgaaggccaaatggtctttaccttgtaagactagcagtgactaatattttttatttcgtaggttatctaattgcttccaagcattattgttattgaagcaactaactcacgtttattcactatgtgattcttattcagatatccaggatctcctataaagatgatcaatgcacaaatgaagagtctatcgacattggaaatcaaccaaaggatctaagccttgcaccactctcacccgatctccttctggtgacctttgagtcaggagttgtgtttcttcgtgatgggaaagtagtgtcaaccatcaaccttgggttcattgtcactgctttggcagtaacacctgatggaaccgaagctgtcatcggtggccaagacggtaaactccatttgtattctattaatggtgactccctcaccgaggaagcagttctcgagagacacagaggcgccatcagcgtcatacgttactgctcagatttgtctatgtttgcatcagctgatttgaacagagaagcagttgtgtgggacagagtctccagagaggtaagtaattaagattatttagaatctctccatgaatctggaacacaaacactgatcttatatcgtccctttttttttaaacagatgaaactcaagaacatgttgtaccatagcgcccgcataaactgcttagcttggtctccaaacagcactatggttgccacaggatccttggacacgtgtgtgattgtgtatgaagtggacaaacttgcttcgtcacgcatgacaatataaggactcacttaggtggagtatatggtctgggtttgctgatgattcgatgtagtgagtctggtga

SEQ ID NO: 5312 - DNA, 492 bp, Arabidopsis thaliana
ttcctcttttttaattggtttactttataatgattgcttgtttctcctctcatattagctgacttctggttagtatttttcaagtagtatatatcactcgcatgacccttattgtcaatgcttgcaggaggaatgcctgcagaggttgcaaagccgcattgatgttgcttatgacagctcaatacctcagcatcaggtatgctttcctttatgggctgtgtttgtaaggactgctcacaactaacttgttccataaattagatggtctctgtttcaagtttaccagctcttcagttttactgtatgctagcttcactggtcaaaactctacctgcgtttacataaatatattgtctgccatttcatatgtgtgtaggaagctctaaaggatctttggaaacttgcatttcctgaagaagagctacacggaattgtatctgatcagtggaaggaaatgggttggcagggaaaagatccatcgacagattttag

SEQ ID NO: 5313 - DNA, 876 bp, Arabidopsis thaliana
gacggcgtagtaacagaaatttatggatagccacaccttagcttagaccaaacgtttaggtacaaagagtatgataaagttgagaacttaagacaatgtcaagaacatcaaaaccatgtcctgatcatacattctcttgtttaatcaatgtattatagattggactgagactcaaacacagatgccactcgatgtcagaaacgagccactttcgtgacaaaagacgcttggaaagcaaagataaatcacgggtttggttggacatatcacgccagtgaggatcagaccttagatggcaccttggtgtcagtctccacctgtctcccgccttcgaacttgtctatcgccacttgaagctcgtctgtgccaccaaccgccctcattgtgtagaagtataccccaaaaacaaaagctgtcaagccaccagctacaaccgtgttcttgccttttgggcctaggtaactaaaacctggaaatcccgccattacttcaaagtctttaacctgcaagatccaatgtgtcacatgttacagaagagacccaagtatcagaagtattagattatgttatatcttcaatatcacagtttcataaatactaagatgaggaataacaagagagaactctgaagcatgatataacaacttttgattactctttttaacattgcagaagtgactccagaagccctgaggcatcgcaggacattgacatattgctcatatagtgaaaaagagattagcgagattggatacgacgaattttcgaattgttatacttatcctcatcctaagaactactacgccaagagtaagtgatagtcacacaacgagatcaaagatgagtacaatcatggtatgaatgacgactgaaagt

SEQ ID NO: 5314 - DNA, 549 bp, Arabidopsis thaliana
aaacagaggaaatctctcccgcttcaaagaattaattatttattataaccaataaaacttagacacgtaatcacttctaaaatatgcgaatataaaacttcaaaatggaataattttcattagatttttaatgcggaaatacacacttcaacacaaagcaaagcaaacaaaaaaaaaacattgaaagggaccttcgaatttttttggagaagatcaatctttatcatactcaccaactcaaataatacacggtaaatccaataggaaacagacacgtggagtagacttgaatcagttggtcctcccgcaaaccttgcggatctcaccgctactaccagtcaacgggctgatatcacccatttccatcaatcgcgccgtgaagtcagagttaaagctcgacggattgttgctgtatccacggacgatggagtcagtagagccgccgttgaagagcacttggtcggaatggaggagcctctctgagtcatgagattcttgaagtagttgttgtcgaaagaagctgccgcggtgacgtctagtggagctagg

SEQ ID NO: 5315 - DNA, 603 bp, Arabidopsis thaliana
tgtggtgataccttggttttctttaatgtagtcgaaagctttccacattatccctccgccacatccattgttttccgtactacaatccaacagttgctgctcagacagcgatacaagctctccattcgcaatcttcgtcatgccttccactgctgccaccgccgagaaagcccagcaacatcctgttccattttagtaatctttatttctagtttctacgagacgagaatatatattactgaataagttaacatggacatttaggctaatgatgtatattagtgtcgtagtgtcccattaatgtgttatcaacatctagattcaagtattacagtatatatgtatgttactaaaaaaagactagagtaatgataattaataaattaccacattgttgttggtgcttaacggatgtaacagccccttcctgtatccaatccatgctctcaccggttcaccaacgttttcatatctaaacgataccgtttcatgagaatcagttgttgaaattctggtcataccttcgggcaccaccagccccgtgtacctcgccttaaattcctcgtcggtgagatcagagaactcgttaacatccaacgtgta

SEQ ID NO: 5316 - DNA, 505 bp, Arabidopsis thaliana
ggagatccattttttgatacgttgaaaatccccaagtatctagttgattctgcatgtgagaaatccatagaaggagatactacaaaggccattccatggcaccttcaactccaggctgaggcactagagcgcaaacgaagtgtgttgagaaggagagtggtttagaggaactgagctcaattgagtccttgtagaaaacatgagccatctgatgatcggaagcatttgtaagctgcaataatccattgggaagtactgttgccgatccatcaagataaagattttcttggctgcgaaaagtttcatagacaaaacttgtctcttgctgacttgagagtttaatcaaatgaaaaaaggatatcatcaggatctgaaacaatccccaagccattgcttatgatgtatcaaagagtcaacaatggtacaaatcataacctcgcaagctgaagaaaaaagaacaaagaaacatgtacaatatgttttggtaatgaagtttaaagtattg

SEQ ID NO: 5317 - DNA, 836 bp, Arabidopsis thaliana
gctttttaatcaaaccctagagagattgagagagcgaagagaagccatcatcagccatggcgatgaagaatctactgtccctagctcgccgatctcagaggcgtttattcctcactcaagccacacgatcttcctcttcgttttcagctatcgattcggtgccggcttccgcatctccgacggctctatctccaccgccgccgcatcttatgccatacgaccacgcggctgagattataaaaaataagatcaagaagctcgagaatcctgataagaggttccttaaatacgcatctccacatccgatcctcgcttcccacaatcacatcttgtcagctccggagactcgtgtcactaccttgcccaatggtctacgagtcgctactgagtcaaatctctcggctaagaccgccaccgttggagtctggatcgacgctggatctcggtttgagtccgatgagaccaacggaacggctcattttttggagcatatgatattcaaaggcacggataggcgtacagtgagagcgttggaggaagagatcgaagatattggtggtcacctgaacgcgtatacatcgagggaacagaccacttattatgctaaggttttggattccaatgtgaaccaggctttggatgtcttggctgatatcctacagaattctaagttcgaggaacagagaattaaccgcgaacgagatgtcatcctcagggaaatgcaagaggtatgtatttgttatctctgtacttaaaaaactaaactttttgttctgtcctcgatttatctttcgtttttttttagtgaggtggtatatggactgtagtttgtgttt

SEQ ID NO: 5318 - DNA, 466 bp, Arabidopsis thaliana
catcattggcttctcttatcacatcaggtcttgtacttgtacttgtacttaactttttcattcacaagaatcaaaattgtcattaaaacattgcagtgatctctttgaaatgtggttttgattccttttttcgcagtgaacaagaacgatatagagtcatcgaagctcgctttcgtttcatcagctggtgcatttgagaaatggactactttgacaggtcttttggaacagcttaagggactgtgataggctggctacaaattctttactctttttttgtattttccaacagatttgtcaaagagggtcttttttttctccaaataatcctttgaataatcatcattcactttcttaacttctttggttattatttacctttatacattttgttcatacttactatgcatcaatatcaacaaggttgatttttccatcgaattccacacaccaaaaggaaccaaga

SEQ ID NO: 5319 - DNA, 1487 bp, Arabidopsis thaliana
ctgaaatagacaaaaggccaagtctaaaataggtttcaagactcttgcaacataaaccaaaaagctacatgacacaacaagactagctaaaggttatcggggatacatgaggaggctagatttagaggaagaagcctttgagaggagtgaatttagagaggatctctgcttcacgtttaagcgcattgtctttcttgcattcccattcaggcttcttcaaattagctgattgaacttcctgtacgactttcgggattgagttcgctaccattttttgaccatagcttagatcaaccctctctttctccttggtcccgatgtaccgcttcaattcagaccgtctggcttgaagttgagcgatttggtcatcgatttgacggattgtctcagagtttgtgtctacttccatttggatacttcctagtttttccttcaggtcgctgtattcgtatttaagcgatgctaccttggctttgttgagttccagagcagagaagaacctatctgcttcttcaatcacccctttgttctcttggaacacttcgctgaaggtcggaatctcttccatcagcttcaacctaactatctcttcagcagtaaggtttggatctttccttagtttagttgctaatgctgctatctctgctgcgtccttggagaggaacaaagtagtaaaatccttctccaggagagatgagatcttcattcgggcttcagccattcgtattctctcattggagagcttacactaacaagaacagacgagtctcgcccaacctcttctggaggttgctgcatcaagttatcaagagagttcagatagctatcaaactcttccggttaacatcgataggcgagtgtgagacagcgaggaccccattcataggagagacataaatatggggaatagaaacatcttcttcctcatagttaactccacgcttctttctcttgttactagtctttggtgcagtagcaggttcactctcctcctcattcaggaagttcaagtccacagcaccaccgcgctgctggatcgaggtacgtcttcctgattgtcgagatggttttggtttggtagaggattgaggtccagtagccggagttgtggctcctttcttcttcttgttgctgctacctcggggagttgattttggtttcgcttcaacaggttcataagtttgtggcgtcggcattggctttctcttcctttggctgtatcgagaatttcctttcccatcctgagcattctcatcattctggccaacctcagtctgtacttccttcggtgtctcctcaaaaagagacgcagcatcaactacaaaagagtaatgatatcactgattacgttcatctatgaacatctgcaaaatcttaacctctcttggaaagctataaaatcacctttatttgcaggctggaagagagctggaaccttccagctaaaagaagcaaagaatgcatcagcatccatgccagcgttacta

SEQ ID NO: 5320 - DNA, 495 bp, Arabidopsis thaliana
tgaaggatcaaaaatgaagcattgagttcgagtctttggtctgttttacttactgtccttgttgtaacaattagtgtgtcattggtgaattgagtcttgtgttgtcaatggacaacgcaatctttatgcaatttcaatttgttcgtgtctttgtatggttttgtagcctcagtcctctagtcttgtgtctcatgtaattggtgtctaatgtgtttcttattgaattcaagctttcttattattcgctgcgcattacctgttatgaaattttggcttttgtattcgtttatggaactacaaattacaaatgtttttagagctaattcagattcaaagacatgatttatataacctgacattaccaaatggaccggaacaaagatttgtcgtatacgtatgaatccggaacaggatcttgatcgcttcagttgtcgtaagtacggcactcgttggtctcaggattgtctttgcagtattcctccaaagggtccgaac

SEQ ID NO: 5321 - DNA, 547 bp, Arabidopsis thaliana
tctctggatgaatcgttcttgcctgaagttgaaaacataccgtaaaacgttaagaacacagatgttccttttatgcattaagcatcattacaaaaataaaacaattagtacctctctggtgtaaaggtacggtatctctctccaggctccttgaagttgttctctttctcaataatgcactgaaaaaaaaacagatttcgaaacttttagatcatatgttcttaagtgaaccaatccatgggaaacagaaacagagaggaaaacagagttgattactgaccctctcacgttttccagaacagacagcaggcggagttggatacttctcagcatgacgaacctggtcatacctcgacgggaagtagttaacctgtaacaacagcttcttgtaagactatggtattctagcttcaagttcgatataaagatattgatagtgtactattaagtacctcctcgtccctgtgcatgaaattcatgaatccctcatggtggttgttgtggtgagcacattttggagcattgactggcagctgaaggtagtttg

SEQ ID NO: 5322 - DNA, 251 bp, Arabidopsis thaliana columbia
attacctttcggtaactgaagcgagaaagtgacagcaccgcccaacgcaaggcttcagcctccgcaaccaaagcggattggactcttggaatagcccgaacacctatgcaaagcacatgcttttcggagtttctaagcacccaggctatgctactggtgcttcggtctgcagtctaagttgcatctgagttgcactgtaacccaaccatgtgggggttgcgtcatttgagtgctagtggctcaggtggctc

SEQ ID NO: 5323 - DNA, 391 bp, Arabidopsis thaliana columbia
tgaccgtttaattttcattaagagtcaatattaaacgacaaatagtgattacgcgttatatatttattgtgggttaggtgaagatatgtaaaaaaaagcttacatgtcaaaaaagacttggagtttggcatcaaagctttcgtctgagatctgttcccagaatatcctaagctgttcctttgtgattgcatcgccggagacgttattccggcgagctaatgctctaaagagctggtcagcgaagtctttagattccttattcattcctagagtaaaaaacaaaacaaaaatgagactaacacaaaaatggaaacatatagtactaatagaattgcttagtaagaagtgatttacttacctaagcattcccaaaaattggcagagagtaaga

SEQ ID NO: 5324 - DNA, 433 bp, Arabidopsis thaliana
ggcagaggcggcggcggagatcgtggtcgtggttacagcggtcgtggtgatggccgtggcagaggcggcggcggagatcgtggtcgtggttacagcggtcgtggtgatggccatggcagaggcggcggcggagatcgtggtcgtggttacagcggtcgtggtcgtggctttgttcaagatagggatggtggttgggtaaatccagggcaaagttcaggtggtcatgttcgtggtcgtgggacgcagttgcaacaacctccgccacaggaagttcctccgtcgtcgtcgcaagctcaagtgagtcaaggcgttgcaccaggagacgtgggtcaaggcggcgtcggagacgtgggtagagacggcgtcggagacgtgggtagagacggcgtcggagagtgcggtcaaggtggcgtcggagacgtgggtcaagtag

SEQ ID NO: 5325 - DNA, 549 bp, Arabidopsis thaliana
tttcagcttcttccattgaatgtgctgaagcataagaccaaagctgaagttttcttgtgtatgaaaacattataaggcagaacaaaaaggagataagatgcttagaagactctactggtgagtattatcgccccttttcgcttagcccgtttcactacatcccataagctcttcctcgaggctggatctagcccggtacttggctcatccatgtaaacaaccttgacaaatttcctcaaattaggcttattacatatcatagaacatagataccaagagatgtttcaagttactttggggcttcctataagagaaatagcgacgctgagccgtctcttcatccctccactgtatttactgacttgtttgtcaccaatccctccatggaaaaggttgacactgcgaacggactcttcgacagcctaaaaactcatcagtttttgcataagccattcacaaaccgaccacgttaaaagttaaaacaaacacttacttgtgttaagacagaacctttgagattcttgagccttccatagaacagtagatgtt

SEQ ID NO: 5326 - DNA, 559 bp, Arabidopsis thaliana columbia
caaactcttccttcaatctcaatctctctctcagatgggttgtggtggaactttgttctacccacttctcataactctctccgttgctctaatcacttacaacatcatcatctccgctaatgctcctctcaaacaaggcttcccaggccgatcttcttcctccgatatctccattgacccagtcatcgaattaccacgtggcggcggatccagaaacaacgatggtaaaaggataagacttttccacacggcggtgacggcgtctgattccgtctataacacttggcaatgtagagttatgtactattggttcaaaaagattcaagcttctgctggacccggttctgaaatgggtgggtttactcggatcttgcattccggtaaaccggatcagtatatggatgagatcctacttttgttgctcagcctttaccttctgggatggatcaggtataacgtaatttgatttgcttcttttgagaaaattgaacattgatttttggtaaattttgaatctttcagggttatgttgtgttgaataggccatgggcatttgtac

SEQ ID NO: 5327 - DNA, 960 bp, Arabidopsis thaliana
ttttcttctctggtgggaaaaggtgagtttgagaaattggcaagggtgacgatgaaaaagaggttaacggggatacaatactcggagaaagtagtagaaaactgtgaggagatcatgaaagcgtcagggaaatacacaagatccgaagccaaagccattgaccaattcttgatggtcttcaaaaaccaagatttccctcccggctcttcaatcatcttcgctatctgtcctaaaggctctctcacagtgagtcaactttatttttcggattatcatttcgaataatattggtcgaatgaatgatcgagatcttttgacaacttgtgatgcagattgcattttcgaaagaggagagagtcccgaaaactggaaaagcggttatcaagaataagttgttgggtgaggcagttcttgagtcgatgatagggaagaatggtgtacccctgcgacaaggaagagcctcgctgagagattatctaagctgatgaacaaaaaagacccgtacaacgaagctaacgtcaacgttgctacaaaaaattgaaactattccaactcgcccaatcttgaataattttagaaaatgaagccagcggaggatgttatgtgacttatgatgacagctaaaataaagattgttgtgacttaattaagacagttttatgtttttagtaagattctaaagattatgaaagatgattttgtgttaatgaaaaaatcagtgatcagataaaagaggtgggccttccaaaatctaatgtgatagtgtgggcttttaatcatggcctttttagggacgaaaaagtccataattcagcgaaggaaataacacaacggctagtttgataaacggctccttccatttctgtacccaacggctactttctatcaaaaacccttcacagcgtttcaaaacccctgtgtaggtatacttgacccagattccctaacgccacaatcact

SEQ ID NO: 5328 - DNA, 480 bp, Arabidopsis thaliana columbia
ccaaggtaaaagagctttgatttcacgatttgattcttctgattttcgcctcttagatctgaaaaataaacatatttttgggtgattgcagctgaactcaggcaaggtgatagctgttggacctggatcaagggataaggacgggaaattgattccggtctctgtgaaggaaggcgacactgttcttcttccagagtacggtggtacacaggtcaagctcggcgagaacgagtaagttaaacccgcttctttcttattattgccctaatattctgataaaattctgatctgatctaattgaacctttatgtttagctaatcatgttcaggaatcattatccattaattagattaatggatggaactaagggaattacttgtaagactgtgaagatattgaaaattttgtaacagaggatttaaaaacattttgatcaatgtttaataatgccaatttgaacaccagatttacatattgat

SEQ ID NO: 5329 - DNA, 654 bp, Arabidopsis thaliana
aaatgcaattgcgtagtcgtaatcaccagcatcaatagatttagcaaccctagagttagctccatcagctccaatgacagcatcaacctccattgttttcttcgtccctgtagctccagttttaccatcgtactcagtgtaatgcaaagtgtacggcgagtcccaattctccggatgatccatcttaaggaagagaccgttaatcacagtggctccactcttctcagctctctctctcagataagcatcaagaacttctcttctcaccatacctatatactcatgctccttaagcgtacgaccaatatcaacagcaatgttcgacggcgaaatcatcttcatcttcgtcactctccgatcaataatatccaacggcaagttgaattctccgaccatacagagaggaatcgcgccaccgcaaggcttgcaattgtccatcttacgctcgatgagaatcgtctcgattcctccttgtgctagagtctctgcagctgccccgcctgctggtccacaccgatgacggcgacacggagtttacggttggagagtttgggagtggctctggctgcggttactcggagagaggtccgtcgttgagggagagaaagtgatgacggtacatgagagacgaagtttgtttgctccgttgatgat

SEQ ID NO: 5330 - DNA, 514 bp, Arabidopsis thaliana
ctgaaataataaaaatttgttatcattttctcttctgtaattttcatagacataaacttctcatgaaaagtagcataataaattaataattactatatttttgagtatttcattttgttgagaaaaagggggaggacgactgacttataatgggccatattccaggaaataagcgctagttgggccatagataaggcccacataagcagtgaccactaccgatatttttcctgatattttttgttttcctggttaaaaatacatacagatacagtcgtcgttttgattagtgaaccgtcgaatagaaaaagagagaatcattcagagcactttaaaaaggttaaaaaagtcaagtattaaaaaaagatgatgcgctttcataaagcttgtcatcgtttctctctttcacctctctgccatttatctccgccgtctccgtcaccggcttcttctctccttctacttcccaagctttccggattctcgactctgagtacacgacgttgcgtaagag

SEQ ID NO: 5331 - DNA, 559 bp, Arabidopsis thaliana
agacttctcaaccaataggggaaactgtgagctacataagattgccaccgcattcctgtgatgacactcttagctatttcaaaagcacctgtattacaataatctgttttcatcatcataaaccagtgtggtttatccttagtgaacttgagtaattcagaaatatgaccgatgcccgtcatttggtttattcaaagccttaataatattaggagaggaggcggcaaaggttatattatcataatgtagatgatccatactctctaatgcccattcccaacttttaatttttgcaacaaatagagagtgtacataagaatatgatcttcgactgtgaagtaaaacatgccccatcgaatctcgaaccacccaagatataccagctaattgcttctgtttagtccaagcaacaccaatgttacatttaagttcatccactggtggaggaatccaattctgggaacttgacttaaccataacagacccttttccttgagcattgatccattgagaacaattctcataagcttaatcaacgatttcttgagtcaatgaacat

SEQ ID NO: 5332 - DNA, 1027 bp, Arabidopsis thaliana columbia
  unsure (1)..(1027): unsure at all n locations
gtcatttatatctgtgttactattaagaagtttacgtggatagttacacttgatcacatttgttttgcaattccagctccagagctctacccatttcaattttttagtcacgagaagctatagttatgtctttgtggctaagttcctttttgtgagactttggatcgctggaaaatatctgcttgctttccctctctttctttgattttgtatccaatattgaacaaatcttttttccgttgcagggtttgatgaaatccaaacagaaacaagaatccgagagtccagatctttcctcaccaatacatgaaacagtcgatgcttcggatcctgctgaacaggaaagcgaaaacctgcttaagagagatgaagcatgcccgatttgtcatgaaattctaaggaatcagaagatggttttccagtgcgggcattccacttgctgtaactgtaattactttgacctttcgattgtttgtttttcagcttcgagttttaagcattttctttgtgttccattaatctactatattcttcgtgaacctaaagaatgttacccatatctgcttctttgtgtttgttcacacaggcttttttgctatgactgagcgcaaatcagttcaagaaacgctgcaaaagtgggtgatgtgtccaatatgcaggcagcatacagatgttagaaatattgcatatgctgatgatagaagaaacagttcttcgtcagatcaagatcacaaagacagtgaagcatcattggtggttcaaggttcatatggaacaaaggttagtctccttgcttctaagatcagtgcacaagaagtacttctttttctcatctattgttttgggggtagattgaagctgttactagaagaatcttatggatcaagtcaagtgacccacaaacgaaggttcttgttttctcagctggaacgatgttcttgatgtgttggacatgccttcgctgcaaatagcatcactgcatccggatgaaagggngcaggtaatgtagtgagaattttaatgggga

SEQ ID NO: 5333 - DNA, 125 bp, Arabidopsis thaliana
tggaccagaacgctgccttgctcttcgcgtaatgtttccagcatcgccacggcctgtcggagctccccctcttccggaaccaccagatccagcatcggtacacaaaaatagagtcgatcttttgt

SEQ ID NO: 5334 - DNA, 530 bp, Arabidopsis thaliana
atccccgttataagcgctaggatttcgttgaagatttttacgcccccattattcattagtgtgtcttaaagattttggtggacattttttcagggagatgatgattgagtactcaaaggaagtgatgaaattgggtaaattactcttcgagcttctctcggaagctctagggttaaacactaatcacctcaaggacatggattgcactaactccttgctgttgctcgggcattattacccgccatgtccccaacccgaccttactctaggcttaacgaaacactccgacaactcttttctcactattcttcttcaagaccatatcggagggcttcaagttcttcatgaccaatattgggttgatgtcctcctgtccctggagctcttgttgttaacgttggagatcttcttcaggctaactaactaacccttttggttttttatcagtggttaatcaatggactaatataaatctgacttttattacctcattgggtgcagcttactacaaacgacaagttcataagcgt

SEQ ID NO: 5335 - DNA, 571 bp, Arabidopsis thaliana
gtctctccatgtagctattcatacaccctttgccttgtcctgcaagaaacccatcagtctcgttttccttgtgacccacgtgtgtagagttggaggcgggatccgctgtggcacggatcacagtacttaggtggtcctcaatggaagccaagcggctcgggtcatcaatgggagtgtgagtattgtcgtcagagacataggcaatgcaagccaaacgagcgttgtggctccaagcatgagcttccatgacgttgcaatgtaagtccgcgaaagcagcaaatatctctgagaagaggcccggtcggtctgtcccggtcatctctatcgctgtgtgttcgccgtgatcagccaattgaggttccaaggaattgttattcgcttcactagcctttataaaatcggattctcgcctactcgtaccaatggcctacattatgaatattcatctagtggtaagtacattcaaatcaaacatatatatggtttattcaatggatctaagtttggtacaaacatgtttaatgtggttgatgacgcttttatcagtgagtttatttccatgctcatcggg

SEQ ID NO: 5336 - DNA, 516 bp, Arabidopsis thaliana columbia
ttatttgttgtgactttacaattttgctatcgttggataaagatcaaaattcaataaaaagcacaagtacagtttggtttggttgttgaaaaaatctttaaatgatttgctaatgtaggtgttacaacttctgtcaatatttcattttgatttttttaatttttcaatagtatttgtccactataattagtgtaaaaactaaaaatcccaaaaagagaggaagataaataatcattttaagaaaagaaaaagaagttggagatggatacggatgacatgtcaagtccgacaaggaaatacatgcacttgtcgtccttctaatcctttgcccttaaacatcgttaaaaacgacaacttctctcttcttcttctctactcttctccattttcttctcttcttctcttctttgtccattttttgacagatatggcgatctggtttgctagatccaaaacccttgtttctagcttgagacataatctaaatttgtcgacaattctcataaaacgtgatta

SEQ ID NO: 5337 - DNA, 530 bp, Arabidopsis thaliana columbia
tacaagaaacccttatcagtcccaattctcacaaataacaacaacaatttcgccggcgtcgtcgtcgtcgtctctccatcaccgtctctgctgcattgattcgcagcactgagtcctaaatttccagtattcttctctaattctttcgctgtttcattgatctcaattttaaaattttctctttttttttttttttttgcattcgcattcgttttatgatcggtgactaatttcacttataggcatcaattctattcaattcctcttcttcgttttatgattgatggtttgatctccaatttgattgtatattgtctgatcttaatagtggtaaattgttatgttctcaaggtgtaaaaaaaatcagaaaatggacaacttggaagatttgaagattgtggcagagcagtggtctaaacaaggacttgaatttgttcaaaaaataccaccacctcagctttatactgccattggtgttctcttattagctaccatttggctcttatctagtaagtagtgacaccacgaca

SEQ ID NO: 5338 - DNA, 543 bp, Arabidopsis thaliana
tgaaatatagataaaatgttcgtcctggtcaaccccgtaccagcggacaatatttgaatgtttgtctgaggccatgagattcaaaatctccttctgagccacatcatggtgtgattgtactagacgcttaaccgctacaagacgaccttcataggatccctcaagaacaacagttccattgctccctttagcaatctccttgttggagacaaacagtttaccaaccctatatccttctgctgaactattattgaggccagggaaagcagtaagtaatctcttctcattctcctcatgagagggatctttgttccctccagatataaatccattctctttcttgtgaaccgcctttgtagtaccatttttcttggattttttcttcttcggtgtcgcgattggcacttcagatacatatggttccttgatccgaatgctctgtcttaatcggtaaaagaaaaggccgcaaaccgaaagcatagtaacacaaaagccgaaaattagaacaatcaaaccagaaaatttgctagcaaagcttgcctg

SEQ ID NO: 5339 - DNA, 605 bp, Arabidopsis thaliana columbia
cagaacccgcctccattgctgcctctacaaattccttagtgttataaacctgacgatatccagaaaatgagttttgcattgtggttttacttactgataagagtacttcaatcaacaaatgattacctgagctgcctttacaagtgtgagagcaacaccaggagcaccgtgacaccagtgaacaaggcgatctgatttgcttccttcactagataggtaattcccgctaagaaaacggttttgtatcatatagcttagtgtacctttgacatctttgatttcatctggttcaagttccgtatgcatcaaaacattcatgatcccagctaaaccgtgtgcagccccccagtacctcttcccgtgccactcatacatcaatggacaagttcctttattcccgagttgtcttcctgccctgaagatttcctcaaccactgatctctgaagatatagagatatcataaaatcttgaactttcttgagtaagtcaattaaccaaagaaattttataactttattatagcattcgttcagatgatatactctcctgaccaatatgcttattcaagaacaaacacgcccacaagtatcctgctctaccatat

SEQ ID NO: 5340 - DNA, 2402 bp, Arabidopsis thaliana
gtctttgatgtatttgtccttttagaaattgatcaaggtatataagtaccttcggactcttaggtttatcgagttgggtgacatttctcggttcatgcagagacatgacgcgttaaaggctctaaacctttttcggagaaaagaaggaagatgagacaatcaggataagtagcccacttctccaagaatggattgtaagtgatccaaacttatatatttctcacaagttttaggtgataacgtattctctatgattaaaaatgtttggtacgtataagcttgaagaggaaggcttcctaatcgagttatgattaaagaagataagttcaagagaagataagctcaaataatattaggtacatgcgttaaagcaagagaaacacctcttaatatggcaatgaaaaacatgggatgaatccgaggcggagactgcatgccgcaaaaacaatattccaaaatgttgcggatctggctcgtcgtggtaacggtcaacctcgtcgtgggaatcgtgttggcgctactattccttccaagctcgtgcttatatatataaataaaataaaccttcgctatgttcactttttaaaagggtttgaactatctatacatacttttctatatataccaactataatcataagtccacgcattcatagcacatttttagtattgaaacgtgaaattttttaatattaggtaatagaatttatgaagtcttttaaattataatctagttaaactttcaaaattcaaattgaatttaagataagagtaactaatttattcaatttgttctaaatcaccaatctaaacttttctgatgcaatttcgtttttagtgactacacatctttcaatatttaataattactacgagaatttaaataattaagaaaaaacagattgataaaatataagcaaaaatcaaacaaaaaataagcaaaacataagtaatatattttttaaactcagaaagaataaatttgcggattcaaagttgacattctaaacaaatagaaacacaaatatataaggccataattttgtgtttggcataagttactacattaagctaataaattaatttcatatcaaaataacttaataatctacattggtttcttatagaattctgaaactgaagttgttgaacaagcggaggtggcaaaaactgtgttccttacctctaggaacaggcctcggtatccaccaaaggaggaaatcggatttcgaaagccgagagccgtgtggtggattcttgtgatcgctttggaagtgatcttcattgttggcgccgttgtagtgacggcttgtgcggcaagcatctcaagttttcggcgtaagaccttgtggagctttcccatatgggaattggcactgacatgcgggataaccgtagcttcgaggctcatcgcttgctacttggtgaggatcatcggagtggtgataaggtggatcttcagatccatgcagctgacggtttatgttctccatggccttcaacacgcggcatgggtgtggatgactatggtgtttatcatcacaccttggtttattatcctctcgaataaggcgacaaaggagcaaaaggtggtgcttctcgtgttgctccaggtcatcacggcggttctgataatctccaccttgtggttcacgaaggcaatcatcacaacgtgttgttcagcgtggttccacttgacgacctatcaagagcggatcgaggagtctcttttcagttggtacgtcatcgaagcactttcgggtcatccttggagcaaaatacgtcatctgtttgacccaaagaggacatcggcttgggacatgaagaagattatcatggaccaaaaacacattggcataggcgtaaagatccgggatgaatccgaggcggagactgccgcaaaaacaatattctgaaagtagccaagcgagaatccaagtaagattctgcttcatgtctttgatatttttccttttagaataaatactctcggacccattattatatatgtaatataatattaattaaaatgaaatcgttaactttcgaatgaaatatcaacccgtggtgtaccgcggatcaatctttaattgataaacatattacgaaagtgctggactagaaaagtttttaactttacaatgccttgcatactattaatttttcatgtatgacagaagaaactgttgagaaactttttcatcgaatgcacttttcatccatgacttataatgtatttttcatattaaatgggatattcagactgtacttctcatcatggataattttgtaacatacaacagttttaattaacatttaatcatctttagcgtagactgttgagacacaatttagcatagaatacataaataatatttttctctttaatttgtttaacgaac

SEQ ID NO: 5341 - DNA, 517 bp, Arabidopsis thaliana columbia
ttttgaagacttactctagctttctcatggtggcttatctaagtgattttgctttttctgttatgtaggctagagctggactggattatgaatcttcattcgggaagatgcgacccaatgatactattttaaagcttcaaagaacaacaccgtactataagaggaaccgagcacatgtttgtagtttcttcatcaggggtgagtgtacaagaggtgctgaatgtccataccggcatgagatgcccgaaacaggagagctatcccagcaaaacataaaagaccgttattatgggtaagcttttttcttctgtatgtttgactttgttgacgtttagttccgttctttattggttgtttcgatacctcccctaaggagtgtaaaatttcatatgtttctgccatagtactattttctccttgatcattcataatatactcgatatttgaaagcttctgatatgtgaattcttggactgaactatgctatgttggctctcatgtagtcttgttacatagt

SEQ ID NO: 5342 - DNA, 594 bp, Arabidopsis thaliana
cagcccagcttctgaagtttcacaccttttcgcagagatggttcagcatggattacgttgtattgctttttgtccatctcgcaaactctgtgaacttgttctgtgtttgacgtaagttctcttgttaatcgttgatagaaacaaaaaaatcacgcaagagtgtatgattaaataatgtttatggagtttaagatccataaaatatgccgcagacgtgaaattctagctgagactgcccctcatctggttgaagccataacctcatatcgtggaggctacattgctgaggtacattttctgtatttatgtgtctgaactttggtgttgtttgtagatgaattgtatttactagattggtatttttaatattttgcaggaccggaggaaaatagagagtgatttatttggtggaaagctttgtggcattgctgcaacaaacgcacttgagttggggattgatgttggtccatcgatgtaactcttcatttaggtttcccgggagtattccaggtaaatgagtgtgattactcttttcttttcctcttagaactgaaatctataagctgcgctgacaatgactgatcaattttgagt

SEQ ID NO: 5343 - DNA, 575 bp, Arabidopsis thaliana columbia
aggcctctcattaagcttttgaaaagcaataaacacaacaactagagaggagatggaggattccagtgaggaacccaatcaggaagcacgtaaaccttgccattaggtgaatcagctatatccgagaaagctgaaaagacttgggattgaaggaacgtggggttctagtagcgatatcgtaaacgacatagccttcaccataaccttcaacgaggaaatagatggaattagggcttaggcccgggaatgagcttacttgggttgtgttacttgtgagattcggattctagcttcttcttctccccaactcattagatgtaccagagaatgaacaagtcatcagagtgttggaatggacatccaagattccaagtcataaattaatgtatctatttgtcaagtgatgaatctgatgtccaaaaagcttcaaaagtatgaattcaagggaaactttaaaagaaggctagtacaagaacaactccattgttaaattacaatataagtaacaaattattctgtcaaacaaaaaatatactaatcagagagagaatccttaggttcgagagagataggag

SEQ ID NO: 5344 - DNA, 1116 bp, Arabidopsis thaliana
tactctttccttaaactctcactccattcccctggatcaaagctcatcaactgcttcaccgttagctcaaacgttatctgcatcatacatcatcatcattaataatcatcaatctatgcatgcatgcggtggtgactcggcctgactcactgagtcacaaactcggtccgggtttttattttatttttattataaaaaaaacataagtgagaaggccgaataaaataataatataatgtttttgataagcaagaatttttttggttacctttttggcttcttccatgaggagaacacgagaagaccaagaatcaagattaaaccggactaaccggtcaatatcaagcatgagatggtctttaatgattgaagaattagcaaagctcatggtgagagagtgcatacgtttatgcaaagaacctttcataagaagcagagagtgtttccccaaaaggttacaaatggaagcaggataagaacactcaaaaagcttcccttcgttctgaagaacaaaccggttcgtttccgggtcagctgagaaaatcgtcggttcaccaaaaagatgcgtcatgaaaaccgaaccgtaccgggctactctctcgtcgatgaaaggctcagggttctctgttttgtaagctccgatcagctgaaaagtctctcctatcagagggagaccaaggcttcccggaggcagacccatccgacggtaacgtgtacggcggagtaggaggaggaagccggcggcgatggaagagaggaggaggagaaaagcggtgaaggccattgaagaagaagatgatgatgagagaagaagagaggatgagggagagagagtattaatggagaaggggagagtgggcacacggggggtttctgcataaagtaggacctttcatcattatactcttttgcattcttcttcttttcttctctttgtcttctaaattataagtaattttctaaaatacagtaagcagtgaataataacttcttcataaaatatgaattttttaaataaggataaaatattttcgatactattctaaattttgtttcaaacatctctaacacacagattttcaaatttatcagagagcaaaattctataatttaaaa

SEQ ID NO: 5345 - DNA, 578 bp, Arabidopsis thaliana
gtccaccaaggagacagatcattaccattctctggtaagtacacaagagccatcttatttgtctgcataaaatgaagattactatagcttatgcaagctttaatcttttcttacgatgcaggttcaccttttcgacgatgtttttctcccatagtaagtctgaaaaccccctcaagctaattactgcaattcccgtgtgaaattcttaacatctttatgaaatcaaactctcaggagagactacagttagcacacttggtcgtatggtgcttctgatatggctttttgtggttctgatcattacatctagctacacagcgagtctcacatcaatacttacagtgcaacagcttaattcacctataaaaggagtagatacactcatcagtagcactggtcgtattggtttccaggttggttcttttgctgaaaactacatgaccgatgagcttaacattgccagctccagacttgtgcctctcgcctcccctgaagaatatgctaatgcgcttcaaaatggcactgttgcagcgattgttgatgaacgtccttatattgatctcttcctctcagattac

SEQ ID NO: 5346 - DNA, 924 bp, Arabidopsis thaliana
tgagaagaaagaaaccgatgaaagtctttttttttttggtttggcaggcggaaccgttgttgaaagatagaaggatgtttgcgcagattgtggatccaaatctagatgggaactacccagtaaaagggttgcatcaagctctagcgattgcagcgatgtgtttgcaagaagaagcagagactaggccattgatgggagatgtggtcacagcacttgagttcttggctaagcctatagaggtggttgataacactaacactactcctgcctctcctactcagacatcatcatctgattcatcaaactaatttttattttctttttcatccttttaaatcattaagtttttttttcttttaacgtaaaacccaagaaaagtaattagggttagagttcgaagtcaatcggatgcaaacagttctttgtaatatggtgtaatttggcattggggagatcgcatcatctgtgaatcacattgttaatctcttttgttgataagttaaatcttgatctcttttatttacatttcaaactttttgaatctttcccgttcctgaatttattatttaatcagtgatcaatctgtttcattgaacggtctattgctatacgccatgaaaacgaaagattttcgttttgaatcagctgttgaaacctgcgagatggatcgaatatgactacggtgcggacttgaccattccatggatgtgtatggtctttgatacgttagtaaccaatcatcatcaagttgtgattacattattacaaatgcgttgaaatctgatggaaggttgttgttgataaaacctttgatggtttctacggattaccagtgtcaagtgtgtgttttcgaggaagagggattggattgttgataaaaccttgtcgatacagagtttcgatttctcaaaagagacatttgag

SEQ ID NO: 5347 - DNA, 571 bp, Arabidopsis thaliana columbia
ctcacttcttctccatcttcttcttcatctcctcaacacttctccttctctttctctttcccccgacggtatcgctttactctcactcaaatccgccgtcgatcactcctcctcctccgctttctccgattggaacgataacgacaccgatccttgtcattggtccggaatctcctgtatgaacatctcagactcttctacctctcgcgtcgttggaatttccctcgccggaaaacatctccgtggctacatcccctcagagcttggctcacttatttacctccgtcgtcttaacctccacaacaacgaactttacggttcaattcctactcaattattcaacgcgacgtcgcttcatagtatcttcttatacggtaacaatctctccggtactcttcctccttcgatctgtaaactcccaaagcttcagaatctcgatttgtctatgaattcgctctctggaactctttcagcggatctcaacaagtgtaaacagcttcaacggttgatcctctcgctaacaacttttccggtgagatcctggtgatatctggccggaattgactaattt

SEQ ID NO: 5348 - DNA, 583 bp, Arabidopsis thaliana
aaagtatcatttgacactgtgcaacaattggtggaagtaaagagggatctgttgcatattgtcgaacgaaacctcgcaaaatttaatgcacttgaagcttacgaatccatcttgtctggaaaacggtaaggcaatgtatttttgttcttataaatttccagagttcttacaaatttatcccttaaaactatgttgttccttagttataatttccaagtcttggaatgtagagaacaacgtcctcaagactgcttagactctgtggtggacctccgcgagtacgatgttccttatcatgtccgatttgcaattgataatggtaacctatttagtcaaacttttaatcctagtttagccctcaaggttgtcaaaatcatgatgtgttctcgctgtccagatgtgcgtagtgggcaatggtacaatgtcagtatttccagcactgatgtcatactagagaagaggacggatcttctccaacgcgcagaagttcgcgtttgtgcattcgatatagagacagtaaagcttccattgaagttcccggatgctgaatatgatcaaattatgatgatatgtacatggttga

SEQ ID NO: 5349 - DNA, 1239 bp, Arabidopsis thaliana
ctaaagatcgcccagaacagactctgccacgggaatttaagcataatcagatgtccgagcactggcgctaacaccggaatgatgcaggtaataccgttgagtaatgacagcactttagcccgacgtcgatcatccagcgtgtcggcaaaatagcgaacgcactacgtaacaacagcctgcgcccaacccctgtagaaatcggcctgcaagaaataacgtgctggtttcagccagtgaacagaacaccgaggcaataataaatagcgccgcgccagggtatggcgaccggctttctccctgaacgatcggccactttaccggcaaataacatcgcagctgccatccccgccagatatacggagaacgcaatatgcaactgcgcttcgctggcattgagatcggcggcgatgcgcggtaaaccaacgaggtacatatcaatcccggcggataaagtaaaaccagggcaaaactacaaatcaaaaagcgggacatgggctaaagcgtcctgatagtaaggtgacgcaaagcatacgtggtgaaggaggatcaggcgagttgccatttggacataagtgatttcctgagaggcaagatgccagcgaatggctggcttcttgaaggatttagccaaatttaggtaacacgttaaagacgttgccgaaccagcacaaaatcacggttataccaaagagaatgacaatcgccggaataagattgccgccccagaccgtgaacatctgattgggaaacttcttgcgagctttgattgcaagcactgcgggaataatgaccgcccagatggtggcgcacagctcggcaccgccgatcccgtaaataaagccgttcgggaagatcagatacaacaacgcaggtggcaggaaggttaacagcacggttttgaaacgcccgccgtgggagttatcaatcttaaacaggtccgccagataatcgaacaaccccagcgtgacaccaaagaacgaactggcaacagctaagttagagaacaccagcaggcaaaactcgataatgccgtgctgtttggtgccgaggaacgatttcaccagcgaatcaacgttgccgcctgaggagataatcgccttaaagctttctcgcggaatattccccatggtgcaatagagccagaagagataaatcaccagcgccagcagcgaaccaaataccacgcttttgattaacttatctttgcgttttccatagcaaataatcaggctgctttag

SEQ ID NO: 5350 - DNA, 557 bp, Arabidopsis thaliana
agaactgcggtcgaatcttcaaattcaaggagctaatagctgcaaccgacaatttcagcatggattgtatgattggtgaaggcggttttggaagagtctacaaagggtttctcaccagcctcaatcaggtccttttcaatctctcaaaacttctatgtaagtgtgtgaaatttggcgaaaagttgctaatttttgtttgattgaatgatgagaagtttaggtggtggctgtaaagaggcttgataggaatgggttgcaaggaacaagagagttctttgcagaagtaatggtattgagtctggctcaacatccaaaccttgtcaatctcattggctattgcgtcgaagacgagcaacgagtcctcgtttatgaattcatgcctaacggatctttggaagatcatttgttcggtaaagattgtgaccttctcatgttatatcatcaaagcttttgcattgtaatctaaagttttaatctttcttcactacatagacttaccagaagggtcaccaagtctagactggttcccagaatgcggatagtgccggagcacgaaa

SEQ ID NO: 5351 - DNA, 487 bp, Arabidopsis thaliana
caagataccattatcaattgcaaatcgaacatgataaggtacatcgtactcgcggaggtccacgatagagtctaagcaatcttgaggacgttgttctctgcgttccaagaataaagataaaaatgatcaggacatctgaaacccttaaaaataaacttgaaaaataactaagatacaacttaggttaagaggtacaaattgataatcaacaaaactcttaagtgatttaaaagaacaaaattacatgtcttaccgttttccagccaatatggattcgtatgcttcaagtgcatcaaattttgcctggtttcgttcgacaatatgtaacaaatcccgcttgacttccatcaattgttgcacagtatcaaatgatatttttaggtattttttttgcaggccagatagatgatttttctgctcatgaacataatatacaggaactcaaaattgtgtatcacagaaaaaagctacaaagacatcctaagcg

SEQ ID NO: 5352 - DNA, 850 bp, Arabidopsis thaliana columbia
tcatcaatcttgattcatgtcttacaaaaattttagtgagcatatctcaactcgttgtgtgtttttgacaggtattggtcagccagaggaagcatgccgaggtcgtacctgagaatcaaccgtgagaaaatattcggagtgatgtagcaaaagaacgtggagatctgatctaacgctagtggaatcaacggctaggaatgacgaagaagggaacgcgtacggtgcattgctgaaacaggggatcgcagctctgatcaactcttacgcgagaaaaagtttctcttatgcaccatgggaagtgaagacgatgctgatccaagccatggtttcggagtcggcggctcgccggcaagccgaacatttcgccgtcgctaacgttgcttgtgactaaaaacactgagacagttacttttgtcgtctttaggttttgaatttaagctttttgtcgtgtaaccaaagtttgattccgatcagtttgctactagattatgggcctccgaaaggcccaaattaaacacagaccttgagcgctttgtagtgtttgggaacgactcttcttatatactctctatttacttattaacccgactcaggatatgtatatccgactttccaaacaaatctttaaaatatggtacagattcgaatctaatcccctcttcttttgtttgtttgtcaagtaatttttttgaactttccattttcttccaaacaatataaccagaaatatgtttttgtatcttaatcattctcgaggaccgattcttagggcttttgctgctctgtttcttcaaatcttgtttgtacaattcactacgaagaaggttgttctaatggcgattagaaagat

SEQ ID NO: 5353 - DNA, 360 bp, Arabidopsis thaliana columbia
gaccctccgctgtatcaatccaataccttcaaaagaatacacatcaataagcttcaatcatccttcaattttcatctaaaaactccccaagaaatttctaacagaatggaaactaacaagggtccggatttgagcctatcaagaagtttgtctttcaccagcatgtccacaccaacaccaggaatggaagagttctcttcgctagcgatgaaaaccgccaccaccgttgatttcaacgccggtttggctagccagagtttcttcatgagttcagtgacaagagcaacgtgaccaagacaatctgttgtcccacgaccaagaagcttatcagcatctatgcttagcgagaaaggatcaaat

SEQ ID NO: 5354 - DNA, 740 bp, Arabidopsis thaliana
aataaggtgaaagataatttaagaaatatgaaacaacaattttatttcaagatgtatctaataatgaatttggtataaaaatcataccatttggcagaatcaaatccaagcatattagctacatcagtcaacgctttcttccattgatttttcacttcctctgtttgtctcttgcaagtcttttcaaagatacttccaaattcaccgatttgatacctcacttgggaaggatccacaccgtagaaaaccggtatgataattttatcattgcagttcacaatctccagcaactcgttaagacaccagctcgacgaagcgtagtttttggagaaaacgaccactgcgattctggagtccttgatcgcttgttcaagatcgggccaaagagagtggcttctctcgatctcattgtctctgaaagcagagatcagtttccgatcaagctctttgagaaagtggctacggaatgttacgcggacgtctttcccactgaagctcaagaaaacatcataaacccaattgcgagaagaagatgaagaagccatagagagagttagaaggaggaaactagaaacgaagactttggagattgagattttaagaagagaaatagaggacaagtagtgagtctgtcttggtggatataaaacatttaacataacagctgagaggtaacttggccatacaagttttcacaattatttcttagacttttacttggcggaagtttcctctttgtt

SEQ ID NO: 5355 - DNA, 680 bp, Arabidopsis thaliana
taatggatatggaatggaaaccttgggctaggtttaagtatgataaacgatgggttcaaagaaacagatttgtggatctaatggctgggttttggaggcacaatgtgagcagtaaagatacaccaatgatggataatcttagtggctgtagaaaggagatttcaaagtgaaagagacaaaccaaacccagctaagctttaagaatccaagagcttcaattccggattgatgtggccacaagacaacagccttttaatcctcaactcctaaaagagttgagaaaagagattaacaaagagtattaccaagaagagcagttttgaaaccaaaaagcagattaacctgagtagttttcacgctgccacaaaaaactgaagagcactgaaacacatccaaaagctgatagatgacgagggtaaggaatggcacaacgatgtgcattgaggttgagttgctgaaacatatttcaagaaattgtttgcttcagaagacgtgggagatcaattacaagagatggcataagttgcatcggttgttaatgaccaaatgaatgaagtccttttagctccagttacaattgaggaggtgagaagagcaatgtttgacatcaatcccaccaaatgtccaggacttgatggtatgacgggctacatctatcaaccattctggggaagcatggg

SEQ ID NO: 5356 - DNA, 1359 bp, Arabidopsis thaliana
attactcacagtagctgatgattggtttcttacttgcctttgatatatgccaaaagaaatcatgttcagtattggcttgttataaatgttgctagaaatagatcaggagaactaaatacctttatggtttcatgaaaagaagagtagtggagatgattcttactttttgcggtccttgactaattggtttgtaaagtcatgaagtgcctgctgggactcatttgattgaagtatcagcaatgggttacttcttttctccggtaagtttttatgtgttgctattaatggtttccaaaactgcagttttgtaagaatgtgttgctcatgcaatgatggataaccaaattcttaggtacgagtagatgttagtgctcggcatcgtggcaaggttcaagcaacactaacagaaaccaggaggagtcttactgagctggttttggagccattgaaggaagagcaatattatgaggtgagacttcacatgactcttttcattatttgttttgcatgtgcttctacacatctgtttttttctttctttaatctgatttggtcatgtaaaatactacagattcgagagcctttcaacattatgtcgatcgtgaaaagtccaatgggtctcatggtgggattcatggtcgttgttgtgttcctaatgcccaaattaatggaaaacataggtacgcttctattaccctcgaaatgtaggagttcactatgagccaacagattcatcttccgtgttttacttgtaaacaattcgactatggatttgatggacatttgatgttccttatcacatttcaccaatctaggagcttttagagctcttgaactggttggtggattgcaagttaagaagagttagtcatcgtttgctgatgaacacacctaaaatgttttcgtaaacagatccagaggagatgaagcaagcacaagaggaaatgaggagacaaggcgtgccttcgctcacaagcttgttaccaggcgctggggtagccgctaagagttcctcggttaactcaatgtatcacaaaaggaatgaagagagatttctcagtgatctgagtgagtttggttgttcatctgcaagtgatgatttattaaagttctccttttgagtatctgatatgtatagtcaacttgtttctaaaaccagaaatggtcatcttattgtttgtcctcgacgtcaacttgtgcttatgatatgtaacattattttatttttttattttggctttgaaatattaaacttgggaacaaggagagctcgtttggtatctttctaatcgggtgtaacatcatgtttcatctatatagaaaaagttttatacattctcacttttaacattttgatgg

SEQ ID NO: 5357 - DNA, 620 bp, Arabidopsis thaliana columbia
tcaataagatatttgcggagatacgagcagttaacggtccatgtgcagactacctaaccggaatagggtttgaatattggacacggtctcattttgttggcgagaggtacaatgtgatgacaagcaacgtcgcggaatgtttgaacaatgttttgacaatgacaagggattatccagtgatatcgatcctagaatcttggagaacaacattggtaacgtggtttgctctgaggcgagaagcagctcaaatggaagacaacatattgcctcccaaggttaacgaaatggttatcgagaactttgaaaaggggtcaagttatgcagtcttgaaaatcggggatggtctatatgaggtaagggatatgatggaatgcggataccagttaatctgtgggaaagaatatgcacctgcagacagtttcagctcctcacaataccatgttcacatgcaatatccgcggcaatcagagaaggcgtaagggttgacacatttgttggagtacacacaccgtgcacaactactgttagcatataaggaattgattatgccggtacctgatatggctcactagcacaatcacaaatgatgtcggaggatggaagctaccccgctatatgtg

SEQ ID NO: 5358 - DNA, 587 bp, Arabidopsis thaliana columbia
tgcatggaaaagacaacattgtatttggctggtgtctccgatcattcacgtcagttgatgtcaagtaggtactcttttggggtaggaaagctcccggtccgatatcttggcctacctctagttacaaaacggcttacaacatcagattattctcccttaatagaccaaattcgtcggcggataggaatgtggacttcacgttacctttcttttgcaggtcgtttgagtttaataaattctgttttgtggagtatcacaaacttttggatgaatgcttttaggctgcccagagagtgtattaatgaaattaatagaatcagctcagctcttttgtggtctggaccggagctaaatccaaagaaagcgaaagtctcttgggatgagatttgtaaaccaaagaaggaaggaggccttgggttacaatcattgcgagaagcgaataaggttagtagtctgaaactgatttggcgtttgctatcttgtcaagattctttgtgggtgaaatggactaggatgacctactcaagaaagaatcattctggtccattggtacgcactcaacgttagggtcttggatttggagaagg

SEQ ID NO: 5359 - DNA, 549 bp, Arabidopsis thaliana columbia
atccaatctaagattcagagcttcgacttttttcaaaacagagccgtttccgcgccagtgcaaaggtgtcgcagactggagaagtttccaaggaggagaagataagaagagaggtccattaagaggaacgaaccatttcgaaagcggagataaacggtgtgagaaatgtgggaacaacggcgaaaactgcggtggagtcagagaaacggttccgccggaagctgtagcggcggtgaagaatggtcttgttttccggtgattgatttcaactagctttcttagagatctgtaaatcgccattgatcatcaacaaagcagcttcgtcttcctcattaattttaatttaattactgtttagttaggaatttgaattttgttttgattcctttaacaccggaaaggaggaagaagatgtatcagagaggcgactaggttttcgctgctggcttgtgccacgtgtaatcttcatgaaacacgtggatgctttatgtacacgtggtgagatcattcggtatagctataccgaatcgggatattaaccggaataag

SEQ ID NO: 5360 - DNA, 1002 bp, Arabidopsis thaliana
ttcctcattacttcttcagaagaaactgagaaatcttctctgcaaagcttgtaattgcatgttttgatgggagttgtaacgactggatctctctcgaccaacctgttgggttgacttgacccggttgcagacctcggaagctagagattgcgtgtgtgtgtctgaatttgacatactgtctactgttttgtcggtactatgaatactggtggtcggctcatcgctggttctcacaataggaatgagttcgtgttgattaatgcagacgagagtgccagagtaagaatttatatcaaaattgaagcttttttcacttctttctctctgttttgatttgcacacattgttaaattttcgttgctctgtgtaaaggttttgcctttttcttattctggatctgggttttacatttcatcgttaatttatcaattagggtacacgattccataattcttacctacttttatcatcatgtacagtgaaagtttgtgtcggtggggattgaattctgagttttagtgtgtaaaaaaccccaaatctaatactttgctttaaaagaaacaaattttgagttaattgctagtgaatcttgtgttctaattgagatccaatctatgtgtgtttctcataattctctgcttatgctgatttcaatatacagattagatcagtggaagactaagtggacaaacatgtcaaatctgtggagatgagattgagctaagtgttgatggagagtcttttgtggcatgtaatgaatgtgctttccctgtctgtagaccttgctatgagtatgagagacgagaaggaaaccaatcttgtcctcagtgcaaaactcgttacaagcgcatcaaaggtcacacttacttgttgtcaacaagttttaacctttgtctgatcttatgtatctgacaaaggtttcttactgttttcaggaagtccaagggttgaaggagatgaggaggatgatggaattgatgatcttgattctcagtttgatta

SEQ ID NO: 5361 - DNA, 516 bp, Arabidopsis thaliana
taactaatttccgcagttgtcatttgttggtaactaaaagtaaaattgccaattttttagaaaatcatacacgctctctttggtccgagatgtaaaataaagacgatactaataatacagccgacaacacgtgaagattttatcaacacgtattcaactccaccgcttaaagattcacttgtccgatttataaaaaaaaaaaaaacaagtctaagcattaaattgagaaaacaaaagtacattatccgtaccggctccggtcagatctaattattaagcgcatcctcctggagcaaacccgacccgggaactcgctaagtcgtatacaacccggaaaccctgttgctggatattcccaattatggatagtccgcccatcgtaccggcaaacgcaaaacagaacttgccgttggtatccacagggatcaggtaattcgtcgccggaagtgatacgtcagctccacggaaatgtaaaaccaccgtcggtactttaacctcgttcatattggagagatc

SEQ ID NO: 5362 - DNA, 744 bp, Arabidopsis thaliana
gatcccgctatagcccttgtgtttgtgatacacattttatcttatcatgtagataatttcttgtcaagattaatattacatgatcgaacattatatctctttgatctcattgtttattggtattgcttagaaataatattggatttataatcctatcgatgtgataggtatcccctttccttctctttacaatgataaataacctacttaactcagtggttagagtattgctttcatacggcaggagtcattggttcaaatccaatagtaggtataacttattagacaccatgatcaatggtgtctaataagtttttgtaaccagctttttttattttattgtttttatcgtctttcgatcctattttttttatacattctttttttttacacgtcagctagttacaaaatcaaatcgtattgagagcctcgactcgtgtccgagctcgtctgagagctagattagcctcaattgtctgtctcttaccttcagcttttctcaagttagcttctgctatttcaagagtttgctgagcttcttgtggatcaatgtcactattcttctctgcatcatttactaaaatagtgatttcattattgcctattctagcaaaaccgcccatcagagccatcgttaaccattggttagcaaggcgtattttcaaaatacctatatcaacagctgtggcaatcggcgcgtggtttgctaatacaccaatttgtccactattagtagataaatga

SEQ ID NO: 5363 - DNA, 999 bp, Arabidopsis thaliana
cttaaagactatacgaaacgtgacgtgattcggcacagattccgtgtttccgatcatgcggttaatcaaagcccaagaaatttcaaactcgaaatacttacccagaatatcgatcacccgcttttttgtctcggtggtatgtctgaatccggattctctctcgacccagttgaaaaactccaacgccttttgccaatcgttgctgtaacatgtgagagcttcgcatactgttttctgatcgtaactggactgatcttcttcttcctgagatcgaaacttcgcatcatcgacatttgaaataggttttactgacagaagccgaacggagtaaggggaagcaatccgaactcgattgagtcgccgcaacaagagcattctcttgtttcccctctccgctccctgtacacacgaaattagggttcatcatctaacgggcgaattttgacccgaatacccattttaaaatctgacccgaataccatttatgggcccaaagcccgctggacttgtgttaatatttggaacatttgggccgatctatcttctacgaatctttcttaggcccatcataattgagccatccagaggtgaaaataaataatcgaacggttaatattggtttgattataaacacaaaagttctttccaggtctccttgtagtctttgttgtagtaaatggcgggagtcatccacgtcagcagtacccagattccggttgcgtttatgtccgcaaccaaacagagctttaggagagcttctgtgatcagatgtgccgccaacactccaaagaaacggtacaccatcgcggttcttcccggcgatggcgtcggtaacgaagtgagtcccagtcgctgttgacgttctttgtttagctgggtctcttgaaggttccttctttctcatcctgttgcctaatttaatttgatttcccaactgaaatcgtgtttttggatatcagggatagattttagcttcgaggagttgcctataggaggtgt

SEQ ID NO: 5364 - DNA, 1234 bp, Arabidopsis thaliana
tgatttgatatattggtttggttgttacacaagtatccgactttagatactacaaaacaattctaaaaaaaaaaacttcaacggaaagcgatattcttcaacaaatcaatcctacttaaaatatttaaaatgtaacaaaaaaaaattcgatacagcgttgatggaccgtaataccatatcgacacacaataatttcgagttgaattcacattattgatgcacacgttcatacccaaattaaattaaactaaaactaatgaatgatgcacgtatatagacttaaagacccgaatctctcgttaggtgaccggtgacccatgcaaccgaatgaatctaaatgggaccattagaccggtttggtccctacccatgcttagtcttattggccttcacgtgaggctccataagccaagcttcatgcaccccatccgccggaaattaaacctccggccacctaagcttgtctgctttctgattttgtcccaagtctctaatgtttgcacgtggacactttcttcctttcttctctccttcttcgccacgatttcatctccaattttccaaatctaccccttacattaaccaatctaaattactccttctaaattgcatgatgagggtatatttgtagtttcagtaagacaaataatattgcgtgactgtgtcctgtctgattatgaacactagacgacaaaaacctaacgttacttgaagtttccgaatcacgaggctcactcattcttcttcttctttcttctatatatatataaagccccacgagtagtttgtatctctttcaaacacacagacgagatcttctctctatctttctctatctacaaactttctaaaagtcacgagtcaactcaacgagttacgtacaaagaagtactaaaacaatgggagcttgcgcttcacgtgaatctcggagaacagagacggcgaagctgatattaccagacggaacattacaagagttttcaacgccggtgaaagtgtggcagattcttcaaaagaatcctacaagctttgtttgtaactccgacgatatggatttcgacgacgccgttttagctgtccctggaagcgaggatcttcgaccaggagaattgtacttcgttttaccattaacatggcttaatcatccattgagagcagatgaaatggcggctttagcggttaaagcaagctctgcgcttgcgaaaagcgtctctctttacagcacaccgttact

SEQ ID NO: 5365 - DNA, 395 bp, Arabidopsis thaliana columbia
tgtgtttagtgtgtaagcttgttgcactaagagtgtaagatacgcagtcaagaccagactcagcattatagggcatgttgggattggaatcaatctgatcagaatcttcacttcctctacttgtgttactgtggatagcttccagggagatggtttgagtcacgtggatgcaatggaagtgccgcgttagtttggtcatctggcataatgaatgcattcgactgataaagactagtattaagttttattttccttataggaagaggtacacaaaagaagaagccttacatgaaatcattggaatgagggattttacgactgccattagtagcagatttcaagccagggacttcgtaaataccgatgaactcagtgcttgtgaaagctgcatgtcg

SEQ ID NO: 5366 - DNA, 553 bp, Arabidopsis thaliana columbia
  unsure (1)..(553): unsure at all n locations
ggaaagattttgcatctacacttatttatctgctttcctgactacgggtatgatatgcatccgctctgcaatttcctgcaggttatgactgctaaagaatttgagtcactgatgaatggacctgcgctcattgatcgaggaaaaagcttagatttgtcatcaggtcaaggagattcatctatcccgttctcctgctacttctccccgttcatttggaactccagtgaatcataatttgaagaaaggcatgcccctttatattgtttgcaacaaaagaatgttcttcaatcttcttagatttctggtttactgatacttcattggggaaaaacacttgcaggggacagggtaagattcttcggtgatgagttgtgtccggggctacctacctcaaggtttgattcttatgatatttctgatggaggcagctgctgagactgatattgacttctatattgtatgaatatgaatatttgttggttctggtgaaganagtgaagaaaaatgcaaataatttattgatgaattacttttatttacatccaagaactat

SEQ ID NO: 5367 - DNA, 892 bp, Arabidopsis thaliana columbia
gggtatggagttgtaacttgcctagagatagcgatgaagaggatgcggtggcttcctacgccacgtcgggcggtctcgggtcttgcaattacggtgtttttgctcgttacagctggttggttgttttaccctcaaatgttaagaaatgatgtgcataagagagtgataagtgaatgtttgttggttattgacgttgttaaaaggcacgttgtctgtattttaatgtaacgcataatttgaagaagagttttttttctttatccttatcattgttattatcgacaacactttaagctcccaaatgcgttacaaatttggacactccgatctacattaaaatggttttttcattgttgaggttcgtgcatgataaagacctgtcacatgcgtccgctcgcatcggtttgaggatatcctggagagttgagaggcaaaacaggtttatttgtccgaatctgtaatagctttcatgtcatttttgattcatcctattattatttaaattcatcccatcaaaataacgttacggttattgaaaaagaaaaagaagatctagagagatggaagaagaactcaagaacttcatcaagctttggatttcagcaataatctccatatcttactgttactacttatcaacaggaatcaaagctggtgtttttcgattactctctgttcttcctgtatgtgctctgtttcttgtttttcctctgtttttctcctatgttcacttctctggttgcatggcttttttcctctcatggctcgcaaatttcaaactcatcctcttctccttcgatcaaggtcctctttccccacttcctcgaactctctcccgattcatatgcatcacttgcttccccatcaagcctcaacaaaaccctaatattca

SEQ ID NO: 5368 - DNA, 476 bp, Arabidopsis thaliana columbia
gaaagtataagatatgtgttaaaataaactatatataggaaatggagaaacattaataacacataagattacaagttaattatcctttttcaataaacaacattttaaagtgtttttttccagtcatattattttagaaaatgtttacttaaatattaatatttttttctttattattgtttacttatgttaaaaaaaactccgatattaaaccgttaccgtagtactaattctggataaaaagttaaaaaccaaaataaagtttgatttcaaattttgaatcttgtaacggccaaagcttcttcaataaacttctcctatattcttcttcttcttctctgtgtttctcaaactcacaaagctcaaacaaaaatggcttctcttgctcccggaattctcttaaaactccttcaatgcatgaactccggcactcgccccaccggagatcacagatctgcaatcttacaagtcaccgg

SEQ ID NO: 5369 - DNA, 475 bp, Arabidopsis thaliana columbia
atctattcaaagaaaaactatttaagaaacatatgttttggatcaagtaagggtttgatcttgtaccggaatcaggtttttgcttttcttctagggtttaaggttatttaaaaacagatggaaactttcggtgtgtttcacaaggaagatgatgagcagatggatttgcctcctggttttaggtttcatccaacagacgaagaactcataacccactatctccacaagaaggttcttgaccttggtttctcggctaaagctattggtgaggttgatttgaacaaagctgagccatgggagttgccatgtaggttttaaaaaaaaacataatttagcaacacacatcccccgcatgtctaaattcaaacaaggttttgaagtctaatgagttctgttttttggtgttttttgttttttgttaaacagataaagcaaaaattggtgagaaagaatggtactttttctgtgtgaggga

SEQ ID NO: 5370 - DNA, 533 bp, Arabidopsis thaliana
tatacttaagcttgttactttttattgttaccaacaaaagctaatgtatagttcataactcacaggtcctgcgtctttcggtccgaccacttctcctacagattcgcaaacttctgatcctgaaggtactcgcgaactttttactgcaacttctagttctaactccaaaacattttgttcagaatttgtttctaaaagattttcgggtttgttgacgtcacataactcgcagggtctgcttctttccgtccgcccacttctccgacaacttcgcaaactcctaatggtaaaccatataaattcctaagaatgtattttagtaacataatttgttactaatattttcgagtttattgacaagtagacaaggatctcagcggatcgggcaacggaggagatccaatggggtttgctccacctccaccctcgtcgtcgccttcctcttcgcactctctcaagctttcgtatcttctatttgctttcgcctttacgattatcaaattcatctaattaaagagcaataccatactata

SEQ ID NO: 5371 - DNA, 1206 bp, Arabidopsis thaliana
gctacctttttcgttctggaagatctaaattagtgtttgagttacaaacgcagaagaaagagaaagcctttacgaggaaatgggttgtttcgatcccaacactccagcagaagttacggtggagagtagcttctctcaagccgaaccaccaccaccaccaccgcaagttctggttgccggaagcacaagcaacagcaactgcagtgttgaggtagaagagctctctgaattccatctcagcccacaagattgtcctcaagcttcttcaacacctctccagtttcacatcaatcctcctcctccaccacctcctccttgtgatcaactccacaacaatttgattcaccaaatggcttcacatcaacaacaacactctaattgggataatgggtatcaggattttgtgaatttgggacctaactctgcaacaactcctgatttgcttagtctcttacacttgcctagatgctcattgcctcctaatcatcatccttcctctatgctacctacctctttctcagacattatgtcttcttcttctgctgctgctgttatgtacgaccctctcttccatttgaatttccctatgcagcctagagatcagaaccagctaagaaacggctcttgtttacttggagttgaagatcaaattcagatggatgctaatggaggaatgaatgttttgtactttgaaggagcaaacaacaacaatggtggatttgagaatgagattcttgagtttaacaatggagttactcgtaaaggaagaggatcaagaaagtcgagaacttcccctacagaacgtgagagacgagttcacttcaatgatcgtttcttcgacttaaagaacctcattccaaatcccacaaaggtatatactttactttgctttgatttcaattcatgttgttaatgtgtatgaggagactatgaaatgagagacattgttggtttaatctctgtagattgatagagcatcgatagttggagaggcgatagattacatcaaagagcttttaaggacaatagaggagtttaagatgcttgtggagaagaagagatgtgggagattcaggagcaagaagagagctagagttggtgaaggaggaggaggagaagatcaagaagaagaagaagacactgtgaattacaagccacagagcgaagtagaccagtcttgcttcaacaagaacaacaacaactcac

SEQ ID NO: 5372 - DNA, 598 bp, Arabidopsis thaliana
tctctcgtttggttccattgacatatcttgtataaatctgtaagcttctttcactttcccggctcggccaagaagatccaccatacaagccaaatgctctaacctaggagtgatcttgtaatgatctgtcatgagtttgaaacaactcctaccttcttctagtaaccccgcatggctacaagcagcaagcgttgtgacaaacgcaattgaatcagggacgagacccgaatcttgcaatttcgaaaacaatgccactgcgtcacagcctcgtccgctgaatccataagctgaaatcatagctgtccaagacacaacatcacgtgacttcatgttctcaaacacatctctagctttctctaaacatccgcattttgcatacatgtcgatcagtgcattctctaacaacagatttggtatcagcttcttcctctcaatgtatccatggattttcttaccaagagacagagcagaggtatctccacaagcaggtaatacacttgtgattgagactgcatcaggttcaaacccatcagcctccattcgggaatacaattccacagcttcaacaggcatcgcatttttcatatacacaccgatc

SEQ ID NO: 5373 - DNA, 1316 bp, Arabidopsis thaliana
tacacggctaaccatatcgtggaatgcaaatggaacgcattgtagtgacagctttccactaaaaccttgctcgtcttgatcattatctgttgttagatcgctcgtattatgagaaccatcatccgtatcagcggcttggttcagatcgaaagataaaccccgatccatgttctttcttcggtttcgtcagcctctcctcgtcgctacacagccaacttgctcgtcgtttcccaaatttctcccgcatgcacaacctcaaacgccagctttcgctagccaaatctcgtagttttgcttcattgtctaggaacgatgttttcgtccctgcgaaatgccagctcgctgtcataacaaagatcacgttacctaaactgatctcacggccatgcgagtcacggattctgcctctatccattgcctgttttatgcttccacgcaccaacatatcagcttcgtcaatatcttcaagcaagataacagagaacggactcctcttaacagtttccgcaatcttatccaacgcggttttaccacggaaactagaatttccatctccagcatcttgtctcgacccgagctgaatcattattggattcgtcccatacacaagagaagacagagctgacaccatttttctcttccccactctatccggtcctgaaaaaagtaaccagacatctccctttgataaaacaccgcgtcgtttcccattcccgagcttgcactgactaacagttgcagccaccgcagcggcgtgatcattctgccaccaaactttctcggtcattcccttcaacagcttcttaaacaaatcaatgtctaacgaattcccaagattctccttttgcaaaacactgatgttattattgttctgcactgattcagacgatatgcagccgagaaagtctcttacttgcacatctcctgctttctccgaatcctgaaatacgcaaacgcaagtatttagcgtcaggtttgtgatttcgattagataaacattttcatcacagtatacaaacattcaaatcaacaaacctctgctcgtccaagaacaagatcggtctgaaccgggctcccgggaggactcttcttcttggcctgctcagccaccaaaggactcataggcttcaagtgtaccctctcacgcaactctctattaggctgtaacttaggctgcaacggctgacgaagaagcatgttaggactgtaagggctcgttgtcaacgttataggaaccgggatcggaacaatcctctcgttcttgttatgaaagctaggatgaagacgcacgcatgcatcattccatttcttctgca

SEQ ID NO: 5374 - DNA, 512 bp, Arabidopsis thaliana
ggttacaccacaagtcctgttagcgaagatgcagattccgttatcatgaaacttcccatcagtgaacattcacaagctccgatggatgcagacaatacacgttgttggtaacgtagctaggccaatcttttccttctgaaatcattatcgtcaccggataaaattcgtcctcctcttgtttatctggtgaacagaatccataagctggcaacagcacatttcgaggaagtgagtctgatgtagtgtagaaatgcttggctagcaagaaactaatttctgcttcaaacaaaagccgaatcttgcaaatcacatgatcttgcttccagttgaagttattggtaagcctatactcttccattaccaaacttctcttgtattctctaggtttccactttaggcagaacttgagtatcttcttgaaccctagaatcttaccagtctcctccgactttatcagcttatcacgaccaatgatcctccagcaacccgaatcacatccatcggttttacac

SEQ ID NO: 5375 - DNA, 937 bp, Arabidopsis thaliana
cattcatcaattcactcaagtttacaaaaggttaagtagacgttttaacgcatctatggttcataaattagataaataaaaatgatttagtaaactgaaatgacgccctgattggatatatatatataagattacaacattacattatcctctctttcctttttgataataaaataactgaaatcaaccaattataatcttcttcttcttcttacgacatatattatagtctaaagatgccggtgcacacaagataaagagaagaaaaatggtggatgaggtaaattcataatcaaaagttgtttaaaaaagtactctactcttaatcggaatcgctgtccttgtcgtgtcctcctaagtcgaactcttgtcccgcatagtattgatttgttaatccacggtctccatctggcggacaacattgaaccagaagctggggtatgtcggtttcactggacaccacaatagtactaaactgttgagactgttgagcgtatagcgctggcgggcctagcagcgcaggtgtcaagtcaggttcattggacgccacaagactgtactgttgagattcttgagcgtatagctgtggctgacctagcggcggcgcaggtgttaagttaggtttagtggacgccacaggaccacattctcgagcctttggaagcgcggatggtggcggcgagttagttttggtggagccctttctatagcctatatatggattattcaaaagataaacagaagcaaggaaatctatgttacaccaaaagtaagataaaaggaactcacgtcgtatgatccaaataaccagaaatgttgctccggctatgaaacctggcatcactaaaaccggcatcttctcgtctttattggaccatgttcatttctctgttatcatttttgcttgacttttggggacgccagccagactagtgat

SEQ ID NO: 5376 - DNA, 553 bp, Arabidopsis thaliana
agctaggccaatcgtttccttcagaagtcattatcgtcaccggataagatacatcctccaattgcttatctgatgaaaggaatccgtaagctggcaacagctcatttcgaggaagtgattctgatgtagtgtagaaatgcttggctagcaagaaactgatttcagcttcacacataaaccgaatcttgcaaatcacatgatcttgcttccagttcaagttattggtaagcctatactcttccattacccaacttctcttgtatcctctaggtttcctctttaggcagaacttgagaatcttcttgaacccttgaatcttcacagtctccgtcgattttatcggtttatcacgacccatgatccatccagcaaccagtttcacatccatcggttttaccacaagcctctgttcgaggtttaactatcacgaagctagggctctcagcatcgaactccacatttggattcttgttgaacacgtctgcgtcttcgatgaagtgatcaggccatgagtctccgttgacgaccatacgcttcagataacgtgagatta

SEQ ID NO: 5377 - DNA, 786 bp, Arabidopsis thaliana
acaactcgatgagctggacgtctaaatggagagatcacgaggataggagagagatgaggagctcttcttcgagtaacaaccacgatctagtcaatatggactggggtgccgtggttcctgagaactattcttgggtttctcatactgcctctcacatgtctgatggactcctcagtgtccattctattaccgataatcaggtatcattcttgattatttgtcattgatgctgtcttatgcagagaaaacagaacggctttgttcatttctctgtcttatccatatgctttggttcgaagctgaaattggatctaattgtgtaggtgaatctgaactttgagatagagaaactgagagcggagctgaagcatgttcaggagatgtatgccatggctcaaaccgagactgttggtgcttcaaaaaaggtttaataaaggtcttgaaccacatagaccgtggcgtttttatttttgttaacatttgtttgttcttgcttttgttttttgttgcagctgactgagctaaaccagaggcggttcgaggaatccgagaagcttgtggaactgaaggaaaaagaagaagtagcaaaagatacagcttcaaaggagaagcaaaggtacgaagaggcgatgaaggaagcagagaaggttaaagaactcatgatgaaagaggctttacatagaagagaagctgagttcaaagcagacgccgatgctagagagaaagataagctccaggcttctctcgtctctcccggggtccaataccgacattatacctgggagg

SEQ ID NO: 5378 - DNA, 745 bp, Arabidopsis thaliana
gatgacctcccatggttcggactctcttgcactgtgttccgtcccaaacctgccaaaaagtaaaccgttagtaacttcattgcatcataacaaaactttccacaaccacagattggaaggtaacaaacaacacacctgaacctgaccatgacttgtaccaatagatatatatgaaccttcccgtgtccactgaaccgagcacacactgtcattaggccctaggtcacataacttagtcacctaaccaacaaattcactgttaaatgaatacaccacaactaaaaacattgtgcaaatcttaagaactagtcaagtatatcaaaacactcactttgctattggaagccgtccaaagataaacacaagtaccaagcccaacggcaagaacattctgtgaactccagtccacaacattcaagtagaagtcatcttgtaaagaaggagcatccaagacctgagaccacatcaaaaacaaaacaatctatcatttctacttctcatgaatctgtaataacatcacataaacaggttggatctaaacgatataataccttatgaggtgttttaggaaccttgcgagggggcttcggaggcggagacgagtcactggagtgaccattatcatttccgagaatggaaggagaaaacggcgaactaggacttgaattggaacgatccgtcttgaatctcaacatgttagtacatggactcatcggagaagaagcagatccttgaccacctgcag

SEQ ID NO: 5379 - DNA, 1268 bp, Arabidopsis thaliana
tcaagaatgccaagatattttgaggttggtgaatcgtctagacgtcctagttcacacttgaataataggaaccaaatgcacaagctacaagctgaagagagaggaggaattctgaatctgaagcttcctaaaaagagataattaattgttcctattacaggtttacttaagtttgattagttgaataaggattctaaaacagataaagttttttctggattctgttttagtgattgtcacgctcctttttgataatcttgtcttctttagttcttaagttacccttttgtttgtgtggcttcttccactcttacactgactctgttttggcttaaataaacatttttgtgacaaaaaaaatacactcgaaacataaacaaaagttgggataaacaattcaatgtcttttccgatattttataaaccggatgactaatgtgaaatgatttggacattatattatagatgatcatatagatataattttaatcctgcgctaaagtttaaagatttatcaaataaaattcactcgttacataatttattcaaatcagttgataacaaatgccaaataatgattccattggctctttattaatcacatcaaacataatataataaccactaaaaaacagttttaaaaaaagaaaacggatcaactaatttaatcaagcagtggaagtgaaattgaagttggcgcagttagtttgacggcccaataacgtggaactaaacccaaatttgttactcgccaaatcaaattcgatcaaattatcctccaactggaaccctccgatcaccacagaggctcctgggttgactcctccgtcaacgaaacccaaacagatgacgtcatcactgacactcaccatcgagttagctccaaagattctccaaacgacgtctttgctatgaagcacgagctgaatctccggtacggcgtatcctaggcgcgtgacgccaacgttcttcgtgctgaaacacgcgccgaacggtttcaccgacgctactctcttgatgctcctcgccgctgcttgtctaataaactccgacgtaaaagctttgtagatcgatgactccaacaccgtgtaaggattgacggagctgattttggttcctcctattccagtacttgcgtttatcttcaaaagcgttggatcgattggaagtgttttctcgacgatcttaatcgccgtcacgccgataaaatactccggcgacttctcgccttttgaaaactcaaaaacagtggtccctggattgatgag

SEQ ID NO: 5380 - DNA, 1060 bp, Arabidopsis thaliana
aaaattgtcacaaaataccatacattaatcagaaaattacctccaatcttatataacctcaaaaatccaatcttataacctcaaaaataacatgtcacaaaataccataatatatcaaaacatgttctcaagattgcatctatattcatgtagagacgtcaccaaatattctcatggaaaagaagagagacattacccaatcatggcaggcggcaaggaaatgatcggcaccggaagttcgattccaaaaagggtatttagcagaaatgaagtctatatagtctttaagatacttaataagattgcggtgactgtgagagtcctgaacatatagagtcacctcaagcatccgggagctaaagggtaaatagaaaagatgagcttttgcagggtcctttgtaacaaatttgttgttgttggattcaataatattcataaaccagccttctgatgcataaatccctctgagtattggactatgcattattggttatttccttctttgtaagcataaacctttaatatcttctccatcaactcatagctcctaatgaattcaatatcaactcaaatcagtatcatcataatatgagctttgatgcagttttcaactaaataaaccgactcaccttttgaacatggaaacattgcgataaagaggagcgtagaggaaaggatctttgtcatcgataggtgcattctcgatatcatattttgcttgtaaaagctctaagtcaggtttcgttacccactttggtttctgaaaaagaaaaaaaagaaacatgttatacaactgttacttcttaagtaagaatgtatcgtatcaagatcttgatgaacctttgctagacgattatgagaaatacggttttgacgcaactgcttgctcatctcggatattgacatcactccgaaaccaggcattttcgcattctcctttacatcaggaacaaatctcacaataggagaagcatcaccaacattttttttagttggattcctttccggtaccttgctagtggtagcaatgttcgttttcattctggagacgggttatcta

SEQ ID NO: 5381 - DNA, 777 bp, Arabidopsis thaliana
acagagactaatctttgctggtaaacagcttgacgatggtcgcactcttgcagattacaacatccagaaagaatcaactctccacttggttctcaggttgagaggtggtatgcagatttttgtcaggacacttacccgaaaaaccatagctttggaagttgagagctctgacacaaccgataatgtgaaggccaagatacaagacaaagaagggatcccaccagaccaacagagacttatctttgcaggcaaacaactcgaagatggtcggacgcttgctgattacaacatccagaaggagtcaacacttcatctcgtgctgcgtctttgtggtgggatgcagatatttgtcaacactttgacgggaaagaccatcacacttgaagtggagagctctgatacgattgacaatgtgaaggcaaagattcaggacaaagaagggatttcaccagaccaacagagactcatctttgcaggcaagcagcatgaagatggtcgcactttagcggattacaacatccagaaagagtcaactcttcaccttgttctccgtctccgcggtggaagcttctgaacaagaagtctatggcagcgctttggttttctttttttcttgttatgttttaacttttgatggattcaacttcagagtcttttcgataataattcaaagtactttcttatttatctgttctataatctaaatctcaacaacaatcacaataatttccggctcctgaaatacttgataatgcacaatgccttaaacttggatgg

SEQ ID NO: 5382 - DNA, 452 bp, Arabidopsis thaliana
cgccagtgtgctctaaaggggtcatacaaactgcattcggctcgccgccgggggttgaaaccctcaaaatcccccccatctataattgcattatgccccgtacttttgtacggggtttgtactctgtattcgtaaccaaggggtcagctcgtgacaactatagtaagcgtacgccgtaacggccatgtggtcatcgctggtgatggtcaggccacgttgggcaataccgtaatgaaaggcaacgtgaaaaaggtccgccgtctgtacaacgacaaagtcatcgcgggctttgcgggcggtactgcggatgcttttacgctgttcgaactgtttgaacgtaaactggaaatgcatcagggccatctggtcaaagccgccgttgagctggcaaaagactggcgtaccgattcgcatgctgcgcaaacttgaagcacctttagagcacactggcg

SEQ ID NO: 5383 - DNA, 765 bp, Arabidopsis thaliana
tccaagcaaaacttattcctgatcaatcttaagcaaattgtgatcaaaatatacagttataaatcttcatttgcagagccattctttaacagtttttcccttggcaataaaactaccaacattcttccggtcaattctcatcgggcttccagtacgcaccattatctttttaaccagcgctttcaccggtgactctcctcttacattgctatgctttccagatccagaaacaactacaatctctgcaggaattacacacttttcttcgctaaatctaagtctggtctcatccatccattgcagcaatatcaaatacgatgagctcaagtgcataccatgtaaatccaacttaccctctaccgcgttccactcaattgcttcatctaaaactgatgactgagtcaattcatggaccagaagtgcttcgtcctcattcagaaaagtacgcagttcagaaagagaaaccggacagctatccaagtctttcaacattgatatgatggtaggacaagaattcaagaccgagttatacgtccttatggagaaaggaacattaaaacccttcaacttctgtaaccaagaacccatttggggcaatgcatcatgagctccataggaagagagaaccatatttgaacaaactgtgtcgattttgtgaccttctgttcccattctgtgtactactctgttcatatcgtcaaacaatcctaatcttccatagccgtatagaacagacttatattcaaacaatcccggctttatttt

SEQ ID NO: 5384 - DNA, 1562 bp, Arabidopsis thaliana
taacccaaaccctaaccctatctccctctttcacgagcttctgactcagatccggcgatatcgaattccatggaggacgatgaagacatccgatctcagggttccgattcacctgatccgtcttcctccccgccggcgggacgaatcacggttacggtggcttcggcaggtccgccttcttattctctgactcctccgggtaattcgtcgcagaaggatccggatgcgttggctctggcgctgcttccgattcaggccagcggtggagggaataacagcagtgggagaccaaccggcggcggcgggagggaggattgttggagcgaacgagctacggctgtgttgattgatgcgtgaggtgagagatacttggagcttagcagaggggatctgaagcagaagcactggaaagaggtggctgagattgtgagcagcagagaggattacggtaaaattcccaaaactgatatacagtgtaagaataggatcgatacggtgaagaagaagtataaacaagagaaggtgagaatcgctaacggcggtggccgtagcagatgggtgttcttcgacaagcttgaccgtctgattggatcaacggcgaagatcccgacggcaacttctggagtcagcggtcctgtcggaggattgcataagattcctatgggtattccaatgggaagtcgttcgaatctgtaccatcagcaagctaaggctgcaacaccgcctttcaataatcttgaccggttaattggagctacggctagagtctcagctgcttctttcggtggcagtggtggaggaggcggaggaggatctgtcaatgtacctatgggaattccgatgagtagccgttcagctccgtttggacagcaagggaggactctgccacagcaaggtaggacactgccacagcaacagcagcaagggatgatggtgaaaaggtgtagtgagtcgaaacgctggcgtttcaggaagaggaacgcttctgattcagactcggaatctgaagcagcaatgtcagatgattccggtgacagtttaccacctcctcctctgtcgaagaggatgaagacggaggagaagaagaagcaagatggtgatggagtggggaacaaatggagggagctgactcgggcaatcatgagattcggtgaagcttatgagcaaacagagaatgcgaaactgcaacaggtggttgagatggagaaagagaggatgaagttcttgaaggagcttgagttgcagagaatgcagttctttgtgaagactcaattggagatatcacaacttaagcagcaacatgggaggagaatgggaaacaccagtaatgatcatcatcacagccgcaagaacaacatcaatgcgattgtcaacaacaacaacgatttgggtaataactagaatttagtgatgcagtgtcgtaattgatatattttagatttgagtctttaattgttgaaagagaaactgaaacttatctaggcttcatgagtgtattaatattttgcatatctttcttaactttggtcatatggaacagatttaacttcactagattgcct

SEQ ID NO: 5385 - DNA, 547 bp, Arabidopsis thaliana
ctgaaaaaataattgaaaatcagactttgatgtcatcaagaatagcttaggatcaaattctaacaacaattctcctctcttcaaacgccatttagagaaagaatgtaacatcaaacaacctgctctataacaacccttaagattgaaggtcaacaggatctagagtttcagaaaaatcatacttttatatgttgctcaaagaagaatatatagactataagaaaggaaccagttgattatttttcatgtacagctgaaagcttaccctgtagggctgcattcagtgagaagaaaacaacattcatggcaggcccatagactgtctgtcccatggccattttcttaaacgttgtgatcaaatctcgttttgggaagagacttgacatgagattgaaccaatagtgaagtgtaggacccaagattaataacccatatcctcccatccttgctgttcttaccaagtcataagaatccactgaagcttgtggaattgtctgttgaaagatcaacaagtcacacttttgtcaacaacaatacaagaacaaag

SEQ ID NO: 5386 - DNA, 545 bp, Arabidopsis thaliana
tattaaaaggctcaagatcagagataccacagtctcttggaagctaactctattttaaaagccttaaagagaggttctcaatcaaatcggatctagcaagataaaatcaagcaagggattatttagacaagccctagatttaaccctagatgtcgcttagaccaaatcaaacagtttagcggaagattctcaatcaaatcggatctagcaagatagaagttcatcgaagaagatgtcgaaccctaatccaataaccggagaaacgagagaagagatggagggaataaagaagaaaagactcacatttgccaagcggagaggatgaataaagaagcgaagagaactcttccaagaaaagagaagaaacccattttctctatgtctccttgtgtcgttctaggtcgcaggtggtctgatttgtcgtcggagagacggatcctttctcggtgttagcttaaacttcggttcctctgcttttgtctttttttttttcagagagaaaaaagattaatttatataattaaccaattaaaggtggaaaagaa

SEQ ID NO: 5387 - DNA, 1093 bp, Arabidopsis thaliana
cgtggaaaattatccagttacctcaaggggagttagcagcaccaacgaatgatataaatacgacggttgctttagctttactcacatcagtagcctatttttatgcggggcttagcaaaaaaggattagggtatttcagtaaatacattcaaccaaccccaattcttttacccattaacatcttagaagattttacaaaacccctatcacttagttttcgacttttcggaaatatattagccgatgaattagtcgttgttgttcttgtttctttagtacctttagtggttcctatacctgttatgttccttggattatttacaagcgggattcaagctctcatttttgccactttagctgcggcttatataggtgagtctatggaaggtcatcattaatggttttttttttaatattcttttttaggttagcccaattaattatagaatagttggtttacattatgtaagaaacacttgtatatgtgatatttgatattgcctaggtatatatgagttaaagatctatataatctgaatctgctctactatttttgtgaatttctatttagatttagatagggattcgattagaagttcttcctttttatctgtgaattggctgaaaaaatgataaaaaaagaacgaagaattcaaagaatggttcataaaaaaaatggcataaaaaagtcgtatatatattatggatttttaaaaatcccgcggataggaactactatcaaagtaattcttatgattcaataattttattatattatttcatatttcaattaaagtttttggtttttttggctggattaatcttagcgattacttaattagaattacgtcctaagtcattggatgattgtatcattaactatttctttattttggtgtgaggaacttatcatgaatccactggtttctgctgcttcggttattgctgctgggttggctgttgggcttgcttctattggacctggagtcggtcaaggtacagctgcgggtcaagctgtcgaaggtatcgcgagacaacctgaggcagaaggaaaaatacgaggtactttattgcttagtttggcttttatgga

SEQ ID NO: 5388 - DNA, 576 bp, Arabidopsis thaliana
agctgaaaccgctccacgaagatctccggcattgagatgacggagaatcgaacggtcggggacgttgattggtgttgagggggacgggtggggtttaagcggtggggtaggtagaaggtggttatgtgggggttcattggagggcaagtctggtgccagcagccgcggtaattccagctccaatagcgtatatttaagttgttgcagttaaaaagctcgtagttgaaccttgggatgggtcggccggtccgcctttggtgtgcattggtcggcttgtcccttcggtcggcgatacgctcctggtcttaattggccgggtcgtgcctccggcgctgttactttgaagaaattagagtgctcaaagcaagcctacgctctggatacattagcatgggataacatcataggatttcgatcctattgtgttggccttcgggatcggagtaatgattaacagggacagtcgggggcattcgtatttcatagtcagaggtgaaattcttggatttatgaaagacgaacaactgcgaaacatgttgccaaggatgttttcattaatcaagaacgaaagttggg

SEQ ID NO: 5389 - DNA, 750 bp, Arabidopsis thaliana
gattacatcgcccgtggttttcggtaacgatgcagcaccaattccggagaacaaaggccgaatcgagcagtggttcaacaccaacgtcccttcgttggctagtagaaaaagcacatcagatccagctctattgaccgctgaggctaagccacgcatcatcaaggcatgataatatttataaacattacttaatagacgttttgcttatgttaattttcaacaaatataacacgctatttttttttagttcgatattgcgatattttatatgatatcgcattttgtatgtaggattttgggttttacacatcataaaaatatattttggatctacgaatgcaggtgaaacaaaatggaagaggccatttcaagacaataaccgaagcgataaatagtgtacgggcagggaacactaggcgtgtgatcatcaagataggtcctggtgtatacaaagagaaggtcacgatagatagaagcaagccattcatcacactgtacggtcatccaaatgcaatgccggtattgacattcgacggtaccgcagcacaatatgggacagtcgatagcgcaactcgcattgtcttgtccgactatttcatggctgttaacatcatccttaaggtatttatatcgtaagatatgtctcaaaatatgtggactaatcaaggacagtttatgattacttacatgtgacattacttttgaaagaaaaaagaaaaaacggccctattttacaaatgagataaataa

SEQ ID NO: 5390 - DNA, 489 bp, Arabidopsis thaliana
tccgaaatcatatccgacggttaatctcgactcccttgttgaagctacaatctctcttacgttgccactacatcacgcctggaccggaaaacatgcacgtcgtggtgatactgttccaagcgtaaccaatctgatcaaagggttaagaaacgttgagaccttgaacttatcaagtactgatactgtggctgtaagtgtgctcctttctttttactctttgctacttttaaccttttcacttatcgttgcttcacttccgcttccgggtggtataagaatcaaaatctcgtttgatatgaaattgtttcttgaggttatgatttttatttttatttttgttcttcaggcgttttatttctccaatgaagcaatcccagtatttgaaaacttgcatagtttatctattgcaactgaacgtgaattctgttggcgaactctgccatatctgctgaagaagtcccaaatctagagtcctcgtcattggggtat

SEQ ID NO: 5391 - DNA, 904 bp, Arabidopsis thaliana columbia
cccttattgtgcaggtactgattcaggcgtgacacgtattttggtttgtgcacttatcctggtcaggagctacggcgccgtatcgattttaaggtaacacctgaaaactcctaatgtcacacaatgcagaaaagaactaagtgggttagtcaaagataaaaaggacaataccatgattgattcagctatgtctaggttgatctcttcccggaagatcattcaataaatagtcttttttcataggtctatccaagggatatctattcgtttggactcatagcctggacagggaacgacgtgttgaacagaaggtatggatatgatttcatttgtatacatgtctcactaaacacatttgttggtagataaagaacacagcatatgtatatatatatgcgatgataactgcaggctgagattgctagcagaatcgaaaggatatcgacttgacgacactggactattcccagctactcacagttctagtggtaaccgggtaagtaagggagaaaagtgaattaacttgatgtgaattcttgggttttaaagtgaaagaatgattatgttgaagctgtgataatgtttgtctctcagggtgctagaggaactgcaagtctgaaactctcaacggagaaacaagtttttgatttcttaggatttccttggctcgagccacacgagaggaatctctaaggcatcacaggcacacagcctttggtactaaattttttttttttctttttgaataggttctgtatgtaagtaatcggttcctttttgtaattgcatatccatggacaactgatttagatgttacatataatgcaatgcaatgtacttgtattagaaaccattgcatatctttaaggtaaactaagaaaacgtatggtactgaggaaacttg

SEQ ID NO: 5392 - DNA, 848 bp, Arabidopsis thaliana
tagtcacttcgagactgagaagttctcatgtttggttatggagttctgtcctggaggtgacttgcatacccttcgacaaagacagcccgggaagcgattttcagaacaagcagcaaagtaaaaacattttgaataatcagtttcatgttttgcatccaagataccactttttttttttttttgttaaaatcatattggctttgtttacattttccaggttttatgtagcggaagtacttcttgcaatggaatatcttcatatgcttggcatcatataccgcgatctaaagccagagaatgttcttgttagagatgatggacatgtgatgctttctgacttcgacctctccttgagatgtactgttagccccacagtggtcagatcaactgttcttgcgtctgaagggcaaaagaactcgggttattgtgcgcaacctgcttgcatccaacagccatcttgcatttctgctcctacaacatgcttttctccacgttatttctcaagtaaatccaagaaagacaagaaaatgaaaaacgaaactggaaaccaggtaagtccattgcccgagctcgttgctgagcccacaagtgctcgctcaatgtcatttgttggcacacatgagtatttagctcctgagatcatcaaaggtgaagggcatgggagtgcggttgattggtggacttttgggatctttttgtatgagctattgtttggtaaaaccccgtttaaagggtcaggaaaccgagcaacactcttcgacgttgtgggtcagcctctgcgtgtcccagaatctccagttgtcagttttgctgctagggatttgattagaaggctgcttgtgaaagag

SEQ ID NO: 5393 - DNA, 3098 bp, Arabidopsis thaliana
cgatccctgcaactgggtcggttgcacatgcgaccctgccaccaatcgggtctcggagctccgccttgacgccttctctctctccggtcacatcggccgtggccttctccgtctccagttcctccacaccttggtcctctccaacaacaacctcaccggaaccctaaaccccgagttccctcacctcggcagcctccaagtcgtcgatttcagtggcaataatctctcgggtcggatcccagacgggttcttcgagcaatgcgggtccttgaggtccgtttccttggctaacaacaaactcacaggttctattcctgtctccctcagctactgttctactctcacccatcttaacctctcaagcaatcaactctctgggaggttgccccgagatatctggttcctcaagagcttaaagtcccttgatttctctcacaatttcctccaaggagatatccccgatggcctcggcggtctctacgatctccgtcatatcaacttatccaggaactggttttccggtgacgttccttccgacatcggacgatgctcttcccttaaatcgcttgacttgagtgagaactacttctccgggaatcttccggattcgatgaaaagcctgggctcttgcagctccatccgtctgcgaggaaactctctgatcggagaaatccctgattggatcggcgacattgccactctcgagattcttgatctctccgccaacaacttcaccggcactgtcccattctccctcggaaatctcgagtttttgaaggatctcaatctatccgcaaacatgctcgctggagagctcccacagactctctccaactgctccaacctaatctccattgatgtcagcaagaattcattcaccggagatgtgcttaagtggatgttcaccggaaactctgaaagttcctcgctttccagatttagcctccacaaaagatcagggaacgacaccattatgcccatcgttggattcctccaaggtctccgggtcctcgatctgtcttcaaacggcttcaccggtgaattaccgtctaacatttggattctcacaagtttgttgcagctcaatatgtccaccaactctctcttcggttccatacccaccggcattggaggattgaaagtcgctgagattcttgatcttagtagtaatcttctcaacggaacccttccttctgagatcggaggagccgtctccctgaaacaacttcatctccacagaaaccgcctctccggccagattccggcaaagatctctaactgttcggctttaaacacaatgtaagtcaactcaatctgttatctttctgttaattcactgtgtgtgttttatcgtctctcagtattaatgtagcagtaatatgcagaaatctatcggagaatgaactatccggtgcgattccggggagcattggcagtctgagcaaccttgagtacattgatctgtcgagaaacaatctctcgggaagtcttcccaaagaaatagagaaactttcgcatctcttgacctttaacatctcccacaacaacatcacaggggagctgccagctggaggtttcttcaacaccatccctctctctgctgtcaccggaaacccatccctttgtggctccgtcgttaaccgctcatgtctctctgtccaccccaaaccaatcgtcctcaaccccaactcctccaatccaacaaatggtcctgctctcacagggcagatcaggaagagcgttctgagcatatctgcgctcattgccattggcgcacgtgccgtcattgccatcggggtggtggctgtaactctgctcaacgtgcacgcccgatctagtgtttcacgtcacgatgcagctgctgctctcgctctgtcggttggagagacgttcagctgttcgccaagtaaagatcaagagtttggaaagctggtcatgttctcaggggaagtggacgtgtttgacaccactggcgctgatgcgttgctcaacaaggacagcgagctgggacgaggcgggttcggtgtggtgtacaaaacgagtcttcaggatgggcgtcctgtggcagttaagaaactgacagtgtcgggtctaataaagtcgcaggaggagttcgagagagagatgagaaaactcgggaagctgaggcacaagaatgtggtggagataaaagggtactactggacgcaatcgctgcagctcgtgatccacgagtttgtttcaggcggaagcttgtacagacatctccacggagatgagagcgtttgcctaacttggcgtcaacgtttcagtatcattctagggatagcaagaggtctggcttttctgcatagcagtaacatcactcactacaacatgaaagcaacgaatgtgctcattgacgccgcaggggaggctaaagtctctgactttgggctggccagactgttggcttcggcgctggacaggtgcgtcttgagtggcaaggtacagagcgcgttggggtacacagccccggagtttgcatgccggacagtcaagataaccgacaggtgcgatgtttacgggtttgggatcctggtgctggaggtggtgacagggaagagacccgtggagtacgctgaggacgacgtcgtggtcttgtgtgagacggtgagagaagggttagaagaagggagggtggaggagtgcgttgaccctcggttgagagggaattttccagcggaggaggcaataccggtgattaaactagggttggtgtgtgggtcccaagtgccgtcgaataggccggagatggaggaagtggtgaagatattagagctcatacaatgtccctctcatgacttagagtgattagtcaactacagatgaatcaatcctccttgtttgtatttcttcattccttgttcaattttcatattatcataatatagtgttcgtcttttctataaagaagtttttctcgtgagttcacaatgttgttaagttgtgaatcttcacactaggtttcacaatgttgaaggttggttcataaagtagatcaaaagacaacttctgttacactaaaaagattgttggtcaagacgcccaattatcatatactacaatggacctttgtg

SEQ ID NO: 5394 - DNA, 501 bp, Arabidopsis thaliana columbia
tactcgaaactggttcaatgccatgatgaaagacctatattgggcgcgttaactgcagaggagataaagcagttctcagctacgaattcgccaaggaaatcgccaagtagaagccctgaatcaccgataattggaacagttggtggttactggaacagtcactcaatggcaacgaacaagtacagtcgaagttcttagaactccaattccacaacagagaaagaattccacacatgtttggttactacattgcctttgtgaaattatttttatcactctgtttgtttgtgtgtgtgtggttgataacaaaatcgttgtgttttgtgtgtgatttgatttagtaatattcattctatttgtttgtattttacagaaatttgtctactttatttcacaagtgaatcaaagttttgtatttttttcctccttacaaatccatataatccaacaaagaacacccaaatcggaaaaataggccaagcaaaatggctcaaaatagcg

SEQ ID NO: 5395 - DNA, 1789 bp, Arabidopsis thaliana
cctccatctccaaacagcacttagccatgacttcttcgctcataagagcattgctttgatctctaccaagtagctcccagtagattacgtaatgacccggtatagtcttcgtttctgcgtagcttgtgtactcgatcacacgtgttccttgctctgcaaacaacctcgacgcattctccactgctttttgtagctcagcctcgtcggttttatcggattctacgcttagcagaacattctttctccgtatgaatttgaactgtggagcggaattatggaaccccgtgacacgaagaatgtcgccaactctgtaacggtagagccccgcgtaggtcgtgatcacgagttcgtactcttttcctacctcaacattagcaagctccacaagtgacgtttcgtctaatgatgcttctgctgctccatctccatcgtgattatgtgggaggaattcaaagtaggccatgtttggcatgattgtgtaagaaacctccgagggtttacacatcggctttaggttaatcccgaaataactttcggacgaagcatacatcgtgcaagccatcggtaatccaccgctatagtactccaacgtcgggatatactgagccattgctccagtaacaatcacgtcgaggtacttcgtgttaggccatatctttgtgattatcccttcccaattctcttgtgaacaaaccccaaccaaaaactcagccagttcttgatcaggtttggtcaaaatcttggacatgcggtttttaatggcaggatcgaagattcgagaacttagggttccggttgagatatcacgagcaagttccttccaattgttctggaggaagcttatggcacggaggagaccggaagcaaacactgcgccgagtcggagaacttcatggcgcattaagagaccacatagcatttgagcatacatgctttgggacgagtcggagcagaggatggcttcgttaggactagtgtagacgttgtacggatcgtacggtcgtctcttgaagtggtcgcttttgtaataactcgtgagaaccggacgagccggtaacccacctgacgtctttgactccgacttcacgaataagaagtataaccctttgcctttgtctaatcccggcacgtagctgtagttaaacattttttggttaattttaataaatcgttacgaaaatagatataattaaatgtttaaagtatatatactaacagattcatcacaggcatgagaagactgtataaaagctgacgtcggtccatgtcttcatcaattgttggcatcaacttcctttcaccagctgatgtcccagagctgatacaaaacaagattaatccacaattatagatgattaactctgtctaagagtctaagataacataatatacattttgggttaagtatataccttgtgaggaactctgtgatggggtaagaagacaagatcattgaccggtcaccattggcaatacgttgaatctccggtttaagatcatcgtagataaccaccggaactttggtcttaaatgttttacggtcagtgaatcccttgagaccaaaccgtttcaggtactcagtgtccgagttacgactaagtatctctctaatcactttcttctgaacgaaatcgacgttacgtgtcatctcctcaatgaaccttagagccttcacgtccttagtggacggtgagtgcatcatcggagatcgcagagctgaatcaacggtcatgattaaaatggtatttgtaagtgataatattagactttgtgtttgatgatgaggaga

SEQ ID NO: 5396 - DNA, 1084 bp, Arabidopsis thaliana columbia
tctctcaagtcaagcatctctgctcatgctgtaacaaagtatcgcagcctgattatcattaccaaaaggcttaaaccaaagggagagaagaaatgaaagagacagtagggaagaaaagagacaagggatgaggtaaaaagcagtagggcatgtcatatatgtgtttatgttctttagttatagacgttggaagatctgtgagtatgaatcaaatctagctttggtagtgtattacaaatattttgaagtgaatcgtattgtagcattgttgacctttttttggttaatcaatttttcctatagtttaatgatatcttctacccgaaattaaagtgcaatttctactgtctattaaatttctgtactctggtatcattattttgtattttaaaaagtagctggagattctatacccaaacttatttggtctttgcatttcacataattttatagaatctctacgaaaagttaggccaataccatcgtttgcttgctagcacacatacggacttcattggcacatgagagaacaaaccataaattacgacaatgaataaatgagctcattcacaattacgctaaagcccaaaggcccatcaaattcactgtctatttctttcgtttttttttttttttttccctaaaagttatctttcattcattcatgtcattgtgttcttacaaaaagtgtttgagtggtctaaccacttacaaacctttgattcaaacataacaagatgatcttagaagtaaaacgagaaacatgaaataataaacctgaaacttaacaaagttaaggatatgtcagaaccaaaaaaacatatccaactacttgaagctgctatcctagattccctgtagtcttcaacaaaaattgacagaagtcttgttagagtggttatctctttttgggaggtttcagactctctcccattcttgaagcactgtgtagacgagtttgaagtctaggatcctctgcttctcttcttacttcctgtcttcttgaggattgaccgacttcaaagactctgttgttatcatgcttaggagtgtctgctcttgttggagtggtactagaactcga

SEQ ID NO: 5397 - DNA, 732 bp, Arabidopsis thaliana
  unsure (1)..(732): unsure at all n locations
ccttccaaggtatagcgactcgccgaggaaaatgaaagttgatacggctgctatcaatatagataacggtttgaacatagacaaatacacaggtcccttgtgactcactgcccacgtatgtataacataatatcccgaattcaaaatcccctaagaaaaatgtatattccataaatcatcaaagaccaagaaaaacgaataaatgaacaaacatatgaaaccaaagttataaatataatgtcatgagtaccgttgctactacggtaattaaggttatgtcgaatcttatgacccatgccttcggattgtccttctctgccaaaaggctcacaaatgcacacacaacagctatgcaaacattgtgcacaagcgtcacaacgacggcagatggatatcgacccattgtgtgagcctataaatagccgagttttgagttaccatatattaatataatataactaagacaactatactatttcaatgacattttggatataacattatctagtaaggtataccataacaaggtaagagacggagacaaggatgtattggagagcaagaaggccaccaccgatgatccaatccgaatgtgaagacattagcattggaccgtggtagagagtaccacaagtgcacctattattgacaatattgtcccaacactttggctacactactctttttcctagagatatattttcattcttcataaaaanaaagtgcaagtga

SEQ ID NO: 5398 - DNA, 1332 bp, Arabidopsis thaliana
cacacacaaagaaacaatgttattatctatgcaagctgaatgagatataatgtgacaattctcacctttgtagctatttgatgactttggtgattggaagtctacaacttgtgaatcaagatcggcttctgatttggggcttgtttgactcagcaaatttgcttctcttctgagaagcttttgtccatcgcttggagagtaagctgatgtgttaaaagacccatccatcacatcagtgatctctacatactgactagttgtgatgatttcatctgcactaaaaccaaaggacgccctgtaagcttctaactcctccatgtcttgcttgggacttctgttctgcctattctggttcccgtttccatatccatttgtaggatacacatctgaatccttcgacacgcttaatcttccaccgttttgaggaactgaagggtcgtgatccaggtaaaacttggcaaaagtttcaggacagaagaagtttgactcctgcaaaggtgttgagactccatttgtgtcatacccgaatgtgttgccagaatcactccttgagcatttaccattttgaggcgacaataacccatctcccgaagcccgagagattggtgatctaagagcactggctggacttccgggttaaagagaataagtagcttgaagatcattgtaatgacctttaccagagttcttgagatccatggaggaagtcaagaaacgagcataaggtacatcaggtgaagaaggggcagtcagacgtgcaagctctggaggaggagtgaaaggagcagtcgatggctcggtggtgaaagtagagaaaacaggcggtgagactaattgggtttcatgagcatatggtccagtggcatacatactcgacgaaggacctcccggtgaatttgcagccagagataagtagcagtttggagactgagtagttgaaggaagagctgaattggtgaaggaagcaggagaggaaggtggagccaatagtgatagattaatccctcctgcagcttgattatttaagacaccagcttgatgagctccattaggttgtgaagctgagacattgccaccttcaggaatgcgagaagcaggtacaattctttttccacctttttgtgacttgaaacaagagaacactcctaaacaacctccccaccttttcctctgcaaaaggacacacacacacactcagacacttgacatgtaagtgtaaaagagatctgtgaagcaagaagataattgccatatagtgaatcaatgattatggatctaaagcacgaaatggtgatcttatagcttacacgcatcgaatctagatcataacca

SEQ ID NO: 5399 - DNA, 638 bp, Arabidopsis thaliana
aaaatcactaagcacgttctataatgtaataacaatatatcaaaattttgatatatataagatgatgatattatttattaccacagcaggtttcattgaaggaatttcgtcaagagttcgatgtctggtatggttttgatggggactgggtcctctaacgttccttctcgcaaatgcttcgaccgcacctgagaatttatcgcggatgttccctactgtaagacatagacaggatcacaaaatcagaaccgaccaccgtttagcgaagaagagttatatgattcttaactgtagaaaaaagtcaagggttacctgaaatcctttcaggtttttcagcagacggtcccgcacccatccctggtttaccggtacgatgctgaagaagagatcaatacgaaacgaaagtgagtatgtatagtcatactcgatagaaaaatctacagacatgtgtactcaccctttcatgtgtactggaatgggacctggcactactctgagggtgtttcaatgcagtccagtcgaatacataatcaaactgataacctgataccgcgaatccattcgttaaaagagtgaaacatttatagaaatatcaaggaagatttcaatatctagaaaatttgacagtaactagtgag

SEQ ID NO: 5400 - DNA, 638 bp, Arabidopsis thaliana
gtttccacacatttcgcttcaatttttccgtttccttccacggaaaatagtaatacaaaatcagaaactcataattttgttttattcttaaacatctcataaaacaaaatggaatgaataaaataatatttcggcaacactaacaaaatttactactcaatctcattttacaaagtcattatttcatacccttcccttattacaacaataatacaaagacaaaatcaagattaagaacaacacaaaaaaaaaagaacatgtcagaggctcagcgatcgttccaatccagtcctctgccccaaacttgaacagctactacacctccttacacaagtgtccacaccatcacacgtgtcatgttcttctgccgagtcctgatcaggcggttcttgcatgcccaagtccttatccgagaacagctggttactccggcacaagggacatgttacgtatgagctcagccacgtgtcaacgcaatctacgtggaacacgtgaccacaatgtggtatcactttaactgtttcaccttcttcgaaatcgctcaagcagataaagcaatcttcgttccgctgcttcgctgctttcgtgtaacggtacactggcagagatcgaacggcctgaaatgtccaatcttgccg

SEQ ID NO: 5401 - DNA, 561 bp, Arabidopsis thaliana
tctctgtttgcttcggtgtattgtttcatcattggttaggtgtagatgatcattgagctttagacagtagcttgtcacctatacttttagttgcacgttgttctttggtagtatttgtacacaacatttaatagattataaataagtaacgttaaagaaacatcttgacaacattgatgatttatttattgttagagaaaaacatttcctcacataaagctggcaaattcaagagcatcatctaccacatccatgattttagatttcgaattcaccactctacagttcaatcttatttctccttgtttccctgttaaaggtgaaagactactcatccttattattgctttcacgaacgcatcgaaaaatgtcccttgaccatcagcgtatgctcgaactaaagggagagtgtctgcagcatcagggctagagaacaactcttggtcactttggataagtcctttgttctccttgagattcacatagtatttgttgtcaaagagtgttggtgtacgtaaatcaaaatctaccaagacactctggtttccattacgtggacat

SEQ ID NO: 5402 - DNA, 547 bp, Arabidopsis thaliana
tccttatcattgccttcgcgaacgcatcgaaaaatttcccttgaccatcagcgtattctcggactaaaggaagagtgtctgaagcatcagggctagagaataactcttggtcgctctggataagtcctttgttctccttgaggttcacataatacttgttgtcaaagagtgttggcgtacgtaaatcaaaatctaccaatacactctggtttccattacgtggacattgttttctgagtgtggagaggtaagatttatcaagggttgggtcgggtaaaccagtgttactgaagttataaagccgatccattatgaattgacattggtttttgccaaaggtgtgaccacctaaccaaatgaaaatatagaacgaataaataaacttgaccaataatcatattgagttattagtgactacaactatagatgaaaatgttgccaacgaaataacgtaccagaaagagcaacgagatcagaagcacggtcgagtccgacgtttttgaatctatccttaagttggttaagggtaaagaatggagctggaagg

SEQ ID NO: 5403 - DNA, 841 bp, Arabidopsis thaliana
caggaagctcgctgtaacttctctgatcaaatgcatacatccgtcaaaatgagtgtcaatactaagcacagacgctccgtttgcaatcggctgcacaagttgagccatggagattttatcgcagtaagaagacaatcgaggggattccagcggaagatcagtaagcagagagagcagcggaggtatctccagtagaagcgcaaccaactccgatgactggtttgttcattttccggagacgattcacctgagaaacaaaaaaataacataaagttgtaaactttattgaagatggttatacagttgtaaactttatgaaagatgattcacctgagaaacgagaacactcatgcccagatctttaaaggagccagtgtggctgattccacaatgtttcacccaaagatcgttcatttgcagatactgtttaccaaatctctcagcccagaagagatttgagtttccttcaaaagcagagacgatgtcgtcatcgtcgatctcggggagtacccactctttcttcgaccacacgcctgatccgtacggccaatttgttttaccgacgcgagaatcgaaaaggttacgccagaattctccgtcgtagcgtttcaaggcggcgaaatcatgctggacgtcgaggagagcaccggattgtgaacggtagacgatctcgtcgagggagtaggattctgttgaagaaggtggagcgttgaaagggacgtaacgtgcggagaggttttggagttgatgaggacggcgacgagcttcgtctcgaatgttctcatcgggtgaacgacggggtttctgtggagtctgtggaggaacggcgggagaggcggag

SEQ ID NO: 5404 - DNA, 828 bp, Arabidopsis thaliana
gtcaccagttctcatgaagtattgacactcgggttgatcaggtcgctgaggaaactcttttgaggtggaatttgaagaaggcacagattgatatgttcctgtatatgcagtcgctgaaggagataacggcgtgagtccataaatagagcttgatccaatagacggttgagttccaggcgaaggcattgcacttaaagaagcctaaaaagtcgatagattcatttacaaaaagagtagcaatgaagaatcctacaaaagcgagataaaggcttagaagatggatttacctggtaaggattccaaccagagtatggaaccattccaggaggcagaaccattggaggaccgtaagggctttgaagatatgaaccagttaaaaaagaaggcctagtcaaaactaacccatattgttgagacgaaggaatagattgagattgaagtgtcggataaatagtctgtagctgcggctgtggctgtggctgctgctgttgcggctgctgaggtggaccctgtacagcgagtggcacgggatggttgaatctacaagtcaaaccaaatttacactgaccggttctcaagtaataagagcactctttctctccctgtaatcaaaattttgaagagcttttagagatcatacaatacaatgtggaagcatccacataaccattagagagattagaagacaaaccgggcgtaatggatatcccaaataacttagcgagacaggcgcaacggaaccaccaccacctccttgcctaggatgatgatacttgcaagaagcaccgaatttacacgtaccagttcgcataaaatgctgagaaaaaa

SEQ ID NO: 5405 - DNA, 1517 bp, Arabidopsis thaliana
tattttgggacatgccatcacaaatgaaaagtagaacaacaaaatgtcataacaccatcaacttaaaatccataggatgataagttttaaaagaaacaaaagtcaagaagaataaaaacatagattaagaaatcaccaacgttaatttaaaacaactaacgtgttagacaaagttagtaaggcttctccccaacgtagttacccggagggtcgtagttgcaagtgatgaaaactcctgcgccgttctcgcagacaactctagcgcaacctaggcgcctggtttcacgccacacgatctgagtgtagtgaccacacataccatctccttcacacgtgttggtcatgtggttgtaggacttagcctccacagtccatgactccactgcgaaagtcgatgtaaagtctgagccacttccccagaacaagttctcaccgtatgggccggtcgagtgggttaaggagcagtcgtatctcctctggttagcccaccatgttgcatagcttgcgatctttacgtcccacaccagtggaggcaaacctgttgggaatgaaaattttcatatcaatatacaacattactaataatttaatttgatatcacaattatgttaacaaatgttatttaattgttcgtttctttagtgtagtccatttccttagaacatgtatgtaatatataaggtctcaaacaaaacaaaatatatctggtttaatttctttgtatctagaaaacatcaaaatacggatatatttttgttaatattctatatatatcctaatcgtttttatcttgtagtttcttatgaataggactacatatgagtatgacaacaaaaattacaaagatatatcataagtgaccgtttatgttgtttatggtcatgcatagtcttataactatgaccacatcgggtcttaattctatttatagttaatatatgaaagtacctagaccgcctcggacagtattatgtggatcaagaaattgttgttcgaacgagcccgtgggtggttggtatgtgggaggaggctgataaaggataggtttggggctgggagttgggagcggctggggctttgcaacgtagggaggagggctcggggttataggtcgctgtgggcggtgccggtaatagtctgcatgaacggcttggatggcgaccaagaaaagggcgattgcgaaaactatggcttgggttgatgttgtggtcgccatctgttttcttcgtggagtggctccaaagattttgttttggatggtggtagaaaatgatttgatgagggtgattatttatatgtttaagttagtgcttaattaattatgacaatgcaatttgggagtcaactagaagtggcttacatgttcgattatggttaccacttaccactttgtttcgctttagtaaaagcgagagagttgtagtcttgtagatattttaaccatgcaagtaggtattttatatacattttttccttagactaaagatcaataacagagattaaattttctaacggca

SEQ ID NO: 5406 - DNA, 1030 bp, Arabidopsis thaliana
tcatcccccttccctgggagcaaaatccaatcagtctgactagattcagatggtgtgtgctgctaatggtagcaacctccattctaaactgcttctctccttgctctattccttcaagttgcttcactgcaaccacggttctattagtgagcacgcctctatacacagttccaaaccctccagctccaagcttctctttgaaacttttggtgcaacgctgcagctccttataagtaaactgcacaggtgcaccagaagcgtactcaagcaaagtgtagtgagacgacaaagttccaaaccgaggattctttctacagcaacaccaccagagacctatctctactgcaaccaaaccaagaagcccagctattacagcaaccgcgacaatccacaaatgcactttcgagttgttatcgtcgccttttgttgctctttcgagtgtgttagccaccactggaccacacactttaacataagaagtactcggaaccgatggccactggtacccagtaaagaaggaaccaggatgtttctgccaacaatttccagacccatcagacatggaaacagaagcaagacacaaaacactactaagacaattagctctacaaggcgaactacccgcaaagaaactctccgagttcggatcgtcttcataagtaaacaacctcgtatgaaccaaatcaagcatggttgtattgccagagcaatcacttagctccactttccttttacatccctttcttctatcattcacatcaacaaaatcaaagttacgagacggacacgaacaaatcggattagtatcattgtaactacaaatcccaaagtttccacaatatccataaacaagacactgatcaacagcagaccaatgagcattcacaggtccactgtttctactagcagagctgtagattctcaaattcccatcatcatctaacttcaagaacctaaacgtattgctatcaccgtaatcgccactataaacgatttcagctcctccaagaagattggttcgaagatcgaa

SEQ ID NO: 5407 - DNA, 906 bp, Arabidopsis thaliana
cctgttatgcttagagatgcattctgaattttataggtcaggacaacgagcccagctgcttttacccgtgcaactgttgttactgctgtgaaatattcagtagtggaacgacctgagaaattagatgaaatcatcttccctcagatttcttctttcctcatgctaatcaaagatggtgaccgtgtaagtgaaattttttaacccctttctcctgatacaacataaaacatcaatagacattggataataatgacactttgctgtgtaatcctaactttttccttctgttgttgcagcatgttaggcgtgcagctgtctcagctctgagtacttttgctcattataaaccaaaccttattaaaggacttctccctgagttgttaccacttctttatgatcagaccgttattaaggtaagttcttcagtgattcagcacagttgttatctgtgtcatataatacattagaaggttttatcttccatcgcctgagacatttatctattgcagaaagaattaatcaggacggttgatcttggtccattcaagcatgttgtggatgacgggctcgagctgaggaaagcagcttgagagtgtgtgtatacactggaggacagctgccttgatcaagttaatccgtcttctttcaatgtacctatcctcaaatccggcttagaaggcgagtgttttggtcttcctctgatgataattaagctactgtatagccatttacagttattagcttatacacatgatctttgtcgtatgcagatcagtatgacccgaagatgctttgtcatcttatacgctccgtactagcagacagatggacatcagccgtacttgcaggtatgtgtaatatatagtttccaaaatcattatatcaggcacggatcatagagcagat

SEQ ID NO: 5408 - DNA, 545 bp, Arabidopsis thaliana
ctatttgtgcatggattcaatggattgctacacgctccacttcccggactggctgactatcttcctcgcccagggcctgggtggcggcattaacaccgtgctgccactggtgccgcagattggcatgatgtacctgttcctctccttccttgaggactccgggtatatggcgcgtgcggcgtttgtgatggaccgtctgatgcaggcgctgggcttgccgggaaatcctttgtgccgctgatcgtcggtttcggttgtaacgtaccgtcggtaatgggtgcacgtacgcttgatgcaccgcgtgaacgtctgatgaccatcatgatggcaccgtttatgtcctgcggcgcgcgtctggctatcttcgcagtattcgcggctgccttcttcgggcagaacggtgcgctggcggtcttctcgctgtatatgctgggtattgtgatggcggtgctgactggcctgatgctcaagtacaccatcatgcgcggtgaagcgacgccgtttgtcatggagttgccggtctatcatgtaccacacgtctttag

SEQ ID NO: 5409 - DNA, 1153 bp, Arabidopsis thaliana
tcaacaagcacagcagcaagagatgatgacccctccaacaggtcaacgaatgatgggttgactcataaacttttgtttgttcacaatattttttctgtcttttatttctttgttactttctatatttttcttggccaaagagaaaatgtaagagagtaatttcatgttcgtggatgaacaaaacatgtgtgaatttcacgtaatttcttcctatttactacacataaataaatttcttcaagctcgtaatcgagataattatcaaattatcagtaattctcaataagattttcgatttgaattggagaaaataaacttcttttacagattgggtgctggagttcttattgttcacagttgcaaagtagattattaaaatgttaagtttcttcaatgaatatgatggattagtctatagtagacgaaaataaatagatttcaaatctcgagtttacgagggaaatggtccaatgcacaatttcttaattcttatataaggttcaaaaactgcctctgatttttattttatttttaccattacttacgaatttagttgggttactagttttacagttaacagtttaaactctaatctctcgcgcgtataaagtgaaacgccgatgcaaaaacaaaaaccttacatcccaaaacacctacgaatcttctggccaagtccaactctttcaccagagaattcaacatcagtccccgttgtaacaatctccggctccttgaaattcgctttctggcttaactccttgaacgcgtcgaccacgttctgcaaccgagcaacgaactcaatgaggagagacgcgaacgtcgcgagagacaatgcactcgcgctttcataagtctttgttgtctccaccaacggtgaagctccgttagtcgtctccagatgcggcggaagtacaagccgtgcaggccatgacacctgttttgagaaagtaggtctatggttcaacgcttcacggtgattcttctcgccccagcttggtggtatctctagaactgcctcgcttagggatttgaaggcgtagattggaggcgcgtggttttctggtggatctgaatcttcgagggagagcagttcttgaggctctgattccttggtggctcggtttccgatctcccagcattcggaattgacaag

SEQ ID NO: 5410 - DNA, 1011 bp, Arabidopsis thaliana
ccatgactcttctcataggtttatttctccccaaaatacatgtatttatccatgttaattttttttatttctttggcttaagtaataattagatcaatacattttagaccaataaacgtttgaacgtctttttgcatcagaacgtgaaattaatgtcaaacgcaaacgcatgtacaaatcctgaacaaacataccgcttaggtgatggatggttgcgtaagaacaaaacaccttaaacggcagcgttttgtaggagcaccgcttcgcacgtttcttccatatctctgatcacgtgatagtcgtcttcttcagatcttttatcactttcttcttcccggagaaaatttggccctaaatcactttcccgggaaaatcaaactctggggaaagagttgaaacaatgtcacaaggcgatacagtaccgcttcatccatcgtctcaatcagacattgacgagatcgagaatctgattaacgaaagcgtccaatcaggtcccggaaccgttctcgccgctcgtccaccgagcccaaccagaccttcgattccagtatcttcttcttcttcttcttctccgtttatgcaatcgaatcttccaccgcttcatccgtcgtcatcagctcagaaagtgacacatgtccccgttcctccgcctcttccggcggtaagtaactccagcaatttccaaggagcgagtgcttttggatctccgccaaatacattgacggagcctgtgtgggatactgtgaagcgagatctgtctcggatcgtgagtaatttgaagcttgtggtgtttcctaatccgtatagggaagatcctgggaaagcacttagggattgggatctttggggaccttttttcttcattgtgttcttgggtcttactctttcatggtcagcttccgttaagaaggtaagaacttcctttcagctttgttcattggaagttggacctttgtggatgcggaccctgtacattggctatgcgactgtgtgatcgatttgtgaacttgg

SEQ ID NO: 5411 - DNA, 754 bp, Arabidopsis thaliana
ggatcctctagtaacggtcgatgaccgctagaatagccggtcgtgccgggcaagagctagccaccgttgctgaagaagctaagcggtgctagacgagagctgaccatcgcggagatttggtacataagccggcatgaaaccggacgacaaagaacgcggcaacggaaagccgtgtcacgctaaactaacggcgatatcggaccacgtccgaacggcagaataaggataaagtctccctctctgaagaatgttagagagagaagagagcgagactttttttcactccgatccatttttctaagaataagttggtttgcttttaacgtattatatattaatattaaatgtagttataatgtaatcattaaaaaggtaaaaacgatagggaaaagttacaacagtcaaatctcaaggtaaattattcgagtgactagaaccatttcatgatacaaaacttttgaaagcagaggataccctccaatggggactcaagctatgaacttgggtggctttctaataagagttgcttgttcaaaggcaaaagcaatctcaatgagctttggctctgagaatctcagtcctccaaagctaatcccatatggaactcctccactatcgtatcctgcagggacattgattccaggataccctccaatggctaggacagagctcagatctgaaccaagtgtcactattgcatctaacttgttctctgcgattagctttgcgattccattcctcgatagtgctttca

SEQ ID NO: 5412 - DNA, 546 bp, Arabidopsis thaliana
ctttctttctcttgaatctccatagaagcagagcaaagattcctatcaagatcacaccaacaagaaccgcgacaatcactgcaatctttgttttcctgttctcccctacttcggaatcagcaagacggatatgaagcgaagaaccaccagcttcaaactgttgtaaatccactaaatcttggttccaaatcatgcatccaataccaccaacaagagaataagcattgcaagaacaattcctcagacacctctctctgcaatcctcaggatcaacaagattatgttcaggaatttcaaaatcaggcaacttcacagatttcaaagtcaagaactcatcctctccaacactaatgttcctttcacacttcaacggtgttcttcttctacaacctctactccaattcccaacagaaacttgctcataaccatgaatacagctacagattccattagagcccttcatatcacaaataccaaacttgccacaacgattatactgatcacactcactatctggctcagactgaaacttagtccacttcttca

SEQ ID NO: 5413 - DNA, 588 bp, Arabidopsis thaliana
gtttcatctgtctgattagaacacaagtatgagattgtgaagaggcttcaagagatgaagcatatttgtggcatgactggtgatggagtgaacgatgccccagctctcaagagagctgacattggaatagctgttgctgatgcgactgatgcagcaagaagtgcatctgacattgtactaaccgagccagggcttagtgtcatagttagtgctgtcctaacgagcagagccatcttccagagaatgaagaactacacaatctatgcagtttcaatcacaatccgtatagtgatgggatttatgcttcttgcactcatatggaagtttgacttctcaccattcatggtcttgatcgttgctatcctgaatgatggtactatcatgacgatatcaaaggacagagtaaagccttctccacttcctgattcatggaaactcaaagagatatttgccaccggcgttgttcttggcacttacctagcagtcatgactgtagttttcttctgggctgcagagagcactgacttcttctctgtaagagagttctatcttacttttatgaccagctcgagtaagtgtatgtgttga

SEQ ID NO: 5414 - DNA, 726 bp, Arabidopsis thaliana
cctgaggttttgcacaaagttgaaggaccaaatccagaaagtaagtagaagcgttgtcaatacaattttataactttaacgcttgacccagccattctagggaacaagaccttcacatggtcgaaaagatttctcctataacgaactacgaaacttatttcaaactaactataatagcaactaaaaagggctagtgcttgaatcaaggaaagagcacaagatacaaatacttgaaaagacatatgttagaaaacgaggtgatatgaaataatcagatacttacagccaggtttgcatgctacacaaccacttatcaggcagcttctcagtattcaggtcatagggcagtagccgccatttctcacaactctcacattgggcccaataatctaggtcaacactggtggaagaaggtgcaaccgcaaaatcaaacccagtgtccatgctattgtgacctatatatgcggcatccttcaaaggcatctttgataaaactttatcaccaatacgatatttgctacggttctgttgcaactttgtcggacatgtttttttctctttcacagcatgcaacccaacaaactttattttatttgcgactctgggatcactttcaccatcttttctacaaccttcctgcaagttactttttgttgtaacccatcagtagtaagacttgcccacctaaaccacaagctgagttatcctggctagctgaccagtgga

SEQ ID NO: 5415 - DNA, 1026 bp, Arabidopsis thaliana
agaaagatgaagattggtgtctgttgtgataaagaagaagcttcggtgttttgttgtgcggatgaagcagctctttgtaatggttcgatcgccatgttcatttcgccaataaactagccgggaaacatctccggttctctctcacttctcctactttcaaagatgctcctctttgtgatatttgcgggtacgtaacaacaaaatttaacacttctctctttttttttgcctttcttgatagaattataatcttcacttggaaaatttgtgagcttttagatatgttatagtattgatggaaatctggtttcatgaacggatgtttcgggtgacctgagtcactttttttttcttctttctttccgagatttgtttgttggttggtgagaaaatgattatttggcaacaagtttacttcctttcctagcaaatttgaggtttcacacaatttttgacgaggaattttatggccacgaccaaatattacttttctcaaaaagagaacagagattgagcttaccaaacaccttggtgatttatttggttacacactaatcaaacttaagatattaaccaattaaatcgagttattagttattacgatattaaaatactttcttctttgggaaggtaagccgtggagaaaaggatatttctttttgctgttcattaaataaaataaaacaataaaatggaatgttttttgtttgaaaaggtcaaatctagcagataagtatgttttaaaatagatggatacaaaacaagagtcttcttgattatctattattaaatggtactaaacctttatacatatgacaggagaggcgtgcattattattttgccaagaagacagagcaatactatgcagagaatgtgacattccaatacatcaagctaatgagcacactaagaaacacaatagattcctccttaccggcgttaagatctctgcctccccgtcagcctacccaagagcctccaattccaactctgctgctgcatttggtcgaccaaaacccgaccaa

SEQ ID NO: 5416 - DNA, 1033 bp, Arabidopsis thaliana
cttcttaatcacaaatcatttttatttcatagctcacataattttccaaatgcttttaaactgagatgcattacctcggttgaggaagcacccccgggtcaacagtcatggacacgttcatctccgtcggctcgctaaaagaaatatctccagaatcaccactggttcttgctctgcatagactctcttttagctcagccacaacctgactcatcgtgagtcttgtcttagtactttcagacgcacaagccaatgctacttcagtgatcttccaggccaagccagcgttgaacctctctcctagcttcggatccacaatgcttttgatatctcctttagacagcatcaagctaactcggtcgcttatatgtctgttctcttcagtccttgaacgtgaaattaccggttggcccgtgattacctccaggagtaccaccccaaagctataaacatcactcttctcgctgaattgctgcatcgagtagtgccttcatttcaaataaccatagagtagagaaacaaatgaatatagacaacaacaaaaatagctgagatttgaggttcgaagagaaaagctttactcagggtcaagatagccaatagttccagcgacttcagttgaaacctgactgtcaccttccagtgtgaagcttctagataaaccgaagtcagcgatcttggcctggagcttttcgttgattagaatgttcgtaggtttcacatctctgtgaactataggaggtttgcatccattgtggagatactctagccctgtttttttcaagcaaaccaaagttttattgattttctcattctatttttatatgtaattttgagatacagtaatggtgtaccttgtgctgcatctaatgatatctgtaacctttcctcccagctcaaaatactcgagtttttcccttaattatagaaaacgacaatcagattaagttcttctgattataacaaatgacaagtgaccaaaaattgactacatgaggctgacctgacaagtagtctcccaaggtcccactac

SEQ ID NO: 5417 - DNA, 774 bp, Arabidopsis thaliana
ccatgccgacttctaaaagagaaacaggtggaaccttaagagccacgtcaggtcctctacagttccttctcaagaaattataaccgaaattaactgctaatctcttcatcaccgatgatccttgtttcgctttcacatgtgaatgtcccaatataaacgcagttcctgcttcttgcgctgccagcaaatccctcagctcgcttctcagttccgcatctgcttctgctgacgatgttgatccttcgtcctcgtaactgttttcctcaaccgcaaacctcacccgtcttatggtggcggttggggctggttcggccatttgtatgacgtcttccatgctttcgactgtggagaatccgatggagacactctctggttggagattgtcttcgatctcgtaagctactgttccgatcacggctagtcttgactcgcttgaggattcgttggactggacagaacgagcgttgtcgtcttcttgttgtgttcttttgtgccaatcgtaacggatgaaatccgccagcttgcttacgagctctgtttcgaatgagtccacgtcttgatggacgtcacggtatccataccgaacgatgcatctgtaagagcggtggtcaacgggaccaacacgacccacgaggtatctctcagcaggtggaacgaacgggacagggacagatttcacgcagacaaagacaagaacacggtggaaggcagggaggttggtgacgaaccgggagaaattggcggggattctagaggttaaatccgtgaagacta

SEQ ID NO: 5418 - DNA, 952 bp, Arabidopsis thaliana
aataaaagtagaaaaatgaagacatctttaataaactgaaactttttgtgcatggttctttgtttacgaaagttcaatagtactattgatatatagaatatataaatgcaaataataaaagaatgtataaatatcctcaaggaatttgaaacaagtgattgtgaacaaaaaaatgaaaaagaaaaggtgatcttgttggatatatatgaagttgcggataatgtcacgtatgtgtgtcccgtgagaaagatggggacccatcgttttcaattgtacgccatctcgtatttatgagagacctatgtctatctaacgtttccatttattaatgttatctatcacatgtatatttcatacgtgatcttgccttataggtttgacaaagatttgatctttcaatctcaaaaacttgtaacctaatagtttgtactgtatttaaaaatattgtgtgttgtgaattgtacacaacggtaaaacaaaaatatcatcagtttctctattctctcaacagattgacttgcatatgaccgatttcattttggtcgttcgttaaaccaaaatacatattcttttttttcctaaagttgtatttaatattttctcattaatatttcaaaccccctcatgtagaaaaaaaattagagagtttaattacattttggttcatgatgctttagaaaactaaactaaataaatacttttcacacttcaattagctctttcatgacttgtccatctttcacaccaaaagatccattcgcttcagcatcagaactcgcatgaacgccataaaacaaatacacgagcacgatcaaaccggagaagaatccaaaccggacgtaagagggtgcgtccaacgaaccaagcaaaaaaatgttcaagaatatcgacacgcacggggtccacggcatgaacgggactccccacaactcaggtttcctagcctggggaa

SEQ ID NO: 5419 - DNA, 536 bp, Arabidopsis thaliana
caaatccagaaattgaaaagattcatgaagcaacaacaaaagtgattgaaaggaaattctgttccaaattccttttgacgtaaatgccaaaataaagtaaatgagaaagaaatgccaaattagttttgtaacatagtaaattaggcttcgacaacaagataaatagataagaaatagtaaactaagactagccatccttttctctcctccatattttgcttctagaattgctttttaaatgcttcaagtctcaacatgttctgtgcaaatcgtggcttttctaaactgctttgtctttgatccttttgcgtagtgcaggtttcttgatttggaccaaacttggaacataagagcacacatgtagccgacacatttggtttgtgagtactccaatatctaaatttattaagtatccagcctctccaataatgctaaatgttcttggaatgtcttctgtcttcattaaaatcccatggcgactttcttctcctcgtcaatgaagtatcctcacatatagttgtgaccaatatatcagg

SEQ ID NO: 5420 - DNA, 815 bp, Arabidopsis thaliana
tgcagcactttctctgaagatattgtaagaaagtatgggagagaatcttgtttcagatgtcctgaaggtctagttaaccaatccggtgtactttctgatgacgaagaagatgaagatgatgacgatgatgatgaagacgaggatgaaggaggaggaaaagttgcttctcttgtaagcaaccaaatgacgatgaagtatggcttagtagcatcaaagcaaatggtgggtatattccttactgtgtggatgagaaaggaacttattcaacacgtttctcatctcagaatctcctccgtcacccgcggaatcatgggttgcttaggaaacaaggtacagtactttaccactttcatacttaaaaaccataacaagtaaaaaaaaaaactctgtttctgatattctcttcttcttcatcatcatagggatgcatagctgtgagtttgcagctctacaagacgagcttctgcttcatctgcagtcatctagcttctggtgagagagaaggagacgaacgccgcagaaacttagatgtgatcgagattctcaagaacacaagtttccctagaatatgcagaacctcttttactcgtgtccctgatcgaatcacaaagcacgagtaagatttaagaacacaaatatcatcgttaacacaaatactattttctgccttggctaatcttggggtttcttaccgcattttaatatcagtcgggtcatatggcttggagatttgaactacagaatagctttgagttactcagaacaaagccctcttggataaaacgcttgggacactcttctcacaaagatcaggt

SEQ ID NO: 5421 - DNA, 588 bp, Arabidopsis thaliana
gctaagttccagaagaaaaagattgagcgactactcattatcgatgaagaaagataagaatgaaccatgaacatgatcttaatcttcagtttcattaactcaagacttgaaataaaagctctgtttctgcgtaataatagagtaatatcatctcgttggctcctttttccttcctcctatcaaagctcattgatttgtcgcttagagtgagacaagcctcaacatgttttcatcatatcgacacttttctaaatcgctttgttgtttcgattcccctccttcaggttgcttgatttgtactaaacttggaacataagagcacagatcagtcctacattcttggtctccaaaatctccaacgagatccaatcccctcaagtatccagcctctccaatgacaataactctctcgcggttacgtccatcaaaaccaaaggcgactttcttctcctcgtcaatgaagaaactttcacttataaaggaacataactattaaatccagctgttgccactctcaagaacttgctccacaaaacctctccagtctcaatcttggtcgtaaccataagtcaagtcatatggatttga

SEQ ID NO: 5422 - DNA, 1234 bp, Arabidopsis thaliana
ggtaagaactttgaccttttaagattgtgtttttctttagtgattatgaatatgtaataactctgttacgttgtgtttggtttagaaactggaggagtaccggagattgctgagtcttttggtaatatggaagtgactgatgagtctcctgatcagaagccaggacaatttgaaagagactttgtgacggagaagcaaagaattcgaagagtttgatcaggactttgactctgttctcggtaaggattcgccggcgaaatttccaggtgaatcaggagttgttttcccggtgggctttggtgacgagtcaggagctgagctggaaaaagattttccgacgagaagtcatgattttgatatgaagactgaaactggaatggacacgaattctccatcaagaagccatgaatttgatctgaagactgaatctggaaacgacaagaattctccgatgggctttggtagtgaatcaggagctgagctggaaaaagaatttgatcagaagaacgattctggaagaaacgagtattcgccggaatctgacggcggtttaggagctccgttgggaggaaattttccggtgagaagtcatgagttggatctgaagaacgaatctgatatcgacaaggatgtgccgacgggatttgacggagaaccagattttctggcgaagggaagacctggatacggtgaggcatcagaagaggataaatttccggcgagaagtgatgatgtggaagtagagactgagctgggaagagacccaaagacggagactcttgatcaattctcaccggaactttctcatcctaaagaaagagatgagtttaaggagtccagagatgattttgaggagacgagagatgagaaaacagaggagccaatacagagcacttacacagagaagtttgcttcaatgctaggttactccggagaaattccggtgggagatcaaactcaagtggcgggaactgttgatgagaagttgactccggtcaatgagaaggatcaagaaacagagtctgccgtgacgacgaagttacctatctccggaggtggaagtggagtagaggagcaacgaggggaagataaaagtgtgtcgggtagagattatgtggcggagaaactgacaactgaagaagaagacaaagccttttctgatatggttgccgagaaacttcagattggaggagaagaagagaagaaggaaacgacgacaaaggaagtggagaag

SEQ ID NO: 5423 - DNA, 889 bp, Arabidopsis thaliana
tgattctgaaatgaatactaaacttctttttgtatgatctgaaataactttagttttcatctctgcctcaataacaagaccgacacaacagctttgagatacccaaaagatcacatacaacttccatatatcatgtatacactattatgatacttgtaattgaacaaaagcatatattctactaggtacagaagatgtacacaaggggtcttatgcgtcctacttacaagcatgcagatccgaagctcttcttctgtcctcattttctatactttcacctattctttttttattcttctgtgcatagtaaatcagttttccctctgcaaatcatagaaagggcatgagcacaacatgtcatttcttactgtttgccttcttcttcttaattatatttctgcatcttggtttctggagaacgtttcggataaagaataagtgccaacgccaaagagaccataagaccaacaactccactaaaaggctgtgatgggcggctccctgcaatccaaaccggggaacttgggttgtaagtgaggaatccacctgactgtagtataaagcttgatgctatgattcctgcccgcaacccaattggaacaattagatttccttggcttctttcacgagcccaagtaagcgccaacgacagaagccaaaaccctggaattgatctcagggatctggagaattcgacaagatactaaaaacaattagtatataatccctaaagagttaagcatcacgctagtgtactttccatgaacaataattgtgtatactacaagatgacatacacatatagccagttcttaacaataaaatacttaacaaagatatatactctggaacaaggcaaatatgagtcgtgtaatgataatgcttgatg

SEQ ID NO: 5424 - DNA, 766 bp, Arabidopsis thaliana
gataacagaactcctgttccatccggcctcccctctatcattttttcaccaaaaaaagttagcgagaggctactaatacaacaaaatcataaagagacagggtttataaggtcaagactatgcaacaaaaatgtctcagagaaaccacgaaacattaaagcggatacactcaagttccaatctaagcttgttgtttaagcgaacctgtgcagagaactcgaaagagcttgttgttttgtgcagcagtcttaagtatttccagaacaactctagagagtccatgaaccaatatggtacaaccatcgaatataaaatcttgactaagcattgcgataatcctacgagcctgcgcaataaccaaacctttataaaccctcttctatcaaatactaattgatctacttcattgatatatgtacaaaaactactaaatatgagccagaagccataaaaggaagtaccttgcaagatatttccccaaatttctcagcacgttcaagaagacgagacttagctgaattgaaatcttcatattccaaagcagacgttctcgtaacgtatctgataaacaaatcgcatccagctgtcaaagagatcgacgttttgtcccacgactgccaaaatttgaacatttcttaaatcaacaaagcccacaaaatcgaagaatgaacagaaagtgaaaaatgaattctcaccttgagtgtatcagaagcctttttgagctcaatttcaagctccatcatgagcgttcgctcgcacgaataac

SEQ ID NO: 5425 - DNA, 657 bp, Arabidopsis thaliana
ttaggcgtgaaagctgggttacgctccaagtcattgggtcgggcctggtcgtggtgataggtgggatcaaggttatgacgttaccgcgagttcttggattattgtaacggtttgaggaatgggtttgtggccgagctgaacaagaagatgaggaatggttatagtgatggcttcttcgttgatttgcttgggaaagacgtgaatcaattatggagagagtacaaggccaagtatggtcaatgaatacaaacgatacaaaataatctcaatatggtaatgaaaataaaataaaatggtgaataaaatgaaaaatatggtgttgttaagtttctattggaaaacacatacattacactctttgtattaaaatataagctcttgctaaaaatggtattgtatgtttagtcaaagaaaatatattgggggttgatttagaacgttatgtcactgtttattcgtaatcgtggccgaataaaaactctttcttgtaattgtccattaaggtatgtgagaagaaaaaagaagtaaaatctatgggaatataaagttaacgtctcgcaacaattaaacgacatgattaaataggtgacttcggtcaaaataaaactttgaacaaagttaaataaatcagtctttggaataatttgtaatctcgtg

SEQ ID NO: 5426 - DNA, 687 bp, Arabidopsis thaliana
cacgagagacatgattggtttcatattttgtcgacccatgggccatgtaataagagaatgaaagagacagcatatttgttttagaggcgttcatgatttgaacttataaatgtcccacattttaataatccattttttttggtaatgacattttaataatccattaggcaatggccatcagtttataagaataaaaaaacaaatgatcaaagatatttctatttgcagtaacaatatatgtagaactgttattcactttctaatagtctaaatatgtgtggtgtgtagcttctacgtagacaatgtgcccatcagggtttacaagaacaatgaggcaaggaaagtaccatacccaagattccaaccaatgggtgtatattccacgttatgggaagccgatgattgggcgacacgtggaggaatagagaaaatcaattggtcgagagcgccattttatgcttattacaaagattttgatatagaaggatgtccggttccaggacccgcagattgtcccgctaattcgaagaattggtgggaaggcagtgcgtaccaccagttgagtccggtggaagctcgaagttatagatgggtccgagtgaaccatatggtctacgattattgcactgacaaatctcgttttcctgttccacctccagaatgctcggctggaatctgatccaaaca

SEQ ID NO: 5427 - DNA, 1665 bp, Arabidopsis thaliana
tgaaattgatttaattttcttgtttaatgtgtttatatggggttctttttgtatgcttcattagtgataagtgtttttttcattctttgtttttctgttgaagttttgcggatatttttaattgtgttttatatgtgtttgtagattgtgacaaattcagggcatgcaactacactaacagccagtgatgctgctactccaacactgaggcgcattgaaagagctgccattgcagcagcaacgcctataacttatgattctaaggagcttttactgcttatccatgagcatctccaggcatcaggtcttggtgatacagcttcagcactgttaaaagaggctcaattaactcctctaccttcatcggcttccccttcttctattgcatattccactacacaggagatgtctacgccgctagctcaggaacaatggccctctggccgtgctaacagtggatttttcaccagcaaacccaaggtctgtgcacatgacgaagatccaaattctagatctaatgcagctctatctgccaagaagaagcatttggcttcctcgacactggagatgcccacaccagtagcacagcaacaatggccatcaggccgtgctaactgtggtttttgtcccagcatacccaaaatcaatgcacgtgatgaagatcctagttcgagaggtaacgcagctccatctgcaaagaagaaacagttgactttctcacccagttttagttcgcagtcaagaaaacaatctttctcccatgacgctctacctcagtctacacagagaataaattgttgttcgaattcagatcctgctttggcagatacatcagaaactgctgcagaattagttttgaagaacgaccttgatgccgatgctcaatttaagaccccgatttcctttccaagaaaacggaagttgtctgagcttagagactcgtcagttccgggtaaaagaatcgatttgggtgagcgaaggaattcaacctttgcggatggctcaggtttgcaaacaccagcttcagctttagatgccaaccaatctgggagttccagactgggccaaatgacacctgcttctcagctacggcttccaagtgatccccagccttcaaatccagaacggttatcactagactcccttgtggttcagtatctaaagcaccaacacaggcagtgtctggctccaatcacaactcttccccctgtgtctctcctacatccacatgtctgtcctgaacctaaacggttacttgaagctccactaaacatgactggccgtcttgttttattgcagcttcaaagtttctacagtggagtccatgggaatcgcagggatcgtcagtttgttttcagcagattcaaatcttggagatctttccgggatgagactgctctctttacatgcattgcacttcttggcggtactaatcatatagcagtcggtagtcatgctggagaaatcaagatatttgaagctagcagcggtacgatgcttgagagtgtctcaggtcaccaggctccggttacacttgttcagccgtatgtctctcgtgatactcagttgttactttcttcgagctccagtgatgtacagttgtgggacgcgtcttctataactggtgggcctagacactcctttgatggatgcaaggctgcaaaa

SEQ ID NO: 5428 - DNA, 481 bp, Arabidopsis thaliana
ttgcctattctagcaaaaccgcccatcagatccagcaaaagctgctgcttcacttcttcagttccaaaattcgccggggttctcaatgcaatctccgtccttagtgcagccgcagatgctgcagcagcaactctctcagcagcagcaacaactctctcagcagcagcagcagcagcaacagctctcccaacagcagcagcaacagctctctcaacagcagcagcagcagctctctcaacagcagcagcaacaactctctcagcagcagcagcaacaggcgtatcttggcgttcctgaaacccaccagcctcagtctcaggctcaatcacagtcaaacaatcatctttctcagcagcagcagcaagtagtggataatcataatccgtctgcgtccagtgctgctgttgtttcgctatgtctcaatttggttctgcttctcagcccaacacgtcaccactccagtccatgacctctctgtgtc

SEQ ID NO: 5429 - DNA, 545 bp, Arabidopsis thaliana
aacaccgatttgctgcaaaaacaattatggatcggatcaagatatagagaggatttcacatttgacttctattgcttactcattccaaaagacggtttggtctagtttttgaaatttaaccaatcttgaaaatacggaatttgtaatgtactttacaaaaattgtatatgctaattataattttgtgatctcaaatattcatgtttatatgataagataagagataacatgaatgcattattatataataccatagaagatagaatgtatacagtctcaaaataacaaaatttaatacggacccacatcccaaacctctcccactctatatatttggtctctataaaacccactaaacctaaacttttccaaaatcataccaaaaaaacatttagtaacatcaaaatttacaaaaaacaaaaaaacatgctatctctcaaactcttcctcgtaacactcttcttatctcttcaaacactcttcattgcttctcaaactcttcttccttcaaactcttcatcaaccatatgcagaacaacacccga

SEQ ID NO: 5430 - DNA, 547 bp, Arabidopsis thaliana
tcaaactcttcttccttcaaactcttcatcaaccatatgcaaaacaacacccgatccaaaattctgcaaatcagtgttcccacaaacatctcaaggcgacgttcgcgaatacggccgcttctccctccgcaaatcgctaacgcaatcgcggaaattcacacgcaccattgacagatacctcaaacgcaacaatgcactattatctcaatccgccgttggagctctccaagactgccgttacctagcaagcctcacaacagactatctcataacatcgttcgagacggtcaatatcactacatcatccaaaacgttgtcgttttccaaagccgacgaaatccaaacacttctctccgcggctttgactaacgagcaaacatgtcttgatggaatcaacaccgccgcttcctcttcatggactatacgaaacggtgtcgcattgcctctaatcaacgacacgaagctctttagtgtctcgctcgcattattcccaaaggttgggtccaaagaagaagaaacaagtaccagttctcttgggccaccaaag

SEQ ID NO: 5431 - DNA, 435 bp, Arabidopsis thaliana
cgcgaaggatcccctaatatacatacagagattcatgatctaaaactccaaatcaaggaaaaggaagcatgtcttctctgatctgtttcattttccttttccttttctcattcatcactagcttcacagcttctgctcaaaatcctttttacctatatcataattgttctatcacgacaacttactcaagtaacagcacttactccaccaatctcaaaacccttttgtcctctctctcttctcgtaacgcctcttactccaccggattccaaaacgccactgcgggacaagcccccgacatggtcaccggacttttcctctgccgcggaaacgtctcacctgaagtttgccgtagctgcatcgcacttgtctgttaacgaatcgttaagtcggtgtccaatgagagagaagcgtgttctattacgagcagtgtat

SEQ ID NO: 5432 - DNA, 516 bp, Arabidopsis thaliana
cgataatagtgccactgagcgcactcggggaagctaagtgtgtcggtgtttagataaacccacttatctccgaacgtgttttgtgaaggagggtagaatcctttgaagtcttcaaataatttctccccaatttctcgaatttccttcgtacgttcacaagcatgtacaacaaagaaggtcttgaaaatctcatctgcaatttcaaacttccctgcgcaaagcaagaacattgcatatgcaaatgttgggcttgaataataaggcacaagagaagcgaccattgccaaagccccatctagatcttgttctcttgtaactaatctaagcgattcaaagtagactgccgtagggttttcgtaatgtaaacatctctcgaagaaacatctacccagtcccgcttcgaagataaacccattgattgggtttatcgatttgctgaaaatttgaggaggctcaacgcacaactcatccagattagcttccatcaacacttccgtactgtatacttgcaccaga

SEQ ID NO: 5433 - DNA, 633 bp, Arabidopsis thaliana
tgtgcgttgagctgctcatatttttggcaaatcgataaaccccatcaatgggtatatcttcgaagctggactgggtagatctttcttcgagaagtgtttacattacgaaaacccaacgacaatctaatctaaatcgctaagattagctacaagagaacatgatctagatggggctttggcaatggtcgcttctcttggtccctattaatcagtcccaacatttgcatatgcaatgttcttgctttgcgtaaggatgtctgtaattgcaaatgaacatgcttgtgaacgtacgaaggaaatttgagaaattggggagaaaatattccaaaacccaagggattctaccctccttcacatgacacattcggaaataagtgggtttatcaaaaaccgacacaatcagcttccttgagtgcctcagtggcaccattatcgaattcattgtaacgactgctacctattgtggtgtcaatacgcataagagaatttaagtagttatgtcacctaatttttggtttgttgaattgtttgcttgtttaaaaaaaaaagttgtaccctactacaatattgttttgggattgtattggccattgaattgatttaatagtaccgtatatgttggtagtaaaagct

SEQ ID NO: 5434 - DNA, 782 bp, Arabidopsis thaliana
cttctcgccttcatgaaaatccctcacgtagtcagaatctactttcttcttccggtggatatcctgctggctcactcatgagccatgcgggatggtcctcgacttgtaggtttagcaccactgatgggttcctatggacgtgatgcaggagattggtcacgccctttataccaacctccaagaaatgacccaccggcaacagagttctttattcggctagtttccccagttgaaaacattgcaagtgttataggaaaaggtggtgctctaatcaatcagcttcgacaggaaaccagagcaaccattaaagttgatagctctagaactgaaggaaacgattgtttgataactatatcagcaagagaggtttgactttctttcattggtcgtctgtcttttagttaagaatattttttccagcttttcttccttgacagtgtctaatctgttttaggtttttgaggatgcgtattccccaaccattgaagcagtaatgcggctgcaaccaaaatgcagcgacaaggtggaaagagattctggacttgtttcattcaccactcgtcttcttgtgccaagttctaggattggttgtatccttggtaaaggaggagccatcataactgagatgagaagaatgaccaaagctaacatccgcatacttgggaaggaaaatcttccaaaagttgcatctgacgatgatgagatggttcaggtaaacttcactggtgctactccgtcaaagttttcgattgcagtttctcctctcacgcttaaggtacttc

SEQ ID NO: 5435 - DNA, 502 bp, Arabidopsis thaliana
atcttagacaatcaaacgaagcagcaagtcgtctccaaatcatctgctgaaggtgagtatcgtgctctttcttttgctacagatgagcttgtgtggttgactttctttttcagggaacttcaagtacctttgtccaagcctacactgctcttctgtgacaacactgcagctatacacatcgccaacaatgctgtcttccacgaacgcaccaaacatgttgaatctgactgccacagagtccgtgagaggttagtttcaggtttgtttaagttacttcatattaacacacatttacaacttgcagatccattcaccaaacctctataccctgctcccttcaagcttttcatgagccagatgggtctcctaaatgtttttgtccatcttgagggggactattattgtatatagttttcttatagtgtagagagtatgtatagattgatgtttctataaatcaatcttagttttggtttaagtattggtttatggcttatggttt

SEQ ID NO: 5436 - DNA, 1358 bp, Arabidopsis thaliana
tttcccatgaagaactggatgctttgacaattgaatggttgagctgttgtcacagttaatcacagttgcagatttttcttctgctccaagcttctctaacacttttctaagccaaacacattgacacgcacagaatgctgcagctatgtattcggcctcggtcgtagaaagagccaccaccggttgtttttttgaagcccagcagatcgctccggacgccatcaaaaaaacgaaacccgacgtgctcctccgatcattcaagtctccggcatagtcactgtccgtaaatgccataagcttcaggctcctattctttcttctcctgtaaaatataccaagctcaaccgtaccttttagataccttaagatcctttttgcagcgagccaatgtgacatccttggattagacatgaatcgacttatcaaacatactccatacattaagtcaggccttgtcactgttaaatacatgagacttccaaccaactgcttgaacatggtttcatcaactttctcgccattttcatccttcgtaagctttgttcccggaacaattggatttttcacagcattgctctcatccattccaaaccttgctaaaacctcccgagcgtatcttctttgacaaataaaaatcccaccatcactctgtttcacctctattcccaaggaaatgcttcatctttcccaaatccgacatttcaaattccagcatcattgatttcttaaactcatcacacatagctttatcacttccagtaaatattaaatcatcaacgtataagctgacaattaaaatattacctactcttgtctttgtaaaaagcgtatgctcactaggacacctttcaaactcttctttcaagaaataagcctcaatccggctgtaccaagctcgtggtgcctgcttcagcccgtacaatgccttccttagcttataaactttttcttcctctccttcccttatgaatccttccggttgtcttacgtacacttcctccttgagctcgccatgtaaaaaggcactcttgacatctaattgaaagatctcccaattgaattgagatgagatggcaagaatggtgcgaactgtatcaagccttgcgactggagcgaacacttcggtgtagtctataccataacactgtgcatatcctttagctactaacctcgccttgtatttatcgacttctccatcttcattcagcttggttttatacacccattttacgccaattggtgtaaaacctttaggcaatgtggttagctccatgtgttattctcacaattgattcgatctcatgctccattgcttctctccagattttatctttcactgcatcatcaaactgaatggg

SEQ ID NO: 5437 - DNA, 1253 bp, Arabidopsis thaliana
tgcactcttcgtaatagaacacagcttctctctgatttggacaccgagttaacgattcgttaacggagaaggcaacgcagttactgcaaacttccggggataggtctccgcgacaaaggaaaagtccggtgaccctgtcgggggtttgtcccgccctgatgttttggaatccggtggagtaagaggcgttgcgggaagcaaaagaggacaaaagggttttgagattggtggagtaagtgctgttacttgagtaagttgtcctatttggacaatcatgatttaggtaaaaaggattttgagcagaagctttgaagctagtgaggaatgagaaaaggaaaaggaaaatgaaacagatctattagtaaacaatctcattctcattaatctggtaaaagatacaattgtgggtttatatacatttgaccaggcctaaaccagagcctctaaaccagctaaaccaaacctatacagactccaattaaacctatacaaaaccataatatttacattgaaactatatacataatagtccccctcaagatgggagaaagatactctgtaaacccatcttgctcatcataagcttgaaaggagtaggatagagtggcttggtaaacggatctgcaagttgtaaatgagaattaacatgaatcaatttgaacaaacctgcaaccaacctctcacgaacgctgtggcagtcactttcgatgtgtttggtgcgctcgtggaaaactgcattggtggcgatgtgaattgctgcagtgttgtcacagaagagaagtgtaggcttggagagaggaagctggagttccctgaagaattgagctaaccacatcatctcatctgtagcaaaagagagagcacgatactcagcttcagcagaagacttggagaccacctgctgcttcttggatttccaggaaatgagagaagttcccaaaaacatacaataaccatttgtagagcgtctagtgtccttgcatgactgaaatgaagcatcagagaaaacttgaagttgcatttcagcttgagaagaataaaacagaccttgaccaacagtgcctttaatgtaatgcagaatcttcatgacagcctgttgatgtgcaaggcgaggagcttcagagaattgactgagcttgttgactgcaaagctgatgtcaagacgagtaatctgaagatacatgaggcgaccaatgagacgtctgtaagctttagcatcgcacaaagtcaccacctgaatgagcagagaaagt

SEQ ID NO: 5438 - DNA, 456 bp, Arabidopsis thaliana
cgatttcgcaagagcttcatctccaatatagaaatcgagatccgcagcaactccagcgttgtgctgagtttgccaagttgccttagaagaactcttggattgattcaaaaacgactcgtttactgcaactactgttggtaagataaaacatggctctacattacccgcaaatcccattttagtatacctgcaatacacacacacacaagaatgaatctaattgcagcatttcatcgaacacgttaagcgcataaacaaatcaaacctatcattgaacgtacccagttccattgtcgatgacaatagcgggtcgagaagtcggatccattagagaaactaagccggcgatctctaaagcaaaatcagctcaccagagggtgtgaatggagatccaaaacagtatccgattagagatcgattatctctaccgtttaaacactagagaaccctagaatt

SEQ ID NO: 5439 - DNA, 545 bp, Arabidopsis thaliana columbia
atcttgtagctaggaagagaaaaatcaccttagatccattaggcacaagttctctaagttccttgattcgatcttgaataagttgcctgtctcttgggcgaggtcgagaactttcaccaggtttggccctctttttgttcttcttgggtatgtccagggatgtctgaaactgatcactagaggagctggggtacgtagatgagaatccaattgaagaaaacgctccacaaatatctgatgaattttgttgggtatccacctctgccattggtggctgattcatagcactattaattgggttaacaatattatgcttcttctgacctgagggttctgccagttccatgttagtaagcaatgattgtaccgatctgctcgacatcatatcatccctcgcattaccatctctttgacacacattagcaaccacagcatctagaagattctcagggccagggtcaaacgtgagctggctatgactcatatcgtctgttggtctcattgttgaaccatgttcagacttcagtagctcctcctgaccagtg

SEQ ID NO: 5440 - DNA, 551 bp, Arabidopsis thaliana
attcattggatcatgctctgtgttactacggcctctttttcggtccaggttaatggtgaactagcagactacttcaaaagctcccgaggattgcgtcaaggatgctctctctctccttacctctttgttataagtatggatgttctctctcgcatgcttcaaaggcggctgatgcaagaaaattcggctaccatcctaaatgtaaaaacattgggctcacccaccttagctttgcggacgatctcatggtgttatcagatggtaagactcgatctattgaaggaatagtgtaagtgtttgacgagtttgctaaaaaatctggattgcgtataagtatggagaagtcaactatatacatggcgggtaaccttggttcacatcagcgagaaattcaggaaaagtttcactttgaggttggtcaactcccagtaagatacttgggtctaccattgcttactaagcggctcactgctacagattatgctcctctgttagaacaacttaagaggaaaattgggtcctggactcataggtactctctaacgctggga

SEQ ID NO: 5441 - DNA, 610 bp, Arabidopsis thaliana
tagtaactacgccagtgaacggggaaaaaggcagtgatgtttacagaggatgaagatatagtgaaatgggtgaagagacagttacaaaaaggtcagatcgttgagttgcttgaaccgggtttgttggagcttgacccggaaagttcggagtgggaagagttcttgttagggatcaaagttgggttgttgtgtactggaggagacgtcgttgatcgtccgtctatggctgatgttgttttcatgctcgaagggtgtagagtcggtccggcgatttccttgtccgccgatcctacttcacctacttctcccgccgcaaccgccgtttcttgaaattgctgttttcttattacaatcattttatttctttttcctttattttttttcctttgtggataatttatgttgactttcattgtgttgtatcttgtcacgggtacgacaatcaaattttaagttgccaaatttattgaatttcccacggtggaatgaacaatcacttcaatgtgttgttgttaacttgttatcttgggttttagaacaattttttccgggattctcgttcaacaaaaaatcatattataacgaatatatatttgtcgggtccagcata

SEQ ID NO: 5442 - DNA, 889 bp, Arabidopsis thaliana
acctcagtaatttcgttatttaacaaaagggcaaacgcatacgcacatggctaaaatctgtccaccagcgagttttgagtgaatgcgttgtaaaaagcctgcccttgttttggattgttgtccttctttgagaggatgatgattcagattcagatcatgttgttgttgttgtcgttgtcgttgctccagagatgtctcggctggatctattgtatttcatgtgacttctcacaagctgtccagctgcaattgctgacattaaagataactctccagctaaaactgctccggctacgatcgtcgctagcctccttgcgttcattcccggcgactctgtgcttgctcctttaactccgagcaggtttaaacacgctgattgagatgcaagctgtgttcctcctcccactgtccccacctgataaatccaaacccaaaaaccatagtcatgatctcttgaattcagaatctttataagtgagctcagagaaagaggtttgatcaactacctcgatagatggcatagtgactgagatatggatctctttgccgtcattaatagcttccatcatggtgatgcattgagaactctccacgttttgagctggatcttggccagtagctatgaatacagcagacactatgttactggcatgagcgttgaatccacctagagagcctgcaacagcagagccagctaggttcttgagcatgttgagctcgactaaagcagccacgctcgttttcaagaccttgttcacgatctctcctctgattacagcctcgcaaacaactgatttaccacgtccctcaatccagttcacagcagcaggtttcttgtccgaacagaagttacctgaagaattatgataagaatatattagcaactgtg

SEQ ID NO: 5443 - DNA, 879 bp, Arabidopsis thaliana
ccataccttagcagaacggaaaactgttccagagcttggttgcagatcgccagaaataagtttgagtattgttgatttaccaataccattgggtcccaccactgcaaatcgacgagaaaaccatatatagaggttaaaattctggggagaacatcaaaagtttaagttctacatgttctttgatgctgcacttgttgtttccacatatgatagatgaaggtttataaacatgtatcatctgtgtgatctcataatcaagggagagggggggagccttcttacttgcaatacggctgtccagatctattccgaaatttaggttcctaaacaacaacggaccaccagggtagccaaatgatgcatcactgtagaaaaaataaacgagcaagaaaatttagcatgctaatatctggatcctccccataccaaaattagagaagtttctgtcagattcacacagctgatttcaggaagatgacaaacctaaaactgatgatgggaggtccaggcttatcgtcaggagttgggaattcaaatttatagctgcaaaaataagacaagaggttaatgcataaaaggctggagctgagagtaagcatcgaatcgtactgtagcaaatttatcaaatatcagattatagcatcattcctaatatcatttgaaagtagttaagcatatatataagaggggctcgcttactcaggatcattaataacttgatccacatgagccagtcggtccaatgcctgaatcatagacacaataatattagagcaccgctgatggccaaaatttaatcacataaatagttgtaacagttgacaccttgattcttgactgaacaagagacgccctctttgcattgtaacgaaatttatc

SEQ ID NO: 5444 - DNA, 534 bp, Arabidopsis thaliana
ttccattggaacaattagaaccccgagtaaacgtaacaaatctttacttttttacttgaaaaaaaacaattacaacaaacgtatgatgtaatatgtacaaactcattaacatttcctaactatatgaagtgaaggattggtgattacgcgcttcttctttttttttttttgtaagctaaaaacccaaaattttaaactgttgtgagaagaaaaaagtaacccaaacaatttcaagagaatatgctctactactgtttacaaacagatgttgattacaccgattagctcagacttgttcttccaactcgtggcaatctactcggtcttaaaccagtttgtttcttcatgtggcaatctcatcgacctccgaatggaagacaaaactcggaaacgttgtcgtaatatccctgcattgtttatgtacaagttaatatgacatttcatttggcatttttcagttttctttggtttcataaaagggaatttgtaatatacctgagatatggaagacgtatgatcttaaagaatgatgga

SEQ ID NO: 5445 - DNA, 1133 bp, Arabidopsis thaliana
aagaaggcttcggctgtaaactggatcgaaggacgtggtaagcatgttgtatgtgaagcttttattaaggctgagattgtggagaaagtgttgaagactagcgttgaggctcttgtagagcttaacacgctcaagaatcttgttggttcagccatggcgagttctcttggtgggttcaatgctcattcaagcaatattgtcagcgctgtgttcatcgccactggccaagacccagctcaaaacgtggagagctcacactgtatgaccatgattcttcccgatggtgacgaccttcacatctctgtttcaatgccttgcattgacggtataatgcatgttctatcttgaaattaaacccattattgcagagaacacaaagccgttagttttttgaattattgttggatccaactcatgaatgttttgtttattgatgtgactccaggttggtactgttggaggtgggacacaacttgcatcacaagcagcttgtttgaatctactcggtgtgaaaggatcaaacaacgagaaacctggctcgaacgcacagcaattggcaagaatagtggctggttcggttcttgcaggagagctttcactaatgtctgctattgcagctggacagcttgtgaagagtcacatgaaatacaacagatccagcagagacattggcccttcgtctcaagtcaacaggtgatgtttggagcacgatgagacggataataataaaacaacaaaaacccataattagatttgatgtaattctaacttcatttgatttcttcttcatcgatctcttttcttttctatctattttgtactaagtctccaaattttcttaatttatgtaaagtcttttgtccttccatctttatggcttatattaatatcatagcttagcatcaaaatgtgtaattaaattgcggtttaagctttaaagccatgatttttttttctaacattgaatagattattgtggcagtgtttgctttgtgatgattatgtacgtgacagagttaggtactactaataaatgtagaaatgtagttgtgaatattgcagacgatggaggagtgatatggtagtttgcaaatgaacatttgaggaatgaagtcctcccatggcatgtgtgt

SEQ ID NO: 5446 - DNA, 1492 bp, Arabidopsis thaliana
tccccgtaatcaaaagtaactgaacacacttcacctgtaggcacctgaacatccttggaatttcgcaacggatttcgaacatcaaaaagaacttgaactcgcacataatcttgagcttgagatttatccaaatctaattcaacctttaacacttcacccagacattcgacaacttccttaattgtctcttttgtgtaataattaactgggatattacgaagacgaatccaaatcggaaggaacatcaagtactcctcaggtggcttctctacccactgatccattacaacacaccactcatcttgagtccaaacacctgttttaaaaatttcaagcaaatcatcctctgacttgaagaaaagctgaaatctctcttgaaatagagcaaccccatgaacccgggagtagatccgccatattcgaggcatatctaatatccaattagacatacgttggtgagaagggttcagaaattgtcgaataatactacaactattcttctctatcgaactaaactttggttgataggataaaactagaggaccatcatctttgatcgacatctcaaagatagctttgtctaactccatattcatgacgagaaatccacttgaatcaacttcgataagaaaccaagcgcaatcaattcacagagaatcgagcctaattgaaacagcaaaccaaccttttgaaagtagcaaatgaaatccaactgaatcagaactccaacaaaaaactggtaattcttcggacaagggctccgctcaagtataatgatatactacagaggagaagttcttaagcccaacagaaacgggacggcaaacgaacggcgatgagaatttctaaaatgagctgctaagtgagagaacaaagatttttttagtttgatcgcgttaactcatgaagcaaatttattgacgaagattaaatttaaagagattaaatctatatctattttatccttgaaggcaaacatttttttgttccttgcatttaaataaatcttggtggttctctctcttctctcatcagcatcttttagagagaggaagcactggatcttctttttccgacaataatcgcttcttcaacgtttgttggccggtgctcggcatcttgcgtagagctggctgtgacattgtagaggctctacaagccggtgctttgactttctggagaataaaatggactcttttttcaaaaactcatatctggacccaaaggctgtgcgtgcccagcttcctaagagggctgatcttgcggctccttctgaaccgatgaccgttgcgttacgtattagtgggagcattaaaagcaagaatgtaattaagtgggcgctcaacaagtttggttctgacaaaaatgtcactttcaagctgattcacatccatccaaagattactactctacctacagcttgtaagtccaaagattttcttctctacctgagacttcctgtgactacttaagagcctgataccggtttctg

SEQ ID NO: 5447 - DNA, 778 bp, Arabidopsis thaliana
tgcaattcatatcagtgtattgaaccatatattaattcagttacatgactaatttctggtttagccaatttttcaacaaaagtagtgtacctcatattttcgatatctaagttagaaccagatcttccgatgttgtgctggtcagaatccaactcccatagcgctggcctccccagtcgaggccggaaatgacccaagaacctgtcaacaatcaactttacactaagcaaacacgtagcaaatgtaaagacgaaaaaacaagacaaaaagtttctaaaatggagcttacacattgatggcgttttgcttatcactgtcctgatacgcgttactgtagtaacgacgtacagctgtgaagatatcacgctgcctcatcaccatattccaattacctctcagatcacagaacatctgtataccataaactttctaaagttgatacacatagttcaaagatccatcaacagcctttcgtacgaaaaaaatgtgttggtaatcaatgactcaccttgctgtgtgcttccgagccaccatactgcatcgcaagtgtattacccatcttttggtaagcgtccatcagttctattgccagaggattattaagatcgacgacaggaggtcctgagatacctaatgtacgcagctgatgcccgagagaaaccaatccgtgggcgtactgcgcaaaattagtgcgatctaaacagtctatgcagtttgtcctcaagaccccattttgaagcagaaatatatccgccttcatatcttctttttctggact

SEQ ID NO: 5448 - DNA, 791 bp, Arabidopsis thaliana
aaagtctatttcctcttctctactatatatacacaatgtgtcaatattaatgcatagtaattttgatttttacaagattttaagtacgccaagggaaaagattcagtgttggaggtgactgaacaagagtacaacacatgcaacacgacacaccccctgacttccctctcagacggagactctctcttcctacttagccactcaggttcctactttttcattagtggcaactctcaaaactgtcttaaaggtcagaagctagccgtcaaggtcttgtccaccgtccaccacagccactctcctcgtcatacctctccctccccgtctccggtccatcaggagttgtcttcgccggggccttctccaggagtggaaccatcatctgattcaaactctcgtgttccagctccaggaccggctacagctcccaattcggccggtttggttggtccggggatggtggttcttgtgattatgataagttctctgttttgaggggtttatatattgtcgctagtcattaaatttgtgagggtattaattactctaccattgagtttcatatttatgtgcctttttatttgtatgtttgaagcatcttgtaacccatttttaatgtttccgctgtctcgtttttgttcttactaaagaaaatatttaagatgtttttttgtattgattagatgcgaatgtttttattttgtgttttaattatgatcacactaatatgaatatatacgacgaatatgtagagttccatagctcatgcaataaaacttctcacacaaact

SEQ ID NO: 5449 - DNA, 614 bp, Arabidopsis thaliana
caatatgatgcgcaatggtgcagattacgctgtatttataaacaccgggcaagaatttgatgggagcgactcgggtgcacgccctgatgaagccgtgtcttggggtaaaattaggggttctgctaaaaccgttaaggtctgctttttaatttcttcacatcctaatttatatctcactcagtggttttgagtacatatttaatattggatcattcttgcaggtatactgtgatgctaccatagccttcccattgttggttgcagaaacatttgccacaaagagagaccaaacctgtgagtctaagacttaagaactgactggtcgttttggccatggattcttaaagatcgttgctttttgattttacactggagtgaccatataacactccacattgatgtggctgtgacgcgaattgtcttcttgcgaattgtactttagtttctctcaacctaaaatgatttgcagattgtgttttcgtttaaacacaagagtcttgtagtcaataatcctttgccttataaaattattcagtccaacaacacattgtgattctgtgacaagtctcccgttgcctatgtcacttctctgcggctgtgaaaaaggagaggtg

SEQ ID NO: 5450 - DNA, 848 bp, Arabidopsis thaliana
gaacactcatttgaagaagaagctgattcagatgggttttgatccaatgactcaccgtccaagaaccgatatcttctccggcttatctcagctcatgtctttgtcttctaacctgagaggctttgttgatctgcaacaacagtttcctattgatcaagaacacactatactcaaactccaaaccgagatggccaaactccaattgttccaataccttcttcaaccgtcttccatgagtaacaatgttaaccctaatgactttgacactctcagtctccttaactctattgcctctttcaaagagaccagtaataataccaccagcaacaatctcgacctcggtttcctcggctcttatcttcaggacttccacagcttaccttccctgaaaaccctaaattccaacatggaaccatcatctgttttcccccagaatcttgatgacaatcacttcaaattctccactcaaagagaaaacctacccgtgtctccaatctggctctcggatccatccagcacaactcctgctcatgtgaatgatgatctgatttttaaccaatacggtattgaagatgtcaatagcaatatcacatgttcaagcggtcaagaatcaggagcttcagcttcagctgcatggcctgatcatctattggatgattctatattttccgacattccttagccttcttttgtctttactttcaggtatgtactttggaggaactcaaatcaaatttactcttggaattgtgcttgttggagatttttatttgcctatctatatatatataacacctgtagagacatcatatatttgtagctcatgttgtagaatgtacagtacagag

SEQ ID NO: 5451 - DNA, 911 bp, Arabidopsis thaliana
caacgaatatcattatcgacccaagaattaatcatatggagaagttttgtatgagctatgtgaatactaccagtacgcattaccatgatcataaattcataattaaacacaaacaaggactaatacgagacgggagaaatatataaaggtacaacaaacataatagaaaggtacattaatattaaaactcaattgtggagaaactgatactctcacaaattatatgaccagagataaaccctaaaccatggaacttatcataatcacaagaaccaagcctagagaaatcactcccggagcaacggaaccggccaaattgcgaacagctgcggcgggccctggagccggcgcaagaacttctgaatgggagggatccactcccggagtaggcgctggcgatgacaaagccttatggaccggaataggcgctggcgataacaaagccttacggaccggagacgctgagggggaaggggaaggagagggatgacgaggagtgtggctgtggtgtccggtagacatgaccgttacggctagcttttgacctttgagacaggatccggagttgccgctgacgaagaagaatgggtctgagcggctaagtaggaagagagagtcaccgtctgagagggaagtcaaagggtgagtcgtgttgcatgtgttgtactctttttcactcacctccaacactgaatcttttcccttcacgtacttaaaatctagcaaaatcaacaattgatataatcatgcattaatgacacatatctgtggccaaatagaagagaagagagagacttacaaagagtgtcgttgacttgaaaccggtttcggtgagaccaatgagaataatcctcggaaggagtaaggacccaaccatctctccgcacaacatagaacttgtgcccatttga

SEQ ID NO: 5452 - DNA, 950 bp, Arabidopsis thaliana
ggcctccgttgatgtagtttttaatatagttttcgcattgggacggaatcaccttccagggtccaacattgttggtctcagcggctaatctccaactctcgcagtatgaagcgatggaagaccgaggcagcttgatgaaggacgcggcgcgagaagagatcgccggattaattaagacggtgaataaagcaacgatgaagaacgtaatcgagctgctacgagaaaaagtcattggagaggctttttctgtttttcaactattggatgaaagaagaagataggtcgcgaatttaaaatatagaaagatggaacattattgtcgtatttacactcccacgtgatttttgttgagaactacaacgtcttcactggctgaatttgatttggtaataatagaggtaaatcaaaacatttccaaaaattatactataaccatattttaatgaattattgttcaaattgtcattacacgcgctatgacgacgctaatcagatgcggtcactttggcagcgtttttgaacatggcaaagcaatgtattcattagtggttaggttataagctccctctttttgcatctttatatagttttgagagttggtaaaaaattatctctataaagtttccaatcattactatatatgtttgattaattttataattttgaaaattaacaataaggtggctgaaatcatcacctcaatgtttccattaaatattcaattacaagaagggctgaagaacttccaattttatttattcatatagattattatggaaaatattttcttaattataaaacattattatttagaatttgccactttaacaattataagtacacacacaattaggagttctactagctttggatgcaatacatttcccaactccattgtaccccgtatagcagcttaggcgacaatcaacaaggtcacatggagttcttgg

SEQ ID NO: 5453 - DNA, 1910 bp, Arabidopsis thaliana
tgcttcttgagctagtattctaatttgattgtgtcttgtagtttgctttggccattggtttggatcctctgttctctgtgtatggcaatacttctcaaaacttgtcctgcgaagacatgtactaacaaaacacatccaatatgagtttgcttactagactacatgagctttatgccttttatttagtcaagactatacgagtttaagctaggcagagcatttggtttggattctttcgatagggttttgtcgggtttttttttgggattagagaaattctacccaaattaattaaactaaattatggttctttttggttatattttactatataaaccttgatttttaaagtcgctaactcatatgatcatgatacatgtaatatcatttcataacacaaacatcaattcatacataacacaagtctcaatctaatactcaaattaatatcgttatttttgttggtgtcgaatctcgaactatgtgttcggatccatccgaagcttgccacctaaaagtcaacaagacaacggtcaacgggacatgctctcgaccgaagcccatagttgaagccgagcgaaccgaagagtttgtacaacggagcgaaaaggagatgagtttgagaatgggtaacgggccgagcattcggaggcccatgaagggttcaaaggaattcaaatgaagacgttacaacattgattagagaatcaaagcgaacacttttaagagcgcttagtacattaattaacaaattaatgtaaattataaatatgagtcccttaaagcataagggggtacattgatttctttctaaatatctaatattatactattttatcttcatatctttgcatgcattttgataatatatacaaagtacagtatatacacttgtattatttttttaaaaactagatgaacatacatgcatgggtttttgtttttaaaattgttggaaaaaattttggttatggttttttgttgattttgatattcatttttttttttccttctaaaacctttattagtgacgagtgtcataatcattgtttacaagagacatcaaaaatacaggacaagaatgatacaaaagaccagagatttggacctaaaatagcttttttcgctaatagatcggcacaggcattttgttcacgatgggtgaaacagaatttcgagtttatgaaaccacttctccaatgttgtattgtccccatgtagtgtttgagtcgaagatgagcaccgtacgtattaataacttggttgatggttttattatccccttcgaatattacgtttcggtatcctaatccccacgcagcctgtattgcccagataagtgatgtacattcagcttcttctatcgtatttcgtccttcaaattgtcccataccacagtccaacacaaagccattggaatcacgaattatccaaccaagtcctgaggctccagctccttcatgatgcgacgcatcataattacatttcacccatcccctaggtggtggtagccagttatctcttcttgttctctgtgtgtgaggagccggaattgtgttcacttgtttaatgacattctcaatccactcctgagtgtccgttgttgccagttcgagcgtctcccgtgccggaataagctttttgttgaatattagatcattacggcatttccataatctccacataatccaaaaagggaggtacctgtgtaattcatcgacattcctatcgtcgtgaatcctaaagaggtaccttaatttgtcttccaggggtgtttgcgagttacatggtatggtggtgtctaggcaagtggtcctccataccgcttccgcatgcggacaggaaaaaaagatgtgatccctgtttcagcttccgtgcaacagtgtgcacggtatggattgatgatgatg

SEQ ID NO: 5454 - DNA, 507 bp, Arabidopsis thaliana
ccttcacaataccgtagtgtgggaagcctcccattggagtcacatccttctcagtcctatatcatcatacacaaaacattatcatcagactcagatagaccacagaagtacacgtgctgctggaacgacacagactgatgctggaagcttgtgtattgaattcagtttcagaagaagattatcttgagttgggaagagctggactgggaagttgtttgcttggtgggttgccagattggatgattgcttattctgctcgtctggttagtcttgaatcattttatgttagtttgtcacatcactaatgatgggattgcaacttctgaccgaatgattcttgtgcataaaggtccggttcatcaatttcgagagaacaaagctacccgaggaaattcttaagcacaatctagaagaaaagagaaaatacttttcagatatacaccttgatgttgagaaaagtgatgctgaggttcaggtgagactatgctcttcttaccgttatactgg

SEQ ID NO: 5455 - DNA, 607 bp, Arabidopsis thaliana
ctagttctagaggaagtgtgctctaaaggcggcaagacgggaagtctgagtgagaagtgactgtctgagagttacaactctcttcttgggaccaacacagcaccccttaatcatcaagtagtcatccttcacaataccgtagtgtgggaagcctcccattggagtcacatccttctcagtcctatatcatcatacacaaaacattatcatcagactcagataaaccacagaagtaatcatgaccagacaggagaaaagaaacgaaacagagaaatttctactgacctgtcatattcagtcatggctgtgtgtgcctcagtaccaaccttacccaacctgtaaatcttcttgttaagctcagtacggtgatggtaaccgttctgaccagccctagcaacagtgtaggacactctagcaggatgccacgcaccaatacaagcaaccttacgcagacctctgtgagtcttacgaggaagacgggtaacacccaacgagtaacaacaccttcataacccttacccttggtcacaccaatgatatcaatcatttcatccttctggaagacagcttcaattgggatctgcttctcaaagaaactgtaggcaaa

SEQ ID NO: 5456 - DNA, 525 bp, Arabidopsis thaliana
ggtaaggcctgttcgtcttgggagccatggctgctgctaaggattttttacttgtgcaagaattacagaaaacactcccgcagttgtaacagttgtgaagcttcctcatgtagttaaaaggatggcgacaaccggagcacttagtactatcggtacccgtaatgggtttgtgaagacaaatggttgctgtgtaattagaaccacacaccacttttctcacctgtttacctttcaaagctttcacaagagtcggcatgcatctatattcagtgtctccgtgcccgagctgtccgtttgatcctttgccccaagtgtagacctcagctttcgagttcaaaactgcgatatggtgaaaccgcaagccacttcttggacgaaactctttcctagacccccttcaatgcaagaaggagctctcacaatatcatgactcggatcagcagttcccattgcataaacttgtccagacatagagagagcaacagtaatgctctggccacaagccacctgttgaaagctagttgt

SEQ ID NO: 5457 - DNA, 531 bp, Arabidopsis thaliana
aagagcttgtgctcctccttcattggcaaggcaaacccattaataatactaccgagaatctccaaaagctccccaatcccactatgtctctctgtctcataaataaacctatagaaaatatggttcattgctttcctaataaagggcctgtgaaccataaacttgccataaatcctatgaagaatcgttttcaagtactccctttctctaggatcttcagtttcaaacaattcaagcaacctcaacacaaaagaatgatcaatataccgttttgcaacttttgtatctgtgtcagaaggaacaatgtatctcagcagcaactcataaattagctgtaaatgaggccaagatggttccaaataaggctcctcttcctcaagatcagcaggctcttgacctgtattctcgtgtgaagccggaggaagacaccggaatatattaaccgaaatcatctttaccatttcttcttgacaaacttcagtgagcttcctgctccagactgtataaaatcaactagctccaataacgttt

SEQ ID NO: 5458 - DNA, 552 bp, Arabidopsis thaliana
tgaattcatctttcattttcacgctttgatccaatttgagttctctcttccactgaatccctcatacgtaaaacctagggtttctaaattagggttctcctgaggtctgtttatagtgcgtaaagccatgtttaagaagatcatgaaaggggcaaatcgaaaagcctctaaagctgaggcgaatgattcgtctatgtatgggtttgatccaccaggtaggtcaggtcctggatccaatatgattgtaaatcacgcatctcgtggttcgcttgttccttcttctccaaattcaatggcggcgcaacaaaaaaacggctcctatgtatacagacgagcgcctctcctcttgaacagagacgtctctgtctccgagcgtcaatcctttgttcttgaggaaactccagatttgttgtttacaattggattttacggatacgttgaagaatgcgagagagaaggagattaagaggcaaacgttattggagctagttgattttcacagtctggagcagggaacacactgaagtttgtcagaagaaatggtaaagatga

SEQ ID NO: 5459 - DNA, 954 bp, Arabidopsis thaliana
cagaaccaaaaacggttacagaagctcttaaacacccgggatggactgctgcaatgcatgaagagtatgataattgtacagaagcacaaacgtggagtctagttccgtatacttctgatatgaatgtccttggaagtaaatgggtgtttcgaaccaagttaaatgcagatgggtctttggacaagttaaaagctcgcttggttgcaaaaggatttgatcaagaagagggaattgattacttagaaacatacagccatgtggtaaggtctgcaacagtcagaatggtgcttcatgttgcaacagtcatggactgggaagtgaaacaaatggatgtgaagaatgcatttcttcatggggacctcactgaaactgtttacatgcttcaaccagctggctttgtgaataaggaaaaacctactcatgtctgccatctacataaagctctttatggtttaaaacaggctcctcgggcttggtttgacaaatttagcaattacttgcttgaatttggtttcaactgcagtattaaagatccatctctgttcatttatttaaaagggaatgatcttatactcttacttctttatgttgatgacatggttttaacaggtagtaactctgcaactatgatcaagctgcttgaggatttgaatacacaatttcgtatgaaagatcttgggcaaatgcattattttcttgggacacaagcttaatttcacgagaatggcctatttctatctcagcagaagtatgctgaagaccttctcaccattgcagcaatggacgaatgctccccaatgccaactccactgccacttcagcttcacaaagttcctcatcaagaagaactctttgctaatccaacttatttccggagtcttgcagggaaacttcagtacttgacattgacaaggccggatcttcagttttctgtaaactttgtgtgcaaaagat

SEQ ID NO: 5460 - DNA, 893 bp, Arabidopsis thaliana columbia
ccagcggttaggatatctggctttcacccaggagacctgggttcgattcccggcatcggagctttttgcttcttttttaaaccctactcaagtttttaatattctgtgaaactattgagcctaatcatataagttaacaaatcccaaatccaaaacataagatcccataagttcgtgagaaatagctcaatgccaaaattgcagactacaaagactataaacgtacacaagtcataatattaccgcaacagcaaaatcagagggccaattgttttcatcacattgagagctaatcaccattaactgtcatgttttcagggttttaagtgagttctttaacttacaaaaacttccgagccctctaataattaaatcctcccagccaaaagtaaccgatcatgttccggaaaaaaaaaaaaaaaacacagaagtggtttcaaggcctggcttattaatgtgtcctaactgttcagggaagacagcattcctcccgaactaggcaggaccacttcccaacctggacccttcactggaaaagcttcagcagcttgtgtctctcccggtgcagtaattgtcaggtcactccggtcaagtaacctgtcaagatccgcatcgcttatatcggtttgtatcaacttatcttcagcagtttcatcttccttaagcaacgccagtatgtcctcttcctgtgtgttagtttggttcaagctgtcaataggagattttgttgataataagtgtatctaaaaaggattgagctttaagagaagttaaaacctctaaaggtgttgaagacttggcacgttcttgatgaaactgcccttggccaataaccacatgttccagcttgagcttactgtacgctcgtttcagaacccgggtctgagcaaatg

SEQ ID NO: 5461 - DNA, 818 bp, Arabidopsis thaliana
tattcagtgtatataacccaataatgacaaatactaaaatagaaaaaacgaataacaataaataaaagaattaaacccagtagagagtggccaacttggaccgagtcaagttacgttacatagtcactcaaaccccaccacttgacgcgtttctcgtccccacttcttcttcctcgcaactctttcactctgtttcacacacacattctcacatatatataacacaaactaactctaatcaccaaatcataaaccaaagcttctaaattcagtttcaatggcgatcattaaaccaaaccgagatctcaaaccggacggtgtcacagtcgtgactcgtgaagtctgggcggagaatctcgaatcagaatttgaactaatcagcgaaatcatcgacgattatccatttatctcaatggacacagaatttcccggcgtgattttcaaatccgatctccggtttacgaatcccgacgatctttatactcttcttaaagctaacgtcgacgctctcagcttaatccaagtcggtctcactctctctgatgttaacggtaacctcccagacctcggtgacgatcttcaccgaggattcatctgggagtttaatttccgtgacttcgacgtggcgcgtgacgcacacgcgcctgattcgatcgagttgcttcgtcggcaaggtatcgattttgagcggaattgtcgcgacggtgttgagtcggagaggtttgcggagctgatgatgtcgtcggggcttgtttgtaatgaggaagtgagctgggtgacgtttcatagcgcgtatgatttcggttacttgatgaaga

SEQ ID NO: 5462 - DNA, 528 bp, Arabidopsis thaliana
gtaaagccctatatatatcttcttattcgattctcaccttctatttatccatcgaaatcaattccttcggtgaattattacgaccatatatgtaaatccaaaatgcgacgacgtttctagtgcatgcatgcataggaaagccttttttagtcttctccactcatcaaaaattgagacgccacgaacttatctagatatctccagtcagtgatcctcttctcggagctcatgtcatctttccggctactgttctcagaaaaagtagtactatggggagttatttccgacggaagagaggggctctcgagctgaggaagctgggagaattgatcatcatcgatgcattgaaggtacatagatccgaaatctccatcctggacgtgactggcctcggagagtaggtcttgcttgaacggtgtggcggtaaaatcaggattatgtctggctcgcttgtcgagaggttccaagagagtggcgtcgtcgtagaataagcagttcggatccaaagttgcccctttttgttgggat

SEQ ID NO: 5463 - DNA, 914 bp, Arabidopsis thaliana
  unsure (1)..(914): unsure at all n locations
taaattcaataaaatatataataccaatgttttttttttgtcaacagaattggtgtattaattttttggcagtggatattttcaacaaaatctaaagcgcgttcgaccacgcgcctgtgacgcgtaaaactcagtttgacaaatattcacaattaattgaagacgccagtcagaagaaaaaaccactacgcagcttgaaaagacaaacacaccctcgtcttcttccgtcgcaccgcttctacagcaatgtcattttagtcaaaccccaaaattcgagctccctttgaagaaaaaaccaccaaatcagtttcgttgtcccaaatccaaaattcctccttcttcttcgctgtaacgctttatacctaatcggagataaaacaatgcaatcgtcgaaaggacggcggaaagttggctccacaaccgccggagccggtatagattcggcggagaagctcgacgagctcttgatatcgtctgccatttgtaacggtgaagatttaggaccatttgttcggaaaactttcggtacagggaaaccagagactcttcttcaccatctcaagtttttcgcacgatctaaggaatcagagatcgaagaggtatgtaaagctcactatcaagactttatccacgccgtagacgatcttaaatcgcttctctcagatgttgaatcgcttaaatctgcgctttccgattcaaactctaaactccaatctgttgcggcgcgcttctttcgtctctcgattcgcttgttgaggctcagactgtgtctaagaacgtcgatctggcgattggagcggtgactcattgtgttcgtgttatggaacttgtctctcgagctaatcagcatcttcagagcggtaatttctcatggcgttgaaatgtgtggantcgattgagagtgattcatggag

SEQ ID NO: 5464 - DNA, 1068 bp, Arabidopsis thaliana
atcgaatttataaaaaagtgaacagactaatactagtagagttaaaatagactgtagttaagttaagaaaatgtacgatcaacagcccacaccgccacagatgaaattacgtggaacgtggtaaaaaagccacgacggtaaaatagtaatttaattaactcttcgattttccttttaactctgaagagggcaaaatggtcaatgataatttcgtttatttagtcataaaaaaaccgggaatgcaaagagatgagggcaaaatagtcaaattaaaaaaccgacgatcttttagattccttttaaaacctagacgtcccactctcacacaatacacacaagtaaccagttttctctctcattttctcagtttgtctctctctccgtttttgaaaagatttttgtttctactttgggaagctttccgctacaatgtcaaatcgtggtggtggtggtccggcggcgctagtcgtggtcgaggaggtggacgaaggtctgaccagagacaagatcagtcttctggtcaagttgcttggccgggtttacaacaaagctacggtggtcgtggtggttctgtttccgccggtagaggtcgtggaaacgtcggaagaggtgaaaatactggagatctgacggcgacgcaagttccggttgcttctgctgtttctggcgggagaggtcgtggtaacatcggagatccgacgttttctgttgcgtcttcgtctaagacggtgtctgttgcttcttcatctaaagaggaaagtaagaatacggaggtttctgagaccatgtcgaaccttcagattacttcgacggagacgaaacctgaaatgacgtcacttcctccggcgtcatctaaagcggttacgtttccggtacggccaggacgtggtactttggggaagaaagtcatggttcgtgcgaatcatttccttgttcaagttgctgatcgtgatctctaccattacgatgtaagtttccggccattttttctcgacgaatctgtacttgtttgtcgtttttatgtgtcgatttcaaatattgtcgtttctatttcatcaagttatagtg

SEQ ID NO: 5465 - DNA, 558 bp, Arabidopsis thaliana
attggaaacttccttaccttcagcacattgtgtcagagactttacggctttatccggtggctccaatgcttttaccccacttagcatcagaagattgtatagttgatggctatgacgttccacgcggcacaatcatcttggtgaatgcatgggccatccatagagatccaaagttatgggaagagccagaaaaatttaagccggagaggtttgagaaaaaaggagaggataaaaagttgatgccatttgggattggacgacgatcttgccctggttcagggctagctcaacggctagtgactttggctcttggatcattggtccaatgttttgagtgggagagggttgaagaaaagtatctagacatgagagaaagtgaaaaaggaaccacaatgcgaaaagctacatcgttgcaagctatgtgtaaagctcgtcccattgtccataaggttttagatgcttcttgtccataactttcatcatacagaacctcttgtataacaatttcgatagaaacacgatctgttttgttgcttcttagctatggccttaccagag

SEQ ID NO: 5466 - DNA, 1015 bp, Arabidopsis thaliana
tagaggatatccctattgtcgtttctatttcatcaagttatagtgttttttgctttttgttgttgttcagtttttgtaaaccttgtacgtcaaaagatgaacttttttttgtcgtttgtgttcatctgaagttgttctttcagtgagatttctgactgaaaatttgttagtttctgcatcattggtttttttttttttttgctttcattcgacgaatatactgttgtttgttcctttttattgttgatctgatgtatttcacaaagttcctagagagagttttgacatgatgaatctgcggttgtgacttgttttagtcatatagagattttttggctaaaagttattgttattgtgttataggtttcgatcaatcctgaggttatatcaaagacagtgaacagaaacgtgatgaaacttctggttaagaattataaagactctcacttgggagggaagtcaccagcgtatgatggaaggaaaagcctctatactgctggtccattaccttttgactcgaaagagtttgttgtgaatctggcggagaaaagagctgacggttcctctgggtaatgtcttgttttaactctttgtgaatgtgtttgtatcgccttgtttttcatagttttttttggcattgtgactccttttggcaggaaggacagaccgtttaaagttgctgtaaagaatgtgacaagcactgatctttatcagttgcaacagttccttgatcgtaagcaaagagaggctccatatgatactatccaagtgcttgatgttgttcttagggataagccctctaatgagtaagaaatctgaaatttgcataaacttcagtattgtcaaaagctatgcataaacttaacatttccctgttttgctttctgttcagttatgtctctgttgggaggtcttttttccacactagtttgggaaaggacgcaagagatggtaggggtgagcttggagatggtattgagtactggagaggttatttccaaagtctaaggctgac

SEQ ID NO: 5467 - DNA, 733 bp, Arabidopsis thaliana
ttcatcgtaccaaaggacaaagctgcagctgcaagtgcatccatgctattatgtataggcacatttccctgaaacaaagaatgataactgagtattcaggtgctgcttaatcaacaagaaaatgtaacagcttacttccacaaagtcattctgcagcaaaactctattaccttgactggaagcttaggtggcttattaagaactataatagcagagtcctgcagtagagagagaaaataaggttaaaaactagtctataagatcaaccaaaagagaccaatcaccgtttgaactcaagtgtaaaaacatccgcaaatccagaagaattaagagttaccttgaacctgacaagcctttgaagatatgcgatttcgtctgcgtttggatacaaggttccacttggtatggtgtcatatctcttagaaatcctcatctcagcgattgaaaccggcaaccagattttgtctcctatttgcatcacctcgttatgcttaatctgcggataaaagtgtacaatgctacctccattggaaaacctaatcctaagaaatgatcacaccaacaacaacaacaacaacaacaaaagatcaattgtacctttctcataggaatagctccatcttctttctctcttgaagcatccctacgacctcgaaactccatctgaacctgccacaaagatgatacaatttattctctcatacaccaatagcatgttaacatgcactcacgg

SEQ ID NO: 5468 - DNA, 972 bp, Arabidopsis thaliana
taattctcaataacatttcaacatagcacaagaatctcaaaatcaaattcaacttagttgattatattaactctgtcaacatcaccaaacaagtgattattaagactttattgtataccatttatagtaaaagacagaaacttgatgaaaatttcgatcaaatcgagtaagaattataactgtactgtacttaaaaaaacagaaacttgacaataattatcagttccacgagcaataacaagctcacctatctcttcctcccccattgaatccatctatagactctttttaattctcatttgcgcttccacctccaacagaaggataagaagccatggatccaaacttattctgctgcatcatataaggatttgactcaaacgcaccatttccaccagctccatgatgatgacgatgattctgatgataaggatcatgattatgattttgatgatgatatccttgcatacccatatgatgtgcataaactggcatctgcatcatctgttgcgttccatacgcccccggaatcggcactccaacattaccgctgctaccgccaccgccaccgatatcttggaagctctgtggaggaacaggtgttgaagagaagagcttatccgaagcagagggaccttcattagtcaatccctgcatccttttgaggtaaagcctatacttttgaagatgagacgcaacgttctcacgagttaatccttcaacgttcatcagctgcataatcgtcttcggaacagcgtttttgatccctaagtgagctacaacgtcaacgaatctcttgtgtagctgcggtgtccacactaaacgcggtcgtttaagtgtttcccagatagatcttcagttcctgaatcatccttcttccagccgccatcgccgaatccggatcctacaccgccaccgtcatctccatcaccgtttgatgtcttttgcatcttcgaatccgatctcaggact

SEQ ID NO: 5469 - DNA, 995 bp, Arabidopsis thaliana
tttctttccagcagcttactcggatgccaagtcctgtttacgcttcttcgtctaatgctctggaggctaaggcttatctagctattgaggattttctacacgccactgttaagagcttgtgggaggcgttttggagtcaggaagagcctgttcctttctctgttggttgtttatacaatcagaatcttaagttttatcaggctgagagagctttagctcttgggaagcttgaaggtctttccgccacaggtattttgcttaaaaatcctcggcatcctcacgggaaatgggatcacattcttgaacttgctcttctaaggtctgacattggaagctttgcacaggatagtgatcgtctgccttctttacctgtcttaggcgaggctcttttctatgctgttcgtatactcatcgcaaggagtgtgagccgtttagatttttctcaaagctcaaactgtgtcttcattcttctagttgattcgcagtatggaggtgttgtaaaagttgaaggggacgtaaataaattggattttgacttgaacaatgtttatgagtgcgcagcagattggataaagaagcattctaagatagcagtgtcaccagttgacagaatatggaacaagctgggaaatgccaactggggagacattggtgctttgcaagtggtgtttgccacttaccatagtataatgcagtactttggggcacccagacattccattgaagacttagctgctatccatagttctcgccttcactcaagacgacaggagaggcagttgggagatactagtctcagtgaaaatggtatgtttaggttccagcagagtaccatgtctcctgaaattgtcgaagttcaagaagaatcaaccaaaatcgagcctgaaccttcgatgaaactggaagttggatcggttctatggttggaggagtcaaactatcaaaaaggttatcagattaacgaaatattgactaatggtacacttccttatcat

SEQ ID NO: 5470 - DNA, 733 bp, Arabidopsis thaliana
taactttttgtcccaaaagttataaatgtattttgaaatatttgttgggtaggtgagataagattttgtggtataggtcatgtggttggtcgatctttatttgaattttttatttatcatgcaaacacaaattgtgtttgaaagttttaaaaaattgaagactaaaacggctctgtttctaaacttaacgttttggatgttggttactacgagcagggctatgggatgacagaagcaggtccggtgctagcaatgtcgttagggtttgctaaagagccgtttccagtgaagtcaggagcatgtggtacggtggtgaggaacgccgagatgaagatacttgatccagacacaggagattctttgcctaggaacaaacccggcgaaatatgcatccgtggcaaccaaatcatgaaaggctatctcaatgaccccttggccacggcatcgacgatcgataaagatggttggcttcacactggagacgtcggatttatcgatgatgacgacgagcttttcattgtggatagattgaaagaactcatcaagtacaaaggatttcaagtggctccagctgagctagagtctctcctcataggtcatccagaaatcaatgatgttgcaaacgtcgcgtatgtgaattttaaacaacgaagacactaacacaaaccactaggtttcgaatgtcttttgttttacaccgtttcttatttccttcaatttgtttttttaatgt

SEQ ID NO: 5471 - DNA, 457 bp, Arabidopsis thaliana
ttggtttgattcattgccatggttactatactgttgataatatccttgcatacccatttgattcccatagcctggaataggcaccatcgacggaaccggaaccggaacccccaactttccgttacttcctccgccgtcttgaaagctctgtggaggaaccggcgttgaagagaagagctgatccgacgacgaataaggatcttcttccgtcgtcaatccttgaatccgtttaaggtaaagcctatatttctgcaaatgagacgcaacgttctcacgagtaagtccttccacgttcatcagctgcataatcgtcttcggcactgcgtttttaatccctagatgagccacaacgtccacaaatctcttgtgtagctgcggtgtccacactaaacgcggtcgtttcgatgtcttcccagacgcgtcttcaggcccggagtctccttcctccgccgtggaa

SEQ ID NO: 5472 - DNA, 633 bp, Arabidopsis thaliana
atttcttctatggtagcttgcttccatgtctcacattctagacttctcatggcttcttcataggtttctggttcataaacttctccatcttctgtcattgttaatgcaaacccaacaaggctgtcatcttcctcaacgaatctctgtggagctctgatctgtcttcgaattctatccctggccagtagatagttctctagacaatcatcatcagaatcagtttcctctacttgtttgtctttacttgcagatcttgttgttgacgcttgttcttggtttgaattatctcctccttcactctgattttcatcatctgcagacaaattctttagctctatgagagtcctttctacttcagtgagctgtttgtcttcctcagacatatcattcttctgcagttccttgtacatctgattttcttgaaaaacaatgtctcgagagactacacatttcctgtcttctagcagccacactttgaatctctttacaccatctggatatccgagaaaaatccccttctttgctctaggattcagctttccttgatctgaatgaatataagcaactgatccaaacttcttgagtatcttgtaatctggtggatgaccagtccacttctcttcaggaatatca

SEQ ID NO: 5473 - DNA, 576 bp, Arabidopsis thaliana
tattgaagagcttgggcttttgttgatgaggaacacggcagtagacgatgcttctgcccagaactgcttccccaaccctgattcacttaacatgcatttaaccttgttcatgatggtcctattcatcctttcagcaacaccattctgctgtggtgtgtaagcacatgtcatgtgccttctaactccttcttttctgcagaatgaatcaaactcctggttgcagaactccagcccattatctgttctgagaatcttgagcttcttgtcctgttggttttcaatctgtgttttccattctacaaacttgctgaaagcttcatctttggttctaatgaaatagatccaagttctcctcgtaaaatcatcaatgaaagtgatgaaatactgacacttaccaatggagaatggtacattcggtgatcccatagatcagaatgcacatagtcgagtttatcctttgtgacatgctttgcagctccaaagctaaccctgtgtgtttttccatacacacaatcttcacaaaactgcaaatctttaatcatggtcttatccagatgacctttactgaccaaaact

SEQ ID NO: 5474 - DNA, 1041 bp, Arabidopsis thaliana
tacctacacatgttatcgtggtccaaatagaagagaaaaactatatttaaaaaattaaaattatatgagatatttattttcaatgaaaaggagaaaataaaaaataaagaaggaaaaatataaagtttcctttccctctcgttcgttgctttgccttcccgagagagaaagataagatttggttttgcattcctcttctctctcgccgctctcaatatgcttcgatttctattctcctcttcctcttgattttgtcttcttctctttgctgcggagagattaagaaacccaagggttttaagcaagagacgcggcgaggaagctatccagaactctctgaaacatccattcctttttctcatggacgtagtgttgccggaaactgccgtggtaaccggtggttcggttatcggagattatggatttaatgtggatccttttctcgttgaggcgttgcacaactctcgccatcgtctcacgagtatgctccgtttctcttcttttttttgttctctgattcgtgtcgtttaaccttatttcctgaaattagagctgatttttgtcatctggattaacaaatttgaaattttgattggtggtcttatctgaatttagctgggtatagttaggttaatttaaccgcaatttggggattttgggtttctcaggaactggctctcttcttagatttgcgattatgttgatgcccatgctgaatttagctctcttctctgcactgtattatccatggttaatgttatcaaagatgtaaacttttattctgtccatggtgttcaacatttatagttgcttaccttttgtgtggtttatgtggaactgcttgtggtacatatatctcctttatctggtagtagcttagcttttgtgtggttgtgtggaactgcctgtggtgtgtcctggcttttgtgtttcttgctactgtaactaagccttttgttttgtttctcttgttgtgttagttttgcggatggaacttgatgttcaaaggttgttgcagaacctgaacagcagcagtttgag

SEQ ID NO: 5475 - DNA, 589 bp, Arabidopsis thaliana
tgcccagaactgtttccccaaccctgattcacttaacatgcatctgaccttgttcatgatggtcctgttcatcctttcagcaacaccattctgctgtggtgtgtatgcacatgtcctgtgccttataactccttcttttctgcagaatgaatcaaactcctggttacagaactccagcccattatctgttatgagaatcttgagcttcttgtcctgttggttttcaatctgtgttttccattctacaaacttgctgaaacttcatctttggttctaatgaaatagatccaagttctcctagtaaaatcatcaatgaaagtgatgaaatactgacacttaccaatggagaatggtacattcgttgatccccatagatcagaatgcacatagtcgagtttatcttttgtgacatgctttgcagctccaaagctaatcataatgttcttatccagatgacctttactgaccaaaacctgcagcccttttgcaccaatgtgaccaagcctgctgtgccataaacttgtttcaccttttctttgtctatgacattggcttcacctgcaagtgtcgtccctggagaaaatcaaag

SEQ ID NO: 5476 - DNA, 1716 bp, Arabidopsis thaliana
gaagtcaccccagatacatggattctagacacagggtgctccttccatatggcctgcagaaaggattggatcatagacttcaaggagactgcaagcgggaaagtaaggatgggcaatgatacttattgtgaagtgaaaggaattggggatgtcagaatcaagaatgaggatggatctactatcttgctcactgaggtcaggtacataccagaaatgttaaagaacctcatcttacttggaactcttgaagataaaggctgctggtttgaatcaaagaaaggtattttgactatttttaagaatgatcttactgtactaactggaaagaaagagagtactttgtattttctccagggaacgacacttgcaggtgaagccaatgtcatagacaaagaaaaggatgaaacaagtttatggtacagcaggcttggtcacattggtgcaaaagggctgcaggttttggtcagtaaaggtcatctggataagaacatgattaaagagttgcagttttgtgaagattgtgtgtatggaaaaacacgcagggttagctttggagctgcaaagcatgtcacaaaagataaactcgactatgtgcattctgatctatggggatcaccgaatgtaccattctccattgattgaaaaccaacaggacaagaagctcaagattctcagaacagataatgggctggagttctgtaaccaggagtttgattcattctgcagaaaagaaggagttataaggcacaggacatgtgcttacacaccacagcagaatggtgttgctgaaaggatgaacaggaccatcatgaacaaggtcagatgcatgttaagtgaatcagggttggggaaacagttctgggcagaagcagcgtctactgccgtgttcctcatcaacaaaagcccaagctcttcaatagagtttgatattcctgaagagaagtggactggtcatccaccagattacaagatactcaagaagtttggatcagtcgcttatattcattcagatcaaggaaagctgaatcctagagcaaagaaggggatttttctcggatatccagatggtgtaaagggattcaaagtgtggctgctagaagacaggaaatgtgtagtctctcgagacattgtttttcaagaaaatcagatgtacaaggaactgcagaagaatgatatgtctgaggaagaaaaacagctcactgaagtagaaaggactctcatagagctaaagaatttgtctgcagatgatgaaaatcagagtgaaggaggagataagtcaaaccaagaacaagcttcaacaacaagatctgcaagtgaagacaaacaagtagaggaaactgattctgatgatgattgtctagagaactatctactggccagggatagaattcgaagacagatcagagctccacagagattcgttgaggaagatgacagccttgttgggtttgcattaacaatgacagaagatggagaagtttattaaccagaaacctatgaagaagccatgagaagtccagaatgtgagaaatggaagcaagctaccatagaagaaatggactccatgaaaaagaatgacacatgggatgtcattgataagcttgaaggaaagagagttataggctgtaagtggatattcaagagaaaagcaggaattcccggagtagaccaccaagatacaaagctaggcttgcgccaaaggatttcacaaagaga

SEQ ID NO: 5477 - DNA, 536 bp, Arabidopsis thaliana columbia
tgaagatagttggagaagcaaggaatccagctccatcaactagtgctgtcaaaagctcgggctcaggagctgatgaagaagaggaagaggacgttgaagctgaagtggaagaggaagaagatgatgaagacgaatacgagaagcatgtcaaagaggcacagtcttgtcaagagtctgacaaagcttaaaaagaaaaatgctctctgtttctcttactttatttcttcttcaagaacactccttggtgagttggtgacttgcttctggtaaaaagaaaaacacatttgtcaaagccaaaggctgtaaactacgtgctggttgtttcagttttagattgatgtcgttgtactgagtaatgagcatgaaacagaaggtttatattattatatgatactatactataggttttcgtctttgtgatgatgatttcagttcacctataaaatccgaataaaccgaatctgaacaagatttataaaccgaaaatctgaaaaaccgaaaagaacgaaccggatactaaccgaaactgggatttg

SEQ ID NO: 5478 - DNA, 660 bp, Arabidopsis thaliana
caacagggtcttctttccccgcaccggcctgtagtgatttttgtggatgaatccagggctaaacgtcgaggcctcttccgctttgataatagactccgggaaaataaggatatccacaaacttattcaggatacctggagtaacacaagagagacctcagttctctctaaaatgaacagctgcagactagaaatcataaaatggaccaaactccagaatttgaattcagcctccgcgattagagattaccaaatggctttggaggaggctctctcctcggaccctccagaccctgaagtcataggagatctcacagtaaaacttgaacaagcgtacaaacttgaagaacagttttggcaacagagaagcagagtgcagtggttgcatagtggtgatcggaattcaagttacttccatgctatcacaaggaaccgaagattccagaaccgcatcactgtattagaggattcttcaggagtgcctagacatgaggatcaccaactatcccaaataatttcggagtacttccaacaaatctttacctcagaatcagatggagattttcgggtggttaatgaggcaattgaacctatggtttcccaagaagacaatggtaggctaactagaataccagacgctgaagagattaaggtggcagtg

SEQ ID NO: 5479 - DNA, 563 bp, Arabidopsis thaliana columbia
tggccctccaacaaaataaagaaatcaagagataaaagagaagtctctccaagattatgagtgaagaagacggcggctcaatgagtgtcaaaagcagtctctcaagcttcctcaagatcttatcttcttacaattccaatgttcttttagctgctctagtcttccttctcttagtcgtcctcttcgtcttgcttctccatttctacgctcgctttttctggtctccctctcatcaagatttctccgccgccgctagacatcgccggagaagacgaagaaaccggagaagaacagtgacgacaacaagaatcataccttctctcccactcggaggttttgatgatggagtatcttctccagctgctactgcaacaagggatgacaaaggtttggattcttcagtgatttcttcaattcctctgtttgtttacgaagaaaacgaggaagaggaggatgaagaagaagagtgtgtgatatgtttggggttatgggaagctggagattttggtagaaagttgagaaattgtggacatgggtttcacgtagagtgtatagatatgtgg

SEQ ID NO: 5480 - DNA, 488 bp, Arabidopsis thaliana columbia
tgtctcagtctctatctgaaaagtagactcatgttcacttgtaataacttccatatgttgatgactaagcaactcgggcttctcaatggaaacactgtttgttatagttgtcaattccccagcaagttccaaagacgcttcaacagctacgctagtatgaacagtgctgacaaggagatcttggcattcggtcccagaaacatcttgtccacctacctcaagagtagagggagcttggtcccctctttctagtactgtgacatcagatagctctatctccttcaaatcaggctttgcagttttgccaatattttcagcttccactttttcaacttcggaagctgagtctatatggctatcagaatgaccttcaaccaaaattgaccgtgcatctgcagttagatcattgcggttataactactttgaatgtggtcgctgataacattttcatcattggaagtctctggaagtatagtgctctgattat

SEQ ID NO: 5481 - DNA, 389 bp, Arabidopsis thaliana columbia
tagtaacggacgccagtgtgctctaaagaccaggttttgtccggcctgcggcagtaaattcaatgccattcccagtcccgccaggataaacgcgaactcaccaatctgcgccaggctggcggcgatggttaatgccgtacgttgggagtgaccaaacagtcgcaccaggaaaaatgcggctaacgacttaccaaacagaataatcgccagcgtcgccagcactgccagcggttgctgaatcagaattaacggatcaaacaacatcccgacggagacaaaaaacagcaccgcaaacgcgtcgcgcaatgtcagcgtatcgtgggcggcacggtgactcagttcagactcgttcagtacgatcccggcaaagaaccgcccgagtgcaaagg

SEQ ID NO: 5482 - DNA, 550 bp, Arabidopsis thaliana columbia
aataagaaccatggtgttgtgttgatgaaaataggatgaagcaggtgctgtagccgtcatgactgttgaattagattcagcattaggtggacgtgctgttcagtaccgagaagtacagggtcacgaaaccgagaagtttctttcctacttcaaaccttgcataatacctcaagaaggtggagttgcttcagggttcaaccatgtaaagcccgaggagcatcagacgcgtctgtatatctgcaaaggcaaacatgtcgtccgtgttaaagaggcaagttaattagcatatcttgaaatgtcttttctctcaactggttctttatgtttcatcttggtttgcattgattttcttattcacaggttccgtttgttcgatcgactctcaaccacgaagacgtttttattcttgatacagagtctaaaatttttcaattcagtggttccaagtcgagtattcaagaaagagcaaaagctcttgaggttgttcagtcattaaagacacttaccatgatggaaagtgcgatatccagctgttggtaagtgactaaac

SEQ ID NO: 5483 - DNA, 838 bp, Arabidopsis thaliana
caagaacagacctccatcaccaccaccacctcttcctcttcctccttcaccatctccaccaccgtctcaacaaatgtcttcctcaagacaaaaaaacactccgtttctcttcccaagatccgattcctctgttctacccgacccgtctcgtttcttcagccacgatctcctctcatctcctctccctacaaactctttcttccaaaacttcactctcaacaatggcgaccaagctgagtactttcatccttacatcatcaaaccctcgacttcatctctctccatctcctacccatctctctcccacaactctgctttcatctacgaagctttcaacgccgacataaccataaccgggtcagatggacccgacccgcattctcgtaaatctcatctcatctcttccttcagcgatctcggcgtcactctcgatttcccctcctctaatctcagattcttcctcgttagaggaagccctttcatcaccttctccgttaactcctccatcacaatctcaacgatccacgctgttttatcactttccggtaacacctcttcaacaaagtacaccgtcaaactcaacaacaaccaaacatggctaatctacgcctcttctccgatcaatctaaccaaagacggcgtttcttcaatcaattgcggtgatgggttttcgggtattatccggatcgtcgtgttaccaaatccaaatccgtatttcgaaacaatcctcgacggattcagttgctcttacccagtttccggtgacgctgatttcacaaagccgtttgctttagagtataaatgggagaaacgaggctatggagatcttctaatgcta

SEQ ID NO: 5484 - DNA, 551 bp, Arabidopsis thaliana columbia
ccgaacaatgtaccacgaaatgtctatttgccaccattcaagtccttgtctagccgatgactcgaacgcatgatgattgttgtgccaactctctccaaatgaaaataccgataaccacctttcaaaaaacaaaaaagatataaataattcaactacattattgagtttttggaaacatgactttatatgagctgtctccaattcatgtgtacttttgtattttgggaaagtgtcataaaagatattataccattcaaagtacagaaaccaaaaatgttaagagataatattgacataccaaacattacgagaagtgtcattggtcttccaagttcgagtgccccaaatatggcagagtgaatttatgaggcaagtcacgtgcacttccaatgctgctcctaccccctgagaatctcaccaacccatacattaattgctaattgattctacaatttatatcgaccaaaatactatacgttttaaaaatatatagagacattcacttaccattccccaagtaacgaaggacattgccaccaaggtagaagaga

SEQ ID NO: 5485 - DNA, 774 bp, Arabidopsis thaliana
gttacgatcctaatcctccaccgaataggtactactcggatcatcatccaccgcgtagttacgaccgtaatcctccaccgaataggtacgacgccaatgatcttccgccgaataggtactacgatcatcaaactgaaggttactacgagcattctgcgccgagagatcacaacgccgatcctctagaggacaacgaatccgcccatcctccgcgagctagttactgcgccgatccttatcctggtgattacatctccgatggtgactccaactcagatcctccggcggatactctccagttatgcgtgggtaccaatgtctcatcatccagttatgtcactgtgaccaagtccctaccagtctgcgcagtttcttgaccgatccaaataccacgttcgtcggcgtttggaatagtcaagacgcaggaaagctggcgagatctaaacatcagttagagatcgggaaacttctagacataaggtagtacgtgaatgattcgcgaggaaagagcatgaggggttgttcgtttgaagagattgttgatgaatttttgggttctccaggatcaggactgaggctagatcctgcgataagcatgagtgattggagcgttcacgttctagaccgtgatcaggtacttcaggcgtcaattgatgttcacgtttgccacctgctcggtgttatggctcgtctgtgaaaacaagatccagaagattagaatggtggcttgaaatctttctattgttattgttgactagcattgcttgaatcttg

SEQ ID NO: 5486 - DNA, 420 bp, Arabidopsis thaliana columbia
gagacacagctatataataataatgggaagaagaaggtaaatcaccttgtttagttcatcagttggagaaacacggtgaaatgcatgtagagaatgtggtaactcaagaggagcaacaggatcacaagaaccaccttctttgggagttttcatcctcataagtatgtgccaacttgaagcagcagatagatagtcgtctggtagttattcaccacaagtaaagactaataaaaactactgtggagacagatatgtaaaacattacttgtcaatcttcatcacttttgccttcaacacttggtccagaaacgacttcactgcagtcctatctgttcctggattcttctttccctgtagagagatcatacacttaataatataatgtgacatatgcgggcaagtgtattgagaggaggagtg

SEQ ID NO: 5487 - DNA, 743 bp, Arabidopsis thaliana
aaatcaacactttgtcactaagcaaaacagagcattttcagtttgataatcaaagcttagagaagagagttttaccatgaagaagagagtgcaagcttccattaggaagatactcataaaccaagagcttctcttctttagcatagtaataagctcttagcttaacaacgttttggtgtttaagcctaccaataatctccatatactgctcaaactctttcctcggacatggattcgcgtctttaagccgcttcaccgccacagtcgttgagccgtcgtctaacaccgccttgtacaccgtccctaaactccctttcccaagcatctccgcagatgctttcaacaaatcatcaagctcaaactgtttcctcctctcgaaaaacacaagtctgctcctatctgtcgccgacgtcgcatcactctctcctccttctccgtaactgcttcgtctcttcccttctcctcctccgacgaaaccagtctctacacttccggattttgatctttcgccgttacggtctaatcttccacaacagaaagcaaaaccaaaagatactaaaacaataaccgccacgcaaccaccgataaccgcagcgattattcccggtttaatccctctatgactgtgaatttccggttctctaacgctaaccggagaatgcggaatcgaagtaggattcgacggaacaatctgatcagtgttagaagattccgggtcgtttgtgatagtacaaccggtaaag

SEQ ID NO: 5488 - DNA, 401 bp, Arabidopsis thaliana columbia
gaatcaccgttaaatttgattcctttatcgttgaatcagactggtgtagaaacccaaaatgtgaagatgtcaatgaatccattttgtgagatcgcgcttgaggaagcgcttcgaatcaaagaagctggttttgctaaagaggttattgcagttagtattggaccttcacaatgtgtggataacttcgtactggtttagctatgggtgctgatcgaggaatccatgttgagaccaattctatttttcttcctttgacgattgctaagatcttgaagagtttagctgatgttgagaatcctggattgattttcttagggaaacaggtatgtttggctctgatttgcttgtcaagtttggaattttggttgtgtatgcgtcaaatctctagatcttgttttagt

SEQ ID NO: 5489 - DNA, 466 bp, Arabidopsis thaliana columbia
gcaatacacggtttacaaaacaccaaaccatacgacttagtgagacaaaaacataaacgtgtaaatcaaaggatggagcaccagccatgagggagtttagacgcagcagcttggtctaggaaccataccacttcaacatccgcggttagtctaccagctggtaagtctttggtatgattaagagcagccgcaagcgaatcagcctgctctttatcacatacggccataacattataggacgcacaattgctaaccgggaaagtcaatgtgatccttgttgacggtggcataggtgaatcggttatagatgtgacccatttcagcgtctcattgatctgagcatgtccagggaatcgagacgccatgtgaccgtcctggtccatacctagcagctgtagatcgtactgtggacaaccagaagatttgtacgttcggattatgttttggttcacttgatgtgtgaggc

SEQ ID NO: 5490 - DNA, 597 bp, Arabidopsis thaliana columbia
tggtgtttgttcagtgctttcaagtattcttaaagaaggttcgatgaaggttcaagccgttgtggcttgggctgtttcagagcttgtttctggtaatcacgccaaatgtcaagaactgtttgcgcaaaacaacgtgattaggcttcttgtgagtcatttaagcgtttgaaacggttcaagaacatagcaaatacgcggttgttgcgggtagagcaacgtcgatgcatcacgccgtcgtaatggcgagtaaaatcagtagtagtaaagagaatttaccggcgttgaacgaggaggaggacgacgataatcatatcggagtctcgagtccgatgacgaatcagatgcatagcatcgttgcaacaacaatggcgatgaaagcggttggatcaggatcgaaatcgaatctttctagccgatttgttaccggcgacgacgataaacccccggaaaagatactggagaagagttatagtatgagttcacagatcaaggcttacggtagtatcgcacatcaatcgcgaaacgcgtctggtgacgagagggagagacttgaagatcggtgacgaagacttatatgaaagcgatgcggcgagacgt

SEQ ID NO: 5491 - DNA, 525 bp, Arabidopsis thaliana columbia
ggattcaatcagaggggatataatcaccaaaatgttaagctacaaatgagtggcggaaagaccttctctaggggagggagcatgtttgtaccatctgcgacgacaaagttcttgttcatccactcaatgcctctttcaacagcatcagaagtgactgactccattgatgtcgaaaatagagcagtatcattgctgaaagtgataatattgaaagaatctccaggatcaagcttagatagagctgtagatatcgcattttttacatcctcgagaggttttccagtcatacttttacttatgtcaacaacaaatactacctcccgcttgaatgcctaaagttgacaaaacaaaacttaagattaaaatgcaaatgaatttattgctagagaaaagacagagttaaaaatcaaaccttagttttttgctgctttcctggaaaaagatagacagaccatatgtcctctgatcaacatcgtgaacaggcgcacattgaaggaaaagtccccaactatattacttgaggag

SEQ ID NO: 5492 - DNA, 571 bp, Arabidopsis thaliana columbia
gaatagtctaaaagattcatatatagaagaagaaaatacagaataggaaaacaagaaaaggtaaatagaacagaatgatacattaccttatacactggaccaaatccaccttgcccaagtttatttgaggaactgaagttattggtggcagtacgtatagtatgcatatcaaataaatttacgcctgagacatcttgtggttccatatccttcgcccatgcatcttgtgaactgtggatgaacataggatttggttctacgagtaacaagtgtgcatgtattagtgcttaatttgtagcagtttattagcataagcattgactttcaatagaagcgaacatattaaccgttaggacatctagctttaaactgaccatatagacttcccaaaagaactgtcaacctgagactgtaccttgggacacaacttaagaattctagaaatgtagtgtgtatcagatgaagaggaagagattaatttgcttcggatttggtaccgagttagattaaaaaagaggacaaggaaagagagtgagtgagacaaagtgcctgtgtctcccattttgttttg

SEQ ID NO: 5493 - DNA, 1509 bp, Arabidopsis thaliana
cctacactttcacttcaacaacttgtccattatctcttgtaaaatccacaacatcaggtaagggtttggttaaatccagcaggactttagcatgtgacacttttaggctcacaaggtttacggtgaaatcatcagtttcctttggctcaccaactagtccagagactaaactgataccttctttggttcgcagatctagcggaatattaaacatatgaatccatatgggaatgaaatcaaaagctggggaatcagaagcactgtgagaagcccaaggtgcagtgtgaaacatagaatcaccgatgtaccaaatacctttttctagcactttctcacgaatgaaatcatttggaattctgacaagcattgtgccagacaagtgattgacatgaatttcaaggcggcaccccttcccccacatatgattcagcacactttgaatttggttatatagaggaggtctaccattaaagtagcatatgatgaaatctttatggaactcagcccctctttgaaacactgtatcaggaatgtgagtagtaggtcttccaaattcagagaattttataggagctaggcgtttcaaagaacggtttacagattttctcagtttttccgccagggtccttggaacagaggcagacggaggcctacttgaagaaggggctcttataagaggagattgccctgcagaaggagcagcagcagcagcagcatcagtagatgaggtcggaccaccaggagtgataggaggttgaccagaagtggtggacaaaggaggattgtcagaatcttcaggggagggattagaggggataggggcagagggtaatataggattggaggttttgatttggtaagagaaatagaagccttgtttgtgagcaagagagaggttgattttggtttaagtatagtgaaagtttcagctaccttatcttgtattgtagcagtaattccagatctagaagaatttgaaaccgcatctggacaaacagaaataggagtctcaacaagatgcatctctacatcagtagtagttggatcagaagcaacgaccaacacagagcctaccactacaggctcaagaacacgagcagtttgcaatgaaagctttggggtcttggaggaactggaggacagggaagggaactgggacagggataaaataggggaagagggatcagggggtcaggagggagaggcggaggagggatctggttaccaccagcggtgggaagcattggattcaaggcggaagcacgaccattcgagaaccagcggttctgcattgggaactgggacagagagaaaaaagaaaaaagaacacacaataccagacaaaaaaactatttagcaagttatatattcatatcacctcaataccatacatcacaatgcttaaaataaatagagaatatagtataactattcgattccataatttaaggtaaattgacctcgaaaaaaatatctacaacctccaccatcttcagatctgtcagtctc

SEQ ID NO: 5494 - DNA, 618 bp, Arabidopsis thaliana
tcttagaacacaaagaaattgccctatattctagaatattttagtaaatatatataattattaagtttcctggtattcatattattttccaattaaattctgtggaatacagttgggaaagagttgagatctcttcttgacatatgggaatcatctttgcgtgtccatgatagaaactttataaaatcagagagaagtttttagaatataatccattgaattaaattcataataaatggtcaaatatctattacttcatttggaaaatgcaattaaagcgccattaaaaagaataaaatacaattattcttctccttaagattacatttattaattttagatctcaaaaagtaataccaatgttttctcacaagtaaatgaagatgatgaaaccagttccaaagctttgggttgtcatctcaagtgcctttgtgttctgtcttttagtactgtttcaaatcaataaatcagatttgatcgaagcaaatctccaaatcactcatcaagttaacaacttcctcatctccttcgttgcttctcaaataatcaaatcctaaatccaccaaacatgcgaatgagagtgatggatcagagcgaacagcttgaggaagaagaacg

SEQ ID NO: 5495 - DNA, 559 bp, Arabidopsis thaliana
ccctataaaggaatatataccaaacagtcattgaacagagccaatgatagagtaaataaccggtgatcggactttcacctgtttgattacagtgacagaagttgttccgctgcagaaacaattgatggttggatgcatttttaactccttatccatctgttgacaagtcttgagcaaagcccttttaagagggagatacatctcggggaatagcttttcgtccttctcacatagctgtaactcacaccattgctcttcatctacacaagtaggcgcagagttgaggccattcttggagctgctttgttctgttcctgaggtcgttttcagttgagttgataatgtgaaaggtaacatatctcggactctctttgaaaccatatgaccaaatggaccatgtccatcaaatacaccacataacactgtatcgcttctcgaacagaaattctgtaacaagttaaacaagaagaagatataaaaaagctaaaatacatcacaagaagaacatcaatagcaacaagaagagcattgtaactgtagcagcaacagcattacaaaa

SEQ ID NO: 5496 - DNA, 1005 bp, Arabidopsis thaliana
ccactcggtttgagtgacggatccacttgaatcttgaatctcctctctccataactccttggtatgtgtcaagaaaatctgatgcggccgaaggagacaaagaaccgtcctcttggtcgtcgtctaggaggacaaggtgaggtttctcgttttgcctcatgaacgagactgcttcgaggactacggagattgaattgggatcgacgaaaacgagcttagattcactgtgacgcaggaggacagagagtgcatgtgcgtccaaacgagggttgatgttgtttaagatggctccggacattgggacagcaaactgaagctcgtagacggacgggacgttgggacctacgacggagacaacttggcctcggtttatgccgagagaggaagaagtgagagccgaggcgattcgaagacagcggttgtgggtttcggaccaagtgtggacggtgttagtggtgtggaggatggacggacagtcgccgtagacagaggcggctcggtctaagaagccgaggacggtgagaggtgttgagttcgaagggtgtggaagtaagagttccatactttgatttttgttaatgttttgtattgtatgggtatgaggtttgtgaaaaggttagggggttggatgtatttataaaaatcttcaaaatgttttcaacttcatgaaggtggtgttggagtttaggtcattttgttttatttttggtaactataattgatcacttctggcccacgaaatcagcttgatgaagtgaaataaacaaatcttctttaatttcttaacttatcaaaatactaaatttggttaataaataagaagaaatctctctctttttttcttttaaccaaaatttattggtgagtgacgtgagtatataaaaatggaggtgggcaataaataaaggacaaagtttccaactaggcaactaacaaaagttggacggaccaacgaactctctattttataaagctccaaaattgtgacgacaagttcttagttga

SEQ ID NO: 5497 - DNA, 385 bp, Arabidopsis thaliana columbia
tgtaagctaacagattcttaacaccaatatctttgcgagcactaaccatataaaccccacttagcttaggtgctcctccagccttggcacggtggcgcacccatcggtctaaccgagctggtgaaatctgtgtaggaagtaagtctacttttgttgcaacaagtacaagttttgggaggtttttgctacccttaggatcattttcagctttttgaagcacttgaaacagagacttggcagctcgtttgggaaacgaaccatcaaagtctacacaatcaacaaccatgactacaactgtagtgctggagttactcatcggtttgatcagtctagttgagatcaactatcgaaatcaaaatcgggtaagagattctctgcagcctga

SEQ ID NO: 5498 - DNA, 894 bp, Arabidopsis thaliana
tcctgacagaaaataaatataactcagtctctcttgaacagcagcatctatatcctctgacctcactgcataggattaaactcatcctcgtattttgggaaaaaaaggagcaccaaaatgttaagtattttacttagttttctcaacttatacctgatctagtgtttgaacaagattcagaagaatccattggtttggtctgtggagcagcttttacaagcgctgagtaataaattttctcctctgtccccttataactttctttatgtgtttgctctacctcatcgatataggcgacacgaatagacggatacctgccatgaggaaatagcaagcttaactaatgaggctaagaactaaataacaaaccaactggaaagataaaggatgaaagaatgaagatattacgtagtcataagcgtcaatatgtctttagcacgttggtcaccagatctcttatgtatactgtattgttggcatgcgaccacataggtgaatttaatatcagcaagtgcttgacactcagcccagagtgaacttccactacttgaagcttcggcactcttgtatcctttcattaattcttgaacaaaacaaaagcatttgagggaacatgtccatagtttctacaaataaaagtaatcataacaaagactttcatgcacctctttcattagctagatcaaagaaggcctgaagctccaaagccttttggtaatacatcatgcctcgcactggttgatcaaattaagaaacattaaaaaaaaactcactcacaactttttaagttcagtttcttgtttttttcgtccagtgaaagagcgaagtataaaattcgtctagtgaaagaccacatacctgttttggtcagtgtttggcccctgtaagatgcca

SEQ ID NO: 5499 - DNA, 733 bp, Arabidopsis thaliana
ttctccatcgtggatttaccccctgggaagcgggcaattggcaacaaatggatctacaagattaagtatcgttctgatgggacaatagagagatacaaagcgcgtttggtggttttgggaaatcgtcagcaagagggtgttgactatgatgagactttcgctcatgttgctaagatgagtacggtccgagtgtttcttggagtagctgcggcccgtgactggcatgtacatcaaatggatgtacataatgctttcttacacggagatttgacggaggaggtatacatgaagttgcctcagggctttcattctgatgatccgactaaggtatgtcgtctacataaatctctctatggtctgaagcaggctccgcgatgttggttctcgaaactctccacggctttgattcaatatggtttcacacagtctctatcggactactctcttttcagctacaacaacaatgggacgtgtgttcacgttctcatctatgttgatgacttgatcatcccaggcagttgctccatcgctgttgaacgtttcaaagtttatttggaatcttgctttcatatgaaggatttgggtctgctgaaatattttctgggaattgaagtggcaaggaatgctgatggtttctacttgtctcagaggaaatatgtcctcgatattatatcagaaatgggtctgttaggcgccagtacttcttcttttccgatggaacagaaccacaaac

SEQ ID NO: 5500 - DNA, 585 bp, Arabidopsis thaliana columbia
tgataaactccataatgtaaaaagcagtcccaatgacagcagggtcagtgcataagcagaagactttaggaacaggaacctgtgtatgttcacctaaagcccgaagcacctacataaaccaaccaccatcaaagtattaagcaaaaaaagcatctacctttagttgataccgtatctcttataagcagcatcacaaaaagttacaatgattctgcatttcaaaacggtactagaaacaacaaaatttcatcttcttcaaaaatcgagtatgaacagttacaatgaattttacagaggtaaagattattaattgattgatacctgaaactctcgatcaacagcatgagcagattgaagaagcttgccaggaggcttcttcctcaaaacgtatcgtttcaaggaactccctgagccaacctctatcagaaacgttggattcgactgcccatgtccgaactgtatgtaaccataccaaaacaaaacacagtcagataaaagtgtctttcttaccggagaaaaacgtcggcgattggaaacatacctgtgagacttgaattgggaagggttggcggaaaccagagacgt

SEQ ID NO: 5501 - DNA, 684 bp, Arabidopsis thaliana
cccgtaatcctccatacctatagaaatccatgccctcatctctagacagtcaggagaggccttgaatccaagaatcttgttcagttctgcgattgcagctccaaactggttttcttccaccaaagccactgccctgaacttgtaggggaatgtcaaagtagggtcaaactcggtagctgtatccaaatcaagcagcttttctttaccactgcaatacaaggacctttcctggtgcatccacccagtagccttgtgatccgaaatcaaggaattgatgatcttataagccgagtacctgtggtcacgcttaaacttagtcctggcaacacccacgagagagtaaagatggccagcctcaaccgctgcgttaaaccatctctgagcatccttatattcttttctctctagcatcaccactcctaattggtgatacgcaagctgtttctcccaactatccaccgcacattcaaccagacgttctaagagcatcacagttgtgttagatttcatatcatcttccatcgcaatctggctcaagaagaagtacaatgtaaaagaagcatggccaagagacgccagcatttcccgtccctcggcgctgcagaaaatctttataacattcggattatgcatagagctaggcaattccctgagaaaacctgaagacaagctgccaccagaaga

SEQ ID NO: 5502 - DNA, 510 bp, Arabidopsis thaliana columbia
ggagctgtcaaataagccaatttcttgcagcttgctgatgaatcatgaaactgtttttgcctcatattacgattgaaacacttaagagaaaaccaatacaagaagaatactgtctgttgaatcattctcttattacccgaagaaaaaaagatataacaagaacatatcaatcctcagcgaaacatcattcatcatcatcatatgcatttgagagaaactaggaaatcaccacacatcaggacggagttccccagtagccggaggatccagcgaccagaattgtacacattctcgccaactttccatcccggaacatctttcattacatcagcctcatattccagatactttttccactcagacacaaacctagaatgcaaaatggggattgaaacaagattgctatctgaaggttgctgcaggcacattgacttaaatttgagaatatggtttcctttcatcttcttctgcttgaagaatgggaagtattgttctacgagcagcatattt

SEQ ID NO: 5503 - DNA, 558 bp, Arabidopsis thaliana columbia
caacaagaaacggtgtcaacacacattacctgcaaagatcttttacgtccttcaaagctaaacggataggtaacaacaccaacagtcaaataaccagcatccttcgaaatctgagctaccacaggtgcagcaccagaccctgttccaccacccataccagcagttatgaaaacaaggtctgatcctttaagagcattagcaattgcatcttttgattcttctgcagcttgttctccaagaagcgggtttccaccagtgcctattaaaacaagtaacagagacgcaagtttgttactttaagtgccaaaactcacacaacatctataccaaataatagtataactctactaaccaagcccacgagttaaaagttctccaatttgaagtgggttctcagcagaagactgtaacagagcttgcgaatccgtgtttatcgcatagaaatcaacactctggaacacaggagaattcaaaccattaatcaatcaaaacccaaaatgagaaaagttccaggttttcttcttcgtagagagaaagagattgagaaatgtgacctgt

SEQ ID NO: 5504 - DNA, 608 bp, Arabidopsis thaliana columbia
aggaatagagtcatggccaggaaagcaaatccatagccacaattatcgtgtttcagatccattcaaaggtcaagtaatttacagaagtccacaaattactttgactatatcgtcttttcagttttttaaatgttttgttatagtatagattaggttaagattaacaatgttattgtttgagatgtgtaggtggtgatagtgataggatatcaatccagtggaagtgatattagtagggacatagcaatcctagcaaaagaagtccatattgcagctaaatctgatgcatacgcaaaggaaagttcgatttatagcaatctacattttcatccgacggtaagtaaataatgaaaacataaaaacagagaaaataacaaaaacaccatttaattttaatatatgattacttgatttcttcctccccaaccacccctgatatgttatagattgaccgagtgtatgaggatggttcggttgtttccaagacgggaaactgatatttgcggatgcatagtacattgcaccggctacaagtattgctcccatttcttgaacaaagggttatgtgaacgcgaagataactgtgttggacattatcaagcatgtgt

SEQ ID NO: 5505 - DNA, 552 bp, Arabidopsis thaliana columbia
  unsure (1)..(552): unsure at all n locations
tttgtaaaaatcaggagattggttgtttacccaaaaggaaacgaagaggacaatggaaagggctttgtgtctatgtatgtggaatgtctctcatccacaacaccacccattgatgtgtttgattatctctctttctttgtctttaacaagaaagacaacaagtacctctcaatccaaggttcgtatgctcaaatccttattatctctctttttctctcgtatgtatatatgaatgaatgaatcgtaatgtgtgtgtatacgtgtaaacatgtagatgttgaagttaagcgtttcagttcttctaaaacggtttggggattgccaaaagctatgtcgcttgaaacattcactgaccctgcaaagggatttatcgtggaaggagaaccatgtgagtttggtgctcatgtgaagattgcttcatcacccggtccctgttgatgagaatctcccttttcacaaattctcttggagcattcgtgatttctctgttctgaaacagaatgattgcatatctanaacctttgcaatgggaggaaagaattggtgagtttt

SEQ ID NO: 5506 - DNA, 422 bp, Arabidopsis thaliana columbia
attatttgtggcaggtgatcaacgcagcttgggataagggacttcaaatcggtggagagaatgcgattacttgtttcgacagagatggttgtatgagattaatcgatatagctaaaccaagaaaccatccagatggctatcacttctccttcttcacatatcgtcaaccttcttccctgggtccagggatctacttgcttttccagatttggactacttcattaaacgcatgcatggtaagatttacccgcacgcttgattgtgccttccctttagattcgttgtcaaaatctttgttcttacaactatatttgtttctttgcaggcgacataagagataaacagttttaggatttgcatggtcttaggattcttttagtaagtgtctgttgtttaaaacttcaaaatctgttttgttttgt

SEQ ID NO: 5507 - DNA, 577 bp, Arabidopsis thaliana columbia
caaagattttgggaaagaacaaagagagctgcaatgggctcacgcacaaagaacgctccatggtctacaagcaccagatactaagatgttcacagatcgaacccatgtcagtgaacttaaccaaatggctgaagaagccaagaggagagctgaaattgctaggtaaagtaactcaaagccaaatcttctccagctttttgaacataacaaaagaacattttttcatcgtcttctctctgtctactgctctcttctttataggttgcgtgaacttcacacgctcaagggccatgttgaatcagtggtgagactcaaaggactcgacatagaaaccattcaacaagcttacactgtctgagaaagtgagtgcaagctgatttcagttgggtcatgaaggttgtgtctgtagttaatacatagatattgcatataaatatcgaatcctcgtagccttcttttagcggtttgttatgttctgttctgttgtggtgatgaaagaagaaacagaaacttcgtacggaggttgacattaggacaataaacttatttacaatacatgtctcaaagatgaagtgat

SEQ ID NO: 5508 - DNA, 238 bp, Arabidopsis thaliana columbia
ggcatctcctcaaaaaccttccttgaacacgaaaccaatccataaaccccatagagatgcaagatagcagtactaacgtaaacatcagacaacaaaccagacttagccacaaagccgtgaacttgaaccccttctctgaacatagaaccagaccgaccacaagctgttactaaactagcaatcacaaagctacttggcttaataccaagatcacacatcttccgaaaaaattccattc

SEQ ID NO: 5509 - DNA, 667 bp, Arabidopsis thaliana columbia
  unsure (1)..(667): unsure at all n locations
caaccggcttcatacacatctcttatggcgacgtcccagttttgtcgccatcatactacagtgccgcggcgactcctacgactccaagtgcctctcctgctatgccaccgccctttccggggtaatgtcacttcagcattattaattagccgtcgcatatcgaaagaaacaccaaaaaatgttttctattgtgattttactcggtatgatttcaaatatttaaaaattaaatcatcaaatctatctttaacatatataaacatgtatatctcttgcatgttaagatatatatttgcattgattagttaaatcattactcaaaaaatgaaacaatcacatgtatgtatatggcagcttcgtaggagatgtcagaggaacaaaggaagagtaatatggtacgaccaatgttttctcttcattaattccatcagatcatccccaaggaagaacgattaaaggaatgttttctctatgcacaacccaaacaacatgatcgaggacacggaattgttcacaagaaaacaagggattcctctacgagctcatgctggaagcactacaccaacaggacaatgatgctttcgcagcaggggagaagngctagggcaaagaaattgtatcaatggtcagtgtgccaagcatattcgatgaagggttgttggatggg

SEQ ID NO: 5510 - DNA, 2000 bp, Arabidopsis thaliana
ttttcattcagacaactattagttcttgttaaatttctctatctcgtgtgaaactattcaggtttgtttaactggttctgatgaggcagaagtggccactgagtttgaagaattggcgaaagcgtttgctgaaggagctagagcaagctctcctactcttcctctgactgtattagttgttcaggtgattacttttcctcactttctctttaataaaatttgaagaaattgtatataattcagtttcccgctctatagtctaattttattattaaccgcctctattacttcttgcgcagaatcactcaggaatatcaaatgttgcaccacctgatgctccactgcaagtgctggctattccaatttcagataatgggacagatcaggagcaaaccaccaatgtcttgactgaagctcggattcatgatcacattaacaaccttcggttcagcatatccccaacagcattttttcaggtaataactgaaccttcatgatcaatacatttcaaaattcttttgaaaattgtttaattgatttgaaaattattgatccaggttaataccgtcaccgcagagaagttatactcaattgctggagactgggctgaccttggtcccgacactttgctcttcgatgtatgctgtggaactggaacaattgggcttacactggcacatcgtgttggcatggtaatactgtactacttgaacttgcaaaaccgaatagcaccaatccttacctgtttatttggttgaagcaagtatactatgtttcactagttctggtaaccaaaactagaaaagtgtgtacaactggtgctgtcttagttttggttataactttttagagacttgcaggtaattggcatagaaatgaatgcttcggctgtagcagatgccgaacggaatgcaacgatcaatggcataagcaactgcaagttcatctgctcaaaggcatgcattttgacagtaacatatttcgtagttggttccattgtcttaatctgtcttcatggtagttctgttggctttgttgtacaggcagaggatgttatgagctctctacttaaacagtacctagatgtgactcaaatggaagaagctaagcctctaagtaatgctaacgatgatctcaacaaacaaattccctcaacagaagaaatgacaaactcagagcatgtagctgatcaaaacctacctccttcaaacactcaagtggaagaacttcaagacaatgagcagaaggattcctcgtccttagaaccggaaaaaactacaaaaccacagttcaaaaatgtggttgctatagtcgatccacctcgctctggacttcatccagctgtaatcaaagctctaagaacccatccccggttaaagagacttgtgttagtcccttctctaaacactccctaccacaaacttggttacttcgtctctgtttcctctgtttaacacagttgccaatctttgctttgatgcaggtacatttcgtgcaaccctgaaacgctagtggcaaacgcgatagagctttgcacgccatcttttgatgaaccggatagaggaaacaaaaattacagagggcgcaagaaaataggcattgccgctttggctcgacatagagccaagtcaatgccaacttctgaggcttttagacctgtcaaagcaatggccgttgaccttttcccccacactgaccactgcgaaatggtaatgctccttgagaggtaagaatacgaaataaactctttaagagaatgatgtagcaccaaaagaacaagcaacaactatttttgttttgcataaacacaatttaaggattatatatatgtttaagaactgaaacaagttttttatatcaaaaaaaaaaatggctctttaaaggaactctccttcagtaaagtaagtgtaacgagctctggtcatgttatctcttcgtttcttgtaaacaagagctccgattacaatagctcctactccgagtatcgttccaatggctat

SEQ ID NO: 5511 - DNA, 561 bp, Arabidopsis thaliana columbia
  unsure (1)..(561): unsure at all n locations
nnnnnnnnnnnnnnnnnnnnnctaaagttcacctgagcaaccagtggcttcacaccggagaaatcctgctgcgcccagtaaagaaatgcatccgtggttagccagccttccctcggccttttttgcaataagacccgagcgtcacgatccgtgatgttattgaggaataacgctctgaagagcggaatatcgttctccgttagcatattaagattgatgctaagttccgtggtcgggagaacgcagacatacgggataagccgctgatagatgttttcggttatgccttttatctgacgtaattcgccagtcagaaaaagcatctgattggcactatgccggggcggcgtctggctttggtaaaagctatcttctgcgccgtgaaagcgtggtgagtcatcgacatcaatatagtcagcgattgattgcacgatctcatcggtgtttccgcgatcgataccggcgttaatcagcagcgcactgaatacctgggcggggaaatcaggggaaccagcgggtcgtcagagatttttgctaacgcattgagattaaacagtgctg

SEQ ID NO: 5512 - DNA, 1305 bp, Arabidopsis thaliana
ccgacattacgactgctaaagcaagtttttccatttgcggatacgagattccgcgccggtgaaagtctgcgagacgtaaaaaattggtttctgctcgcctctgtcttctcggactaacactctactgactgcagtatcctatacggcaatgtacaagtatagtggttctccgattacgggtttcgcgaggatgggtggagttgccaggtacttcttgagttcctgaaaaagcttcttcgcatcgggtcgtccattcaaactttttatttccccgaagcacatcataaaaggctaagcatttgtcggttgagcgagagatgaaacggttaagggccgcaactcttccggttaggcgctacacttcttgcttgttctgaggtgaccccattcccaacaatgcctcgatttgcttcggatttgcctcgctgccgcggtgcgtgactaggtatccgaggaactcgtcggatcttactccaaagcggcactttgcaggattgagtttgacgttgtagaggttaagctgcttgaaacattcgcgtaaatgggatatgtgatctttctctgtcatggatttcaccaacatgtcgtcgatgtaaacttccattgtcttcctgatctgtaatgcgaagattttgttgacgaagcgttgataggttgccccggcgttcttgagtccgaagggcatcactcggtaacaaaagatgccttgttctgtgtaaaaagcggttttttcttgatcttcggggttcatcatgatctggttgtaaccaacgaaagcgtctatgaatgacagtagcttgtttccagaagttgactctacgaggcgatcgatgtgtggtaatgggaagctgtcttttgggcaggctttattaaggtctgtgaaatctacgcagactctccatttaccgtttttcttttttactacgaccgggttcgcgatccaatcgggatatttcgcctcggtgatggatccgatcctcaataatttctctacctcggctttcacggcttcttctcgctcccgacccaattttctcctcttctgcttgatgggtttgaaagtcggatcgatgttgagctcgtgcgatacgatgtcaacacttactccgggtaaatcttctgaggaccaggcgaatgtattgacgttttctttgaggaaggcggtgagttcagctgttagttcttctcctagatctccgccgattacgcatcgctcgggcttcgtcgtcaaggcagattaagactaccggattcggagttggtgttgtagattcccgagcctcctcgatccttagctgttataac

SEQ ID NO: 5513 - DNA, 1307 bp, Arabidopsis thaliana
tcaagttcagggattgtgctcatgcatatactgagagtgagttcgagaaagagtttggtcattttacaagtttatggcctaaagctgctgactttcttgtgaaagtagggtttgagaaatggtcgaggtgccattttaaaggagacaagtataacattgacactagtaattctgcggagtccattaatggtgtgtttaaaaaagcgagaaaataccacttgttaccaatgattgatgtgatgatttctaagttttctgaatggttcaacgagcataggcaagcttcaggttcttgtccaatcacagcacaagttgtgcctactgtggagaacatattgcacattagatgtcaagttgcagccaaattaactgtgtttgagcttaacagttacaaccaagaatacaacgtgattgatctcaactcggtaagttttctggtggatttgaaaatgaaaagttgttcatgcaaatgttttgatatagacaagatcctgtgtgtccatgctatggccgcagcaaggcacctcgcccgcaaggaagggagaaatgcgaatacaaccatctacggactctgctctgtgtattacttgatagatagttggtcattggcctattaccggacgttgtatgtagtcccacatgagtcggtttgggttcttcctgcccatattaaagagttagttgcctttccgccggaatacacaccaaaaggaccaggacgaaatcaagagaagcggtttccatcagctggtgaagcgcgaaagaggagaaaatcgcaacctggaataaacttggaggcttggctgcagcctgaggaagattaagtctgatgcagaaagggttcaaccggaacaacctggccaactgcagaaagggttcaaccaatacaactaagttcatttgtatttgcattatattatttgtaagtctgatgtactatattatttgcattataattctcaatattttcagctattatcaacatctaaacattgaataaatccaaaatatgatattacaacattgttattaataaacttgatcataaactggtttcctaataaatcacctatggtttgccaaggacattttggtcatgattgtataatggacatacgttaagtatgaaaacagatatttactaaatatgattctatcaaaacttattaaaatccattaatatgttaaaacttatgggaccaactaaaaaaatgagttggttttcagattcacttcaaaacacaaaatttagatagttcactgtttgtgattcggccactgtacatatcatacactatgtgtatctg

SEQ ID NO: 5514 - DNA, 1357 bp, Arabidopsis thaliana
cggcttaggatgcttttgcggcttcaaatcgagctttcgaaccattgtttcactcgccacatttgtacagcttcctccatcaatgatcaagctacaaactttctcattgacgatgcaccgcgtatgaaataggttctctctttgctcttcttcttcggttcgggtttgaaggcttaaagttctccttgccacgtaaagttctccgaacttttcttcatactcatccggggatgaagtcacgtcttgctcctcttccgaatccttagaaactttcctcgacatcaaaagcttctcattagccagcttagcaatacactcttcggacgacgaatcaggttttagcacgaactcgtcttcggactcaaactcaccattcgcccttatgaccataactctcttgttggtatattcattagcatagtgcccacgtccatgggacttgaagcatcaaagatcacgggttctagtagtggtgcactatcgggcttggtcttgtctcgctcttggatagtcggcattattttaggctcactcttaggaatgaaggctggcttgacgtctcttgaatagcttggtcggtttgaatcataattcacccaagaggatccctttctcttaacctgttgctccactaggatatctttatgtagcatctcctccaactctttgtaatgttgcatctcgacacggtcctgaatttcttgattcaatcctcccaagaaccttgacatagtcgcttcacgatcctccattatattagcgggcaatatcaaagtttccatctcttggtaatagtcttccaccgatcgagtaccttggatgagctttcaaagcttggaatgaagtcacgatgatagtggcttggcacaaacttacgcctcatgagaagcttcaacccttcccatgtatcaataggatactctccattacgccaccttgtagtgacgatttgatcccaccaactaagatcatagtcaaagaattcggttgcggcgacctcatcctaacatacctcggcgtagttttgacaattgaacacaagttccattttcttttcctagtccaaataggcatccagatcattcttcccacgaaaaggtggaaccttcatcttatagccaccaagattctcaaccataagatctctttcttctctccatatcttggtcttaggttactccggtgagatgagtgaccatggttgtagtattcttgagcgtttgggtctactaggtccttccttgggtcatggattcgactattcatctcctttcgagattgctctccttccgagatgacaacttgttcaacgggtgctttccactttcgctttaagttgattgttgattggcttaag

SEQ ID NO: 5515 - DNA, 545 bp, Arabidopsis thaliana
catgctccaagcacttaggcttaaaacattaacattttgagatcccttgttaaaagcaaagagatgtgttctttctcctattgccaattttggataaactctcgaggtaatacatgttttccctttcccaccaaagctctccactattgatttatcaatctacaaacacaagaatcaaaaactcattagtaacaaaaaagcacaaattagtcttcaagttcttgtgattatgagaagttgagacgactcaccaaagtcctgagagagattggttgataaggagagatatctaaaaaagcaccataagttgttttatcattccctttctctaaacttgatgtgctttggtcactgcacatgaccactacgtgctccttactattctcaccagctctgaagattctgatattgaccgatgtatactcttccatgttcttggaagctagaaccattaaaccgaatggacctaaacctgatgacgcattcctctgactgcagatcaattgcggatcggtccagcccggttcaatcacatctgctttctc

SEQ ID NO: 5516 - DNA, 1231 bp, Arabidopsis thaliana columbia
caagaacttgcaacaatccatgaccagcaaaagggcctccactaagtttcccactttgtttttttttttccagattttatcaaacatttcgaagagtaatgacgagcagtgagtgtagtcgcttcaaaactccagtagtattcttgcttagtgtattcgttacatagtttgagaaaagtttcagagaaatgtttactggctataaaaacgagccgttttggtttacacaaaccatctcttctctgacccccaagattccagcttctgacatttgcggaaacagagaaaaaaacaaaaaaaaaactggaccatcttaaccttaaacagaccaaaaatttcacatctggaccatcttcaaaattgtgatttgcagatagaactgaacctttttttttaattccacaacatcaacctacaacaaaacaatagagatgtgtctgtcaaaccttgaccattatctcatcagtcatcactcaagaaaagcttgtaaccattccctgattctttctaacctgttggttggttgttctgatcattaggttccttgctactacctgcctggcctaaactcagctgtgatgttatttgttgactctataagaacatttttaaaaagaggatgggtcttgtgagcaacgtcatttgttggaacagaggaataagcacaatggatattgggaaagaattacctgcaatggaggaggaagagattgttgcatctgatggtgaccaacaaactgaccataaggattcatctgaggttggttcgacaccgggttaggctgtggactttgtaaccaaactctggatgggtcaaaggtctgaatgtttggaaaagggtatcgcggtggtggatatgatggacctacacccgccatatgagcctggctagggaaaggtatgtatgcaggaggctgattcatacccatggccatgtggggcatgaactgctgcatattcgatgtatacatcatcggtggcatcataccacttcccattgacatcatcgattcagatattaaaaaacctcattcatgatctgaagattattcatctacataattgctgtaaaacaaattcatgacttgcaagaaacagaagagcaagacctcaaggacatataagaggaatcatcttattaggccaaccatctaaacgaagatgaatcttcagacatcaaatctaaaaagaggaatcttcaggggcatacatttatttgcatctctagaga

SEQ ID NO: 5517 - DNA, 1499 bp, Arabidopsis thaliana
ctagaggaccgtcattctaagcaggagattcatgctgcttagtgcactaccataatggagaagatcctccattttcttcctaaagatgcatctgagacatcttctactccactcaacaggtatatcaagcgacttgttaacaatggtattcgctcagatgaagctaagctattgaccagggacatcagtgcaatcatgctgcctaaggtcaagaaagagaaggcacagagagtggacattgttgagtacatccgcacaatcactccagatcagaccactgagaagcttccagatccaggtagctttgttcttgattgctctatctccacaagcaggttcaaccgctctttgtgtgatttgggatcaactatcaacctcatgcccaagtctgttgctgagagactaggcatgactcactataggccgactcgcatcactctcctctttgcagatcgttctagacgtatccctcaaagaatccttaaagatgttcctgttaaggttgataactgcataatccctgctggtttcgtggtacgggactatgagaaggaacccaaggatcctcttatccttagaagagcgttcctagctacagctggtgctaggtttgatgtgaagagaggtaggatctctctaaaggtttgtgatttggagatggagtttggcatggatggttcagagcttactaagcccatcagcaacattgcctccagcacaaacacccctctttagactactcgggatcccaaaacagagctacacacaacgctcccatccactcagctcaccaatgagagttgcagagcaacggtgtcgatcaacaccactactcctgtcgatcgacaccctcgggtttcacagacagatgattctgcacattctgttcagcccacaccacttgaggacctctgtgataagttctcttctatctcttctcctgccataccttcgattaattctttggattctttgaagtctgcttcactggataacaagcatagagttcttcgaaagcttgtttctcctcttgttcttgcaggtgacgagacgagtgttgatcgacacaccactaagtgtcgatcaacacctacagctgctctaaccagatccgtttacacaccgccttcgaaggcgaggaggcagcatcaatcctccatcactccacccacaccctgaactccgccaagtcaagctattgactcaaaacaagcgcttagtgggaggcaacccacaggtttgatttttattttccctctcttttattttcttttatttttgatttatttttctcgttttctctagatttgattgccactggggacagtgtcgtttaagtctggaggaggttcttactaattatgctttgatttttggttcttatcatttttcgtttttgagtttattgagtcattttccttcttaaaaaaaaaaataaaaaaaaaaaaacgttttctttagtttagttagaattcaggttcaaaattcccctggattat

SEQ ID NO: 5518 - DNA, 1090 bp, Arabidopsis thaliana
tgtgtctcttccaatactttatctagttctggggccgagctgacggcgcgatgcatcttggacgatatatctttcaatgttgttcgtagttgctggagttcccgatcacgcgcaccggtatcatcgtcttctgttcgacatgctcgagtgtcgacgctcggccagttgtcacggtttgacgcattttcacgggtgtgctcgtcgatggacccaacgacgttggaggcagacctgttgcgtcggtttgccggtctttccatgattggagtttgttagggcgggattgtttcgtcatcgctgagctgtcgatcggcttgagctacggagaactggaattgcttgatctgattctgcgaggcctcctgggcagcgatgatcgcgttgatgtgttcggaagttcttgcatcctgtaagtcgagtcggtcgaggaaagatcggatgacttcgtccagattggttcctcgtggagttgtctctccgagttcggcgggagctgggacaggagctgcggttggaactgcgacaggagctgcgggtggaggtggcgtcgttggccgagctggtggtggtgtcgtctgccgagttggtggtggcgtcgtctgccgagctggtggtgcgacacgaggcgcgctggttccgactccttgttcgttcgaggtttccatcatctcatcgtggctctccgggattactggcaacatcgtctctgctcgtcaatatcagaagaaaactatgcctagccccacggtgggcgccaattatttgtaccgaggttgtaacaataaataactaaggggttggggagaacggagtagctttttgattaatgacgaacggaaaagatggtaatttaacagaacgaaaaaccgtaagtatagaacggagaaccaaaagtacagaacggaaaaccgaaattacaagtcggaaaacccgaaaatacagaacggaaaacgagaaagtaagagacaacagagctaggcaattattctcacttaaattctctagctaataactcttggtccgggcccagttcccaatgatatgtcttttgatatttataggctaggaattgacctagggtctccctgca

SEQ ID NO: 5519 - DNA, 608 bp, Arabidopsis thaliana columbia
ccatcttctgcattcaccgcagattctatcacagtaacctcatgttctttgtaatttcgttgcagctatttgcaacaaagaaggcagactctatgtcatgttggacactattggatttgtacctaaaccccagcaccgtaagatttttatatcactctgtttagcttctgcttattctagagctacgcttagcaactcttcttttctaggatgccccattcccgttgattatgaccctgataaggtgctcctaccaagtgataaaaccgcagatacaattgtcagaaatttgacctacgtaacagaggatgaatcctctaagtctcagtttcctctatttggcggaaacataagctggtctgaacgagaagaaagcttcaaactgaaacctgagatgaaggtaaaagacttgttttaaggcaatggctaaacctcttctaccattcttcccacgaataatttctaaattatttatttcattacaacccaaaacgtttcaggtccattgcggattcatgccacgtggtggtgctgaaatgtcactctggataaagaatcgtaaagaagtgcagatttgttgttgcacggggattttcgtgcatatgatg

SEQ ID NO: 5520 - DNA, 557 bp, Arabidopsis thaliana columbia
tgaagaaaaaacaggacaaagcggttagacaaatagaagtaatcggattcaagaactcgacatatcggtgtgacttgtttgacctggagttcagcgattcttttgagctgagcaccttcaccaccttctgacaaaggaagtgcagcaaccaaagcatcaaactgtttagcagccttaactaagccagcactgagctgcttaggttgctcaggaaaaggcgtacatcatcagtaaccgtagttgtagcgggtggttcaggataattaggtgaaagctggactggtggtgcatccctttgcagtgtcccaaaagcattgaaagtgatagcagcaatcgtattcacttgttcttgcaactgtgagattatatccatcttccaaaaccttaaaagaccttgaacaagtataaaatttacagtaatcaatcacatattagacttttaacatatactcaaaagcaagatataacgttcagagaggatctaggagattcaaatggcacaaaattggtggtcaattcctgaatttatcaaacaagattcctcacaaaactagtgc

SEQ ID NO: 5521 - DNA, 1322 bp, Arabidopsis thaliana
cttatcacgaagtcctcaagtggtgtggctgatgagaatgtcagaagcatctgtctggaaacccgaggtgtcaattgacaggggtagtggtgtcgattgacaccgtgctctgcaactctcattggcgagctgagcaaaagggagcgttgtgtgtggcgctgtggtgggattctgagcagtctgaggaggtgtgtctgtgctggaagcaatgccactgataggcttaataagctctgaaccatccatgccaaactcaatctctaaatcagaaaccttgagagagattctcgctctcttcacatcaaacctagcaccagctgtagctaggaacgatcttccaaggataagaggatccttgggttccatctcatagtcaaggaccacaaaatcagtagggataacagagttaccaaccttaacaggaacatcttcaagtattccttcagggattcgcttgaaacgatccgcgaaaagaagagtgatgcgagtaggcctgtaattagtcatgcctagtctttcagcaacatacttaggcatgaggttgatacttgatcctagatcacacaaagagcggctaaacctgcttgtggagatagagcaatcaagaacaaagctacctgggtctggaagcttctcagtggtctaaccaggagtgatggtgcagatgtactcagcaatgtctactctctatgccttctccttccaggtcttaggcagcatgattgcactgatgtctctggtcagcagtttagcttcatcggagctaattccattgtcaacaagtcgcttgacatacatgttgagtgaagcagaagatgtctcagaagcatccttaggaagagtatggaggatcttctccataatggttgtgcacttagcagcatgaatttcctgcttagaacgacgtttcctcgcataagggacatgaggagtgtaaacagactcgggctgcattgggatttgcacctcaaaaggtgcagtccggatgcagtgtcgatcgacaccttcgtattgagtcgtcttagagaagagcgtcccgtagggtgtcgatcgacattggaaggtatcggtcgacaccatctctgcaactgcgagctcgagctcttcttcagtatcgacttcttcccacacatcatctccttctctgatcaagatggcattacagctcttccttgggttagcatcaggatttccaggaagaaaaccctcttgtcgcttgattgattgtgctgtttgagctaactatacattcatcttcttcaagtgagagctcagattgtcgatatttccattaagatctgtgtagacagcatcaaacttgc

SEQ ID NO: 5522 - DNA, 584 bp, Arabidopsis thaliana columbia
cagatttggttctctttgtgtcttttgttgtaacaacatctggaagagcctttttcccctgaggtagcctcatagattcatagttagcaccggttgatttcgatcgaggaagaagtagttttggatcacttgttgtgttcttctttttcctaatggagaaagttgatgtaaccctcttcacaaaacctttagatccatctttcccaccacctgtagaagccatatatattgcagtttcagtttagctccttcaatcttcagagccaaaatacaatgtttggtttgatttataagcagaacaattcacaacataataaacaacatttgcgtgtgcttagagattaaccagaaacggcaaatgcaggaaaaattcctagaaaatgtcaactacttgaaaatgatatatgaaatttaaaattcttaaacattcttgattagttgatgtaatgcaaataatatatcaaataaaaaattaattgaaaaattgtgacacacctagcactaagttttttcttttcttctgatgatgattagaaagagtcaataagcttgaccattaaacaaacagaaccttcttgataaaa

SEQ ID NO: 5523 - DNA, 1442 bp, Arabidopsis thaliana columbia
tgtcgactctacatgcgtcgttttacatatggttaactgctaaacattccattatctctacttatcaatcaacagatcatagtaaacgtaatttcgtagaagttaagcacatacatcttctaaaaactagagattatttatcttgagaaatctgtacatatttcaaacaattctatatatatccaagggtgaatgggcctgaggggactgttaaatgggccatatatcaccctccaacccaacaatactgccagatggcgggattaggaatttagtattctttaaaaataaaattaaagaatgagaatattacacgtagaggcactattttgaaactttagccacaaataggcactttgaaaggagaaggcactttaccaaatcaaaattcccaaattgccctctgaaccacaacgctttctcctcattttctctctcaactcttttctttatcgtctttatttctctctctttccaaaatcaaaaccaattttttacgggaatctcaatattccaaatcaaaactaaaaacccaatttcatatgatttatcatcatcttccctgtctctcaacaattatttgatttggttccatttatttctctccttgattaaggaatctctgtcatcgattacaatgaaaagtgaggatgttaaccatgatcagttaccttctaagcaatctgggcttgaaacggttcgtgatgttgagaacgcgagtagcagcaaaaaggccattgtcgatgtaacttcatctgaggcatagttgtccattgatgagtgtccaagcattcaagtccaaatggtcatctaataactcacatttgaggcatagttgtccattgataagtgtccaagcactctagtccaagtggtcatctagtaactcacatctgaagcatagttgtccattgatgagtgtccaagtactcaagtttaagtatataaagcgtgtaagaagatcaattgtagcagcaatgttctgttgttgattcttaatatatccttcgtttttaagttatgatagagaattttgagataatctcagaatttctatgatttgtaagaattatagagaaccaccatgattgatgattttgaaaaaggaaatgaaaatgatgaaaaaaaaaaaacatggaagacagagaagataaaaaatgatagtttctcagacacgatctcatctggagtgaacggccatgactaaaaaaggagagcttcatttataagttatttgcgtctgcattactttaagggcaaattggtacaatttcttttcattactttaagggcaaatataaaagtgaaccgtttggacaagtttaaatggacaatctatactggataaattatttgttgatttttctttcaatttgcagagatctctacctttaagacaatatattgatgccacgagaatattaccatatggtcattagcgc

SEQ ID NO: 5524 - DNA, 1636 bp, Arabidopsis thaliana
catatgaagaagtacaaaagcagtcaaaagttatgagaacagtcccctatcgaagtgcagttgggagtctcatgtattctatgataggcacaagaccagatctagctcattctgttgggttgctatgcatgtttatgagaaaacctctaaaagatcactggcaggctgtgaagtggatactcaggtgtattgtgggtactatggatcgaaagctttgctataagaatgagggagggcttgctctagaaggttattgtgattcatattatgcagcagacaaagagaaaagaaggtctacttcaggagtagtattcacgtttggtgggaacacaataagctggagatctagtctgcagaaggtagtagctttatcgagtactaaagctgaatacatggcattgactgatgcgactaatgaaacagtgtggttaaaaggtctcgtgaatgagttaggcttcacacagagatcagtaaacattcattgtgactcacaaagtgtgattgctttagaaagaatgcagtttaccacgagagaaccaaacacattgatgttaagtatcatttcattagagagttggtgagtaatggtgaaatacaagtactgaagattgatactcaaagtgtctcacaactaaggtggagcttgtgttccggataacagctgagtgggtttattcagggagaaagagctgagtgggtttattcagggagaagaggctgaacaagttggttcagggacaggagaggaatccaatactaaactaagacagaaagtgcaaaaagatcaaggtgagaattgaaaagaagtgatctatatgctaagtctgtgaaagactctttgagaatcagaaggtttcaagtcgagctgaggagatcgcgacacgtagctcaatctcagtcgttcatctctaacggaagaatcttatccgtttctcgtcttctttcattctgtttaagttgctttttaatttttgtttcgcatcatcacgattcagagttgttgaatcgagaggttagagagagaagagcagaacaattttagagagagagagctcgattttgagctaagaagtttagtggattctggagaaatctacggcgagacgtaggattccaaatcggaatcaaaactcgtaaaattctcttttgtccgttctaagtttctcggtgtctagtatcaaacgagcgtgagagaaagtgagatcgatcagtgttcttgaggatcaaaacctaacaagaacattcggtgtctagtatcaaacattcggcaacttttgctgagagagtcgaggcgaagacgcttctcttcgaacaagttagcgaccggtatatgctctttgtctaggcgaaacgcaacaatgagttgattaccaagcttgaaggcgggggaagccttgaagaggagaagaagcaagtgctggcatggaaaaaggaatacgatgatgccgaggcgacatacaacaagctcgttgtagagctaaaagaggagttgaagatccctcctgtttttcctaacttgattcccaatagcctcgggaacagatcggccgagggctttgcagatgaggttggcgttactgatcatgcaagctcaaacctgcgcgaagatgagatgtgcccttccgaagaggagcct

SEQ ID NO: 5525 - DNA, 522 bp, Arabidopsis thaliana columbia
gctaaataggtcatgtagaaggacatattgaactgtttcacgaaacaaaattcgaacaaaaatcaacaaaatcgccatagcaaaacaaagcaataatcagacgaaaccagataataagaagaagaaacacgagattactgtttcagtgaggtggtccagattcacggaagtgaatcggagaaggtcattgcagctgaatctacgtatcgtcgtcatctcttctttttctcaaatcccttcgagcttcgtcagattctctggaaaaagaaagaggagacaacaacaaagcaatatacatggcccagttagaaaattaataaagcccatttatatttgggcctataacactgatgacgtcatgtaaaagatgatcaaatttcattatctcccgtcgtcgcgaccttctcagacaacagaaccaaatcctcggcggcgattgaagaaacctttccgatggatctgctcagggaagagattctgaagaaacgtaagagtctagctgaggaatctggtggtaagaag

SEQ ID NO: 5526 - DNA, 554 bp, Arabidopsis thaliana columbia
gcggaacttcccaggtttagtgatctttgcaccagacagccaacgcaacacggtggtgaatacttcatgaatgagaccctgaaaattcatacaattcagcgtatgtataaatttttttattcaggaacaataatgtaagtgcagaccagacagaaaccttatatgatcgctccagcttgtccttgaactttgtattcataagttcatcactaattgacagttcactttcgacaacggtgtctgtttcaaactggagaagatgcaaaaacagttatgtaaatcagagtaaaaaaacgaaaattatacatagaaaattgaaatggaaggaaaaatgtaagtaatgtttacctgcataacaatgtgggggtacattgtctgacctttccggattggtgggtctagagagataacaacaaacgtgtgtggttggtttgactgctcaggcatataaaaaaaaatacgaactcaattaatgtgaacacgattcagtgatcataatacgataatccctttaatctgatgactgctaacataggtaactgcctgagatatgc

SEQ ID NO: 5527 - DNA, 425 bp, Arabidopsis thaliana columbia
aataaggtccggtactcttgatccgcttgacccgcttcggtgctggtcatgtaagctaccgcaggggaggaccgggattttgcaagctgccggtgtgatgatcgggaaagatcggaaaaccgaacgaaaaactcggaagacttttttgcttttcttcttgtgttgatgagatggttcgagtaacgtgacatgttgacgtggagccggagatggagacggtgacgcagacggcgaaggagttgaatatgagtcggtggaggaggaagcaccgcttgccctttgctcccccattaaagacggagacgtcgacgaagatacgacgacgtttttatcgaaaatcttctttctattttaaagagaatagctaatgtaaactgtttttaaacctgttagccttttttgccttccatacaccttgcagattt

SEQ ID NO: 5528 - DNA, 483 bp, Arabidopsis thaliana columbia
cttgtaggtttttttttttttttttttaaagtaatgttaaattagatttaaaagaaaattgcgtttttacaacgagtgcaacttataatttatacgagagagattgaaaacaggaagtagaaagagtaagctttgcgattaacttcgactttgaagccatcgttggaaggtggcctcatatcgatggtccttgtggcgttgaatggtggtgattctgttgcgcatttgtttgtcgatccattgaataagaatgagagcagattttggagcttcattatgacgtcttcgattcctctcatgccagatggtataaacggaggtttggaagatgtatttcaccaagaaacaagttaccttatccttgcgatgggctgagactaggttgagcagttggtgcctatcacttgtgtagtgatgctgaagcaatcctcgagcaagcgcttcccaaattccagctgtatagctgccagataaaaagagatg

SEQ ID NO: 5529 - DNA, 560 bp, Arabidopsis thaliana columbia
tgtcggaacctcgtagaaggatcctttcgcctattgtatacaaatttgatgttagataacccgtcaatgtacgtataataaagaacattgagcattttttaaaattatatttgtggggtatattactgttataatggcgtctctggcagctatagcgatgatgtccgcacacgacacaacatcggggcaagaccgctcaacggcagattttaccttgcctataatgttgaagcctccaacgccggctaagaacctactgaggtaatttggaaagtaagacagtggagcaagcccgtgaaactgaataacatttccacaatttttgcttatattttgcttatattttgcttatgttttgcatagattttaccttaagttgacatgtctaaccaaagcaacctacctttgaagttagcacaatatcatcattttgttgatccagcttacaaagaattgtgtgtgaccattaattttgatacaaatacttatataataactttctatttacagaaatatttgaaaaatcactatatttttatttggaacatcttgataagaac

SEQ ID NO: 5530 - DNA, 1057 bp, Arabidopsis thaliana columbia
tgtgacctaaaaatagctaccttttcaattttgatttctaataacgttatctgcatccacaccagtacactactactatcaggaaatgcagtcttactctttatgaagccaccagaagtttctccacattgaatttttcatatattgacatttgacatgtgctgaaaacaatatccataaacccatgggcctgtagaatttaattcaaagtccataaacccaattatagtgatggagcaaagggcttataataaacccaccaattgagcactaccaattccaataccatggtgagatgtctgaagtgtctaaaaataaactgagctgagaccatgcacgagaaatctaaaaagacaactaaaacaaacgaaactttgattaggacaatttataaaggaaatcattagtctctaaattattgggaacagaaagtatctataagtacatctgttttctttccgaagacaacatttcttgcttctttaaaacatcttaaacgattaaacctagtgatgaagttagtatgaaaacatctttaactgtttaaccattctattataacaataataaaattaaaatagaaccaacatatacattaagagaataaataaagtttcctattaaagtaagaaaaacatgattcaacaagccatctcatactcgtcaactgaaaatgctcaaaggccaaacgccaaaaccaatcggttttagtatagcatcatgagcaatcaaatttggaaactcattttgatgttttctcaattgattggttgctcatgatgttataacatctactatttttttttggctgaccaaaaataaaataacagaaagtgaatagttcactggagagtggttccgaacgccggagcccaatagtcggcaccattgtcgctgccaacttgtagtgtgcatgagatgggaacaagacaaagccctctacttctcaaatctttcatcggttcttcgttaggatttgatttttgattgtccgtcgatgacaatgaaactcctcttttcatgcaatactcattcacaagctgattaaccaaatcag

SEQ ID NO: 5531 - DNA, 560 bp, Arabidopsis thaliana columbia
cattgatatttcgtggtaccaatttcttctaggtttgggaagcaaataagatatgcatcacgcaaagccagagctgatacgagaaaacgggtcaaagggagatttgtaaaatctggagaaacttttgagtatgatccgtcactggtgatgtgaactagtgaatcttcactgcggaactaaagaataatctgactccatccacgggattaacagtttcttgtcggagaagtaacaaaaaaaaaacataaaattctcttcttgagaaagtatacaagatcaaactacaaagacttaaaatcatcgcaaaggtgattccaaaatggagattaaaaaaaaaaaaaactgaaagttgctctttttactagagaatttccactgttttttgatgcaccacaaaacctaccggtcatacaggcattaattaggcatacagctacgagacgatcagacaaaatcagaaaccaaaaaacaaaacaagagtcgttgactctttcctacttatagctccttaatctcaattacatgttaatcatagaaaaatatatcttctttgtgttttg

SEQ ID NO: 5532 - DNA, 940 bp, Arabidopsis thaliana
tcaagtaaacataagtagaactctcttgagacaatcatgtcaacatctataaactaatgttcaggatcatctttgtctaaagaagaagataagaagctcaagatgaaaccatctaagtctccttcaagaaccgagtcaggatcagagacctcgtagttggttcgcagatccttcaccattctgtatggctacaaaagcaaagaataattactcagattattgtcatgtaaactcaaattgcaacggaaaatgtgtggatcggtatctacatacatggagaacataagttcgtatctggtttccccagctgatctctgttagtgattgtgtatgttgagcgttcattgctgtctgacgagccatttccagttggtctaaccgtgattgtagtactgccattgctgaagccttgttactatgttgtgacctgcataccaaaatcagggattgacaaacaaaccaaacaccaaatttagtataagaataagaagagtgtaagaaaaataatagaaaaattgagactttgaatacagacctttcattctgacaagttgctgttatgccagttggtatgtgaacgattctaacagcactgtctgtcgtgttagcgtgctgcccaccggctcctccagaacggaaccgctcaatccggagatcggagtcattgatctccacacgggtggacccatcacctagaattggaatcaccgcaactgccgcaaacgaagtgtgtctccgttttccactgtcaaacggggatatacgcaccagcctatgtactccaacttctgctttggcgtatccgtatgcgtattcaccgttcactttgattgtagcacgctgttcaagacattggatcaatcgttagccaatggttcaatattatagatttgccaattgcactaaacagaacatgagattttagcagtgaataatggat

SEQ ID NO: 5533 - DNA, 139 bp, Arabidopsis thaliana columbia
agtgtcctgtaaagactgtttaacctggtgtgcgtcgggtttcataacttatcgctttttcgaatgtgctttctggttgtcgaaccagtggaaataactgatcacgccttcagcaatcgctgtggcgattttctgacga

SEQ ID NO: 5534 - DNA, 1433 bp, Arabidopsis thaliana
tattttatttttttatctttggtttgttattcagttattgttacctttttaattattatacatatgaagttgagttgatgccatgtaaatgattgtgattgaaaaaagatgaagaggaggagaaaaagatttagaaagtagtggatgttgggtgtgggattggaggaagctcaagatatcttgcctctaaatttggagctgaatgcattggcattactctcagccctgttcaggccaagagagccaatgatctcgcggctgctcaatcactcgctcataaggtagctttggataaaacataacctttcattttgtgaaaatttcatctaacgtatggacattggacttctaggcttccttccaagttgcggatgcgttggatcagccattcgaagatggaaaattcgatctagtgtggtcgatggagagtggtgagcatatgcctgacaaggccaagtttgtaaaagagttggtacgtgtggcggctccaggaggtaggataataatagtgacatggtgccatagaaatctatctgcgggggaggaagctttgcagccgtgggagcaaaacatcttggacaaaatctgtaagacgttctatctcccggcttggtgctccaccgatgattatgtcaacttgcttcaatcccattctctccaggttattatattccctaccctttgctgccgaaaacattacttaactagagtttttttactaaactagaatctgaaaatatgtgtttttaggatattaagtgtgcggattggtcagagaacgtagctcctttctggcctgcggttatacggactgcattaacatggaagggccttgtgtctctgcttcgtagtggtatgaaaagtattaaaggagcattgacaatgccattgatgattgaaggttacaagaaaggtgtcattaagtttggtatcatcacttgccagaagccactctaagtctaaagctatactaggagattgaataagactataagagtagtgtctcatgtgaaagcatgaaattccttaaaaacgtcaatgttaagcctatgcttcgttatttgttttagataaatatcatttcactcttgtctaaggtagtttctataaacaataaataccatgaattagctcatgttatctggtaaactctcggaagtgattgtcatggattaactcatatttacatgcttcagcagtaactcataatacagtactgctctcgaataatgttacattcttatctattcttcttcctcatccatcatgtggaacttccggtttcgtagacatggtacatccacacaggttgaagcagttctcttgcagcctccagcgtcttcacttcatcttcatctcttccttcaccaatctctcgctctattatcgggtaaattctcggaagtaagaccaacattgtgtccagctctttc

SEQ ID NO: 5535 - DNA, 346 bp, Arabidopsis thaliana columbia
gactcatccccgtcaaagttaacaccaacaatagtggaataaaactgttacagaatcttaaaatttagggttatagtaaatacaattattactatagtgaaaatgagagaatagaatctgaaagattcaaattctctaataatgattcaacagaatgtcgtgaatctctctaccttcctcctctataaactctactctctgactcttcttcatctctcacaaaatctctcttaatctttgcaacaatggcgtcggctctctcttgctctgcctctgatctgattccattactatcaggtggagccaacgccacgcagcagcagccgccgctgaatacatctgcggg

SEQ ID NO: 5536 - DNA, 1699 bp, Arabidopsis thaliana columbia
  unsure (1)..(1699): unsure at all n locations
tcagttcaattcccctaaaacacaaacatgtcgatgcggctatagggggtgtcaatccagtccactgtattgctagcaatcaagatgtgaacaaaagcaactaagtcaagccagattataatgatggtgggtttctagtaacaatcctaggtcaggattcaaacaagtaaaaatgagaacttaagagcctactcgatcattgggtcgagtagaaccaactgatgacaaaattaagaactaaaatgcaattaacttgggatacaaataggggatacaaataacgggtaaataaaagtgcaaccaacatggatacaaataaatctagtagaaattctaaggatggattcattgataagggcaactctacggttcatcagatggctaataggcaaaagatagatacccatgacgatagattcaaaaaccgggtcaattcactctcatgacagagatcccataactctaccacttcctaatctcaactctcgttgatgaaacatagcagagtagggttttaagcaacaatctaccaaagccaataagcagtctagccaatctcttggtctatagtctacaaatctctggaatttgtaaatcaggcatccatttgaacgtcttttgaacgatggatacctatggtcgaatttcacattagccagcgaaaaccgcataagggccaacgaatccagaagggatcaaacctaatcctaaccaactgactaacctagagattaccctaatctaatccatcctcaagaaccctaatcattactcaagcaacataacgaagaagacaaacccaaaaattacggaaatcataccaaaatgtagatctaaacaagctaaacaactttactcaaagaactaaatgaaaaaacaaaatagattaagagtaattaagttttgaagattcaagaacacaaagaaaacctaagagataaagcatatatcctttggacaaatcccaaagtgatctatttatactaaaatgttggaaaccctagatttactagaagacaagtgacttgaggcggtttgggctaataatcgatcttggggatcgagtaaagagggtgctgcaaagtctgcgcctttgtgtctatgctccgagtgatcaattagtcgagtagatgattcatcttctcctatctgtatgcgcagatgtctggttgagtggggaatgaggaggatccgaagacgctttgatagctcaacaagtcttgtagagttggtcacccatggtcgagtaaatggatagagtagtggatcgagtaggaggggcgagtagatcaatctgctgcttcatctgaggttgccttgatcgagtaagagggtcgagtaaactgcagcctcctttgtagcatcctggatcgagtaaaaaggtcgagtagaatgatgcctcttctgaagctgcctgaatcgagtgaatggatcgagtagagtcctttttagctccttctgcacctgaaaacacaccaaaacatgcaatgcatatgcaagatgatcttagatgcctaagtatgcaaaagaagctaaaatggtgcaaaatgatatgatacaatgagcaaatgcaaaactaaatgatgataaatacacacctaaaatgagtaaagtacagtgttatcacntccccaaacttatctcttgcttgcctcaagcaacaaaaaatctaagttgaaggagaggtttaagatgggga

SEQ ID NO: 5537 - DNA, 981 bp, Arabidopsis thaliana
gctctttgtgtgacatgggatcaagtatcaacctcatgtctaagtctgttgccgagagactaggcatgactaactacaggccgactcgcatcacccttctcttcgcggatcattccaaacaaatccctgaaggaatccttgattttgtggtcctcgactatgagaaggaatccaaggatcctcttatcctttgaagaacgttcctagctacagcttgtgctaggtttaatgtgaagagaggtagaatatctctaaaggtttgtgatttggagatggagtttggcatggatggttaagagcttactaagtctatcagtagtattgcctctagcacaaccacacctcctccaactgctcagaatcccacaacagagccacacacaacgctcccataagctgagctcgccaatgagagttatagagcaacggtatcaattgacaccaccactcatgtcgatcgacactctcaggattcatagacagagggttctgcacaatctcatcatcccacaccacttgaggacctatgtgataagttctcttctatctcttctcctgctttaccttcgattaattctttagattcttcgaagtctgcttcactagataacactcctagagttcttcgaaagctttttccccctgtcattcttgtaggtgacgagatcagtgtcgatcgacacaccactgagtgtcgttcgacacctgcagctgcccatctagatcaaaacaagcacttagtgggaggcaacccacttgttggatttttctttcccttttcttttattttcgatttatttttcccgctttctctagatttaaatgccactgggacagtgtcgtttaagtctggggaaggtccttactaattatacttttatttttttattcttattattttttttcgtttttgagtttattgagtcatttttccttagtttagttaggaatcatgatctatacttctcttgattattgcct

SEQ ID NO: 5538 - DNA, 1465 bp, Arabidopsis thaliana
ctgctggctaagaagaatcctgtccagcttgtcattcagcgctttgatctcctttctgtgtttgtcatcagagtcagttgtgcttctgacggtcctatcgcagtcctcgttgtaattaccatctaattgagctaagttctcaactaattcccatccttcttcaacatccttgttctggaaattcccattgctggcggtatccagaagcattttgatgtgtggtagaactcctctgtaaagagtgctgagcagagaggctttagtgaagccatgatgagggcattggttggtataacccttgaaacgctcccatgcttcacaaaagctttcaccagccttctgtaaaaaaccagaaatctcatttatgagtcttgcagttctagcgttggagaagaactttgatagaaaagccttcttgcaatcatcccaggtggtgattgagtcatggggctgattcttctcccagatgtgtgctttgtcgcccaaggagaatggaaacaaacggagcttgaattcgtcttcactgacaccattgatctttgttaggttgcagagcctatcaaattcatcaaggtggtcgagtggttcctccattggtagaccatggaatttgttcgcctgaatcatcgagatgagaccactcttaatctcaaagttgttgttctggatagaaggaggtgcaattcctttcctctgacgatgatcccatggtgcatctccagcaccagtgttggtagggccattttgttgattctgtttgtcagccatttcgagtggttgctggggcaaaagggtgactgtgtttctactttctctgagttcgcgagctatgcagtccatgttgtcgttgaaaaggaaattctgggggcctgttgatcgagtttgcatacagcagaggtgtacctggatcaagaagacaacaagaaaaacacacagttagtaacagaaaaaaaaattgaaaaagaacttgatctaagcgagtctaaaatctcaaatgtaacaaacaaacacccaattggcaacggcgccaaattgataatagttttttagtcaattatcctaaaacaccaatcatatcgttgtattagtttaggttgtcaatccaaatgggtgtaatgctaacaatcaagatgtgatcagaagtcactaagtcaagccaagcaataataagttttggtgtgttctagcagtcctgagtgaacatgcagaaaacagaaaatcaagcagaaagagtaaaacactcgactaacacagctcgttgcagacacctgggtgtggtcgagtgacaggtcgaggaacagacagtagatgaaacaaagatactcgactgcacagtctgttaccagacaactgggtggtcgagtaccaggtcgagtaacaagaaagaattgcagaaactaagcaacagataacaagatgcagtaaacaacagtagagtaaacaataaaatcaatcagataaagaa

SEQ ID NO: 5539 - DNA, 589 bp, Arabidopsis thaliana
tggtgctacttatctgcagattcttgaagggcttcttaaacatccagagaacagagaatgtgctgactgcaaaacaaagtatagttttctacctgatgtgaattttcagcattattatgctggttcatgtatgtatttgctaatactgttccatttgctttgcagaggtccaagatgggctagtgttaatttaggtatctttatctgcatgcaatgttctgggattcacaggagtctcggggtacacatatcgaaggtagtctctcactttcctttctacatttgttttcttgatgctgcatttttttacgaaagctcagatattaattcgatgaataactcattccatttggctcaaattctctgcacaaattttcaatttggtttttgtattagcaatttcattttgtattttccatcacaagagctggaaagtttgacatgaatgcattaaatctccccaccttcttgtactcccattgtcgtcgatacagtttacacacgaacttcaagcaactctgtgcaaaagtacatgatttgatttcgcctctgatttttgtatgagccgtgtccttttgtcaagtagatg

SEQ ID NO: 5540 - DNA, 1925 bp, Arabidopsis thaliana
  unsure (1)..(1925): unsure at all n locations
aattcttgaattttaccaaagcttcatctttgttatgcaatagatatacataacaatatcttgtgcaatcatctaggaaggtaacaaagtatttcttaccgcctctagtttgcacatattttaaatcacataagtctgtgtgaattaaacctagaggttcagttgttctatcaactcgtggtgacggagtttttgtgagttttgcccgtacgcatacttcacatttttcttggttagttttgaatatcggaattaaattcatgttttgcatttttctcattgttttataattgacatgtcctaaacgttcatgccaagtagtaaactcaacaaagtaagcaataggattttcatttatttcaacaacataagctacatttttaggaaagactgtcattacagacattttgaccagtccacctttaacaaaaccctttctcagatacaccccatgtttctaaagaactagcttatcagactcaaagttaacggcaaagccattgttacttagcaccgttcaagagatgagattcttccgcatgtcaggtacatgcttcacgttttgcagagtaagctcacgtcccgaagtcagcttcagaaccactttgcccttaccttcaatcttagacatcgccgtgttgcccatgaagagttgttcgtttgacttgttattcacataggtggagaacatggtcctatctgtgcagatgtgtgtggttgcaccagtgtcgtagtaccacttcacttggttgtcgtccaccatgttacattcagtgaccactgcaaccatatcctcttcagttaggtttgcctggctcttgacatccttggctttgctcttgcaaacatcagccttgtgtccaatctttccacaatgatgacactttccttagaacttccgctcagcattgctcttcttgaagtttgttgacgatgaaaccttcaagttcttcggaggaatagagaacccttttcccttgcctttcagcttggccttatgctcagctacattaacatcatgcccttgattcgtgagcaccgcgtgagccncacgattgttgccttcaatcattaaccttcggatgagatcatcaaaagtcattgccttacgtttgaagttaaggtaattcttgaaatctgaccagcccggtggtagcttctcgatcaagcaattcgtcttgaagacgttgcagatcgacatcccttccaactctatctcttgacagatacgttgaagagcctccacctgttccatgattggtttggagtccaccatcttgaaattcagaaacttcgcagttgagaatctttgcattctagactcatcagtcttatacttgttctctaaagttagccacagtgtttttgaagactttggccttgctgtagaggtcaaacagatcgttcaacaagcggttcaggattagacctttgcaacaatagtcaccttgagcccatgtatccatacctccaactgtatacacatatgtggtaccttgaggaactattggtggatcctctgggaggtacctttccatgtttatgctgaccaaatagtagcgcatcttttcttgccacgttttgaacccggatttgccatcaaacaagtgtgacatcatcccttgggaaacagaggctggtatggtagtgttggttgaaccattaccgaacagatttcggcgcacattatccatatcagaatcggtgatctgtgtcttttcaagctctttcgcaaggctgcaaagcttcctcatccggggtctcagcaactgtggtgttgccaacgatctcgttgttggtgttaatacagtcattctgttcacagaaaaacagatttgattagtatattaaccanaaaattcaggtaactaaattacaccgaattagttttgcaaactcgcttaagaagcgttcgcaaaaacttg

SEQ ID NO: 5541 - DNA, 1867 bp, Arabidopsis thaliana
tgcatgtctgctagatcggatcccccaacgtcttggagctaatactctgcgtgccaagtaattgacgtgatcaacataccactggagatcctcattcaacagtgttcagttggtggaactctttcccactgtagctcctttcgaagaactctacaaccatgagttgctcttctagcattgaatcgtctatcggaaggggttcttcaattctcatccttgacagatggtcacctgcaccattttcaatgcctttcttatctactatctccatgtcaaactcttgcaatagaagtatccatctcaatagtcttggtttagtatccttcttggcatatagatgcctcaaagctgcagtgacctttgatccaaccagatagcttctgaaattctcaaatgcgaatacaacagctagaagctcattttcagttgttgcatatcttctttgagcttcatccaacgttcgactggcgtaatatatgacatgaagcttcttgtctattttctggcctaaaacagctcctactacgtaatctgatgcatcacacataatctcgaatggatagtcccaattaggagctcgaacaacaggagcagataccaaagcatttgatatacctcgattttcactgcttttaactatgatttaggtataggtttgagagtctatttgttatttctagagtcttttctagtccttttcaggtctttacatgtgtgggatgcatttggagatcatgaagcattctggagcaaaacagacaacttaagctacggcagtaatccggagacgaaaattgacgtaggtgtcgatcgacacaatccctggtgtcgagagacaccaatacctgacggcaattgaattgcgcaacttattgatgttttgaagatttccaaattcggcccagaactttctcctagttctaaagaagtccctgcacgttttaggtcatatatatatatatagttttaaaggtcattgtttagacctaactcttattatctcttttattcttgggagcaaaaccctgtggagactccctttagagaagattcttctaaactcttttctcttcttcattccatcattgatttcttattcaatcatgttttgttcttctatgatcatgcttgagtagttcttttgttgggtttagggattcttattagggatttggatgaattagtaaatcaaaaaccctgttaggataatatatttagaattcttcatttttgattattcttaatgctagttctagttagttctagagtaaatagctagaacttgattttaggttattaggtatgcccaccataggtatctaataatggaactattttagatgagcctagtatttagatgcgtgctagagtcaattacttaggtaaacttatcaaacatgattataatgcttgcttagttctagggatttacaagagagttgggatcaatactattaagcatagtgagtttcgcggaacaccaccggttactctatattagtaatttgagttctagaatggttcgataatattcctaatttactgctagatctactattttgatataacctgagaatttccctaaacccgacgttttaatcatctgaaccttcaatctcttttattgctttcttttcttgtcttttattttataatctatttgtttagcttaattcgaaaccttagtctattgtgtgatctaagagctttgtggaattcgaccataaagtactacaatcaatctcttatttgagagagtggtcttaggattaattttacccatatcaatagtactgactacatattcaacggtgggatcacgtttctaacggttagttcttgacatatctatatgttttggtgacag

SEQ ID NO: 5542 - DNA, 653 bp, Arabidopsis thaliana columbia
ttcctcaacaaccgatggacctttcaatatttctctgaattttatcagaaattgaagactctcagatgtcttctctgtcgcaatcgccaccaccgccggagatggatatccaacccccggcattggttaacgatgatccttccacttattcctccgctttatgggattggggagatctccttgacttcgccgcagacgaacgccttctcgtcgatcaaattcatttccctcccgttctctctcctcctctaccgcctctgattccgacgcaaactccggcggaatctgaattagatccttctccggaagaatcgggttctggttcggatcgggttaggaagcgagacccgaggttgatttgttccaatttcattgaaggtatgcttccttgttcgtgtcctgagcttgatcagaaattggaagacgccgagcttccgaagaagaaacgggttcgcggcgggtcgggcgtggctcgatgtcaggttccggattgtgaagcggatattagcgagctcaaagggtaccataagaggcatagggtttgtctccgttgcgctactgccagctttgttgtgcttgatggagagaataagagatactgtcaacagtgtggaaagtatgttacttttcttggctttgagaatagaatgggt

SEQ ID NO: 5543 - DNA, 695 bp, Arabidopsis thaliana
actcaagaatggaacatgggagatagttggcaggcctaaagagcaaaaagtgattagctgcaggtggatgtataaattgaaggtatttcaggagtcgaagctcagaggtataaggctcggttagtagccagagggtttacacaacataaaggaattgattatgaggaagtgtttactccagtggtcaaacacatttcaatcaggattctcatgtcaactgttgtgaaagatgatatggagctggaacagatggatgttaaaacaacatttctgcatggagagcttgaccaagtactctacatggaacaacctgaaggatttgaagtaaatccagagaaagataaggtatgtttactaaagaaatcactatatggcttgaaacaggcaccaaggcagtggaacaagaagtttcatgctttcatgatgagtctacagtttgctcgaagtgaacatgattcatgcgtgtatgtgaaagaagttaactctggtgagtttgtttatcttctactgtatgtggatgatatgttgttagctgctaagagtaagtcagaaattagcaagcttaaggaagctctcagtctgaattttgaaataaaagatatgggagcagctagcaaaatactcgtaaattgatattatcagggacatgaaggagggtctcttcgtttatctcagcgagatatgtgataaggtga

SEQ ID NO: 5544 - DNA, 412 bp, Arabidopsis thaliana columbia
gggtaccggtaagcttcttcttcttcttccatggattattctgtgagaacttctttgattagtaattgactttttatgatggtagaaagatacagcctcagtgatttcaacaatgctgcttcttactggagttacaactatacttcactgttacttcggtactcggcttccgttggttcaaggaagctcttttgtttacttggccccggttttggttgtcatcaactctgaggagttcagaaacctcactgagcatgtaagtttgcatatatagaaatcagaaggaggattttgagttcttggagactttgcaatagactgatgttttagcttcgcacagaaatttcgggacacaatgagagaactacagggggctataattgttggttcattattccagtgcatattagga

SEQ ID NO: 5545 - DNA, 1177 bp, Arabidopsis thaliana
ggaagtcgtagctggtgctgatacaacagaacagggaatggaagagaggaaagagcagccggttgaccctgagaaaagagaaatggatgggcctgggaaagtaaagattggtggattgatcttcatgtgcaatacaaaaactagacccgattgttttcggttcagtgtaatgggtgtacaagagaaaaggaaggattttgtcaagggtatcaagcctgggcttaagctttttctttatgattatgatctcaaactcctctatggaatttttgaagcatcctctgctggtggtatgaaacttgagcgcaatgcttttggtggatcctttcctgctcaggtaacattgtgtgtcacccatgtttgttagccgttttccatttgtacaacttgtctcgaagatgatatcagttttctttcgtcggaatttatttaacttacggatctagatgatgatattctttggattcaggtgcgctttaaggtttttagtgattgcatcccattggctgagagccaattcaagaaagcaatcatagagaactacaataataaaaacaagttcaaaacagaattgactcataagcaggtgaccttcatattttcatcattttctctaatttatatcttactattaacacgtcttaatcactctgttcgtctcttctattatggtgttcttaaaggtatttaagcttaaaaagctttttcggccagctgcgatccctgcacaagttacccacacccagcaaatccctgttcctcgtgatactgacaggaaaagatctgatagagaccggtatgcccctggtagcagtaggggtcacccaacacgcaaacatgaaagaagacgtgcttcacctcctccacgcagagaagaacaaccgcgtgatttatatcttagtgaaagggagtatcgaacatatggcttgagaggaggagaaacaacccagcattaccaaattccacctccagaatcctcttcttcttaccacattgtcaaccgagaccgtgttcatttggattcttaccgttcatctatggaccatgaccggcttttgagacaagcagagattgagaggcatgaccgtaggaagttcgtcaccctcatttgtctgagagagactaccagacgtatgatcatcttacttctagacgggaaatcttggttcgaaactcg

SEQ ID NO: 5546 - DNA, 531 bp, Arabidopsis thaliana columbia
ctgttattgttactaaactggattctgttgtttgtagcttttgggcaaatgatagctcgaaccttggaagaacagttacttcgttggctacgttcagcagagtgacttgtgatcgcgcacactactcgtcgcccaagatccaaaggtaccaattctaaaaaacaagaagaaatcaaacagaatgcgaaaatacctagtgatgtttatgttattgttcttataatctctcttatgtcgcttccaagaggttgttgtatctgttctgatgaaattagccggaggatgtccatcaatcgctgatcagctaaatgttgacgcatttctagaacaagcccgttcatatgacaaagcttcttcaagccccttgggatggtacataaggtgagaaaattaaaactatacaaaatttagattattcttccttcagattcacttctttgtttgtttacatatttccttgtctcagaaatgctcagactagtcaactttcgcatccattgccggttcttcgtgcacgtgagattgatgagt

SEQ ID NO: 5547 - DNA, 564 bp, Arabidopsis thaliana columbia
agtccactactataacattttgtggaaagttttgaaaggtgattgagccgcctacatggaaaactttcagatattcatggtaaatgatctcactttatacacatcaacaaaacttatcaccaacctaatataaataaatatataaacaagaaacaagagagaagaagtgagctagtccactttgtttatacttaatattaacacggactagtaacccaagttgtatataaacccatcactccttctttgtcaatctcactctctcattatccactctcacattttcatttaaaacacacatattttcaatatggtaggccaaatgaaatcgtttctcttcttattcgttttccttgttctaacaaaaaccgtcatatcagctagaaaaccatccaaatcgcaaccaaaaccgtgcaaaaactttgtcctctactaccacgacataatgttcggtgtcgacgacgtgcaaaacgcgacttctgcagcagttccaacccaccgggcctcgggaatttcaaattcgggaaactcgttatcttcgacgatcctatgaccatagacaaa

SEQ ID NO: 5548 - DNA, 571 bp, Arabidopsis thaliana columbia
cctgtaatcgtttataaattacaatcagagaacataagagaaaagtaaaattaaagtaagatatttagccacatagaaaagtttcagtaaataaccgtctctcttctcgtcataataataaccattcccgtgtcatcaaatggaggccgaccagccctgccagacatctagaaaagaaagattacttatcctgctagaaatatatttaaagcacattccagttgattgtgcagataatcagactgcaatataacatttaggatacacatgctcgaataatttacctgtagtagagtggaacgatcatattccatgtagtgacctttttccttgttgctaaaaggaaaagaaatgtcagtatattactggaaattaactgaaattccaataaatacttaatgggcatatctactcaaagacgtacaaatgttgagttgatttaatgaccactgtatgtgcaggcaggttgattccatgggcaagagtgttggtcgtgcagataacttggatatcccattcaggaagagccttctacgaggctgcggtccttttggcaaagtccccattgtga

SEQ ID NO: 5549 - DNA, 576 bp, Arabidopsis thaliana columbia
tggtgagagtccctcatggggctctctcccattgtttaatataaattgtgaaaatttgtaagaagagagcttgtatttatttttagaagaaaatgatagtacaatggtagtttctctcaaatggggttctttggaaaaaaaataaaaattagaagtgtgtttgtatctttgtaaaacaagaataaatgttgtttgtgtctttgattaaaagacttacaggtcgaaacccgaggaaggttggtggaaacttaatacggatggggcttccagaggtaatccgggtttagcgtctgctggtggtgtgctacgagatgaggaaggagcttggagaggaggttttgctctgaacattggagtttgttcagcactttggcagagctatggggagtgtactatggcctctacattgcttgggagcgacgagtcacacggctagagattgaggtggactcagagattgttgtgggtttgttgaagacagggataaacgaggtacatccgctgtctttcctggtacgattgtgcatggcttcatatcaagggactggagagtccgtatttccacgtttataggga

SEQ ID NO: 5550 - DNA, 635 bp, Arabidopsis thaliana
gtcttgctcctaccgacttacaaaaacaagtaactgcatcaagatcagacacattacgtacgatggaacaacatggctctgcctaccagtggttagaaggccgtcactaattgctagaattccggcacatatctttagttcggtatcattcttggagcatatgccaactagaggaggtgatagtggtggtgtaatagctggtggaggaggtggtgttgtttgtggcggaggcggttttaaagtttgtggaggaagtggtggtggtgagattgttggtgatggaccgggacagctaaagccttgtggaatcctacgaccacaaactttaaagaagatgccgaaattgggagagagggaaaaacgtggtgctcctaccgatttacaaaaacaagtaactgcatcaagatcagacacatttcggatgatggaacaacatggttctgctcttccagtggttagaagaccgtcactaattgctagaattccggcacatatctttagttcggtatcattcttggaacatattccaaccagaggaggtgatagtggtggtgtaattgctggtggaggaggtggcgtggtctgtggaggagacacggtggcggtaagggttttggaggaactccgggtggtgt

SEQ ID NO: 5551 - DNA, 580 bp, Arabidopsis thaliana columbia
cctcccacgaagctgattggtcagtttctccataaacagcaagcttccggtgagatttgtttagatatggacttaggtatggacgagcttcaatctagaggtttaactccggtatcggaatctccgagagtttctacaaaacgtgaccccgtgggaagacgagacagtcgcagtaataccaacaataacgatgatggagaagttgtcaagtgtagtggtaataatgctccgattcagagaagctctagcactttacttaagatgagaactaggtcacgtctttcggatccgccaacgcctcagttgccgccgcaaacggcgtatatgaagtcgggtcggattccgaaatccgggcagatgaaatcaggtttttttggaaaaagccctaagactcaaggtgaggaagaagaagatgatccatttgcagcagaggatttaccagaagagtataggaaagataaacttagtctatggattgtgttggaatggttgagtttgattttgattatagctgggtttgtttcactcttgcgatacctccttgcgtaagaagaactctgggaactcagctatggaatgg

SEQ ID NO: 5552 - DNA, 514 bp, Arabidopsis thaliana columbia
cccaaaataatataacttgtatttaacaaaaatatgtgaacattacattaaaaaaactgaatactgatcaatattaagaacctaaaaagtaaagagggaatttttgacttattattcgcaaaactcatagtattgatatgagtgacacccaaacaaaaaaatgatgtaatcaagtgcgccaaaaggaaagacagaaaacaatccgacttaaagaagacaaacaacgaacaacaactgtagaactaatttaatacaacttttttggctttaagagcaagcaaaatgcgattcaaaacccctaaaaattaccaaacatattttctattcatcacacatatagacacaaaacagcaaacgagagaggtcgtagtgagagcttaatcaagagcaacaatggcagatgaggtgattcttctggatttctgggcgagtatgtttgggatgaggacaagaattgctctggcggagaaaagagttaagtacgatcacagagaagaagatctatggaataaga

SEQ ID NO: 5553 - DNA, 642 bp, Arabidopsis thaliana columbia
tgctgtgctgtttactatgtcatatatagatggtgaatttacatataaaaacttcggtgagattgttactgcccctgatgataagcgttccgtgaaatcaacgttttgttttgttcagttgaggcagaatcttcttcgcgttgagtctagttgttgtgatgttgaacaaccttctcagtggaggccccatataacgatctggtcattgtgcctaggaaatggtaaagaaaaagaacttcagcgcaaagtgcttggagaaagctcctattttgctgattggatttcaagctcctgtttagatcccaagggctcggttagtgcagaaactggtacttcgcagtcaggaagtcagtgcagtgccaaaaatgatctacaaagctttgttagtgacaatggacagtgtgtgtcatcgtccatggttatttctgagaatatgtatgcccatatgctgtagtctatggtttctttagtggtgagatagagattgcaaagtttgattttcttcatggaattgattctcctgcttcaagcccgagatcagatactgatccactcgtctataaacagcgtctattgggacatataggatctgatctatgcttagcagcgcatcgaatgtttggggatgcaaatggatgtaat

SEQ ID NO: 5554 - DNA, 1770 bp, Arabidopsis thaliana
tttttgtcgaatcccaaatcgaataagaagcccatctggaatttgctctctcccactttgatcaatcgttaactctaagaagtaggattaactaaaaccctagatttagtgggaaatccactatagtgtgtgagcactattacctacgattttctgttctcatttgcgttttttttttctggtcaaccatttgggtttttctttcaaattgtcgggcaggaattacggattttaataaaacttaggaataaataaataattaaaaaaaaaacagaaacaatattataataaatttatcttttgagctgtgtcctcaatgaaaccttaataaagagaaccctctctgcaacatttaatactcataacaaaacctatctctctctgtctttactcattgtcgttatggtcgcgccgcctatagccgccgcgtcgttagagctccctcctccgttccccgccgtcttcgaacaaccaatggagaaactcaccttccctaacgagttcccttacgagtttgcctcctcaacgttttcaacttctccggaagactcaacggagacagaagatgaaacaaccgacgacgaagatgacttcttagccgggttaactcgcagactcgctctctcgactcagcgcctctcttctccttccttcgtcaccgacaagtctcaggtttgttaaagcttctctctttttccaatttttcaaatgttctctcaatgtagactaaacactcacagattcttgctctgtttcttcagatgaaacccaaagtcacagagtcaactcagagtggactcggaagtcctaatggtccgttttctcaagttccttcaccgccgacatctccgtctcgtgaagaagactctttgaaagtgttatctgctgcagctggagaagtcgccaagatcaaaaaggccaattttgatgctaaacccatcagctacccaaaccctaaccctaattacttaaccagctttcctcaaaacgtggcatattataactgctactggttatgggagccgcattatcctcaatctcagatgggaatagttccaaatgcttggcatatacctccttctcccgttagagccttttacacccttccaaccgccgtgaaatcgccgtcgactggtaccggcgttttccttccccggaaatactcaaacccttctgattccccgaagaagaaatcaggtaactttactcaattttccgttgatttcacattttgagtttctgaaatttgagaactttcgttcaattttgctaatctagaatcttaattggaaaaaaaatttggatttttcaggagatggatgtgttaaggttgttaaccagcaaaaacctaaaattgaagtgttaccggttcgctgtaaaccaaattcgaaagctggtctctctacaggacgcagcaaaatcgattacggtactacttcaaaacatcctctgtttttaatttcagttctagacaaaacagacatttgattgagtctattcgtttgttttatagtagctggtggtggatgtctgaagcatgaaaagcctcttctacaagaatggatgtactgagtttgaattaggttgtaggattcaggacttttggaagaagaaaatacagaaatggtcgtagttagtgggttgaatttatagtgttgattgtgatggttactggttatagtaaagaataattttgcggggttaagttggattgggatttatttatatttacttaggagaatagcaaaatcagtttctaataagcaggga

SEQ ID NO: 5555 - DNA, 381 bp, Arabidopsis thaliana columbia
ttgttggaaccaaaaaaaatcacaaggctgtctttgtatatttaagactagagagaatgatgagaatgtgtgtggcgcaagataatgggcagcatgcgcagcttaagtcgtgtgtaatcctgcgaccacaaaccgtgtagaatctgccgtgattcggatagacggttggacgtctagctcctaccgacttatgctaacaagcaacggcatctagaccagacacattacgtacgagggtacaacatggctctgccttaccagtggttagaaggccgtcaccaattgcgagaattccggcacatagctggagttcgggagcagtctgggagcatatgccatctagaggaggtgatagtggggttgtactagctggtggaggag

SEQ ID NO: 5556 - DNA, 1006 bp, Arabidopsis thaliana
actccccgggtacactgaagctttactaagacatgaactatattaaaagtacctgtatcaccagcctgtagcatcatggactgtatgcatggagtgacaccttctaaaacatacattctactattgttattgggccaatatctgaactggaacgtccactccctacccctcacatcttggattttcaaaggaatgccttcggattgactaatcggaggaaaatatgcctatataccaatgcagacatcagtcataactctacaaaatatttcaaggacaagaaaagacatcaccataggaatgggaaatttacctctgcacaggcttttggaagaactagacgaccaatgcgaccagcatcactggcactaagagttttctcaaagagaggtacaatgttcaaattcaaactagaatttgttaagataaacaatgagtcaccagaagtctgtccagaataaaatatttggcaaaagtactagaagcaaataaaggatactttccagagatctgctgaacctctttatccgtatattttggccaataccgcggaagcaagtggcctctccctcgcccttcgacaggaggccttccaatccgcgcctgagcggatttactagccacaggaggagttgaaatagcaggtcttgatggcttttgcagtatattagaagcagagcaatggaccatgttggactgagaaggactgatgtgtttcattccctcgacagcctcggttgcaaaagatgggctaaacggattcacagccaaacccatatttaaagatggctgtaaaggtgatgattcatgcatttccccagcagcatccagcctatgcccggtggttgtactttctggactcattagcttaccaaacccacggtgaggcatgaactcttcccttttatctccgcccatgactagtggctgagaaaagagatcgccttcgtttcttcctcacgtttcgccatttacatgttgcctatcagctaacgttttcattggc

SEQ ID NO: 5557 - DNA, 559 bp, Arabidopsis thaliana columbia
tatcacgaagattgagccttgttctctccggtgatggggttttatgaagatataaacgcaaacaattcttaaaactcaagagtcaaaacaagtttcaagtaaagtcgtaaacttgacacgccttttaacactacccattctttcataaccaatcccaattttgctatgcattagcttcattgctaaatctgcttttcccactttcctcaacgcattgatcatcactgttctgatcctccctggcacttctcttcctctctctgttatcccatcagctaatttacaagcttcttttatccgaccagctttacacaatgtatttatcatatcttcacaagctgcatcaagaatcacacccattggtgctaactcatccagtatcttacaagctctcgccacttttccggacaaacatagcccagtcgacaacgccctgaagcaagctgcggttggtgtaatgcctttatcgatcatcatgtcccaaagctttaacgcctcctcgtttctatgttctttgaacattccggataagagtatcgtgtatgtataaaccgtttga

SEQ ID NO: 5558 - DNA, 454 bp, Arabidopsis thaliana columbia
acagttctatcgccacaaattactgccaaatatgtcccccggtcaatggtttgatgtgccgatacatgtatgggaaggattttatatatgtggatggtttctaatcccatcacaggagataatttaacgacatcacaagtgacgacaaacgggtatcgatcgcatgagagtatatatatcggctatgatccagttgaagatcagttcaaggtattgcttatgacttggttgcctagtagcggctcacacgagtatcaagtttagacattagggactagaaatctttcttggaggaggatccaatgttccacacttcattatcctcatgaagatgatcgaatatgcatcaacggtattttgtactatcaagcaattattggccaaatacgttccatcgtttgctatgatgtttggtctgagagatatagttttgtgacattgatcaatacttggc

SEQ ID NO: 5559 - DNA, 563 bp, Arabidopsis thaliana
ctcatcataagctgtcttgtttgttgttgggggtgcggttgcggttggaggtgggacagagagtgaccttgggcgaggaggatcaaacaattagccatatcttgatcttcttcgtcagccgtggcctttaatgtggcattgttgttggaagatgaagaggcagaagatgaagatgtaacaccattgatcaaagtattgttattattcttgatgttattgttgttgatttcatcattgagactcttctccttggaaacaagactagtagactcttcttcagcatccggttcatgcgaagacataggaggaatgatagagaaagggattggggactgaggacgttgccgcttagtccgtttccctttaaggatcaatgattgctccctagcggctgatacagcctccgcagctgcttccattgagtatatagagagattcaagaaaaaaaggacgtaatattggaattgatcaatcggaaaagatgaaatagagagaattgaaattgaagatggagatgatcagctttaaggattacatatatataaatatgtatttgtgtgtta

SEQ ID NO: 5560 - DNA, 1007 bp, Arabidopsis thaliana
  unsure (1)..(1007): unsure at all n locations
aaaaaaaaaaaaaaaaaaaaccttatttgatatcatgatcataattaggacttgattgtataagttgacgcttacatattatatgatttgcgttaagaagaaacacctccgaaattatatgaatatatagaaacaaattcagacactttgaaataaagccaatacaagaaaatgttttagaagggaatgttgtatgttcgttataaacaaattaaagaacgactagccatgcatcagttttcagaccagccttttccagcaaaaaatatcaaaaatcagagttgaagggaactttggtagccggcaaccagttattgccgtctataaaaggtttcaccgtaaacttatttgcttccttctttgttaaagacgtcttcaacccttgccacttaacccggttcttggtcgatgctcctggcccggaatttaagtactcggcgtaaaagatcgtgtctggcgcggtatctcctgtccacggtaaccaccctttcgggttgatgaatttgtccatgaacgacttcatgataaccgttgtagagaaatccttccaaggccggcctaggaatgtttggatatcggttaagttatccaaaggcttgatagtacaattgtggatagaaattcctgtgttttggttcggatctttccggccctgagcggttattgtattctgctggcctttcataggacgacgaggcaagatctcgcacttttggaatacaaccgcagcgtttccaaatataaaatcaacggttccgaggataacacaatcacggtaaaactgacgttgtgcatgagcgtacattgtatcttggaaagcgtccatggtgcacttgtagaacacagataagtctgcgcttaccattagagctacggcttgatgcttagctggaccagctgtgttaatgaagcccatgtccctagccatgaaccccttccaaacacagctanaacattcaagganaaataaacaatctcttttttttatagatatctagtatttagta

SEQ ID NO: 5561 - DNA, 808 bp, Arabidopsis thaliana
agagaaatttatagcatttttgttgtgttcatctggttttcactaatttggttttcttctccatcttttgttgataggtttggtaaggtcagtgttctctaaggctgaaatttgggggtttctcagtctcgatgtggtcgtgctccgttaggattcttcacaatcattagggttatatttcttacaaactgatgctcattttctcttccctgtctatggctttatctgtgatccttcaaaagcttagtgtcttcggccctggtttgaatccttctataccttactgcatcgccaatcactcctttgcctcccgttaattgagttgctctctttcaacttaattacattagtctgcttcctttgctgtctagtctggatagtgttgcaaatcaagtagtatcttctttagacattcttggctgagagatttacactaaaagcatagaataagaaacccctgtttggttagtatctacccgagtctcgtagtcctacacagatccggatcctagtttcgaagctagttcttgtttagctgaagctcagacccaaaatgctccaagaaccgtcggctgcattctccctccggcgtaactcattcagacgccgatctcccagatcaaatgtcgatgacagaggctggaatccgctccatatcaaagccagaaaaggcgatctgaaatctgtcaagcagcttctcgaccaaggaatggatgtgaatgctctagcatggggacccaaatcaaaaggagtgagtgcacttcaccttgcagcagagggaggtcacattgaagtcatggatttactc

SEQ ID NO: 5562 - DNA, 667 bp, Arabidopsis thaliana
atagtgatgtattttatcaactaattaaccactaatagaattttttctataaaaaaaaaacatgtttataaattgtaggatatgcttattttctaaaatgaaggattttattatatcttacaatgcttcttattaattaagtgcataacaaggtaaaagataaaaagagaaacattttaaataacggaagatggaaatgcaatgagagggaactttcggcaaacatcgagaccaaaagcttcagttagatcaggttgatccccatttggtccagcctcggccctccagtcaaatcggcctacaaggttggccactgtcacctctaccaaacccaaagcaagatttatccctggacaaatccttctccctgatccgaatgggatgaagtttaaatcttttccatgataatccaaagttgaatctaaatgtctttctggtttgaattcttctgcatccggtccccatatcgcggggtctctttggatggcccaagcattgattatcacctacacatgtttcaaatacaagtttagccaaatcattttttctatatattggaatatatgatgtagctaacgtacaccatgttttaagaatttgatttgatagaaattagtttacctcggttctgcggctatgttatatccctttactttgacatcttcac

SEQ ID NO: 5563 - DNA, 670 bp, Arabidopsis thaliana
gtccctataaaaagtgaattatatgatgcatgaacttaatttattgacaggttgatacaaatgttgggcgcatagcggtcagacttggatgggtgccccttcagccgctcccagagtcacttcagttgcatcttctggaaatgtaagcacttttcaaaatggtcctacttggaaattgtaatttgttacttaatacatctgaggtttggtttgtctaggtatcctatgcttgaatctattcaaaagtatctttggccccgtctctgcaaactcgaccaaaaaacattgtaagaatgatgtttatcactaactttttttttttcatgcctcagtctaatacacttattcattagtttaataccctattatctcacaggtatgagttgcactaccagatgattacttttggaaaggtatgtattaaagaaatacatatatacgtatgtcaaaatcagctcacatgatgaggtttgtaatctgcttgattattgtatcaggtcttttgcacaaagagcaaacctaattgcaatgcatgtccgatgaaaggagaatgcagacattttgccagtgcgtttgcaaggtgctacaacatgttctcttaaacctttagtaccactatgactctatgaggaaagtccttgttaaaatataacccagttaaatgagaatt

SEQ ID NO: 5564 - DNA, 660 bp, Arabidopsis thaliana
  unsure (1)..(660): unsure at all n locations
gattcatatattttcaaatctaattcgttttactacagaaatatttcaatgtgattcgagataattcttacatgatcaaacaactttctaattttatgaataaactgtgatcccggtgaaaatgtatgtacttcacaccattaaatatcaatatttttaacggcccataaatataggcccaattatgtgaaaagttactaatgggcctgatttatttcaagtgtccgtttttctctctctagttctcttactcgtatgagaaagaaagcccacccgggaatctccgacccgaccgagaaatgggatcgtcagcgaatacagaaaccaacggcaacgcaccgccaccgtcgtcgaatcaaaagcctccggctacgaacggcgttgatgggtctcatcctcctcctcctcctttaactcctgatcaagctattatagagtcggatccgtcgaagaagaggaaaatggggatgcttcctctagaagtgggtactcgtgtgatgtgtcggtggagagacgggaaacaccatccggtgaaagtaattgagcgccggcggatacataacggcggtcaaaatgattacgagtattacgttcattacactgagtgtatgtcgtttaattccttatcaagttttgatgntagggtttcattttggttga

SEQ ID NO: 5565 - DNA, 1551 bp, Arabidopsis thaliana
tagatcaaaacgcagtctccacaatacagcaacgatgggcttcgaagttaatagggctgaagtataagattgaatacaagcctggtgtggacaacaaggtggctgacgcactgtccaggaaaccccagactgaggtgttctcacagctaacattgcaagctactcacaccatcgacataacagctctaaaagaagcagtcaaggcagataaagaattgagtaagctgttgcaggatatagaacaaggctgtcagaaaaatggagattttactgtggaagatggtgtgccttacaggaaaggttgtcttgtagtacctgtagtaactcccttcattccaaaactactggaaacgttccacacaagcgttgttggaggccatgaaggagctctgaaaacgtttaaacgattgactaaggaggtgtgttggacatgcataagaagtgatgttgttaagttcatcaaaggctgtcaagtatgttaagagaacaagtattctaacactctctccagctggattattagctcctcttccgatacctcaacagacttgggaagacatcagtttagacttcgtggagggactgccagtctcaagagggttctcgtggtggtagacatgttgagcaaatatggtcactttattgcattaaaacacccattcacagcaaagacagtagtagaggcatttatcagagatgtaatcaaactgcacgagtttccctcaatgatggtgtctgatagagataagatattcttgagccatttctggactgagctcttcaagttacaaggtaccgctcttcacaagagctttgcttaccatccccaaacggatggccaaaccgaggtggacaacaggtgtttggaatcatatttgcgatgcttcacgggtagacgtccaactacttggattcaatggttgccttgggcggaatactggtataatacatcctaccattctgctactaagaccacaccattcatggcagtctatggaagagagcctcctgcaatgatcaggtatggcgatgtccctactccaaatgctaatgttgaagagctgcttagagacagagatggtatcctaatggaattgagagaaaacttggtcctagcacagaacaggatgtgtaaagatgctaataaacacaggagagatgttgtgtttgaagttgacgagtgggtgtacttaaagctgaggccttatagacagaactcagtggttcacaggaagaatgagaagttagctccccgttactttggcccgtatcagataatcagtaaagtgggcaatgtggcttataagttgaaactccctgctcacagccacattgacccggtattccatgtcccccagctgaagctggccgtgcatgcagcctacagccctcaggagctacccaagatcatgacccctttgctggaatgggcggtgggtcctgagaagctacttgacatcagaaaagcagaatcaggaaacagtgcagaggttttagtgcaatggagtgggttatctgagctggaacctttgatacacttgtgcaacagtt

SEQ ID NO: 5566 - DNA, 1357 bp, Arabidopsis thaliana
cgtgacaacaggtcctagaatagcagcagtgatctgaacttgcgacgagctttagtacacagttctggttcagcccgtttggggtgtcgatcgacacaggtactggtgtcggtcgacatatctctgcaaatcgattctcagcaacgaatccggagcttgcttcatgtggacgcttgctgttgcgaagtacctgttcagagacaaccactgtctttgtcttgtcatcctgcttctctaaagcatcgtctcgtatcatagcactctgaagagggggtgacaacttgtctatttcaactggaggcaactgaagtagaacctcatccatgatactcatgcaacgcatctcaggaatctcttgcttggactgtcgaggcagtagacaaggaatttttggtgtgtaagcaataggcggagattcaaggcagataggtggagtctaagtccaatatcgatcgacactaggtgagtgtcggtcgacaatactgtctgatatcgatcctgctctttcaaacatcaatagtggcctgtctatgtgatgttggtgtcgatcgacaccaaggtggtgtcggtcgacactgtcggggtcgactctggtcgatatgggtttgtcacagcttgacttctccttgagaattgttggtgtcgatcgacgaaggtaatggtgtcgttcgacaccatcgggtataagttcctcctcctctgtgaaattattgattccacttgacaaaggtaaaacagagtcgttaagatcaattggtgtcgatcgacacccttatgtatcgattgacactgaagttttttctgcaactggacgagatgaagtcttttctgaaagttctcgctgaaggatcgggtttggtttctttccactgtgtagtgtgactacatagacaaatgctgaggtaggagaaggctgagatatatgagatctcaaattgtcgatcttcctattaagatctgtgtacacataatcaaacttgccattaagatcaaccacgagctttgtttagctctcaagaatctgcgcaagcatggagtcgagtcggctgtctaaggagggttgagggggggagggggggggggcttggacaggagcagagattgctgaaacatgattttctttgcttgcggtggcaatctcattcaagctgatccaagctgcctttaaactttctattggagcttgagaaaatgaagagatcttctctcttaataattctgtcactgaatcatcaaggaagttgatcatgaatgcgttccttgtgtcagccaatttttcaatgaacctgcttctatttgtcacaaccatgatgtcctctgcccgcgagagagtgtgggaagagtttgcaaagaagat

SEQ ID NO: 5567 - DNA, 1054 bp, Arabidopsis thaliana columbia
ctgagagaatcttaaagcccggtggtctcatcagtttggtgggtttacattggccatcctggtggaaggtaataaaaaaatgctagcaaaatttctctgattatctaatgagatatgaactttcctaacatactttgctccatgtttcttgttgttgtgaattggttcggtcttcagagaagagttagaagtggttgaagcttttgggtcgggtttaccggtcagtgattggatctgctgcaaattccaaatgttgaaccgaccgttagctccagttcttgttttcatgttcaagagagaaaactgaaaagtgatttattttgatccaccagaagctttgtctgcatctgccgaaccattcactattgtatatccaatctatattacctttgttgatgacagttttcaaaatctgtttatacgcggaggagaagaggtttatgaaaaaagtaaattgataacataaataaaaaacgaccacggtgggactcgaacccacaatctcccgctccggaggcgagcgccttatccattaggccacgcggtccttttgatagtcaactacaattacatcaatatatctatttatcttaatcacaatccatgtaatctagtaaatgatatgcaacacagaattgtcaattgtgtaacaaacaacaagaacattaagacttttaatcaatctccacaaagatgagaccaaactcaagaatcctgaatactgatgtataatactaatacaaccctcccagcaatttgttaaagtttaacacagaaatggattgaaccaagctaagcttataaatatatatccactggcttgtgatcttgtagctttttcttggactttcttatgaagaagaacccactatgggcaagtttggtgcagttgcgcattcagtccaagacccatcatagattgccacattagttttcccagacgataaagtccctgaccagtaaaataaagaggaatcagtctttagtttttatcatatgatcacagtaaatgaatgaattctagatcatcatttagttaccaatgcgaaaatac

SEQ ID NO: 5568 - DNA, 1459 bp, Arabidopsis thaliana
ctcccccagcttaaacacactatccccagtggattcaaattggaagaaggcggaaaaaataaatcaaaaataaaagaaataaaagaaaggaaaaaaaatatcaaaccagtgagttgcctcccattaagcgcttgttttgagtaaatagcttgacttgacagatttcaggatgtgggtggagtggtggaggattgctgctgcctccttgccctccaaggcggtgtgtaaactgatccggtctgggcagctgcgggtgtcgatcgacactcattggtgtgtcgatcgacactctcgtcgtttcctgcaaaatcaaaaggagaaacaagctttcgaagaactctaggcttgttaacttgcgaatcagacttcgaagaatctaaagaattaatcgagggtaaaacaggagaagagatagaagagaacttatcacagaggtctgaaatgggtgtgggctgaagagaatgtgcagaattctatgtctgtgaatcccgagggttcgatcgacaataggggtattgtcgatcgacaccgttactctacaactcccatttgtgagctaagcggatgggagcgttatgtgtggctttgtttggggattcagagcagtcggaggagatgtgtcctgggtggaggcaatgctactgataggcctaataaactctgtaccatccatgccaaactccatctccaagtcacaaatgttaagaaagatcttacctctcttcacatcaatcctagcaccagctgtagcatgaggttgatacttgatcccatatcacacaaagagcgactgaacctgcttgtggagatagagcaatcaggaatgaagctacctggatctgggatcttctcagtggtctgatctggagtgatgatgcagatgtactcagcaatgtccactctctatgccttctctttcttgaccgtaggcagcatgatggcactgatctcccatgtgagcagtttagcttcatcagagctaataccattgtcaacaaggcgcttgacataccttttgagtggagcagaggatgtctcaaaagcatccttaagaagtgaggtgaggatcttttccatgatagttgtgcacttagcagcgtggatctcctgcttagaacgacgctttcgtggataaggaacaggcggcgtgtaggcagtctcgggcttcatcgggattctcacttcatatggtgtagtccagacccaatgtcgatcgacactagaggtgtgtcggtcgacacctaagtatggaatcgtttgagaaaacagtgttccatatggtgtcgatcgacaccgggattctcacttcatatggtgtagtccagacccagtgtcgatcgacactagaggtgtgtcggtcgacacctaagtatggaatcgtttgagaaaacagtgttccacagggtgtcgatcgacaccaactatgcagctgcgagctccaactcgtcttcagtgtcca

SEQ ID NO: 5569 - DNA, 1575 bp, Arabidopsis thaliana
catcaatttgaagacgcgcgactgtacccggatttgcccgtcttatcatgtataggtaagaaggcaattcttcaaaactactatcaggggttcccagagtgagctcccttgcaaacctgagcgtcttgtatgacttcgaataactcatctgttaacacaaacatattaatcgataagtcagcctaaactataccacaactcagccaacaagtgatcttaagtcagcctttaaagtcataactcaaccttaatgtaattatatgtcagccaaactatatcaataagtcaaccgtaaaatatctataagtcagccagcagataaatagtaagtcagccgaaacattgtaattacctttactcgaaaatgcttagtgatgattattccgattgattttggtttaacatccggaccaacgtcaccaagatagtccctgtaaagaactcctagaacatcaggtgttgcttgtcgggatcgcccagaacgttccctcacagaacatgtgtgttccgaatcgtatatataaacataaaaattaggatcatttccttgtctacatgcacgaaccctccaaagacatctatccacccagcactcgtaagatactgtagtcttattagaagttggtacatcaaaatcaaatccatcccttatcgcaagaagtttgagtcgatactccaactcgaatttgctacggtattgttggcctaccgcgagtgttagggtagacagctccagctttaaatcagtcaggctcccagcagatcctatcatttccatggtctgagttctcttcgaaggagaaggtttcggtgaatcttcgtcattattcttaggctcgccgtatacagcaaagtcttcatcatcagatgaggcaccatcggagtcgtcaaaaaaatcaaaccggctagaaaattcatcatcttcttcgtcgtcacttgcttctttgtcagatgcttcatcgacacctgattcatcgtcccctgcttcatcgtcccctgcttcatcgtcttgataatcataacagacaccttcaaacccccaactatgaacttcgaatctagattctgctcttgagtcagatgcaatagcgcgtttcgaaccccttcctcttgatccatccttccgactaatatcacttgaatctttcgccgtaaactccacacagagacgtagctgctcgaatttcgtcaaacctagataacattgcaactgtcgatcattggagatataaactggtggagtatcgaagggcatagttttcagtgtcttgttagagaacatgtaactcagccgtaactgatgggtcgactgattcactccgtaatcatcgaccaccatctttaaaagactatcgtaaactgctctttccgcttctagctgcacaactctacaccctctttcgtcggggttaaatacgaatctctgtttctttacccataaaccggaaagaactatgaccgtagcgggaccagccatatcaagagaaagatggaagaaattgaatatgtatgagaagatgaatgacgaaaagagagttccggtgatgttgctaacgttcaggcggtggacacagt

SEQ ID NO: 5570 - DNA, 1467 bp, Arabidopsis thaliana columbia
gcattattatcaagtttgattagttcagctagtatctaaaccagagcccttctatgagcctacctgttctttcttaaatgcataggctcctctatgatggttcaaacaacaagtatctatggtggacatacctatgatctaatatcaagttttagttagctactctagaactaacattaagaacaatcaagatgaagaatcctacagataacctagcaagggggcaatctattaaatcatctaaatccctaatgaaataccctaaacctaacaagaaagctactcaagcatgatgaatgaagcaaacaacatgattgaataagaaatcaatgaataaaacaagaagagattaaggtttagaaagattttctctaaagggagtctccaaggttttgcttccaagtacaaaagagataaggagattagcctctccaagcttaggtttaaacaatgaccttaaaactatatatatgacctaaaacacgtgatgggccttctttagaaataggataaagttctgagccgaatttggaaatcttcaaaacatcaataagttgcgtcttcgaattgccgtcagtattggtgtcgcgcgacaccaagggtggtgtcgttcgacacctatgcggattttggtctgcgaactgcttctgcaacttaagttgtgtgttttgctccagcatgctccataatctccaaatgcatcccaaacatgtaaagatctgaaaaagactagaaacgactctagaaataacaaaaggactctaaaacctataccaaaatcaaagctaaaaacagtaagaatatggatatatcattgtctcttgatcacatcttgctgtagcagcttatgcaccttcttgccaccgttaagcaggtagacgaggtgtccgattgttcgccgcacaatagccttacatgttgccacgggtcgagcatatgtctaccgtagtagggacatccgccatcgtgggtcgagtatatgtccaccgcagtcgggcacacgccagtatgggtcgctcacgcatagcttactgactgttcacggtaaggttctcgattagtttctcgccccgaatctaaagtctaccgacccaaacttaattttttttgcccaacttctatttctctcacccaaatcctatttttactcaataacaacccttactttgcctattcatgatgagtggtgtcaccttacccttttggcgacacttccaagcgtttccgacttagaattcttatcttctcaacactccttcgtcttaagtcttcgtaatgcttccccaaactgttccaaaacaacttcttacttagctcttttcgatcccttttgattctttagcttcgatcaacttttggtgatggactcgccaaagcgagtcttagtctaggtgaggaatgttacattttcattcctcgaatttttatgacttagtgactaccgattgttcacgttgctttgatgtg

SEQ ID NO: 5571 - DNA, 1042 bp, Arabidopsis thaliana
ttaaactgcgtccacaccgtcagcgtgtgccttgaatcccaggtgtgcatacgctacaaagagagcaaatagtaagaatttggtctacggtttacaggaagtgctttatataaaaactcgatgcttaccgtgaggagtaaaaaccatcttgccttgaaaaaaacgggaatcatccggtacgtcggccacgcatggtgaaagttgcgctggagtatatcaccaatcgcgacagatagttggtgattgaatttgaaccacgtaacagtggttttgtcgacccatgtacccaatccagggtttagaactaaagatctgcacgatcaggagcggtgagcacggcttcgacatctcttagaaactgtccgtcgatgtgaggcaccatgtcgttaagatgtgaggatgagacgtctaaatgatgcgttcaagtaactgatatatagaaaagaaaagacaggtagaggaatgcgaaaggttccgtgtttgttcgtttggcgggaaaaatttccgtactacggctaagtttggcggcaaaatatattgttacggctgagttatacccaagacatgtaactattatacggctgagttgtcaagaattattaaaaaggacaggtaaaggaatgcgaaaggttccgtgttttggcgggaaaaagtttccgtgctacggctgtgtttggcggcaaaatatattcgttacggctgagttacacacaagacatgtaacaattttacggctgagttgtcaagaattattaaaaaaggcaagtcaaggaatacgaaaggttgcgtgttacggctgagtttggcgacaaatcgtccttgttatggctgatttaaatcacattacggctaagttgtcaataaaaacatgaagttcaattcgatttactgactaaccgaggtatggttatatccggcccaattaccagcggtttaatacacctataaaaacggcttctcccataaacaccagaaggctaaactcgcacaaacagaagctaacgagttcaaaatatttctttaattttcaacgactcggaat

SEQ ID NO: 5572 - DNA, 1785 bp, Arabidopsis thaliana
agaggatatattttcagttaatcttaagaggtgtgtcaatcgacactcttcacgtcacctgcaaggacaacaggagaaacaagcttttgaggaactctaggcttgttttcttgtgaagcagtcttcgaataatctaaagaattaatcaaagataaaacaggagacgagagagaagagaacttatcacataggtcgtcaattggtgtgggccaaagagaatgtgcagaatcctctgtctgtgaaacccgagggtgtcgatcgataggggtagtggtgtcgatcgacactgttgccctacaactctcatttgcgagctgagcaaatgggagcgttgtgtgtggctctatggtgggattctgatcagtctggggaggtatgtctatgctggaacaatgcaattgattggcttagtgagctctgaatcatccatgccaaactccatctccaaattacaaaccttgagaaagattctctctctcttcacatcaaacctagttccaattgtagctaggaatgctcttccaaggataagaggatccttgggttccttctcatagtccaggactatgaaatcaacagggattatggagttaccaaccttaacatgaacatcttcatggattccttcagggattcgcttggaacgatcagcgaagagaagagtgatgcgagtaggcctgtagtgagtcatgcctagtctctcagcaacagacttaggcatgaggttgatgcttgatcccatatcacacaaagagcggcataatctgcttgtggagatagagcaatcaagaacaaagctacttggatctggaagcttctcagttgtctgaccaggagtaataatgaggatgtattatgctatgtctactctttgtgccttctccttcttggccttaggcaacatgattgcactgatatctctggtaagcagcttagcttcatatgagctaattccattgtcaacaagtcgcttgacatacctgttgagtgaaggagaagatgtctcagaagcatccttaggaagagtatggagtatcttctccattatggttgtacacttagcagcatgaatctcctgcttggaacgatgcctcctcggatacgggacaggaggagtgtagacagactcgggctgcataggtatttgcacctcacagggtgcagtccggatccagtgtcgatcgacaccataggggtatcgattgacaccgtcgtattgagtcgtctaagagaagagcgtcccatatggtgtcgatcgacacatgagggtgtctgtcgacaccatctctgaaactacgatctccaactcgtcttcagtgtccaattcctcccacacatcatctccttctctgatcaagatggcattgcagctcttccttgggttagcatcaggattgccaggaagaaaacccttttgtctcttgatcgattgtgtagtttgagctacctgtacatctagcttcttcaagtgagagctcagattgtcgatcttcccattaagatctgtgtagacatcatcaaacttgctattaaactccacaacaagctttgtttggctttccacaatttgcgcaacgatcgattcaattcttctctctgccgagggtggaggggggcttggtcagctgaattaccataggtcctttgaaagctgctttgaggaaaggtcctctgaaagctgctttggagtgtagttggaggaacctggttcctgtaaacctgttgcactgaagttgcatgtggctgccaaaatttctataccctgaccactgtgtagaagatctt

SEQ ID NO: 5573 - DNA, 565 bp, Arabidopsis thaliana
gcaataaatctcaagctcaccaagtgtttgtcaatcatttcaagagccttctcatagtttacaggcagcttaactctctcccacaatttatttggcatgtgagctctctcaatagtcttcatatataaataaaacactcctgtataaacaacaacaacacaagaaaaatccatttgtaagaaaccaccacaacaacactaaactcaaaagaaacatctttctaattgccctttactacgtaaactaaatcaacacccaatcctaactattccaacacacagaatcagctcaaagattgacacttttctaaaaattaccatcatggtcacggatagtggcgtatcggctattagcaagagggcaagagcttcgattacagattcctgttacattatattggtttctgcaaaagattccagtttcgattctagaaaagcaaaagagaacaaaacaaacccatcaacaaattgagctacaaatgaaaattgaaagctaacaagtgaggataaaaaatacatacttggccatgtaactacagtgcttgtgcctaatgacctgccatata

SEQ ID NO: 5574 - DNA, 1904 bp, Arabidopsis thaliana
  unsure (1)..(1904): unsure at all n locations
aaacacggagaatcaaacgagccaatacaatcgagagtatcatggagattctaaaggtagaggtcgaggaggatgctcttactacaagggaagaggccgcggaaggtttaatgggggaagagatacatcaaaaatcatgtattataggtgtgacaagttaggtcactacgcctctgattgcccggatcgacttctcaagctgcaagaaacccaagagaacgagaaagatgatacacaaactgcggatgaacttatggttcacgaagtagtgtatctaaatgagaagaattgcattccgagcaactatgaaactaacaccggagaagatgtgtttggtatctcgataacggagctagtaaccacatgacaggtgatcaaagatacttcactagtacagatgattctgtcaccgggaaagtgcgatttggcgatgattcacggattgatatcaaaaggaaaggatcgatcttattctttgacaagaatggcgaacatagaaagatgttggatgtctatttcattccgaatttaaaaagcaacatcattaggttgggacaagctacagaaccgggctgtgatataaggatgaaagatgacattctaacaatgcatgaccaagagggaaaattacttgtccatgcaacaagatcaaagaatcgactctataacgttcggatggcaaggaagtgatatctccctatttttactgattttaactatgttttaggtataggattttgagtctttatgttatttctcgagtcttttagtgtcttatcaggtattctatgcagtgggacaacaatggagatgaggagacattttggagcaaaatctacggaaaaggatgctaaggacgatttcagtcccagattcagcgagagtgtcaatcgatacactcctagtgtcgatcgacaccagtttcggcccagcaaagtccattacgctttcaagtttacagaagaggaaatttgcccaagaagacttccctatttgtattattagtctttggatgttttatagggcttatatatagttttagaggtaattgtttagacctaagttccttttatcaagttctttgcaaatccctattttcagagacataagctattcatcccttgttcttgagagattcattcagttttcaatacagttaaaatatctcttcttactcttatcttatttgctgtgtttatgttttcttactcaattatgttgcttgtttcattcaatatgtctgagtagtttgcttgttattaatagtgtttctcattagggattcatatggtttagtagatctccccctttgctaggttatctgtagaattcttcttctttgattatactttatgttagatctagagtaattaactagatcttgaatctagacaatagatatgccaaccataggtatctgtagttggatctattatttgatgagcatggtttagaagtgtgtaataagaatcggcttatctactaaggtgaacaattgaactcgtttagaatgcaagtttagtttgaaaatctctcggcttctccggttattcttagctataggcatagggagttttgcggaacaccaccgattattttagaattagagtttgagtttaagaatgtaggttcctgagaataccctattcctaactctttatttaattgtctacaactaatcaatctactgtctttttactttgttctctttttatttcaatcattacctgctagcttaatctcgaaatacaactcactgttcgaacaaaagaactttgtagaaatcgatccctaaatactgcaatttatctcttatttgagagagtagttcttaaggaaatttgaacgttatcaaatttggcgtcgttgcanagttcttgggcattgagttagtttagagattt

SEQ ID NO: 5575 - DNA, 1256 bp, Arabidopsis thaliana
ttccagcacttgatgttccactttgactctttggcatgaatcacattggcttacccattttgccactgatctcttcatcccaggccaatggtaatacttccttatatccttgtacatttttgtacttcccggatgaatgctcaataaagaagtatgccgccttcaaaatttcttgtcgtaaaccttttacgatcaggtactgtaattctcccattgagtaataaagtgtcgtcatcagctagatggtagccactagcatttggtccatctaatgtttttaattcctccacgattttttgcaacttttcatcttgcacttgttcttgtcggattcggtgaagtaggtttgcttgagttacagcttgtaaacccaagggctcactagattcaccctctagagctaacaaagtcactttctttaacccatcatttaacgactctagatccttttcaacatccacttctactcttcggcgacttaaggcgtctgctaccacattagcctttctcgggtgatattgaatcttcaaatcatagtcggcgattaactccatccatctccgttgtcgtagattcagatctggctgcgtgaataagtatttaattactttggtggtctgtaaatactcgtaccgtttccccatataggtatgatttccataccttcaatgcaaatattatagctgccatttctaaatcgtgagtcttaactctaccctttttctcattctttctctcttttggttcaagttataaaagggttcaagttataaaatctcgaattacaggttgcagaaggaaaagcggcgcagccagagtaaaacagaaaataaaactgaagcaaaaactcaatgtcgaccggatgtcttaggacagaaccctaagacatctatttatacaaaacgaaataaaatgatcgtagacgggccaataacctaatcgcccgacccatagagtgataatgggccgagatgggcttcgtgatccgatggagctccaagccgcttccaaacacttcttcttctcctcttttcttcattgtgctcagctttaccctttaccctttcttctaatcttagcacatagggtgttttacccttttctttgaatcacaatgcctaacttctttgaattccaaaccttttactagacttaacacttttgtatcccccttagaactctaaagtcttactctctttttttctttcttttctgtcattctcattctcattcccattcattccatacacattccc

SEQ ID NO: 5576 - DNA, 1087 bp, Arabidopsis thaliana
tgtcactaagttgcatgcttcacgcggccgttcctaacgctaagtataccttccaactcaacaagggcctctcaactttcaccattccagtacgtagctcaaccggtttatttctaatcaagacgaacaatttcatatcattgatttgtttcccccattgatattataggaatatggaatatctgtaaatttcctgaaaaatgggttcctggtggatttggtatcggacaaaacaagaggattgattctgaaattagattcgatcagtaggggaaatcaatggttgggatctgatgtcgccatctttaacacattccactggtggtctcacactggccgtgcaatacgagtgtatcaaccaacgatcttatatatgagcttaattaataatacaagtatacaacatacatattacataatatactctaatgatgatgatgatgataatgtagatgggattattttcaaacgggagataaaatagtgaaagagatgaatagaatggaggctttcaagattgctttgacaacttggtctaaatggattgatcacaatatcgatccttcaaaaactagggttttctatcaaggcgtctctcccgttcacttaaagttaactctctctttctctagtaatcataataaactaattaatcaattaacaagacgtaaccgtatttttttgtttttggttaatttgaagtggtggtgaatggggtaaaccggggaagacttgcttgggtgagacggtaccagtgcaaggaccaagttaccccggacgacctaatgaaggtgaagctatagtgaaaagtgtgatcggaaggatggctaaaccagtggagctccttgatgtgacggctatgacggagatgaggaaggacggtcacccttccatctatgccggtggaggcgatcgcttaaacgactgcagccattggtgcctccctggagtccagacgcttggaaccagctcctttatacactcttctcagcactagataaatttttggtagcaagaaagtttggatttattatttcaagataattaagcaacttttcgaatagataattttttttttttttgaggg

SEQ ID NO: 5577 - DNA, 2166 bp, Arabidopsis thaliana
catcgtcacttagtacaatcccaatcacggcactggatcaaccctgcaagaagtctcggagctgcaatcatctacaacaaggacaaagcttgggccatcatgtacgttatactatatcatatattatacttcttcgtttttgatattaccaaggttttcaatttattagtgttttctataattactacagtggatattctgggtgggtccgtttgctggtgcagccatcgcagctttctaccatcagtttgtgttgagggctggtgcgattaaggcgctcgggtctttcaggagccagcctcacgtttaactttgatatgctcttccctgagtacatcaaagagagaaaaagagaagataataagagaggcttgtaattttatcttgtgtagacggttggagccaagtgacgtgtagtactagtatctaatttctagctttggtgaggagagatattttgaagtgtcgcttgcgggccaactttgaattgctacttctatgattaaatctatgtctctactccttgactattaagattgctctatttattagtactaaatattccttatatatgatcaacgtaagtcccgagtatttctttaaattacacatgaaagtataaatttacatgtgaaagtggaatagtgtggtccacatcaatgagattatcagattaccttccaagtttcaatcgaactatgttgtggttccttgtagtttggaaagtaatctcatttgatgttattggcatagtgtagtgagtggattggacggtgatggaaaagactcatcgagaggtcaaataaagtggccatcaacctcttcataaagaaagcttttacaacttttgtgtttcatgcgcatttttgaaacacatcatgacgaaaataagtttagtttcgcagaaatctatggagaaatctaatctctagatttcaaactagcatcatgttcaaaagtaaggttttagaccatctttataaaaattttataactaacaaaatgatttaaaatcttttatataagagatttttgttagttataagacatgtctcttaacataaaaaaattattttaaaaaatcattaataataatatttttaatcatctttcatatgaaatacaagaaatcatcatcatacacattttacttttcgtttccagtattacgaaagataatttttgtaaccaatttctttttttttttttcttttttcttttcttttcttttttaaccaaattgttattatgcagaatatatgtataaactataaagtactgtgtggaagctcttttggcccaataattgatcagtagttcattaatgcttctacatgaagatgtatgaggttcgagtcccaactactggaatttattaggaaatttgcagattgatggaggcaagtgtgcaggacatctacaacgatatacaattatatccgtttgccaaaatttctacgcaaagaagatattgaatgtgtctatatgctttaataaatttaatttgtagtcacactaatacagtaaaaccacaccacaacacaatcaatcaaccaaagcaatcatctacaactccgattacttattattacgatgtaaataacaaatgaaacccaatgttcataaaacaagggatttctggattcacctcgcaagaatcgacgttctatgcagaggatgaatctcggaatgttttcagagagaaaggaataacaacaacttcaacgataacatgaaaatgacgatgacacttgatatttattagcttcagctctacgcacacttgatttgaatcacaaccgtccattgatcttctaatcacagccgtccacgtggccttactcaatatcctgtatcaaatcctccctccttaagcaaccatgacctcatggttgaatgtaggatacttctgcaacaggtcaaacaagaactcccaagttgctccgcctcatcctcattcgtccattgaaccagaacctttgtagctgcacgaccgtggcgattcactagcttcctcttcagaatacgcgcaggttccttaagcaacacatccaacaacaccgaaggcaattgcttaccaactgaagactctcccacccacaacttcagttgagaaacatggaaaactggatgaatgcgagaaatgtcaggcagggtgagacctgc

SEQ ID NO: 5578 - DNA, 580 bp, Arabidopsis thaliana columbia
acaatacatggcgagcttcttcaggttttggcccgatgacggttacaatggctcaaccaccacctgcacctagccagcatcagtatctgaacccgccttgggtattcaaggacaatgataatgatatgtctcctgttttgaatttaggtcgatacaccgagccagataattgtcagataagtagtggcacggcaatgggtgagttcgagttatctgatcaccatcatcaaagtaggagacagtacatggaagatgagaacacaagggcttatgactcttcttctcaccataccaactggtctctctgacttgtctttgcatcagagaatcttcttacaatgaacgattctgcaatatcttatctttttgcttctttgtttattctgttatctgctatcaataaaccagacaattgttgccagataatggcttttgattttgatttgttgttttatctccatgaaaatccaagttatgagatcagattgatttctttagcacatcaaggttccatataatgaatctataatcatcctagtatattagtcaaagcaggagctaacattaccttttaacttaa

SEQ ID NO: 5579 - DNA, 603 bp, Arabidopsis thaliana columbia
  unsure (1)..(603): unsure at all n locations
cttaagcatagaaaagagttgaaaaacaaatatccatgccactaacatacagcacacatgagaatgcagttatctttctgagattagaacaagccatagaaatgtttgtacacttctaatgttcccttattaatcaatcaaaaactcaccagcatacctgatgagcaaatacacgagccataatgatgtcattatagcgtgaaagaacacgagcaacatcacgagtttcctcccgcttacccatctgaatgtcattgggacctagatataacgcatggccaccgagcaagaaaaaaccagtctcaaacgaaacccgagtcctcatggaaggttttgcaaagatcatagacatagacttccctttaaaaggtagataatttctctcccctgatttcagcaaggccttaacctctgaagccttgtctaaaatcgttttaatggtggctgtgtcaaaatcatctattgccagaaagtctttcaggtcagattttcctgcaaaaaaataaaatcttatcatctcacaatccactggaaatgaatctctagatgacagcatctaaaagtatacacttgcgtagttcncaatcaatagaggaataatga

SEQ ID NO: 5580 - DNA, 506 bp, Arabidopsis thaliana columbia
tgccaaagcatcagtagccaaactcaacattctaccatatgttccattatatttcatcttctgtttttcaaactttttacgctcttcattctgattcacacaacaaaaagtttagatcaaatgaaactttaagcacaaaacacaactcttcatatagtcaattaccaccatataataattcagttatgcaacacaatattttatttcaactaagatatcatttttcttatcttctctgtttttataaataaaaagctttttttgttgtatgtgaaaatgagtgtagcgcaagaaacgtcagtaatcaaggaaacatgtcaatgaagattacgatcattggacctgtgcagaaacatgttttgggttctcagagagtcctcttcgaagccagacccgaccttcgtgaaggcgagagagcatgaaccaattaacgaggcaaaagaaacccaaaatcgccataacgccaatagctgttttagccgttctttgatcgttacaagcttgga

SEQ ID NO: 5581 - DNA, 805 bp, Arabidopsis thaliana
  unsure (1)..(805): unsure at all n locations
actcaaggctcctactcccgaccccactcctttaagtccgggtggtcacagatcggtcgagactcttgccgacgaggcgggggtcattgatcagtttggatcacttctgcctgccgaggatattcgcctgtctgaagagctcgactaaatacccgacgcggggtcttttgtttttttttgtcattgttttttttttgttttgttaatctgttcggtttattgtacttgcgcctggatggctttatccaatgatttgtagaacctatgcctggacggctttatccattttgcaatttgaaatacttggtgggattctaaaaacccgaaccgttttattgcctgatatgattcagtttaagtgtgggtgaagcttttcggttgcgatccgatccgattcaccctttgaccagcgtttaaaaacgagctggggtaccggtgagtgagtatgaccgggtttccgaagatagaaatttcttttcagaaataatctgaaagaatttatcttgtatttatatagcgcgctgtagccgagcaggcgtaaaagatactccgagccgtcgttcatcgtatttagccgaagcgtttaaaagttgtgaatcaaacttattatttatgtcgaagccagtacttgtacaaaataatgagtgggagtatggatatacggacccanttcccccnctttttaatgggggggtagctgaactcgtccgaagacgagctgcctacatacccttttcagggatcaagccacgtcgtagttcaagtttagtcactcggatttagttgtagtattcgttaggtggat

SEQ ID NO: 5582 - DNA, 631 bp, Arabidopsis thaliana columbia
cttgtgcccatgacccaacatactgttgaaccacaagaaccgacacagtagctgcaaagtctgatgaagcaagcaaatctccaatggcaccaagctcaggacactcactccaatcagttaaacccgcggtaagaggagacgacattccttctcctcttccaactataaacaaatcatgagaactgtccattgatctcactgctgcaacagtctcttccccattgctcactagtttttctatatacacaattgactcgtattccgcattttctgccctaaagagattaatgtagtcatcatcaagttgtctttgttttctatggtccatctttggtatctttaggtcactgtcattggtcgctcgtgttgaagctgtgtctgcttcatcttcatcatgaatgaaccgtaaaacagttagagtgatgccaggatgttgagccattctccatgcataagccaaagcttctctatcgtctggaccgccgaaaaacagaacagcaacttgaagagaaacagtgtttgagttgagtcttgtcgctccattgagtcctctatccacgagtattccgaccgaacaaggcgagttttcgagtaggttttggttgactaaacggtaggctgggttggttga

SEQ ID NO: 5583 - DNA, 559 bp, Arabidopsis thaliana columbia
tgcggaaactgaattcttttcagcttgctcaagatctggaacatgaataagtttactggtattgttggtgtattcaattgtcaaggtgctggttggtgcaaggaaacgaagaagaaccagatccatgatacttctcctggcacactcacgggttcaatccgtgcggatgatgctgatctaatctctcaagtggctggtgaagattggagtggagattcaatagtctatgcatacagatcaggtataaaaatcaatcaatctactttcctcaaataagaaaaaaacttgaaacttcagatcaatactaaaagcatgagcttggttttgatttacaggtgaggtggtaagactacctaaaggtgcttcaattcctctcaccctcaaagtccttgaatatgaactcttccacatctctcctttgaaggtacgttttgtcttgttgtatattaccatgacttggattgataacaacttggagtcataatgtgaatgacgaaatttggctatacaggaaatcactgaaaacatttcgttcgcaccaataggacttgtagacatg

SEQ ID NO: 5584 - DNA, 531 bp, Arabidopsis thaliana columbia
ggatttgcatagttatgaggtgaagttaagtattcatcaagatctaaagacattatatttgcaattatcctgtcatctatttcacttgggctttcatgggagtcaacgaaacaattttcaattggctgtgtgtcccttgctttgtctggaaccaaaatagaatggttaagactgccgtttaactgattgggctcactaagtggcatctcggtatatccatttgagatgggtgctatattacttcccctgctgtcagaataggaagatccaaacacagtcctggtttcatcatgctcagccttatactgggatgaacaaggctgcatacaatttgacgggcgtaggaaacgattggactgacagctaagaacttccggatccttgagtctttgtctatagaacaaagatatatcatcctcagcttcaagataatgacctgttcccaatggtgacatcaaagaagtacctctattaacttcttctctcgagacaccaacctcatttgcgttagttctacagacttttgtaatg

SEQ ID NO: 5585 - DNA, 621 bp, Arabidopsis thaliana columbia
tgatctttaagcaatcgcttcgtttcgatttcgcaatcacaaaagtagcaaaaatcgaaaataaaaaaaacttagtagcgaacgaacgaacccgcccactcatttagtttccagatttttcttccggatctctctgctctccgaatctcccgagttttttttttttaatttttgtttctcaccggcggcgagaggatatggtggtgattcacggagtgtctcttactccacgcttcactcttccttctcgacctctcaacactggctttaatgccggcaattccaccctctctttcttcttcaaaaagcaccctctctctcgtacgcctctttctctttctcttaatttgctgtgctctgtgacgccattgttgtaactgactgtaataattgatgattagcgagttcattcgtctattggactagcttcatgaactgtactgtcttttctttcgctggggaatacctcttgattagatccatgtctgtagggaagatctttgctgggaaacaatctgcggagtttgattcttcgtcacaagctatctctgcttctgagaaagtcttagtacctgataatcttgatgatgatccagaggttttcacaggtggatacttttg

SEQ ID NO: 5586 - DNA, 952 bp, Arabidopsis thaliana
tataacacattcatcttaatataaaaactaatatcttcacatccttctaaaattaattaatctctattttagtatttagtttcattgaatatatccggatgtgatctttacaaattacaattatcaaatggcattgaccacgtgggctaagttttgttgatgctgcgttatgacccgttggatcacactggataatttctgtgagcgaagacttgacttttctcaccgttggatcttacctaggatagacacacggttgataaatagttctgcgtagactgtacctcactggataagttatactcagctccattgttcctgcttgcttcttcttagcaaaaaaagaaaaagaaagacgttagtagagacattcataagagctaagcctacgaaacaatcctaagtaatcgaacggagatggcggttggaatggagaacgcgacggcgtcatggtgaatgtggcgagatacttaagccacgcaccgacaagagagagtatcggaggattgttctgaagaattcgctggaggtgttgttaatcagcgacccagagactgacaaggtaaagctcgattgctgttttaattttgctgttaaagaagagctgaaaatttatatatgttttacctgctactagtgtgctgcttcaatgaacgttagcgttggatcgtttacggacccagaaggattggaagggctagctcatttccttggtactttatatttattattcccgttttaattcttcattgcaggattcaatcactgagctgaggctaaagtctaaactgtctctataaacagtgtatttatcaactctttcctgtgatttgaagtcgtgtggattttgatggccatggtgaataacttgtgatttttattgttttttcgggggtcagagcatatgctgttttatgcaagtgaaaaataccctgaggaagatagttactcc

SEQ ID NO: 5587 - DNA, 992 bp, Arabidopsis thaliana
cgacctttgacatctcatctccagttttcaatttaaactttacccttttttcccagctgtggcgcgagttttgtggttgagattatctcggaacagtttgaggggaagagattgctcgagaggcaccgtattgtgaacgctgctcttgaagaagagatgaaagaaatccatgctctctcgataacgaaagctcaaactccgcaacaatggaagccaatatcacaagactctgcaacaactccaaccacagaggcttgaagacaaaagaacaacaaacatagctgaaaagctgtattttacttttactttgttccatggtagctaataagcttgaacttttataagcatctacggcgaaataacttatgaatttgaatacattactggctgtttatcatctgcataatcgaaattcaacatcttaacagtcacaaacattctctttgaaaaaaacaggagcaaagatctttactcttccttcttcaccttcttcttggactttgctgatcgttctgaagagcctgaaaccgtacttgttgagctccgatgtttacctgaggaagactctgaattttttctttttggcgactttggagtctcggtgaagccagagaacatgctcttctctctgctgctacgtgtgccgcttttatgccggctgctttgagtaaggttagatgatttcttagaggaattcgtcactgatccgacaagcttctgttgtgttctagccttcattttctgaagcaactcgtttggttcagggtaacgaactaatgcaactcgccgagtaatcttcccaactatcataaaacgaacaacaacagaagaatcattattaacgaaacaggtggtaaaacaaaactgtgtaaactgaacgaccaaaacctaaacaagacacaactgtaaagtaatgggaatataccaatcattgattcttcagaaggtataatcaactctgcagcagcatcttgagaatgaaagctagcaag

SEQ ID NO: 5588 - DNA, 920 bp, Arabidopsis thaliana
tagaggatcccctgactgagaaagcaaagcaagaatttggaagtggggtgcaagaacctgagaagaataagctggtattctttaatggatgctcctataactttgatctagaggatttgttgagggcatcagcagaagtactaggaaaaggtagctatgggacagcatacaaggctgtgttagaggaatccacaactgttgtggtaaaaaggttgaaagaagtcgcagctggaaagagggagtttgaacagcagatggagattatcagccgggtcgggaaccatcctagtgtggttcccctccgtgcatattactactccaaggatgagaagctcatggtttgtgattattaccctgctggtaacttatcatcactactccacggttagttttcttcctaccttcgtttaatggtttatatttacctcgttggtgtacttaagaatatcttgatttcgatgccatgacaggtaaccggggaagtgagaaaacgcctcttgactgggactccagagtaaaaatcacactatcagcggcaaaaggtatagctcatctccatgcagctggaggtccaaagttcagtcatggaaacataaagtcctcaaatgtgattatgaagcaggagagcgatgcgtgcatttctgattttggactgacccctctgatggctgtgcgattgctccaatgagaggtgcaggctaccgcgcaccagaagtaatggaaacaaggaaacacacacataaatccgatgtttacagtttcggtgtacttatactagagatgttaactgggaagtctccagtgcaatcaccaagccgggatgacatggttgatctccgaggtgggtacagtcagtggtgagagaggaatggacaagcgaggtgtttgatattgagctgatgaggtttcagaacattgaa

SEQ ID NO: 5589 - DNA, 487 bp, Arabidopsis thaliana
cattggctcctcccaggagcaaacatcgcacctgggaaaaaaagagaaaagggtgcgtatggcataaaactttgactctaaatgttatacctaagtcgattttagctaagtgacagaaaagtctgagactggaaaaacaaagctatgttaataaatcagactttagcaaaaacactcaatacagattccgcttattggtagaacaattataaggttatagattccgcttattggtagaacaattatcaggtttgaggggttcctaagtcatttcagtttactattaaccaatcatacctcccgcagaagctcaggtggaaaaccagtagcttcaaaggacattagaggtggtggtacttggcccccctgaagaaatgggaaagaaatatcagtaaacttcagtaatctaagaaaataaaaaagctcaaataaaacaacgataaaagagaggaacataggggtctaccataaaaacgaggggtgattg

SEQ ID NO: 5590 - DNA, 602 bp, Arabidopsis thaliana
cttctaaactaattcgcacagttctatatacactcacaaacacacacacacacaatatagtgctactaaaataaccttgtattaattatggaaaacacttacgttggccaacgagattaccgcttcaacgttaaccagttgtcctacagaggcattcgtcggaggaaatggggcaaatgggtatcggagatccgagaacccggtaagaaaacaaggatttggcttggaagctacgagacggccgagatggctgcagcggcctacgatgctgcggctcttcacctccgaggacgtgggaccaatctcaactttccggaactcgtcgacagttttcctcggccggaaagctctagttcggagcacattcaagcggcctgacaagatgcagcacttatgtttaaaccaggtaggttgagtgaaccagctctcgagtctggtcaaggactttctcgagtaggattgtcccggatcagattcaagcgattaatgagtctccattagactcgccgaggatggggtggatgcaggatttggaagttgctgactacgaagaattatacggacaattttttggtcagcacgatagggatgagttttttgaa

SEQ ID NO: 5591 - DNA, 1366 bp, Arabidopsis thaliana
gaagaaaccacgagcaccccgttcacggataggatcgctcattttcgcctctaagacgtcgggagatccgtttcccggagtacgacggaacgagcaacccaaagactcacctgagatccttccgtttcgctataactcgagcgtacctgacagacgaagaaaacgaagcaggtcattgccgtttcttcgtagaaaacctcgtaggtcacgccctcgaatggtttgctagcctcgaacggaactccattgataccttcgaccagctcgcttccgctttcttaaaacaatattcggtacttatcgaacacaggacgtctgaagccgacctctggggtctcacccaaattcagaacgaatccctgcgatcttacatcgaaaaattcaaagcaatcaaatcaaagattgcgaacctaaacgaggaggtagccataaccgcccttcgcaacggcttgtggttttcctctaggttctgtgaggaactcaccgttaggcacccggtttctttaggatgcctttcacaaaggtcttcactttgccaaagccgaagggagcacaccgttttggcccaaagattcaaagaatctaaagcacaaaacgcttcccttgcaactaaaatacccttcaaaaaggaaaaccaaacacaagggcagcataccctattcgcaatagaagaggcagtcgaggacgtgagtccagaacttgacctcgaaaaatattgcaagtaccacaaaaagagaggatatttcacctaggaatatcgcgccgttacaaaattaatcgcagccggggtcaaaactaaaaaaggttcaaaccccaaagctaaaacccctcctcccgatgagcaggaggaggagcaaactcccaaactaaagaaacgggaccgaacactggaaggaggtgactctcctccacctgctaggaaagaacgcatagacctagcctttgcagaactcgaactggaaggcaggacaaaaaggtcagtcactacacctcctcccgccacgcaaaagaaaaacacgaggttcccattacgcctcccgaaattctgcagaaacgcaaccgagcacctctccccgaaacgcatcgatttcatcatgggaggatctcagctctgcatagactcaatcaattcgatcaaaactcatcagaggaaggccaattcatacacaaaaggcaaaagcccgatgatggcacctgatcaccagatcacattttgggaaagtgaaaccactgacctcgataaacctcacgatgatgctctcgttatccgaatcgacgtagccaactacgaactctcccgtataatgatcgacacgggaagctcagttgacgtactcttctatgactcacctccccacgtcaacgg

SEQ ID NO: 5592 - DNA, 506 bp, Arabidopsis thaliana
ctgattccagcgtgtatcctcgaccatatggagagaatcttgcatttggcagtggagacatgtcggccgctcagcggttgcgatgtgggtacatgagaagtcgtactatgatttttactcaaactcgtgccatggtccggcttgtggacactacacgcaggtcgtgtggcgtggctcagctcgtctcggttgtggtaaggctaagtgtaataatggtgccagtattgttgtgtgtaactatgaccccgcaggcaattacattggagctagaccatattgatttcaaattcaattgatgaatgtgtgtaaagattgtggtattgattactttttttttcatttgagaattcagtacatgagaaaacattacgttaaaatttgtgtaattacaaaaatgttcctttttgatcgcataaccgaaagatcacggagaagggactttccataatgctatggtttatgccgttgttattacaacttgttaagcgctgatagtagatatttga

SEQ ID NO: 5593 - DNA, 748 bp, Arabidopsis thaliana
atatgagttacagaccaaagagatgtaaactgtttttgctatataggactctctacttacctactccagctccaattgatgtcttcatgattctcagtcttgtcacagacccgaggaacatcctgagaagatgaaaagatcgttttcattgaaatggatgtgccacattacaaatacagatgatgaatgggaagttataagggtagtcacttactgccaaggaacatctcctacaagcatccaatctccgtctttatcttgatatgttatgatatattccgatgagccatccagtaatttcgaagtacatgtttccttaattgtcttgtatccttgtgtgttggatcctacaaatcgatcaatcaaaaccagtcaatttcaagagacacagaatttgaaaaacagaatcacatggaatctcatgaaacagaattagtaactgacttgttacaggagaaggaatctggaaaaacattagatccaaagttttctctaaggctgcataagaatccagagcattgagatcaaccttccttccaattataactccgtccattgtcaccttcacaagcatagaagtcctggacgatttgataaagcaagcatcatcgttcttagcagcaaccactacactttttgtagtctccttttgaatgccagaactcaagccgccttccgtagctaaagactttgcttgattgaccaaactgttgattctgtaagtccgtagaggcggccaacctacagc

SEQ ID NO: 5594 - DNA, 1132 bp, Arabidopsis thaliana
tgtccaaaatgctcttatccatcaaaatagagtattgttttaaaaatactttcgatagttcgttgaaattgctaatcgatcctggctccaactgaatgaaccacatcagggttgcccacacagattttcagagaaaagcttgcaataccctgcgtcttcatcggcttcgttcagatcaactcgcccagcggctattagaaaagctgcgagatagcctttcgggtcttccaaacaattatatggttctaagttgagtttttgagaatctctgattctcaaacttgcaatttgtggggtgaacggtgttcgcctagcctcctggataactcggttgatgtctggctccgaacttgtaacttgatggaacttcgacctcatttctttcagttcccgacttacttctctcatggtttcgagctggtcaaagttttcttgctcgtgctgatcatcgaactggttatcatcttcaggatgcgtttctccatcttccggttgactattcgcgtttgtaccatccagggtcgtttgatcgcttgttgcatttcgtggaagggaatttggggatccgaagatagttcttcgaactctagtagaatttcctgcatttaaagaacggacacgagactgaatggtactaacattttggctaagtgatacctggattgtttacagtgtttcgacgattttttccacgtttgaaaacttctgcgccatatcggccatagtttgttgcatggtcttgagggtttcggctattgaagcgttggtagcatcctctccagacattgcggcttacttcgggtatgtaatacacggaagaaatctgacgactcaagaatcctccgctccccacagacggcgccaaaatgtggaagacggattcacacactcaagtattttttgcgggaaaaatatttttgaaaaaaaaatttggcgcgaaaatattttttcaaaaaattttggccggaaatttattttgaaatatttgggcgaaagttattaatatttcattttgttaacataaaaaaattttcaaataaaggtaaaatggtcattaaaaatttaaagaggatagaaataaaaatggctaaaaaaaaagggtagagttaaaaaggccatcatgaaaagggca

SEQ ID NO: 5595 - DNA, 1062 bp, Arabidopsis thaliana columbia
ttcccggctcttgatgcttctatcagcattgatgcatgttttgtttgatccatttggtaaccagaaagaaccatcgtttgatacacatgttcaaagtattcccattgcagtgatctagctgaagcttcaagcatgaagctgtatgtatactcgtttggaactaaatgagtctcttttctgctgacaatctcttcaaacaattctttagcttctgaaaacatatcattccttccgtaaactttaagcatcatgttcgcagttcctatattcggatcacatttatctttcatatattggaatatagccatgcaatcatcaacatgaccaccgttcaatgaagcggctatgagtcctgtgaaggtaatctcgagcggcctgcaattttcaagtcttttcatcctccccacctgcattaatgaattatgaagaaagttaattttgtgggtttctctgagaagcaaaaagggtaaagtaggagggaacttgcttcgagcattgcatcgcaccaacgcccgttgttgcacagacagcatgccaattcatagtaaactgaacccgttcctataactcccttttgttccatatctctgactgcttcaacagcttcttcgatcttgccttctctccagagagctcggacaagaactgagaatcaatcatacgctataagaatcatatcaccttatagataccaaaatgaagtaacctaaatatacagagagaatcaatatttacccttgtatgtgattgcttttggacgttcgccactgcttttcatcttcctaaaaaaatcgtgaacacgatcaaacttccctgactccagcataacctgtcaaaatgacatctttaagaccaaccttacatattttgagggtacccacaaatactacaccacagcagttcgtttatgttggaaaaaagaacgctacctccatcgcaagcccatatgtagctccattaggcctcaaaccattttttcttaactctacaaatacccatgaaacagccttccattggagtgttggaacacaagcgttaagaatctgggaaccagtgaagcca

SEQ ID NO: 5596 - DNA, 997 bp, Arabidopsis thaliana
atcccctgatgataatcaggtatgctctaaacaagataatcacagcttctttaatactatgcactaatggtcctactttcaaaccttatgatggttttcttctttgcactaatattatattataatgtacaggaagaaggttatgttgctgtctcagattcatctccagcgcgagaaagagagaaaccaattctgtctgaagcagaagtttttcttgtagcagagttgttatcaaaatcaaaatcgggctcatatgaacttttaccttcaatgagtaaataagatttagcattatttcgcaatacccatctccgttgcaccgaatacgtatggttatacattcattttatttatcaccaatacagttataatcttgttataagcttatgctttttttttcctcgcagtgaacatctcacttcgtgtggattcttaatttcaaactcattccttctatcacttgccaagcctacaaactgggtttcaactctagtataaaatcaacaattttttaccaatattacctttataatctttagtgagaaagtctaattcttggtgttgttgtcaacaattgtttacctagcatatggaggtgttggtgtccttgctttctcagaaatcatggtcttcagctttttattggaagcgattagatggcttatataagaatttgtgatctggtgactgtggcccggtgggaatgaagttccttgagattcaagcaagtgataatcccccagagaacatggcgaaaataacagataagcacgttgactcttttaggcgtaaatatgccatggacatttatgaggagtttgtctgccccctctatgcatctgactttagtaacaagtgatcactttctctgctttttgtaatattaaccatcttaactttccttttgaatattatcaccttgtaagctattttctgaacgtgtgtgttctattttgctttgttgaatagtaaacataatataattgttgttgtatga

SEQ ID NO: 5597 - DNA, 1654 bp, Arabidopsis thaliana
tcatatcaataacggaagatgtgctttatcccattccaatgccttcgtgtaagggatgaattgtaccttgcaagcaaattaatagcaaaagcaatatctggtctagtacaatttgcaagatacataagtccaccgatagcattcatataaggtacttcgggacccagaaaatcttcgttatcctcacaagatctaaatggatcattttcaagacttaaagatctattgatgataataggtttttaagatcaattaatcctaaagcattatcatgtcgttgtagtacttaaggttgtcaatccaaacgggtgtgatgcttacaatcaagatgtgatcagaagtcactaagtcaagccaagcaataacaggttttggtgtgttctagcagtcctaagtgaacatgcagaaaacagaaattcaagcagaataataaaagcactcgaccaacacagctcgttacagagcactaggtgtggtcgagtgagttggtcgagtaacaggtagtaaacgaaacagagacactcgactgcacagtctgttgccagacaactgggtggtcgagtatcaggtcgagtaacaggaaaaaattgcagaaactaagcaacagatgacaagatgcagtaaacaacagtagagtaaacaataaaatcaatcagataaagaattcccgaggatggggtaattgagtagtttcgtttcctcagtttacaggtgattgacatgctcaataaattatccctagagaacaagttcattaaccaaatttaagtgccaccgcaacagagaccctcaagtaaacctaatcccagactcaatcaccattgacgagagctaacctaacatgcattacgaatcaacaagttaaagccaaaacgctccctgcaaccaataccttggtacagggccacaaatctctggaattagtggttcagacatttcatcgaacaccttttgggcgcggaaatgtctaggctaaattctagttgatcagaaagcaataggcattaagcacaactaatccagaatggatctatcaatcaaactcaaccacctagcatactgagaattctatactactctaactcatccttagaaacctattcactagtcagacatcattgcagaaaacataaacgttgaatagaatgaaaacatgataacaacagtgtaatagcaagatgataacaggatgaacaacagtaaaccaaatgaagaaaaaatactgaatattgaatactgaatagataaagagaaatccggattacaaaaggtctagaacatagtgtctgaggaataaaacctagataaaaaacttgttctcgaaaatgtaaagtacatgctacttacagcaaaatattccgaaaccctaatactcaaaacgacgcagtattgggacggattaagaactgtactcgaccaaggtggtcgagtgagaggtcgagtgaatagctggagtcttcttttcttccttgtgctcgagtgtctggttaagtgcggaatggagaagactttgaagctcgacatcgagtatgtagtcgagtgatggtgatggtggtagaggtgaagacactcgaccaggtggtcgagtgaagtgatcgagtgactctcgtggtggtactcgccaaggggtcgagtgatgaggcgaagtagtgaa

SEQ ID NO: 5598 - DNA, 1672 bp, Arabidopsis thaliana
tgttggaccatcttgatataaacatggcaaaacgcatatatttggaaacttatataactaaatcatgatatcttattattaaacatattatatcatctgtccaactaaaagttaattctcttaatgaagtccaactctaaatactaaaacttccacaaagaccaaataaattgagtacgggacaactgaataacttatggcacaactatggctaatgcgcagtattttgtctgggcccgcattccacttttataaccataataactattgtgtgttcacactatgcgttcacactatgtgttcacactatgtgtttcaatttcaattcaaaaaaatctttctcatctcattaagtacaaacttttttctctctctctctttatttctctctctctctctctcctttcttctctcgaaaagttttcttctctccttctctcttctctgacgacgacctccgccgacgaacaacacaacgaacctccgccgacgaaccacacgacgaacctccgccgacgccgaatcttccgcatcagccgccttgtccaagttcattggtaagtttcggatttgatagaaaataaattagggttttgatttttccccttttgattttcatgtgtttggctatgtagcaaataatgccgcttagttattcgtcaccttcttcatcagaggaacgatccgatgatccttccaagtacgatggtgattttggtgttccccaaatctgtttttgtggtaaacagcttgagcttgtagagcgtcttattggcgatcaaaagaagacatttctcaaatgtccgatgagtggtcaagatgataattatcacgtagacaagggttgggatcttgcagttcacgagcagtgcttttgcatcgacaaacgatttggcgagcacagggaattgattcaaaacgcattcaaatttggaggtgatagtaatcgtctccagattaaccaaatccgtgctgaaattgaggacctcaaagaccgcttggacaagaaagatgcagagatcgcaaggtttatggatgcacttggaaagaagtaaaatgatttaattgactttgtgattgtatttcctttttatgttgcaacaagtatgttaaagtttgaaactatgttgaattcctatttctagagtcatttgtacctttttaacttgttttgaagtaatttgtacctctttcggaattgagttgtacctctctataaactacttgtacctctttcggaattgagttgtacctctctataaactacttgtacctcttttttgaactcacttgtacttgttttgaactcatttgtacttgttctgacttgttagttgtacctcttttggaattgagttgtacctcactataaactacgtgtactttttgttttgaacatcatcctaaataccataaataccataaaaacaagatcaaccatcctaaatacataagtaacataaatcccaaaacaacatgatcaatcatcctaaataacaaaaacacaagtcttcaatacatccaaaatacataagtaaatcgttcccacaaacacacaagtcttcaatacatttttctccaaacgtaaaccggacccttggtcgctctcattctctccgcggtataaggtggcttgtggaatctcgatggatttatcttacgcttctttttg

SEQ ID NO: 5599 - DNA, 1600 bp, Arabidopsis thaliana
ttggataattctcctcatgcttttacaaatgcatagacgcataggcaattaccttaccatactgcataagcacacatccaagtccaatccttgacgcgtccgtatacacaacataaggctcatttcgctccggtaaagccaacactgagtacttgatgtaggtcaaattgccttacgaccactctctcaaataagagatcgattgtagtacttaagggtcgaatctgcaacgttatcgaatctcacaatagactaaggttatcgaattaagctaaactaaagataagaaaatcaaaagaaagcataagcaaattatgagatggatgtaaactaagataattaaaacgttaggcttaggatattctcacgaaatagatgatagtagatctagaaatagctaggttgttattgaactgtttttaaactcaaactctaatatcacaataaccggtggcgttccttgaaattcactatgccgagagctaaggttcctggtggcgtgccgtgaacccctatacctaaacatgcatgctaaacgagttcgataagttcaccttagtagattggccgattcttattacacatctataaaccaggctcatcaaatagtagttttagtaacagatacctatggcgggtatatcaattatctgagatcaagttctatttagctactctagaagtagtgatatatgtcaaattgccttaagaccactctctcaaataagagatcgattgtagcacttaagggtcgaattccacaaagctctcggatcacacaatagaccaaggttttgaattaagctaagtaagatagtaatgaaaataaaaagaaacaaaaggaagcaatagcagattgtaaggttgtaagacaagaaagtaacgtcaggcttagggtattctcaggaaactattggttagtagatctaataatagctaggttgttatcgagccattcttaaactcaaactctaattatggaataaccggtggtgttccgcgaaactccctatgcttatagttaagaataaccggagatgccaaaagatctttaacctaaacatgcattctaaatgagttcaattgttcaccttagtagataggccgattcttattacacacctataaaccatgctcatcaaataatagatccaactacatatacctatggtggcatatctattatctggattcaagatctagttaattactctagatctagcattaagtataatcaaagatgaagaattctacaaataacctagcaaaggggacgatctactaaaccatatgaatccctaatgagaaaccctattcctaacaagaaaactactcagacatattgaatgaaacaaacaacatgattgaataagaaagtataaacacaacaaataagataagagtaagaagggatctcttcactgtattaagaactgaatgaatctctgaaaacaatggatgaatagcttatgtctctcaaaatagggatttgcaaagaaattgataaaaggaacttaggtctaaacaataacccataaaactatatataagccctataaaacgtctagagactaataacgcaaatagggaagtcttctga

SEQ ID NO: 5600 - DNA, 1210 bp, Arabidopsis thaliana
aaagtctgcgcctttgtgtctatgctccgagtgaatttgtgctttacattgttaatgaacaagaaaagaattccgaaaacaacctttattttaaaaaatccgaggccatacaattcaattttaaatacatcttttgaattataagaaacagattttcttctagttttgtatttcctttttcaaattcgtttcgttagaaacattaaaatctcttaaaaatattttgggaacaacaagaaaagtgaaaagaaaaaaacagagtcaagacttgatgactccaagagtagaagcttgaagcgacaccgtatgactctcatctccaatatgaatcccatgatcaccgatcggaatccttcggttcccggctcggtccactacacttaaatacttacacacgtgtatattcacctgcacacgcttcttctccccaaccgccacgtgtactctctcaaaagcaaccagctgtttcttcggagcccattctccacccggcggagccgagaacacaagcattgtgtgcgtcccatctctcgagccaacgttagtaacttccacgtggactccgagagagagacgatcacacctagcgtgcgtcacacggattgatttccctgaaacggtgccgtttcttccacgaacagctataggaatcacttttggcgcgtcggctatgttgtgagtaaagcgcgtgtaactcaaaccatgcccgaacgggtaaacaactggaccgtcgtagaaccggtaagtccgacccgggatccgcttcgaatggaccggccgcatcgacatttctgtcattggtaaattggttaaataatcttgcggataccaagtcatcggaagctttcctccgggattagcactgccgaataagatatcggcgattgcggtaccaccttcttgacccggatacccggcccaaacaatcgctggaattttccgatccttctcagcaaaagatatatcgataggcccaccagacatcaatactaagataactgggcctttagcggccttagcaactctagagacaagctcttgttgtttcccaggcaaaagcaaactgtttctgtccttgaactccgcttcaatagactgatccaaacccatcacaagaaccgtcgcatcagctccacgagccgcttcaaccgcggcatcgaacaatctatcatccatgcagtgtacgtcacgcaaccgttttgatgaatgg

SEQ ID NO: 5601 - DNA, 1173 bp, Arabidopsis thaliana
attttccttagagatcagagtgagttctctagagcacgcaagagacttttcactttcctgagcggttcagatatgatcctcaaaactctagctttttccctccaatcaattcccgcatgatggacttgcacctcatacagcctaaacggcccagatgaacttaggctcagcaaacatgacaatctgaaacactcaacaattcattagtgctcacttgcaaatacacatccatgtacactcaattaatcaataaccacaatattttcagtgataatttagcaagcacaactttcatcatgcacttgaacagtgacccaaatagtcaattgatacacgcgagtacctacatgtttgagcgcaccaatatacctttcacttgtgacccggttcaatccattgttcccatcaattgttcagaacttagcaagaaactgtcacaaccattcagatcgttgatagatcagctcaatgttcagcggctagtctttcacactgtcatgccttcagttctaaacaatcagggcaacgtgtaacaggcagctggaatttcctttgaagatagctttaccaaacaagagcttgatgatatgtgtttttcgaattgctccctcttttgttaaatcagcaatatcacttaacttctcaattgctaatattcaaacttagtgatcttgatacacatttttttttttgtgtatcaaatccattcggttggttgatcttctcacctctttgacctcctgttagatggcaatgttttacgtctgatttgaaccggcatgacaggcagctattttctacataattttacatagtgatgatcctctattcatctttagatttctgtgacctgttctcactttatatccctgttttagatcagcacaactcacaaccaattcatagttcacatacaccaatggaaggtcgcagactaataaatctgttgaaatccaatggtttggtaaatagatcagctagttgatgctcattacccacatgaccaatcactatttgttttgcctcaacaagttcacgaataaaatgatgcctaatatcaatatgtttcgtgcgagagtgttgaacatgattttttgctatgcttatcttcaacagtagataatgaaacactcttctgtttcttgttgtgccatgagaccatgttgttcccat

SEQ ID NO: 5602 - DNA, 622 bp, Arabidopsis thaliana columbia
ttgaaagagacttaacaacaaaatgatgtctcatacaaccaaataaaacttattgataaaaatccaaccataatctaccacagatagatgaaagttgtctctgcagagtaagaaggaagaagaagcatacaaagagagatcatttggacttctttccttgtttcttcttgacgacttcatcagtgtacattatgcctttgcccttataaggttcagggggtttgcaactccttaccgttgcagcaaactgatgcactctttgcttgtcgattccagtgcagcaaaccacattgttcttgaaacaaaagactcgaaccgctggaggaaccgcaagttcgacttcgtgactgtaacccaatttgaggtataagaaacgccctgcttcctcagctctagctttgtatccaactccaacaatcttcaagaaccggaaaaacttggcttccatgtctctctatcctacagagaattaccctgccaaagaggaaaatttctcagcttcttcaaattaagaacttggaaaccaatagagttcaccattatcataaaccgatgctcaatcagaatgtgaaggcagtagattttgtctctctagccactcacatcacacaagtaaatatga

SEQ ID NO: 5603 - DNA, 536 bp, Arabidopsis thaliana columbia
agtattaagatggaacctttgcaggttcttgtgaaattgttgaggagaaggatgcggtaaggttagccaaacattctagcagatattgtatgtcacctttgggatcaagtaaagatatggagcagcgtcctgcattgaagtcagggtaccaaggttctatggagtatgacattgatcagcttttccagtctataactataaaaccatcacctagaagagtgatgggctcttctttccatcatcttgagacgagcgcaagtgctggtacgagcaggagcacaagcccttcaaataaaggcgctatgaaaaagccctttcccatgggaacccctcgatcaccaagagttggtccctctgattcaatatctctgaagcaggctctgagagatctttgcatctccaaggcatcagaaatggcttcccagaaacgtttatcaaaatctgcagctgcatctccgagggtttctgaagcagacaggataaagactctttacagacaagttttgaatgaactgctggcaacctgggcttcctgt

SEQ ID NO: 5604 - DNA, 585 bp, Arabidopsis thaliana columbia
taactgctttccctccccatattggacttgataatcctcgtccttaacaaggaagtgcacatgcttctgctggctaagaagaatcatgtccagcttggcattcagcgctttgatctccttcctgtgtttgtcatcagagtcggttgtgcctctgatggtcttgtcgcagtcctcgttgtaattaccatctgattgagctaggttctcaaccaatttccagccttcttcaacatctttgttctggaaattcccattgctggcggtatccagaagcattctgatgcgtggtaaaactcctctgtatagagtgctgagcagagaggctttcgtgaaaccatgatgagggaattggttggtgtaaccttgaagcgctccatgcttcatagaagcttcactagtcttctgtgaaaaaccagaaactcatttctgagtcttgagtctggcgttggagaaactttgctagaaacattcttgaatcatctaggtggtattgagcatggggagatcttctccagatgtgtgtttgcccaaaagagatggacaactggagttgaattcgcttcactgcacattgaatttgtaggt

SEQ ID NO: 5605 - DNA, 610 bp, Arabidopsis thaliana columbia
tcccccaaaagactaattcagatttaataccaaaaacagagaaaatctctccttttaaacccactcttcgcccttgaggtttagcaaagagaacacacgacacgagatgggtctcaaagcctccctttctctcctctccctcaccatcttactcgtcttctctaaggtcgttacggcgaataacatcacgctggcctttcagaaatactccaaattcagcaccatgagggacctcttcatcaagaccaagctcattgcagccatcgacaaataccagacgataaccgtgcttgctgttagcaatgacgctatcagctccatcactaacagatccgaagttgagctcaggaacatcctcatgactcatgttattcttgactactacgatgagcttaagcttcaggggatgagggagaagagtataatgcttactaccttataccaaaccaccgggttgggtgaacagatgaatggtttcttgaacgtttccaaatcaaaaggaagagtttactttggatcggaagtgaagaactctcctttaaacgctgagtatgtctcgacggtgtacacaatccatataactctctatcaccagattacatgcaatagt

SEQ ID NO: 5606 - DNA, 554 bp, Arabidopsis thaliana columbia
cgaaccgagttgggaattgaacatatgtcatacttttggcctcttcgtcactttgattaatcttcatccactctgtgaacattgttctgtcaactccatctcgtgaaatgacactgtcgagactttggtttgcatcgaatataagagattgttggtcaggcaggtgcaaagaaaggcgttgaacggctggtctgctgtagtgaataacaaacgaaaatatcctccacattgcctcacatgctgatatatatcgacattcttgataatttttaatctcgtcaacatagtttgactcgccttttgtttttaccaccgaccctgagaccctctctacaacaatggtagctttgtcaacccctttcttgatgtatttaaataaatactttatcgcttcagttgaacagcactattcaacattcacatgtgccttgtactttttcagtagtgaggttgtgtggcactacatgacgattatctaggcaatgtatgtaacacgtgtatgtagtcagtttttaggtgttcagattattttaggcgtatattttcaaatgaaa

SEQ ID NO: 5607 - DNA, 524 bp, Arabidopsis thaliana columbia
ccaaaccgatttcattctccctaatgagtaaagacagaacaaaatcctcgaattggccttgactttgtggccgcttggaagcacgtcgggtttagcaggagacttgtggttaaagggaacaggtggatagagcctgagggcttcacaaaccgcgccgtgtaaatacaccaacttctttacctcttggggattgaatgaatcagaatcataagaaacagaaccgtcgtcggtcttgtttcttggaaatagatttgtgttgatttcttgacgaatcttggtcatggcttcttggttattgcatagaagccagaagaaccaagtgagcgctgagcctgttgtgtctctaccagctaacatgaaggacaagattgtgtctctaaggaatctgtcatcacttggattcaacaacttgtacttagtcgtgcaacatttatagaagacatcaacaaatctttagaagaagaagaatcaatcccttggctgatctcatctctcttagaagctatgcacttagagcaaacacg

SEQ ID NO: 5608 - DNA, 849 bp, Arabidopsis thaliana
aactcaacatggcatcaagctcaatgtcttctcagagctctggctcgtaggactgctaagcagaacaaagcctttgagcaggctctagcaacctatgaccaggacactcctaaccgttggcaaaatgttgccaaagtcgtgggtggaaaaacaacagaggaggtaaagagacactacgaactcttagtgcaagacatcaacagcatagagaacggtcatgttccattcccaaactacaggactagtggaggctgcactaatggcaggcttagtcaggaggaaaaaaggtatgtattgtcctaaaaaagacacattctgctataattaagaatacaaaacaatccaagccaaagacaccaatctgattcataatttgtttatgcaggatgagaaacatgaggctgcagtaaatcaaaaccatcgagaataaaagaggattcaccggtcgatttttctcgtaaccctgtcaattgcgaattattgtttatatctatattcctacttccaatgtttctcccataatctttgaggactccatatctttcgattctccagttttaacaaatgaatctgtattaaggttatttgtaatgaaaactccaacgtcatcacgaatcattgtcttagaaaatgaataactaaagcaaaaacatagctggaaaaaagctacctcgaaaaatctgccattagtaatcgcgagctttgattccattaggaaacaccatcagggtttatgaattggggattttaaaaacgaaaaacttgttccaataaagtgagacgcagacatggcgggaaatttgatgcttgcgaaaaagataaaacttataaaatcgcacattgaggcct

SEQ ID NO: 5609 - DNA, 484 bp, Arabidopsis thaliana columbia
atggccgggcctgatgccgaacctgccgccgacacccctgccctgttctatggcggcacgtgtcggctgccgacggatgatgggcgagttccggctgcatggctttcgcgatgccaccggccgcgaacatgcggcgctgacggtgggcgccatcgacgacggccagccggtgctgacgcgcctgcactccgagtgcctgaccggcgacaccttgtacagcctgaagtgcgactgcggcccgcagctgcaggcagcgcagcaggccatcgccaccgaagctcgcggcgtgctgctgtacctgcggcaggaaggcccggcatcggtctggtggacaagatccgcgcctatgcctgcaggacgccggcgccgacacggtggaggccaaccgccgcctgggcctgcccgacgacgcgcgcgactaccgcgtggccgccgagatgctgaagatcctgggcgtgtgcttggtgcggctgctgaccaacaa

SEQ ID NO: 5610 - DNA, 555 bp, Arabidopsis thaliana columbia
tgagagcttgaacacccgctctcaacatctctctgagcctccaaatgggataaatcgcatcttcccctaactctgctgcatccacttgttgcatagcccagtcgtagtacactgtgtgtattgtgtcctatatccaacacacaacaacaaattctttaaaaaattgtggcattgccatatgtttatgatcttgattcaatattcccttttttacctggcctccttctttgatttttccatcctgatcacggacgcagaagatttcttgcgtttggaactgacatcacatcaaaaacgataaatccatcagacacaattcttagctaaaggatgacctcagaaggaaaacaaagatcattaccctgacgatgattactggagtagtcccatcatctttgtctcttgaatatcaacttcagatacatgcagaagctgcacatcacagccaaaacgattttactcaccacaaaacgaagcaagttactcagtgacttacatgatttcataagaaccaggatctcgtgggtgaaccaataataaagactttaccttgtg

SEQ ID NO: 5611 - DNA, 444 bp, Arabidopsis thaliana columbia
cctcagattattgattattgtgagatatgcaggtgatgtgtgatgcttacacaccagctggtgatcctattccaaccaacaagaggcacaacgctgctaagatcttcagccaccccgacgttgccaaggaggagccttggtacactcttcttcttctgttggtctctctgtatatctaaatcagattctgattgtctctttgtgtgattcaaaaggtatgggattgagcaagaatacactttgatgcaaaaggatgtgaactggccaattggttggcctgttggtggctaccctggccctcaggtaaaaatccagttaccatttgatcctaatgtttttaacaacacatttttgacatctgataaaatgtatttcgtggttgaaacagggaccttactactgtggtgtgggagctgacaaagccattggtcgtgacattgtgga

SEQ ID NO: 5612 - DNA, 1052 bp, Arabidopsis thaliana
  unsure (1)..(1052): unsure at all n locations
gtagtaactgtcatggactcatctctttgacatggtttatgtaaacttcctgttctgacgtatcttgttgtgttctcaaggtagaagaggcgtctttgatggaacaatagagaacatgcatcttcactggaagtatagggaacttgtgaagatcatttgtaatgaatatagcattgaagctgctcacaaagtagcagaaatcttggaagcagaaagtggtggcatactagttgctgtggagatggttagtaagggctatgcaatcattgtgtatcgtggaaagaattatgagcggcctcaatgtctacgacctcaaacacttctcagtaagagagaggcgctgaagcggtctgtggaggcacaacgtcgaaaggtaaagaaccaatcataacaaatccatgacatgacaatattgtcctgtaaataatatcttatctggaaacttcaaattacttttatgacttcctcgcttgcatgttgaattaattttctgctcaaattaatgcagtcattgaagctacatgtgctgaaactttccaacaatatcgaagaattgaaccgtcaattggtaagtcatatgtgtggctcagcttgattttcttaaacagtccttgaagagacgtaacatttgaatgctgctggttgggggcaggtcgaggacagcgcaaccaatgaaacttggtcagatggggaatcaagtaacatgatggtaaattatttacagtttcagtaaacacatgccaattcttgatgctacacctatgcttctatgagtttctcaattctccttatttcttatgtaggtcgaagaagaaacagaaaatcagcatactgaacctgagaaagcaagagaaaaaattgaacttggctattcatctgacttatcagttccttcctctggtgaagaaaactgggaggtgagattgtgagctcctcctctaagtttcttgcaaatggctcctattaatatattctctggattactanaatgtgaacccgaattctgagactgcgttggtgaatatatttgaaggatgacagcgaaggtgaag

SEQ ID NO: 5613 - DNA, 572 bp, Arabidopsis thaliana columbia
ttgagcagattgaagtcagacactgttggagcatgcatcttctggcaaacaaagttaacagcaaactgtatatcaggtcttgttaaggtaagatattgaagtttacctgcaagacttctgaaatatgttggattgtcaaagatttcatcttgtgcaggtatagcagtcaactgaagtggcagatgagtaggcattggagcacaatcactcatcacagccacagcaagaagatcttctgcatacttctgttgggagagaaacattccttctgaatgaaactgcacttgaatccccaaaaagtaatgtagtcttcccatatctttcattctgaattcagtattcaagctgtctaatagctttgacatcgcatctgaactgtttcctgttattatcatgtcatcaacgtaaagcagcagcaggatgatactcttgttcttgatgtatacaaacaaggatggatccggcttgctacattcaaagccaaactcaatcagataagtgctaaatttatcaaaccaagcacgtgggaattgttttaatccgtagatagacttatgcaaaagacagacatg

SEQ ID NO: 5614 - DNA, 541 bp, Arabidopsis thaliana
tgaaattacgaccatgattcttcatgatgacaaggtttgtcttttccctttgttttttcttttaatcccaatttactttgttatcattgaaacagatcatcacaaactatttaatctttgagttgcttggaatttttttcagaataaccgtgttggtgcaacaattcctcatagaaactatcacaatctcttccgtccatttctcaagcctgacacatggattcacatctctcactttcgggtcgtttttcctcaagcaagggttaggtattcttcctttcgtttccacatcaagttcatttgggaaacaagtgtttaccctcttccggaacgggtgaaaatgacttctttgatttcatttttctcattgaccttaagtatccatgtcttgaggattgggattatgtcacgggtaagtttttagtcaatctatgttcttctcattttaagaatgaatttttgatagtagtttatgttattatttttgaactatgctattaatatattattctatacttaggtgcaatgggtgtggtgacaa

SEQ ID NO: 5615 - DNA, 519 bp, Arabidopsis thaliana
atctagggatagtgcgaagaaaagaatggcctcacttcttcaggttccatgtagtgatgggtatgctgcttgaaatcgcactccaggttatagggaccgttagcaagtggatgcctcttggagtctattggggtaagtttgggatgcatttctggactgctgttgcgtttgcttatctgtttaccgtccttgaaagcatacggtgtgcacttgcgggtatgtacgcagacatcccgtttgtctgtgatgctgcctatatccagattccgtacgactaagaagaaacaacattggatcgttatgactcctctttttttttttttttgttaattaggtccttgttttgttgttacaatgactcttcttgaatgacaattatgtttgtaatcaacgtttcatgaacgcagccgtcaaagttacaaacttttgaacatggattggctatgaaaccaaaaatataatcgaacatttttgggggtgtattttgggaaagaaatataattaggtggactaaaatgt

SEQ ID NO: 5616 - DNA, 532 bp, Arabidopsis thaliana
tgcagctagaggatcgatgataccacataatgtctgttcacaaactcaccgatttgagggatacctcaactaactggaagattaacgtgaagatcctatcaatttggaatcatcctccaaatagtcatggtgaaattacgaccatgattcttcatgatgacaaggtttgtattttcactttttttttcttttaatcccagtttactttgttattattgaaacagatcatcacaaactatttaatctttgagttatttggacttttttcagaataaccgtgttgatgcaacaattcctcaaggaaactatcacaatcccttccgtccgtttctcaagcctggcacatggattcacatctctggctttcgggtcgttgttcctcaatcaagggttaggtattcttcctttcgattccacatcaaattcatttgggaaacaagtgtttacctcttccggaacttgtgaaaagagacttctttgacttcattttcccattgaccttaagtatcgatgtcttgaggattgggattat

SEQ ID NO: 5617 - DNA, 555 bp, Arabidopsis thaliana
tgtcatcattattgttctaacctataagaaattctattggttgtggacgattcggttttctttttacacatcaattgtccatcattgtatcttttcacaattatataaaatcaaaacccccaaataaaatcattaggttaaactcttatctttcaaaaaaaaaaaacttcctctctaaaacatgatgtctgttcacaaacttaccaatttgagggataagtcgactaactggaagattaacgtgaagttcctgtcaatctgtaatcatcctccaaagagtcatggtgaaattacgaccatgattcttcacgatgaaaaggtttggaattttggattgttcattcttttaatccaaatttactttgttactattgaaatagatacttttaaattatttaatcgttgagttatttggaaataatttcagtgtgatcgagtagatgcaacaatacctcaaggaaactatcagtatcttttccgaccgtttctcaaacctggctcatggtctcacatctctgactttcgggtcgtggttcttaagaaagggttaggtat

SEQ ID NO: 5618 - DNA, 516 bp, Arabidopsis thaliana
ttttgcgtaaaagaaaaactattttaactgtaagaactttttccttctttacttgggcaagaagatgagagacttgtaagaaaaaaaagaactcccatactcttggaacttaagaataatgttttccaattttactcccatgtcgtcagcttagctagaaccaggattggctgcaaagtacgccaaaacgccaacgaaaggagcattgatgtaagtagtgggctcggacttgcggaaatcggaccgatcatcatcgtacatatcgtcctctccgggcccacccaccaccgctccaatcaaaacgttcgggttcggttcggtagaattgaaataaaccgacccgtctttgcatctgatggcttctggatggtccacaatcgatggcaatgatgagccacggtgatggatcctctttggatatctctctccgtatccgaccatgtacgataacccatcggattattcccaatatatagtcaccttcattttcgaataatacatgattagtttgctgga

SEQ ID NO: 5619 - DNA, 551 bp, Arabidopsis thaliana
aaatccgcactcaagatcgtttagggaaaaaagttagggtgaagtgtaacgatgatgacacgatcggtgatctgaagaagcttgtcgcggcacaaaccggaacacgagccgagaagatcagaattcagaagtggtacaacatctacaaggatcacatcactctcaaggactatgagatccatgacggcatgggtcttgagctttactacaactaggttttacatctttcttattgtttgcgattacgattgattatctttcggtttttgtggtatgtgatttgtttgagtatggagctttatttttggcttaagattttgatttttctgaagattttgcggaattgagatgttgttgttagttgtggaccctgtgattgcagaatttggagatttaattggaattttggaaccttgaaaagccattgttattaaaaactgaagcttgttattgtctgattttgtagtaagtaacccttaaggagaaccaaacctttaattataatgttttggaatagcctagttctaaacgttaagagacgccataagtga

SEQ ID NO: 5620 - DNA, 681 bp, Arabidopsis thaliana columbia
tacatcaggtttgtgaccacattttcttctcatatgtaccctcatttaatcctcatgcgactaatgtaagagtgatgatttgttactacactcaacaatagataatcatgtttgtgaattgagtaccggataatcatgaacattactatattagactaaatatccttttatttgttatttctttcctaatgtaaaatgttactttggctgcaggctttggcatcagaaagagaattggttcatgctttatttgatatagactcagctgaccatcaatcaaacgcaaaaaatacctctgagaatattgccctaaaggcaggagaatctgactttacatttgttctggatagaatttttgaaggagtttgccgtccatttaaagtgagagtcgaacaagttctgcagtcacaaccaagtcttattatttcttacaaactcaccaacaccttggagttctacagctacactgtgagttttacatagcctctttttgtacttgtcgctctgtatattatatgacatttatcaatctggtggtttaatcattgcctcattggtttcttttccaccttgcagatctcagatttacttgggcgagacactgcactgtgtaatacaattggaatggtaaaggatgctgcacagaaaaccttctttgacattcttagaacccgaggagag

SEQ ID NO: 5621 - DNA, 514 bp, Arabidopsis thaliana
ctaaagtatagtgggccatatcgggttggtgcaattgacatcgaggccccatgtgacggacgtatcgtccatccctccatccacctttcagacggccaggccgcctttcagctcgacaccgtcctcttcactctctactacccagccgctccagacgccgtcgccaccagatctcgacatccatggctgatagagcccattcgactgcgcggtgagggattcgcgcgcttcgtcaacgcctcgaattggctcgtcgatcgcgtgttcgctttcatgctctgggcccttgccggcagcgtgcgcatcccggccgacgtcgacatcccgttgcgggacccgagctctgccgataaactgggcgagtctccgactgacactcatcatcggtatccggttatcgttttcagccatggcgtggcggcatcacggacggattacacacagctatgtggcgagctcgcgtcgcgagggtacgtggtagccgctctcgagcatcgtgacggcagtggacctg

SEQ ID NO: 5622 - DNA, 1394 bp, Arabidopsis thaliana
actatattggccggctcagaaacttgtcaccagaactagattggatttttgcacgtcttcttgttatgacctgcttgtcgacagcgtgagactgatttggtaaaagtcttttctgtctctttttctgaagtgacaaatacaggaagttaaaaatctccgcatggtaatactcaaaatacaagtagatgaaggaacgatgttagtacatacccggttttcacctctagatgggatccttttggacagtggtcttcctggtggccgtctactgtatggaggaatgagtatcaaatccactatatgttgtgggatgacaacatctttcggatccgcgataggtagaattggttcttggaaagaatcagaaaaaacgtttgaaggccataccaccatccgacacaagccttcggatcaattccatgctcgattgcagctggtagagcgtgttcacatgggattcttagcttggtgtacctaagacacgtacacgtacactggtccagaacgacatgaaaatgctcaccggatttacttgtcacttgatagctccacggtccagacatctttacatcgtatttacctgacgcaggaacctcttgtagaaacctctcatcaacctcaggtatcacagaagatttgcacctagcaactttcttcctcctcgatgcgaaccatcgcattaggacatcccgaatgaactcgatcatgtaaacaatcggataagtttttgcttttgttaacacatgattcatggactcagagttgttgctagacatgatattgtagcgttctcctctacagtgagctcttgtccaatgctcaaatcctatgtcctctaggtattttgcgcatttagcactcttttcccttaacagttcaaaatatttctcgaaatccctgaccctataagctttggcagcgctgaaaaataaagcagacacaccaaacttaccataataggtggagaggtttcgctcaaggtgaacagcacatgatccatgatgcactctcgggtaaacaacacttaggcctttgtatatagatgaatgtctgtctgagacaatcattaaatcgtcactgtctggaacaatctcagctaacttttcaaaaaaccatgcccaagaagcatcggtctcaccatcaacaacaccaaaagctattgggaatatttggaagttcccatcttgggcacatgcaataaggagacattctttgtaaggtccgactagctgcgttccatctaccacaactaccttcctcatatatatcagacctttgatagaagcgccaagagagacaaagacatacttgaagcgctgcttaccatcatcttctggtgtatagtgtaggtgtgttattgtacccggattagctaattggagaatatacagata

SEQ ID NO: 5623 - DNA, 1174 bp, Arabidopsis thaliana columbia
tatggtcagcatgtacctgatcaatttggttatgggcataatgaagaaaatagatttcatgatatggttacaaatgcatcaatagcaatttgcgagggacttacgactatgcctcacaattcactcgccgaaaaccctaatcgagtattccttgcaaattggtcacaatttgcgaaggatttacgacaacgcctcgcaaatccctcgcagaagaagcctcaatatcctaattgagtaaccctaattttgcgaggaatttgcgagggtcgttgcaattccctcgcagaagaagccgcgaaaccctaattgagtaacccaaatgccacaggaactacagctgctggaatcgcaccacctgttgctgttgaagctgaaacagttagagctgaggaggcagttgagactgcggcaaacaacactggatcctctccatctcttgctttctaaaaaacttgcaacactctgttattatttctctcatctaaaccctaaaacttgcaacactcttttgtataattattttgtttgcttcataattttatttgaacaccaaagtttcagtgttaataatatgagtttaggctatcaactaagttcctaattcagtgctaataccaaaaattaagattagattaacttaagaaaacaattaaaaagataattaagctaaacagaacagtaatcatgtttacctaataatcaaggatgtcgcaaaaacctagcaagtccatcgcaaaagttgcgagggatttgctactacaaacgcaggaactcgcaactccttcgcaggtttgctacagaattattgattgcaaatccctcgcaaagtttgcgaggaattagggagacagctcatttgcggtgaatttgcgacgttttatttcccttgcaaattgcaagaggttagcgagacatctatttcctcgcaaattttgcgagagaattacgaccgtttctcatttgcgacgagcgttttgcgaggaagtgtcgttcgtcgcaatttcctcgctaatagctatttgcgagggattagctacggttttgtccctcgcaaatgacttgttttcttgttgtttgacaacttgcactatctgtttataataatctgaaacaattataaatcatcatgtccttagatatatttcaggtttcacaatatacataaaaattgcat

SEQ ID NO: 5624 - DNA, 1217 bp, Arabidopsis thaliana
tgaaaaagcaaaatccatctcaaaagtcttggtttatcatccttcttcttcatcaaatacttccaggcagcatgatctgtgtgaacaatcacctgtgatctaacaagataagacctgaacttctcgaaagcaaacaccacagctaagaactctttctctgtagttgcataattcctttgagcatcatcaagtgtcctactctgtagttgcataatttcttatccttcctctgtcctagaacagtcccaactgcaaaatcacttgcatcactgataacactgtattttactcattttaggtgtatgtttatcatcatttagctttgcatttgctcattatatcatatcattttgcaccattttagcttattttgcatacttaggcatctaggatcatcttgcattcgcattgcatgttttggtgtgttttcaggtgcaaaaggagtttaaaaggactctactcgatccattcactcgatccaggcagctacagaagaggcatcatcctactcgatctctttactcgatccaggtagctacagaagaggcatcatcctactcgacctctttactcgatcctggatgctacaaaggaggttgcagtttactcgaccctcctactcgatcaaggcaacctcagatgaagcagcaaattcaactactcgcccctcctactcgatccatttactcgaccaagggtgaccatctctacaagactcggtaagctatcaaagcgtcttcggatctcttcattccccactcaaccacacatctgagcatacggataggagaggatgaagcatctactcgaccaattgatcactcggagtgatatgttgcgtttttggtgtcttaggtcccttagttttgagttgtgtgtcgtgtcatagttcgtcttttgcgtcttttcggttgtgtcttgagtcattttgcaggttgtaggtatttaagcgagacacagatgctttcggaacttatcaggctcatttggaccaagaacgatagcagaaatcaagaactcatccgccaggtggggatcgatcgatccaacacttatccgcgaaacagaaatcatctgccagaacgggatcgatcgctcctaggtggggatcgatcgatccaccaatcatctgttgaagaaatctatcagccagcgaggatcgaccgatcccaggtggggatcgatcgatccaaccctctcgacgacgctctagagtc

SEQ ID NO: 5625 - DNA, 1800 bp, Arabidopsis thaliana
gcaaacatcaatcgtatgatatggaagtcctaaattgcgcatcaacttttcggtttggtaatgtgaactagtagcctggtttccttctagtaaaaaatctgtaaacatttcgcaaacagaatccactaacttttcactcatattataatctgccttgttctgcatgagtcgagatgctaaggataactgcgactggccttcacgacaaccatcgtacaatggagtatttgcaccttctaacaagtcgtagaatttctttgaatggttacggaccggttcttccacattctgataactactatcctgatgataactatcctgatgatattatcatcaaaccccacgttaaaattaaatgcatcgttcaccatatccacatatggattttctacaacattacctacttcttcaggattagaactaaaatacgtcctatctgtgtaactagttcctatatccatattcaattcttctccatgcttataccaaacataataatcaggcataaatccttgactaaacaaatgactactaactcttctacctgagatgatgtgtttttcattcttgcatacactacaaggacaatgaaatttacctcgactactctgtactataggccgactattagcgaatgtcatgaattcctcaactcctgcgacgtattcggctgacaaattcatcgtcacttcatcgaatatcttgtacatttaatctcgatagaaaccgccactaccgccataattgtagtttcccgccattatacaataaactaaacttctatttttttcttttcaatcgtttttgttttcttttgatgttgtttagatttgttggtgaaagaagagtgtcgtgaatttttattatatagacgaatttttatgactaatttacgactacaacaaacaaattaggtgtaccaacttggcaatgcgaaaaacgttttccaactactttatgcgactactcagcgactcttatgcgactcttttacgattacagaacgttgtcatatattagtcgccaaatgagcgactaattaatgtactcggaaattgtagtcgtcaattggcgactaagtaacgacaaacgtctcccttcaataatataatcgttcaatagtcgttaatagacgagtatttgccggctaatatagttagtcataaaagaacgactatttgactactaatgttcacgttgttgtaaagtagtcgtaaaactgtcgtcaagtagtcgccaaaaagatgactactgtgattatcgctttttgtagtcgttatttgtctattttcttcaaaacaaattcacacaaccacgagtttaagacaaaatgttgttaactattagaaaaaacaattgtttataaagactgcagttagcgattctattaccactgttaacggccgttaactcatatgtttgatttaccaacatttataaaaacaaaggtttttaaaggacataaaaattaactgaagtattttttggacaaatttaataatgcatgtattaaacagacaaataaaaaataaacaaggtatttttcgggttttttcccaaaataaatatgtacagagatagacatgtgacttcctcctaagtgagctagtttaaagtcttgagctagactccttactattttaggcactgaggggctcagggaggtgaactttagttccttcaggaatggggcaatctgcagtgtagcgcttgaccctctgctcatttacagtaaagtcagacctatcccttcccagtgagagtaattgtcccatatgccaatacttgtttgatggtgaa

SEQ ID NO: 5626 - DNA, 2183 bp, Arabidopsis thaliana
tacttaactaactttcacaacaatgcattaaaaagggctgattgtttgatgaggccaggtcaatcaattgttcatgcttttcataagcaagatgaaatagtcaaaaatgaatacagaatcagattgaatgcttcaattgattgttgtagatatttagtacgacaaagattaccttttcgaggtcacgatgagtcagatgaatcagctaataggggaaatttcttagagcttgtgaaatatacagtagggcagaatgaggttataagcaaagttgtgttggagaatgctccaaaaaacaatcagatggtatgtcccaaaattcagaaagacatcgtacattgctttgcggaggaagttattgaatctataattcaagaagttgatcatgatgtatattgcttgttggtggatgataagtgtgtattttgcatgttttgagcatccatttttcatcattttagcattatattatcactgttttataccattcacatcatttgtcatcactttgcatgtttaggatagttttgcatgcatgttgcatatttgtgttgatttcaggtgatttggagctgttgacaagctatctggaagaagcggacctgatcatgacaaaccactcgaccaccaggtcaagtagaggacatcaccacttcacttcaccactcggccacgaggtcgagtgccctcatctccatcaccagacaatcactcgatcacatcactcgaccatggggtcgagtgccttcaccttcactgccagaccactactcgacctcatcactccacctagaggtcgagtatcgccatcacaacactcgactgcatactcgaatgacaagcttcagagccttcttcattctgcactcaaccagacactcgagcacaaggaagaaaagaagactccagctattcactcgacctctcactcgaccacatgggtcgagtacagttcttaacccgtcccaatacttcgtcgttttgagtattagggtttcgggatatttggctataagtagcatgtacttctcattttcgtagacaagaagttttttatctagttttatttccgcagaacttgtgttctagactttttgtaatccggatttctctttatctattcagtattcagtattcagtttctgtacttgatttcgtttactgttgttcattctgttatcatcctgctgttacattgttgttatcatgtttacaatttgttcaacgtttatgctttctgttatgatgtctgagtagtgaataggtttctgagtatggttatggttagagtagtgtagaattctcagtatgctaggtgattgagtattgattgatagatcccttctggattagttgttcttaatgcctattgctttctgatcaactggaatttgagcccagacatttccgcgcccaaaaggtgttcgatgaaatgtctgaaccactaattccagagatttgtgaccctgtaccaaggtattggttgcagggagcgttttggctttaactttgttgattcgtaatgcctgttaggttagctctcgtcaatggtgattgagtctgggactaggttagcttgagagtctctgttgcggtggcacttagatttggttaacgaacttgttgtctagggttaatttgttgagcatgtcaatcacctgtaaactgaggaaacgaaactactcaattaccccatccttaggaattctttgtctgattgattttattgtttactctactgctgtttactgcatcctgtcacctgttgcttagtttctgtaattctttactgttactcgacctaatactcgaccacccagttgtctggcaacagactgtgcagtcgagtatctttgtttcattttctgtctgttactcgacctgtcactcgacctcacccagggctctgcaaagagctgtgttggtcgagtgttttactgtttctgttttattttctgtttcctgcttgttcacttaggattgctagaacacaccaaaacctgttattgcttggcttgacttagtgacttctgatcacatcttgattgttagcatcacacccatttggattgacaacctaaaatactacaacgacatgattggtgttttgggataattgactgaaaaacctattatcaatttggcgccgttgccaattgggtgtttgtttgttacatttgaga

SEQ ID NO: 5627 - DNA, 1107 bp, Arabidopsis thaliana
gattctcttttagctcattttatgcttgtgatatatatattgagaatttagctgggcacaagtgtagaatggaatgtgaaatttctgattgtcctttgaataaagaagatagcttttttcagtaatggtgagagtctgtatcgtttgtttgcagtcataagcaaaagcgttcgaagcagctgaagagattgagggagagaggacagttagatccagagaaacttgacgctttctcgcgtttgcttgatgttggaagagtcactcattgcttgtacaaagattctgaacgaattcttggaaatacttttggcatgtgcatcttacaggtacttttcttcttatttatattcatttaggatgactgccttatgtccctgtttcgttttgtgagtaattgttactatttcttcttgataaattcaggattttgaagctttaactccaaatctactagcaagaacaatagagactgtggaaggtggtggtttggttgtattgatattgcgatcacttacatcgcttactagtctatgcactatggttatggtatgaaccacagtttaatttcttattttttgagtaagtgggagaaaagcattatctaagtaatgtgacatgacttttttttattaggatgtccatgacagattccgaactgaatcgcattctgaggctgccggccgtttcaatgaacgttttctgctttcacttgcatcttgcaaagcatgtgttgtcatggatgatgagttgaatattttgccgctttcctcgcatatcagatctattactcaagttccaacagaaaaggtaattcttgtagcaaattgagagaatgttatccaaagttccaggtagaattgataactttacaatgttatgtgctactaaaggattccgaggggctctctgaggcagagcgggatctgaagagtttgaaagaagacctaagtgatgattttcctgttggtccgttaatcaagaaatgttgtacattggatcaggttcaaagctatcaattttatgtcttgctaatgttctgtcttgttgcatggttgatattacattgtaggagattctgcgttttcattttgtagggtaaagctgtag

SEQ ID NO: 5628 - DNA, 1346 bp, Arabidopsis thaliana columbia
atctccagcaccaatgtggcaggccatttggtgatctgtcttcagccatttcgagtggttgctgaggtacagggtgactgtgttctcccttttctgagttcgcgagctgtgcggttgatgttgtcgttgaaaaggaggttctgattgcctgttaatcgagttcgcatatagcagaggtgtacctggatcaagaagacaacaagaaaaacacacagttagtaaccgaaaagaaaattgaaaaacaacttgatctaagcaagtctgaaatctcaaatgtaacaaacaaacacccaattggcaacggcgccaaattgataataggttttttaagtcaattatcctaaaacaccaatcatatcgttgtagtattttaggttgtcaatccaaatgggtgtgatgctaacaatcaagatctgatcagaagttactaagttaagccaagcaataacaggttttggtgtgttatagcaatcctaactgaacatgcagaaaacagaaaatcaaacagaaacagcaaaacactcgaccaagacagctctgtgcagagcactagatgaggtcgagtgacaggtcgagtaacaggcagaaagtgaaacagggatactcgactgcacagtctgttgccagacaactgggtggtcgagtatcaggtcgagtaacaggaaagaattgcagaaactaagcaacagataacaagatgcagtaaacaacagtagagtaaacaaagaattcaatcagataaagaattcccgaggatggggtaatcgagtagtttcgttttctcagtttacaggtgattgacatgctcaataaattaaccctagacaacaagttcattaaccaaatctaagtaccaccgcaacagagaccctcaagttaacctagtcccagactcaatcaccattgacgagagctaacctaacaggcattacgaatcaacaagttaaaggcaaaacgctccctgcaaccaatactttggtacagggacacgaatctctggaattagttgtttaaacatttcatcgaacaccttttgggcgcggaaatgtctgggctcaaattctggttgatcagaaagcaataggcattaagaacaactaatccagaagggatctatcaatcaaactcaaccacctagcatactgagaattctaaactactctaatccatcctcagaaacctattcactactgagacatcattgaagaaaacataaacgttgaatggagtgaaaacatgataacaacaatgtaatagcaaggtgataacaggatgaacaacagtaaacgaaatcaagaacaaataccgaatatttaatactgaatagataaagagaaatccggatt

SEQ ID NO: 5629 - DNA, 1137 bp, Arabidopsis thaliana
actctcgaattttcgatttttcacacaagtaaatgattaaatatagatgaaaatcctcaaaaccctaccattaaaaaaaaaaaaaactttaaacatatggatccaccaaaatttaacttgagttgataaatccagacatttattccatttattccttgagttgatatatagtatgccagctggaattatgcggtatgccagctggaattatcaagttcatcagttagaattttacacatagttgtacaactgaactatcatacacatagatgtacttttcactgttttcatatatgtcagctgaactttaatgtacatacttgataactatgtcgaacccaacctaactgtgatttattttgcatattgaaagttttggcagaatcacatttgatatacgaccatattcacgtaatttacttcatttgaggtgatctcatagtaactactccttatcatataagaggttgtttatctgaacacataccacgatttcaatttttataaaaaaatatttatcaatgacactttaatagtaatagtagattttttgttgagctagtagtaaacttcaaacgtttctacatattataaaatcgttaaacacattttactaagtgattatagttgaacgggctgaacctgttgtactaggcttacagatttcgggaattacaaaagaaacatagaacaacgttttattagttaaaataataaagtacccaaaaactaatacaaagtacccaaaaactacaaattccttcgtttatacgaataatacaaagtacccaaaaactacaaattccttcgtttatacgaataatacaaagtacccaacaactaaaatactacattataaatttcatcaacttccggaatttccagattaccaaacaccttcgacacggggccatgactcacaagcttcggtttaggatgaccgctcacacgccagcaaacgagtacaaccacaattctcggagtacaaagactccgaaagtgagcttgaaagtccaaagcttgttgattgtgtgcttcacaatagagaactttattgctgcagttcatagaaattatttacttgatcagaaattgtgaacatgaccatctgaaccaggtctactgaaccatttgaac

SEQ ID NO: 5630 - DNA, 944 bp, Arabidopsis thaliana
gaaaggtctgcttttgacttttgaattgtaataccgagcttccgcatgttgataattctgaattcggatcaaggcctgatctcgcctctcgttgatggtatccagcgagtcgtggagcatcgcagaattctcttcttcatttagaggagcttatgttcgacgaagtcctggtacattgagctcagctggaacaactgcctccatcctgtacaccaatgaaaacggggtttctccggtcgagcgcctaggagttgtgcgatatgcccataaaaatggctgaagttcgtcataccagcccccttttaaatgacttagacgtttcttaagattgcttaaaattgtcttgtttgcagcttcagcctgaccgttcccttgtggataccgtggagtggaataactaaccttaatccccaaatccgagcaaaatgcttcaaactcgtgtgagataaattgtggtccgttgtcagtaactatctcgtatggaacgccaaacctgcatatgatattctgccaaatgaaagtctttaccgccgaatctttaatgtttacatacgcttcaacttcaaaccacttcgaaaagaattcttcgatagacaaaattttgcgctaacgattctcatttttcctagcttgccatctattttttgggagctcgcctgtaacgatgtaatgctttattggctccctccaatcagcccccaatctttagtcggaatttggtcgatttcgtgaaatatccgagcttctggttcgggatgctcatttggcgctagtatgtcttcatcaacccacggttcggttctagcttcgactgtggtgtccgaggtgatttcttctattggttcgtcattttcttcgagtccactatcttcttgcacagtaggcttaggtatggttgtctcttttgactttcgccttttgacaggtggtaattcaataacagg

SEQ ID NO: 5631 - DNA, 960 bp, Arabidopsis thaliana
tgactctttaacattcttaaaagagtcatgattattatttgttgatgatggaatctttaacacaccattctacaccacacacaacattctctgcttcgtgacgcaacatatcggccacgactcaaacacacacaaaagacttacaactttttgaacgatccaaactatgataccacattaagaatcaaaaacaagaatcacgaatcgaatctagaatccaacaatatatattacaacataaaaatttgaaacacgcaagaattcatcaaattcaagcaggtgtagaggtccagaaaatgtccttgagagctggtctaagagcagtactgcagaagttgttgtactcaagcgtatctccatgatctttcttcacttccacgacaacaaacgacggagccaccgcgaatatctccgcttccaccgccaatttccctttccgaccattctgtttaccttcaatccttactctactctcactcttcctcacatcaaacttattcccaagtctcgccgcttcttccaaactcgaaatcacgctactcgctggccgagacgtcgcgaatctcatctctcttttctcctctttcttcttctcctcaaacaacggcgacaaatcaaacccttccgataacgcgattatatgaaacgcgtttaacgtctccgtctcttccttcgacttgtgcaccaagaaatcaacatcctcttccgtggttgtgattgtggcagccactggttcgtttcttgatctcgttgcttgtttcttgaaccaaggcgaatccataaccttctcaatagtaatcctcgtattcggattcggatcaagaagcttagtcacaagccgtctagcatcagaagaaagccaaccaggacatttgaaatctcctctgtaaatcttcctatacatattcacaagattatcatcttgaaacggcaaataaccagcagggatccgttactaga

SEQ ID NO: 5632 - DNA, 954 bp, Arabidopsis thaliana
ctaattttattgtcagttcatactttgtaacatttgtgttgattatatgatacgaaaaattttcctggctccttttggttgtctaagctagaccaaaaaagaagagaaaagaaagaacttatgcccttgaaagcgactttgagttggttcatggatcctcgggtgatggactcagtcactcgatttgccttgagattcataaatttatacatgtgtcttgtggccttcaaatgaaacactggtgatgtcgatatgatgtgatttggcatcgatgctgtcattggctccaaaaaatcatgttttagcggtgagaacaaaaaaaacaaaatttttggaggatcagatggttgaagttaaaactcgagggtattagatggttaaattttaatattgttttggatataggatggtgattaaaaaaaaaaagttttgattagtgttggtgcaggaattagcatctccgataataccaatttaaaccaaggaataacgtgaataaaatcgagaattcgattgaaccggggtatcccggctagtctgttaatgggcctaagtcatgagctcgccagaagatttaggtcgacagtcaagatcgccataggcggcttctcaggtcgtgtaaagggaaaacttccatttaagagaagaggatctcatgaagaatagaagtaatgaagatttagacctaagataattagaagtttatcatattttggtatgttggacccattgtataaatagggggggggggtcaagccctctaagaggatcatgaccaacctaagacaagagactactattacagagcaaactctagctttttattcaagcaactttgttcttctcctttgattattcgtgagctaagagagaagtgaatttgtctaaatcccttagtacaaattaattgtttgattagagaacaacaattagttttgacctgatgatgtattg

SEQ ID NO: 5633 - DNA, 553 bp, Arabidopsis thaliana columbia
cagaataaatttgaagtaaattagtttcaaatcgaaaattaaaacaaaacaaaagtataagggtaatttagcaaattcttgaaacaaacaggaaaaaactgtaaaataaaaaagcgccaagtaggcgattactgttacaaatgaaccaatcaaagaccaaaacctctaactaacttggctacttcaaagattacgcaatcgcctgtttttaggacacagtggcacactcgtaataacgtagtccagagtgatctctttcgtcatttcacatccttcgtctttcttcttctctccaccttcactgccactcacacctacacgcgcgacttctctctcttctgaagcactcaaagagtaaagtttctctgcatttcagcttctctctctcttctctctgtagaaatggcgggtcggatccaatcccaccagctaccaaatggactctacgtatcgggaaagcttgagcaaccaaaagagcgacaccgacaatggcggctcgagatgtcacttacaccggaatcgacatcaagaaatccggcgagctcggaaggat

SEQ ID NO: 5634 - DNA, 593 bp, Arabidopsis thaliana
aggtcgacaggatccctttctgaatgcaaacacttcgtggcacctgaactgaccatcttcttttatgtttttgttttcatttaaagtcagcatgcctcccgtttcacatactttcgctgctcacttctcgaatttctgttgccaagatctaggttgggagtccttgaccatagatagaattcgagcttcaggtcggagaatcagatcccgaactgaccttgccgtatcttcgcctcctttctgtccacgaataatcgacaaagccgacatgtctctcccttcgtaccgcgcagaaaagaaacttgagagagagagagagccgagcaggaaaaggcgcggattaaatccgacaaaactgtgatggcggggacccttgaggacagcaaacttcgttctctagagaaatcgaaataccaacaatctgactctgggtcgaggtcccgccagacgaccaacaaggcttcggtgtcagctgggaaaaaacctgaaacccccacttcgggctctggaaagactattaaggaccccgctggaaaagactccgagaagcgggctgctgataagaaaaggaagcaacccgaagagactaggga

SEQ ID NO: 5635 - DNA, 486 bp, Arabidopsis thaliana columbia
atgcgtgattttgtattttatgtgataacattcttgctagccgatttggctagcttttggactaatgtcattgtctacttctgactcttacggctcaaaaactaagcttttgtagtttgaaaaagataacttatagtttgacttgttagctacaagcctagaatgctgttttaagcatgaagtagaaaacattttttcttattggtacaatggttgaggaactctatagcgggtacaaagaaaatgtagcgtaacatatgcaaaacgcacaaatatatattttgcactcggacaagtattttcttcatatcatgtaattagtcaaatacgacttttcatcaaaaatgctcgcaagaaatcctgcagtgtactctggtatggtgatatctttgtacttagcagggttttcatcagacaaaagatctttaatcggtccataaaccgtggaatttggagaaagactcgagctaaagaagcacgcaactg

SEQ ID NO: 5636 - DNA, 597 bp, Arabidopsis thaliana columbia
tagtaacggccagcttttcatttttatctgtttgttatgctctgatcctaaatgcagttatttcaatgtatgaaggaaccatgtggagctcaagtggcaaaggagaaagaatcaacagttcaagctacgagcctacctctctgcaacggacacgcatacctcgccactttgagaccaggaaagagctcacaacataaaagtcttcaacctgcaagcccacttccacttaatcccatagaaaacatgatggaagttacccccatctcaaaagtgacaccgaaccatcaagttgatgaattttcatcacccaatctcgtagctcatctcagctccactccattcatcactctcagaagacattagtcgctatgtcttgttttctctattcttcctttgtctgtccaaaggtagcttttgaaagatgtagcagcctttgtctatttctctgtgttgagaaaaaaaaaactcttatgtacgaccacttttgtagctatatatatgttctacgatgtttcagcagagtggtgtttatcagaacgtataactggtgtttccaaaggatgcttagtctacttatacatatcataagtagagaga

SEQ ID NO: 5637 - DNA, 1063 bp, Arabidopsis thaliana
tcttgtcacctcggaaaggtttccgagtcttcgatgacttcccagacaaagatgagcaatggagaaaatcatacttcttctttccagtgaatgagctcacttatggaaacaagactggtttatttgtttctgagtgggcagctcgcaccggtagatagtgaattcactctaggaaaacacaacttaaattagtcgtaatttctgaatgcaaacactttatggcacccgaactgaccaccttcttttatgtttttgtttacagttaaagtcagcacgcctcccgtttcacatacttttgctgctcacttctcgaatttttgtcgtcaagatctaggttgggagtccttgactacggatagaatctgagcgtcaggtcggagaattagatcccgaactgatcttgccgtgtcttcgccccctttctgtccaagaattttgagcaaagccgacatgtctcctccctcgtaccgcgaagaaaagagacttgagagagagtgagctgagaaagacaaagcgcggattaaatccgacagaaccgtgatggcgggaaccctcgaggacagcaaactccgttcccttgagaaaacaaagtaccaaccgtctgactctgggtcgagacctgaaactcctacttcggtgtcggctggaaagaaacctgaaactcctacttcgggttccggaaaggctcttaaggaccctgctggcaaagatcccgagaagcgggctgctgacaagaaacggaagcagcccgaagagatcagccactccccacctcgctcctcacgccctcgtcaagaggaaaaaggagcgaagttgaagggagttgtggaggacgccccccagaacctggtggttctgtcttctcgggaatccgaaacccgtgaatcggaacgtcgcaacgtccctcttccgggtaacgaactgatcgtttgtctcagctttcgaatatcacccttagatctgacttagaatttttatcagctcctccgatgacttatgcggatacaatgaggaccctcgtgtccaccggttctgccatagctcccttcgacgagatgaaaga

SEQ ID NO: 5638 - DNA, 392 bp, Arabidopsis thaliana columbia
agaggatccccgaacctcccctgtttttgggaatgtggtcggtagtaaatttgtgttcgaagaaacaagttttaaacttgttgggttttgtggtcgatccggtgaagctattgatgctcttggtgcacattttgcccctcttcctgctcccactccagctcccgcgcccgcgagcgcgcccgctccagctccagctccctcgcccgctcccgcttctgcgcccgttccagctcccgcacccacgcccgctcgagctccagctcgtcctaacaaagtggaggctctaggaggaaatggtcggacaatatttcacgatggtgctttcgatcatgctggaaaggtttatattggtcgaggtgattctggtgtagattatgtgaagttcgagtaca

SEQ ID NO: 5639 - DNA, 517 bp, Arabidopsis thaliana columbia
ggcttcaacaccagtctcatcaacatcttcatcgtcttcctcctcttgtgcaaccgtggctgcttcagaaccatcagtgttggggatcatagacgcaacgtcaggcatcttgaacctctgagcagcttgtgcttgtagctgagagctcatgtcatcaatcttagcctcaccgaatatcacataggtctcagagttcggactcttgaacacatccggcttcgagatgacaaacaacacctaaatgatacaataacatacagaatcaaacatcgctacacaataatggaatacagtcaattaggtcattacttacattctttgatctcttgatagtcactctgctaacatcagtaacaggtttcattccgagtctcagcatcgcctttcggctttacttctcgcttctactttgcttggaagcctcattctcaccagctccttcacataaacaacaacaacaacaacaataacaacatcaaaaccctaacaaatgtcatacatagcaaaacctagaaaa

SEQ ID NO: 5640 - DNA, 594 bp, Arabidopsis thaliana columbia
cactttgcttcatttgaaaaaaggttgcatgtttctaacgttacactgtttcaggctgtgagaaaagctgtgactgcaggtttttttgccaatgcatgccgtttagaagtaagtgacccatttcagttctctttttctgcacatcctttcagccctataaagaaatctgattttcatcatcttaattcttttcgatgttttagccacacagcaatggagtatacaagaccattagaggctctgaagaagtttatattcatccgtcatctgtattattcaggttagtagtatatcttgttgctatggatttagcaaaaacctcaataacatctaaaagttgaagattttttcttttgaacgtgaaagcttatttggtatatatactctttatacaatcttcagggtgaatccaaaatgggtggtttaccaatccattgtctcaactgagcgtcaatacatgcggaatgtcgtcaccatcaatccttcttggctgacagaagttgctccacacttttaccagaaccggcaaaacgctatgtccttctaatcaataagttatccctgcgtttcaagatatagtacagttgatctgac

SEQ ID NO: 5641 - DNA, 552 bp, Arabidopsis thaliana columbia
ggatattcgaaacacacaacaacgaaaaccgccttcactattccacgcattcgaagcgccctgaaacgttaaaaacaatgtaagttatcaatttgatgaatggttaaaagacaagactttcacaaatgggtgttgttttcgaaaaacttcaaacctggaatatgaaaagaaacctgttgtgttgcacaatcttatgtgtttttggaacttgtttaatggcgagaatcggatgaagcagaggacggcttgttgtcgccgccgtgctcctcttgttcgccttgaaaccgtgctggtatacgaaaaccggagaattcaccacttgaagcaaatgcaatgcctggaatagcagattggtgaatccgggaggagtatggtagggatgatgatggtggagatcgtcagtggtcatggactgctgatgatgatgatgatgatggtgaggatcaaccaagcacgaatcataggtgtgttaatggactgaaggggaccctctgtgataaaagctgactttggctataaactggaatgcacgacgacggagaagcaaacaca

SEQ ID NO: 5642 - DNA, 638 bp, Arabidopsis thaliana columbia
cctctctcgtcttccacttcaatatcagctcccagctccaccagcgcctccaccacctccggcctcacgtaaccagccgccatgtgcagcgccgtcaagcctcccctcatgtctcggtggtcgagatcggctccagcctccgccagaagccttacgcacttgtccgaccccagacctgccacgaaaagcagagccgtccggccgttttcgtccacggcatcgacgtctcggtcctccaggagctgtgacagggcctgctcgtcggcttttctagctgccgtccaccagggtgtctcgtactccgacactacgtctgctgcgatgtagctcgatggaacccacgacggagaatggccgtccttccactctgataaggtactccatggctccttcccccgccgttcggcttccaatgatcttgttcacttctccgtacgatgatgatgactcatcatcttcctctgcctcttccacggaggaggtcgtttcttcgtagtttctttgtacggcggcacatatagctcctcggaaacacagctcgatccgtctgatcggtaaggattcaggggagaaagcagaagaagaagaagaagaagatttgggaggagaaagtttgatgcgagacagagactgatgga

SEQ ID NO: 5643 - DNA, 594 bp, Arabidopsis thaliana columbia
ggtatcatatccactcgagattggaggattctaagctgaaagatggttacttggttgacatggggataggagttctcactggtggtcttggaggcatagctgtaggaatctatatagtgtgtttcataaattccatcataaaaaatgttgctattttatatgaatattacttctgcttctatgatgcagtgctggtcagctgttttgccttttgatgtagcaaaaaccataatccagacctcttcagagaaagctacagagagaaatccttttaaagtgttgagctcggtcagtcagccatcttccctctatgaatctaattaccgatacaaaagagtatatgaaatattgtttttgactttaaatcatctctgcagattcacaagagggcaggactcaagggatgctatgcaggtttgggtccaaccattgtgagagcattccctgctaatgcagcagcaattgttgcttgggagttccaatgaaaatgttgggaatcaaacgtgactaggattagtcttccaatctaatttatttggttcgatttacagatctttaaccacaaggagcttgcatttgcttcagattttgatg

SEQ ID NO: 5644 - DNA, 576 bp, Arabidopsis thaliana columbia
  unsure (1)..(576): unsure at all n locations
ggatctcttataacgacctctccatgaatgtttaacaacaagatacctagctagatactccggctcttccacagcaccgccggttgttgaagcaacggcacctctagagacggaatccatagtccgatcagatccaacggaatcgataaactgtaacgtgttgtttcgaggaggattattaagaagaggtcgtagaaaatcccagaatcctaccctggaatgatcggaaacgccaggataatggcgggggtgggactgattcgcccccagttctttgacttggttatagcaaaagccaccggggctagaaggtccttttgcaacaatcggatccaaaatgggaagcttaaaccctaattttagtcgtatgtaagaaacctcggggagaagatgaatgcgatcgatttgttcttgaatacgaaatttggtgaatgatgatgatcagagggaaatgaagcaaattttcgatctgagattgggagagaaagagtcgtgaatttgtgtgttgttgttgttgctgttgttttacagtgtgacgactttgtttgagagggttaaggctanaggcatttttga

SEQ ID NO: 5645 - DNA, 456 bp, Arabidopsis thaliana columbia
ttcaaatatttgcgtcactttttcagatttatagattgaatatatattgataataattgttattttattaatgtttacttttttgtataagttatctattagttgtaacaaaataaaaataaaagggggtttgttattgtttatcatctaaattaggtagattcctttagttagtgtttgtttttatgtcttgttgagcgagtcatcaaggcttcgaacttgtattgtatcagagtcttatcattactctgtggtgcacctcacctcgtcatcatttcccctcatttgattccacaagaagcgaccgctatcgtgttagatttccaccttcgaccatatttccaacttaagtatggaacccttgtatccctccaaggctagttagaagaagctagaaagaacctcacaaattttagaaagcatgaacattccctagtccgagaataagtaacaagc

SEQ ID NO: 5646 - DNA, 485 bp, Arabidopsis thaliana
ctcattctcttgtatttgctattacattagttccaacaattacgcaccatggtccattccaaccctcaaattcttcaggtaagactcgtctagttttcgttatcctggtccagtagtttgtaagacttctcactgattccgaacctcttatgttggaacaactgcttttgttaccagcccatgcttcaggaacttggaaagcaaaaccctcaacttctgaggctaattcaagaaaaccaggcagagtttcttcagttagtaaatgagccctatgagggttctgacgggtgagtcctccaatctgtttattgtaatctaaggttctgtcagatgtaattatatgcttcttattgatatttcattaaactaaataatttgattcacaaagtttaaaaacataactcatcagggagggggacatgttcgatcaacccgagcaagaaatgccacatgccattaacgttacccagcagaacaagaagcga

SEQ ID NO: 5647 - DNA, 597 bp, Arabidopsis thaliana columbia
taagcatttcaagtgtttgaagaatgctataacggaccagcttcaattcagccacaacaacaagatccaacaacaacaacaatgtggtcatccgatgaactctgagaataagactgattctttaagatttggaggaagtgatagttctagaggcttatgttctgctggtcaaagacatggatttcctgatcatcatgctcctgtttggagaccgcaccgtggcctacccgaacgtgctgttactgttctaagggcttggctcttcgatcatttcttgcatccgtaagtaacccttctcgccatataaatgcttttgaaagttgttggattcgagtttgaacttggttccaacaattgattaaactaaatgcaaacgtttaattgatcatgaaccaaattgtatatatatgcttgtgaacaatagctttatatgtgtgtgtcagtgtgaataaatatgtgtgtatcgaagtgtatttttacttggaagtatgttttagatgggacatgtcgactgcttgtttgttcccaaacttggagatgcgctttctgtcaccaagaatgccaacttttagaatagttatggagacgacttgctgt

SEQ ID NO: 5648 - DNA, 190 bp, Arabidopsis thaliana columbia
ttaacatgtgagttttcagcagagtcggatcttgatgcgactgctcacagagagtcaccggcgatgaccatggccggtgagatctcggaatcgtgtctctagcaggtgttgatggagtggtgtcagaggatggagccgtgtcaagcgaggctatgggagtatgttgatgacttattgcttcaggtggaga

SEQ ID NO: 5649 - DNA, 528 bp, Arabidopsis thaliana columbia
ccactttgattaacatttggagctctaacaaatctctcatcttctgccaacctttggtctattcatgtgattatatgtcactaggaaacaaagcagagttcattaacgatcgatgttacattttcggctcatgctccggccttctcctactatacattggtcacttcttcatcgtaaatcccttgacaaagatatttcgaatcgtggatcactctggatcgaagcttctgcctcacatagccagtgttgtcgaacaggccgatccttatgaccccgatggtccccttgttcgtacagagagagcgatgtgcatcggcatcgatcgtacatcactgttgaatcaccaagatattcaagatcgtctgcatacttgagatggaaacaaagtacagatttgaaatcagcgacggagattcttggaggttatcgaaaacgaccctcacgaccagctccaaaagtggtctcaagaagcggatgaaacctgtttacgtagatggcaatcttcactggttgagaaacgactggagc

SEQ ID NO: 5650 - DNA, 557 bp, Arabidopsis thaliana columbia
ttttgagaattttctcaaacttatggcatcttcgaaactgaaaattatttgtggttattttagtatatttttcaaaatagaatatatatttgccacaaaatgctgggaagaaattttaatgcatggtagcatccttaagcaaagttaaagattgcaacagaaatatcaaacgttaaatccattctaaagtacaacgtattatcaaataataagcaaattgaaacgacgtcgttagcaagctatgataatgatatcacatatttgatagcgtatacgtaccagagatgccgtttgatgttctttcttgttaaactcggatacgtttaaggccttaaagcatggcttaaatgacggattaatatccgttaatggcctacttaaccttatatcaaggaaacttctagaactttctataggatcatggaacaaggaaccaccaccacttgagccattattgtaacaaagatcttcctcatttttcacctccaaggcttgtctgtacatagaaatgtcgtcgttttgagaatgatcatgatcgaagtgatgatgaagggtat

SEQ ID NO: 5651 - DNA, 1717 bp, Arabidopsis thaliana
ccagattcagagggagtgtccatcgacaccatttttcggcccagaaaagtccatggtgctctcaagttaaccgaagtggaaatttgccccaaaagacttccctatttgcattattagtccttggacgttttatagggtttatatatagttttagagttcattgtttagacctaagttgcttttatcaagttctttacaatccctattttcatagagacattagatattcatcccttgttctttagagattcatttagtgctcaatacagtgaagagatcccttcattctccaatcttatgtgtttatgctttgtatatcaaatatgttgcttgtttcattcaatatgtctgagtagtttgcttgttaggaataaagtttctcattagggattcatatggtttagtagatcgcccctttgctaggttatgtgtagaattcttcatctttgattattcttaatgctagatctagagaaattaactagatcttgaaccaagacaatagatatgcccaccataagtatctgtagttggatatattatttggtgagtctggtttagaggtgtgtaataagaatcggcctatctactaaggtgaacaattgaagtcgtttagaatgcatgtttaggttaaagatctctcggattctccggttattcttagctataggcatagggagttttgcggaacaccacatgttattccataattagagtttgagtttaagaatggttcgataacaacctagctttcattagttctactaaccaatagtttcctgagaataccctgtttctaactctttatttaatcatttacatcacaatcatcctgctgttttcttactttgttttcttactacttcactcataccctgctagcttaatctcgacattcaactcactgtttgaacaaaagaactctgtgaattcgatcctaaaatactgcaattgatctcttatttgagagagtagttctacgtaatttgaaccatatcagtctccattatcctcgaccattattagcggaacaactggcagatgtagatatagaagtgaataagacatgatgtagaagaaccttaagtaaatacaattacctgaaggttttggtctagagcgtgaatgtcaggaagatatattaattgttttggatgagttagccttttctaatggaggttagtcttggaggtgtcatcagctgacagcaaatcaactatgccaggaatgtttccaaatgctaagatttgccacgccagcgggaaacctgtcaaatgaaaagttttctactgaagttgttttgtaaaaagcttgacatgatcagccgcgagcagttttgtggcggtggacttagagactacgttcagcgggtctcatgtgtgctagtgtcttgacaaatgactctctaccccatggaaaataaaaaaacttttcaagatttgccaacatctctacatacttaaatgtgggcttagctttttggtttgatcctataagtacaccatctacaatgagtagatacgcgagcttaattttgtgctcacagacaagggcctaaaggagtcggttagcatgtctaatatatcaactaaggtagcacctatatctacaccaattaactcatgccaataacacttcttaccttcttcataaactggctccttttctgggtcatagtcatcacagatttaagtcacggcaagccagtcacagcagc

SEQ ID NO: 5652 - DNA, 520 bp, Arabidopsis thaliana
ccatcgaatgtagcatccacatgagtaacaggtgcaccaagtccagggaaagccgtctttgcctgcctcatagtgttgctcgagtagagtctaattttgccatcaagagagccaacaacaattgagccatcaccagtagttgcaaagcactgaaagttagtccctctagaaaactgatgcccctgtgcccaattcaagactggagtattcgcagtagcaagatcctgaaccatcccatatcggtcacgcatatcccacctgcaaagcctattgttatccagaccaagaaacgttgacgcagatggatccaattgagcacctttaccatcattagtaatgtcactcatagagatatccactccatctttctcaaacttccactctgaaataattttcccggtttcaatgtcaagctgatggatacctcgtgaatgaggcgtttggctcataggactcatgtacagcatattagtctcagctctcatgagaagagcgttcttcggtgctgaagaaatgagtc

SEQ ID NO: 5653 - DNA, 1331 bp, Arabidopsis thaliana
gtaacggcgatcccgggagatgtccctgcggaatagctgtattagaagagtagcaactgagcttgttcttcataaacttgatagccctgtggcacttggcgagtaacttgtcctgtttcatgcaccacttctgcagcttgctattgttcctgtgagcttcgctcaaactcctgctttccctcgcaggaggtatatgctcactgaaatgatacatgctcgtgtcaaactccgcctcatctatattatccgtctcatcaatatcttttgttgtagctccttcggtatgactgatctcctcagttggcggactaccctcgaaataaagttcttcaagcgcaggcttgaagtcaatgttcctgccctcgagaatcctagtagcgtcaatgcaggggagaagaatgttggcgattttaatcgatgaattgtcgaacctgtagcggtgaaagtcgccagccatgtcaaactccaagaactcacatcggcgcaaatgatccaagtccatcatcctcggtgccaaccctggttccttgaggggtactccacaaccttgcagaattggcgtcacaacgccacccacgcatagtgctcctctcaccttcttcttcccgttcgtcaacgcccacttcctgtatccacagaaatggatcaacagaggcattacttgtggtgcgttgttgagatctcctctcaaaacattcttccccttcgtccggcggagaatccctgtaagcgcataatctatcatctctatgtccgtgttaaacacggtgcctgtagactccctggagtaaaagacgttggcaacagatcgctgaaagtagcagatcacatgactccggatttggttgctcttagaccgcgccaagtttagcggtaaattgttctctatagtggcccacaaatccttaagctcctctctgtcaaatctgggtttggttccctttccactagggaaaccaaacagttcttctaacttcttgatcgaaagctgataccgctgttcattcactaagaacgtcaagaagcctaaccccatgatatccagctcaaagtctgtgagtgcctcatacatctccacttgcagcgtggaaagaaactcgattgtctcctccttataggcagggtaagggtaagacatgagtgtctccagatgacacttcttgaacagatgctgtacgtcctccagtaaccccagctgggctaaagtctcatagcacagatacctcgttccccagaagtcattcatctcaaagaacctgatatactcctccactgtaacctcgtcgggtttgttcagcagcttcgtctccctgcgccatgactctggctca

SEQ ID NO: 5654 - DNA, 1992 bp, Arabidopsis thaliana
ccctcagacaacaaaagaaaaaccaagaatagtctgtgtccactttccaatatggtacaaatgatattgcacctctgaacttagaaattttttaagattttcaataatttaaaaagattcaaccatttaactaaattagtctatactattaagaatattacctaagaaagctcaaagaggtcggagattgttttccttagaaaacgatcatactattgtttctttctaatcatttcattcccttctcttggattagcttcttgtatagtgagagacaaaacatcgggaggcaaactacaaatattgtagttaatttaaacaataatatagtatgtatacaccaataaatttttattctgataattatacaattctccaatcatataacaacttactttgccacgaaatcaagaacaacatggtaggtgggtgatatatctcgattttcactgcttttagctatgatttaggtatagttttatagtccttttgttatatgtagagttctttctagtctttgtcaggtctttacatgtttgggatgcatttggagattatggagcattctggagatcaacagaaaacttaagctgcataagcaatccggagacgaaaatgcacgtaggtgtcgaacgacaccacccctgatgtcgagcgacaccaatacctgacggcaattttgagacgcaacttatggatgttttgaagatttccaaatttggtccagaactttctcttatgtttaattaaggcccatcacgtttttaagacatatatatatatagttcttaggtcaatgtttagacccgaagcttggagaggctattttctatctcttttgtacttggggagcaaaaccctgtggaaactccctttggatctttcttactctattttcttcttgttttattcattgatttctattctaatcatgttgtttacttcattcatcatgcttgagtagtttttctgttaggtttagggtttctcattagggttatagatgatttagtagattgccccttgctaggttatctgtagaaattcttcatcttgattgttcttaatgctagttctagagtagctaactagaacttgttcttagataataagtatgcccaccataggtacttgctatttgatccatcatagatgagcctaggcatttaagaaagaacaggtaggctcatagaagggctctggtttagatactaggtgaactaatcaaacttgataataatgcatgtttaagttaaagttctctcggcttctctggttattcttagctataggtatagggagttttgcggaacgccaccggttactctaaaatcatagtttgagttcgagaacggttcgataacaacttagttatttctagatctactatcatctatttcctgagaataccctaagtttgacgcttttataatcttgtttcacaaccatccaatcgattgctgttgtttacttttgtttctctttaatttaattactgttttacttagcttaattcaaaaccttagtttattgcgtgattcgagaactttgtgaattcgatcccaaagtgctgtaactgacttctttatttgagagagtggtcttaggattaatttgacctatatcatgtaccaaccggtaaaggtcctaagttaagaagaacttaggcgaggcttagtaataggaagagagtatggcctcctggaaagcgtaaattgtatgggttattgactcttctagccaatggactttatggcatgcatcctaactcttggataccatttgagagtgtcaaaagagtatttgatgacgaagtcttgaacacttatccatggggtcggacaacatatgaagcccttgttatgtctataaagttgttgaggcctattggcaagacgtgcaccatcagtggtatggctttcgtgttgcaggcatgggcgtatgattcaatcatcaccattggtgagcgatttggaaacatagtcaaagcgg

SEQ ID NO: 5655 - DNA, 1359 bp, Arabidopsis thaliana
tcgtaatcttacgatacccaaagcccaacacccgaatgttggcggatccattttgtgatctcgcttctaaaacgtcgatagtgaactagacttataaaaacacatcactttggcttcatcggagctcacctactacaaccatatctaactctttcgctatcaacacataacatagtaaacaaggaagaaacgaaggtttcattcgcgacttggcgataccaaaagcccagctcccaaaatctggcaggtcccttgtgtgacctcacttcaacaggttcccgagacaaaacaactcaaacttactcaaagctttaaccttcgaagaacatatcatatcacatccgaaataacttggactcgaaacaagtccaattattatctggaacatggacaaagcaaggtgatcatacaccaaaattaacgaagtgtcaacactcgaatggaaaaccaaaaaatacttgctaaaaaggataaaagccttggcatccaagtacttaaacgaacaaaggataaaagccttcccaggcaccaagttcaaaaagcaaaaaacgaaaggataaaagccttccaggcattaattctgaaacaaaacacaaaatcctaaaacaaacaaggagcgaaagtgatcactccctcgattctccggctgacgtagcgaagacagtaccagaaccctccgcgagacctcccggaaaagcgtctttgttgctcccgaactcatccaagccaattggcgtcccttgctcgtcgacgtccatcggacgtaccaccgaaatctctaaaacctgcgggagatccaacttgcttagagtaaagtctgatacctccttcgatttgtaccgcgcctctaggtcatccagctccgcttgtagccgaggtttctccacggcagattgatagcagcctttgtgatctggtcgatcaaagccaggtttgactccacctcgaccgcttgcccctccaacatcgtgtactcctttttggagacccacttctccttgatcccagcaagcagcttcgaatacgcagcagccagctctaccttagcatcgtgaaccgccttcttcgccccttgtgcagtcgaagtcaggtccatcacctttttggagagctgttccctcctctgctccaagcgatgaatctggttcctcgccatctgcttgtcggcttgcaaccccccgatctccatctccatgagcccgatcttcgcagcataacctttctcgaggtcttttgaagtggacagctctattttcaacctctcgatctccgcctgaaatcacaaaaacggggtatacctggaacgaaacttcgcgttcctgaccagccttcacactcgacgtcagctcccggatgagg

SEQ ID NO: 5656 - DNA, 988 bp, Arabidopsis thaliana
gtaaatcctaaaaaaataatatattcgaattaaaatttaaaacgtagtttaaaataattgtgtatgaaatgaattaacgaccgtatagtataactattgaatgcaaatgacatactaaagatcatctgactttttgaagaaaaaaaaggttagatttgacaaaaagaaaaatatagatcgtccaactagaacctaaatcgtaatgggaaggcttaattatatatgaaataccattatagttcattatagtcaacttaaataataatcctatattcacatctcataattttcatagatcagtggagtaagtatatgtcacattaatgctcatgaatgtagacatttactaacatatttttaaaagctcacaaaaatttaaaagaaattataaactgtcattgaacatcaaattaaatattgttgctaagagtttacttctcattaatccacctcagtcaccacatgcaccctttaataccaatccaagtagactcactctccctcacacactctctctctaaaatctatttcatcttggagtaagagacagagagacaaagaaagagcaaagcaatgacgacaggcaaaagcaagaagaagaagatggtccttaaggcagtctctgtcgtagacatcggctgtggcaactgtaagttcccaagcttgtcttcttttttcaacccttcccccaaaaagccccgcctctactcctctaattacggccactgccactcctccacccccaccacggcctcctcttcctccgccgttccctccacctcccactggttctctgacacctcttcctcctcggcaacaccctccgccgccgtgtcgccgtcgagaaagactcagacgatccttacctagatttccgacagtccatgcttcagatgattctcgagaacgagatttactccaaaaacgatctcagagagcttctccactgcttcctctcccttaacgagccataccaccacgggggaca

SEQ ID NO: 5657 - DNA, 1540 bp, Arabidopsis thaliana
tatttgattatatgtctctgtatcacactgcaagttttcttagatttagcaaaacacttgacatctacacaacacgacaagcaaattatggggaaagttgttgcacggtactggtcatgttttacctgagcattcatgtttcgcatcatcatcttcttcctcggggacatttcttgggaactagggtctgatatatttagtcgatggaccgtattgggccattgggcctgtttgggctcgttgaattattaatgcagttcatctttgtcttcgaaagagaaaagtgtgtagagggttttgtcttaattgggtcagaagaaaggaatatcaaagacaaagacaattacttagggtttaattggtttccctttgtcactcgcaaacgctgtatttgcgggtgctagcgattgttagcgattgacatcaatcatagaaaccgctagatactgctttacaccgttcaaaatcgccagatttcaaaagctcattcccgcaagcatttgcggttgcgggcggtacagttaggttattttttttttttaattaattaaaataattatgtcttctacccaaaccctatatatcttattcttattaaaaaaaacctaatcaatatttaacggaagattccaaagatcccaaaatcagatttctaagtgatgttcaaaaagaaaatattcttaagaatattaacgaccagtttgggaaaaatttgagttggagatgtgttaaaaatcgtttggatatcttgaagaaactttatcatatgtatagaggcaatccggaaaacccgcgagttcaacgttatttatagtttatcacactacttgatgcaatttttggtatgtaccaaatgcataaagtattaaactttttcttacaaaatttatttattttaaatttaatgttttatttatggttttaattattaagcatgtttaatttttctaatattatcaatttatcataataatatattgtatttttctttcttttaatagtaatatattatatttattttggttttttatttaattactatcacacttgctggtttaccggtcataaaactcccgaaaacgcacccattatcaaacgcttaaccagtcgtttaaaaggcttgataacgcttaaaaccgcaaccggccgtttccgcaaacttgcgcaaccgtaaccgcacccgctgtatttaaaccagtcaggcccttatataagaattgatcaaattattgggcttttaagagttaggtcgagagactttttattgggcataattttattctattcaggcccattcgcaacgtaatgccacgtcggaccaatggtctatgagatgtcgctgtcacttaaacgccacgtagacttttaaccggacacgtgttatacaaaatgactgtgcgcagttataaacgtttaaacgctcttaacgatgcgtgaaggagtgagacagctcacatttccatcaaactagtcgttatcttttagtgtggtagtattatattatttatttacttctttttctgtagaatttagaaggggt

SEQ ID NO: 5658 - DNA, 1441 bp, Arabidopsis thaliana
tttcttctgtaatcaagattgactggttggtatgctaaaactctttcacagggaggtaaggaggttttgttaaaatcaattgctatggccttgtctgtgtataccatgacctgttttagactgtcaaaaggtctattaactaagcttataggggtaatgacggatttctggtggaactcgatggaatcttcgaagaaaattcattggattggagttaaaaattaattatgcctaagagcttaggggctttgtgtgagaccccgtcccggacgtctcggcgtccggcgacgttgtactcaaattcgcgcctctccccgaccgaaccgcttaatttttcgcgattcaacatagaattgcctttacgaggctaaattctataatcgctctcttattacacagcggaagtctttctaaccttggtttaattctaaccaactcttgtaccggttttcatcgtctttgtcccttagacttagatcgatcctttactcggtcaagacatgcatattgttcgctaaccattctaggcctaacaatcgcatgttcctttatcctattttcacggtccattcccaaacgtctatcctaattagtaagctagatcgttacatacctcggccaatatgcggatttgattccttagcccgtttgtcgccttatcctatttgttcaacgattcgtatgcgatcgtgaatcgatgaaccaatccctatcgttacttagccatacaaccaaccaaccccactggtctaagtacaacaatagagattggggatcgtacgatttccttggttcatgatggccgaatcaagctcttggcttattggtccatccgtcctccaaacgtacgccccttcgattccatggtggacgattgaacccttggcttatcgaaccatccatgtttccgatccggtcgtttactacgaccgcccacggtttactaaccgtttatccgtccggtctatggtggtcgataaagctttcggcttatcgatccatccatacgatccgaactatatccttatcacacccaagggtccgtggattcatccatcggatcatcgtaggctagcccatgaaatccttcttccgtcggccttaggtttcctcacgggtccaacatccgttttgtccatcggtttctaccgtggactttctcgttggttatccgtcgagtcaccctttggtcttaccgatctctgatcagtttcaccatagctgaggagatagatacatgaaggcggccgcgatattgatcctatatggtgaatcacgtttccttactcattcttgaagctttctccctttactggtaagattgcatccatgggcgacccttgggtgtgtttggatgcacttatctttgtgcttcctcgaacacctttctcgatctatcccatccgacgatcgttctgtccaacccgttctgtcagacgat

SEQ ID NO: 5659 - DNA, 1692 bp, Arabidopsis thaliana
tttttaaactcaaaaacgaaaaataataagaatcaaaaataaaaccaatattagtaagaacctcccccagacttaaacgacactgttcccagtgacattcaaatccgaagaaggtgggaaaaataaataaaaaataaaaaaaaaagaaataaagggaaaagaaaaatcaaaccagtgggttgcctcccactaagcgcttgtttatagtcaatagcttgactttgatggaatatggggatcaggtggatcagatggtggcagtaaatatcgcggagaaagacctctcatcatccatactggtgtagaagcaattagtgtatgaggtctatctaggaagagaggagcatcaacagggtagaactcaggtatgggtgggatactcctttttcttgcataatcatcaacagaaagaacaagcgctcgacgagaaactcgtggcttgcttaaccgtaaaacagtctttggaaattttaaagtcttattgatgatatctggaggtttaggaggaggagatgagtaccttagccgtttaggaggtggatgaagtatgagaggtgcattgtgtgacgtgacagtagtgcttgaactgatagcagtgatcccagcttgaaaagtagctatcggacatgactcttcctcaaccagagatgtctgtcgatcgacgcgagtggtggtgtcgatcgacacttgtgctacaactcgactttcctttgcatgttgacaattcagcgctgcaatctgcatccagtgtcaatcgacactaggtgagtgtcggtcgacactactatctggtatcgatcctactctgtcaatcttggtcgattctgctctgtcaaacatcggcacttcctcaggttggtactggtgtcgatcgacacccaggtggtgtcggtcgacactatcaatgtgtgtcgagcgattttggagatcaatgtcgagcttgctcgattctgcttcgtcacagcctgatgtctcgtatatatgcgatggtgtcgatcgacacaagggttggtgtcgttcgacactacctctgcaactacaaaatcgtcactctcctcaatcttcactaactcatactcactttccattgaagcagaatgccaggaagtagtgaggctgctctcattccatctagggataggtctctctaagatcctctgttgaccttccagaatctgttccagcaatgattctatcttgcttttaggtgtgggtggaggggggggcttggtaagaagcaagatcatagttccttgtgaagctgaaactattgctattctgaagcggttgctggaactgagaattctgagtgtagctagttggaccattcccataggaacctctgtagccttgttggtgatcatatctctgattcggaaaacctctgctactaacataatcgacatcatccacaaattgattgtggaccgcgttaagtttagccatgatcccagcaatcttactctcgttcatgtttctcgtttggtcctggttctatgattagacaaacacctgaaacacacaagaaaaagaaaagagaaagactaagtaaaaaaaataaaaataaatacttagaaaaaattctaatcctaatctaatggtgaatcgtagagaacccggcaacgacgccaaatttgatataggtcaaattgccttaagaccactctctcaaataagagatcgattgtagca

SEQ ID NO: 5660 - DNA, 1357 bp, Arabidopsis thaliana
tcccaaaactctaattcttctagatctgaccaaatcactccccctccgcaaacaaggggcgaagaacgaaacgtcacgatacagcctccaaacggagataacctggccaacctgtctattgaggtccctccgcgacctgccagcgaattagccgagctccgcgcaatgatcatgaacttgatcaatttaaccaaaaaccaagaaattgcgcatcgcaacctcgccgcgattgtgggtcagcagagacgcgatctcactcgcatgacagatgaggtagagcgcgataccgcgggtaaggaggtccccccccccccccgcgaaactgggcttcctgcccaggtccccatagatctgacaggtactatctccccggcggttcctactccgagaactcgtctggatttcgcctcgatagacgtctcacctcctatgaaccggaaactcgcctttttacaggcacctgcgaacgctctcgtcgaaaacctggtaacaggaaacaaaacaagcgcaacgcctgctttcccaaggctaccggccccatctttattaccgatgggctgttcgccccctaggtacacgtggacaagaaaccaaacaacctcatccagttcccgcattcccgggaactcaatgcaacaacggacctctatcgctaatccaccatccgttccccggataccaggaagcgacctccttaacaggccccaagcaccggttgatccgcgtaacgtcgtggatatggaaacattccacaattacgcagctcaaacaaacgcgaacatggctcaaatgcattctcgaatgcacctagtagtgagtgatgctcccgacatagatcgcgtgatcgaagaaaccaggcgcaccccgttcaaggataggatcgctcgttttcgcctccgagacgtcaggagactctgtttcccggagtacgacagaacgagcgacccaaaggctcatctgagatccttccgttttgctataacacgagcgtacctgatagacgaagaaaacgaagcaggtcattgccgtttcttcgcaaaaaacctcgtaggtcacgccctcgaatggtttgctagtcttgaagggaactccattgataccttcgaccagctcgccgtcgctttcttaaaacagtattcggtacttatcgaacagaggacgtccgaagccgaccattggagtctcactcaacttcagaacgaatccctgcgatcttacgtcaaaaaattcaaagcaatcaaatcgaaaattgcaaacctaaacgaagaggtagccatagcagcccttcgtaacggcctttggttctcctctaggttccgtgagaactcactgttaggcaacagtctctttagacgat

SEQ ID NO: 5661 - DNA, 985 bp, Arabidopsis thaliana columbia
gaggatcccctcaaaaacgtaaataatgaagaagctacatttcttaagacaatagatgatttttacatcatgtttcccacttacattgttttgaatagtgacctggtcaagcgagtgcagaaactgttgatacgcatccttgtcagagagaagcttcctaagctcatccacactaagagcaaaacatttgaagaacatcataaatgagtaataagagtaagcatacaagataacataccgacaagtacagaaatcaattccctttatatatctctgcaaattagtaacacaacgcaaaatcacaagagactatcagcaaccaaactatcaaaaccacagaaccagtaaatctagtgtttggtctagcgttaatctaaactattccaagcctaaaagaccataaattcatattaaagatgacaagaaatgtgtgactgtgtgacacaagaaaactgttatacatcatgtacaaaagaggcaaacaagaaggtataaggaaattgaagactaaccttttgtcttttaaaatggcaataatcgcggcggcttcacctggtgaaacatgtgatggaatctgccctgaggtttgaggccgggatgagctaggagaggtgacaagagacggcgaataccacggtgttgcagaagcttctggagaaggacgagattgtccttgttgctgttcttttgatcccctggatttttaacacaacaatcttaaaaatacttacctgaaactgttccaatacccaatatactaacattgcaaaatcttaagacccagcacaacttcatgagcatagatcaggttcttttaatgattacaactaaaatttttgttcaccttaactatgttagcagcaactaactataagagccatcaatggtatgcataaaacagtaagtaactaacaaaaagcagagttctttaatcccaaacacatagaaattgaaattctccaaaacgatcataatcaaaattaga

SEQ ID NO: 5662 - DNA, 1243 bp, Arabidopsis thaliana
ctccagtgtgatgttaggtgtagtggagtccattggatgcacataatgcaatgaagtgacgatctctccctcatgagccgctccttccaattctgaattcttttctgggaagtagccccaagccatcatgatagggtggatatggagaccgcgactgatgtttgaattcttcaacccgcttgaagccaacaatcctggtgtcttaagcgagccgcaagccacaattgtcactttggcattgatctgaagcttctttctggtttggtgggatagagaggctgcgactcccaaacatctttttcttcgtccgctctcctctcttttgttagcatcgttatccgccaagattagtttctcagccttgcactgtgttaggatcacagcattgttgttaactgcatcaaccagccaggttgaatctgtccctctcttctctccggttgggcatccatacgagcaactaccgcaataatgtttctctgttgaattccttggcactattgtcacatccaaaccaagcttctcgcaacctttccgcagaatctggttctgaaacccttctctgatgattttctcagtgacacctaacctcttgcagacaatacccatcgccgccttatatttctcactagaatatattgaaatccctcgatgtactgaccattcttcgatgatagcatcaggtgtttttaaggacgctgcccagtttaccacagagccaccaccgactgttgatcctgccatgaaccggaacctgccatcatgagtcatcatcaagctattggactcaaacagctcaaacatggaagggccctcgagagctgagtagtctctgggggcaaagtagttccccttctcgataactaccaccctaaggcccgactttgctagaattgcagctgcaacccctccgccacagccagaacccactaccactgcatcacactcgatcttgtaagtgtccctttctctgtcttctgtgactttgaggcctttgttgatcatacgttgcttgatggtcatctcatcttcttttgcagtctcgatgatcccttcatctagaggtctttccttttgttccatgtcctcattttcaccaatgtccacgctataattaattgcacccatactgggtttctgaatttcatttgtctgtcatgcatttgaattagttatcatatatcacaggtaatagacatggaaaagtcttgctggttgaaaaagttgtctgacatgataggga

SEQ ID NO: 5663 - DNA, 514 bp, Arabidopsis thaliana
gagatgagcatacaaacggaaaacgggcaaatgggaatgccgagtaacgtttgctgtgtcgtggttgagtattgccccggcggcgctctcaagtcattcctcatcaaaactcgccgccgcaaactcgccttcaaagtcgttatccaactctcccttgatcttgctcgcgggtacattatttgattcatcaactacttccggtttaacccggtttaccattttattaaatcttgattacttatgtatatgttttaggttgagttacttgcactctcagaagattgtgcatagagacgtgaaaacggagaacatgcttttagataagtcacgcaccttaaagattgcagattttggtgtggctcgtctagaggcttcaaaccctaacgacatgaccggtgagaccggaaccttgggctatatggctcctgaggtgctaaacgggagtccctacaacagaaagtgcgatgtgtatagctttgggatatgtctttgggagatttactgttgcgacatg

SEQ ID NO: 5664 - DNA, 288 bp, Arabidopsis thaliana columbia
tcttgatagtgatttttaaaatcttgaatcttctcgcggtgcaggcgactgtaacggtatataattttcagcaatatcgacacattcaagctccaggttggactcttggatggtcattcgcaaagagagaggttatatggggaatcaatggaggacaaaccacagaacaaggagattgttctaaattcaaaggaactcattcctcattgctgtaaaaagacaccttctgtaggtgatctcttaactggatctccttacaatcagcagactgctaattgatgcagaggg

SEQ ID NO: 5665 - DNA, 522 bp, Arabidopsis thaliana columbia
aagataagtcccaatttacaatttgattacctcgaactcaagtggaagcccatatctgacaataacatcatgcgttggaagcggaaacggaggtaggttctgaaatgaaataccaaataatgtaagtatgaaaccgtcacctcgaggaagttaataggcctataaattcaccttgtttggaacagctccccacatgaaaactctggatcgaaattgggaaagaccatagcaaccagctgtcatgatacctaaccttgcttggtatctcatgttcacaagacggctcaaagcgtatcgcccaagagaacctttgtccatacgcagaatatcaacaacattttccatcaacacatatgagggtttcagatactccactatgtccatagaaactataatttgctgattcctttcatcattcaatggagaatcaacattcctgtgccggttatagccactaattccttggcatggaggtccccacatatccaccatcacgaccctagttacaatcattgacaagat

SEQ ID NO: 5666 - DNA, 575 bp, Arabidopsis thaliana columbia
catcagtacccaacttggtataagcattcttagcagactcaactccccatgatttgggcttcttgttcagaacctgagacagaacaaatggaacagccaatgcagcaactccaccggcaataaccaaaggattgtctgtgacaaaattggatatcccttcaatcagaccatccgaatcaaaagatgaagaagtggtcatagattgttgcagagcttcctcgtacgtcagggatttagcaggagctgttgcactgcttagaacagaagttagaagagccaatccaccattgaatctcttcaagaagctttcttgggagattggtctctgtgattttggtggaaagaggttagggagcgagaaaggctttcgtggttctgatcttttctcggataacaccgacatagggctaaaagttgcggttttcagagcttccatgactctctctctctcagattctccttctacaccaagaattgtccactccgtatcatcaaactgttcccaacgattaaagatgatgaagaagaagtggaagaaaagtgtcaaggacaagagcattgagccgtttctagag

SEQ ID NO: 5667 - DNA, 472 bp, Arabidopsis thaliana columbia
  unsure (1)..(472): unsure at all n locations
caatgaccctgcaactacctgatatctcagaacaagagtatatgcctaagccattggttcctgaaaacctcaaattggaggaaactacaggaaccgctctggtcacaagccaaagaccgagaagaggaaacgcgagaaaagggaaacagagacgagacttccaaagagacattctccctggacttctgacacactcgaaacacgaagtaacagaagacattcaaatgtctgaagggttcatgagagcaacaggaagaccttggactccaaccggtttaacaaggaagaaaaccggttcaagaggaagaccacgacgagccataacaatccctgcagacccggtctattgtccggttccagctccagctcgtcaatcctcctcagttcaacaacatgtgagcaatcacagcaacaatggtgaaactgnaatgtgtttagaagatagaagcattgcaggttggggtaagatgac

SEQ ID NO: 5668 - DNA, 478 bp, Arabidopsis thaliana columbia
aaaaccaagataatgcattagacatctaattgaacaagcaatctcaatttattcccaatgaaaccctaatttggaatttgaagaacacgaagatctgatcatgtagcagaagaaacaaaccaattcaatcaaatcaaccaaaacacaagaaatcgaaaaactatagactaaccggaatctggaatcggcaaattggagaaggaatcgaatcctaagcattagcagttttagggataagaggaacagcagcgtttccttgtagtttattctgtttagccaaagcttcttcttcacggatcttcttcatcgcaagcattctctccataacaagctcgtattcacacttctcataaacgtgacgctcgtcttcacatttccatggaaggtaaaactcagcctgacgacatttgttgagcggaatcaagagatgagcgcacatatctctagatcgaagtgctattttagctgcagacatctc

SEQ ID NO: 5669 - DNA, 472 bp, Arabidopsis thaliana columbia
ttcaccttccttaaaacactcaacctgcaaacacacacatgatcaaagattaaaccgtgtctgcttatgtaaattgttttaatttcatttcaagttcagaactgatcctacagtgtctaatatgtcatcctcttcccctttgtatcctccgatcacatatattgagtctttaaccactgccactgctgaatatcctcttaaatccttcattggttctcccgtcatccatgtccctgtccttggctcatatatctcaacactcgataccattgtctcaccatcaaacccaccaatcgcatatctgcaatagtgcatatgaatacaaccttaaaactcttacccaaaatttgtctgttagttactctcaaagaagaagaaaaatggggagaagaaacttacagtttttcattcagaacaacaagagaatggcagcctcttctcgacttcatcgatgcaatattcatccaggagt

SEQ ID NO: 5670 - DNA, 614 bp, Arabidopsis thaliana columbia
gttaagtatcagatccggtggatgagtaaactgaagaaacactgggaaaccagtaccgacactttccgtctttatggccattgtcgatcattgcaaggccctcctgaaaatgaattataaaattgcaaggtttaaggagtcgcataggttgcattgcatctaccagtataatagaggtattgaagcacataatccaattatagtaatagattgcaaatgcatacttctaacaaagtttcgagagcatctataacgcgaccagatgtccacgagaggcgtctttgtacctcttccacaatcacaaagccttggctctgtgtcaaaagtaacaaaatcctcaagtcacttcaatttaaacttctaagaaacatgtaaaaaattgttttctttttaggaagaatgtatggtctgattataaccagagccaactccaacatctggttatggtctttgttcagctccgtgggaaccgtacgaacaagctttttcttgccaatagtgataacctcaaatccgctacccaatacctaaggagaaaatcccaagataccagcaagatcagttcaaaaaatctgaaagaaaaaagaaaaacacaagtgagatagaaaccttta

SEQ ID NO: 5671 - DNA, 355 bp, Arabidopsis thaliana columbia
tcgattcattatcaaagcttcgtacacttcttaaagtctattgaacgagaaagttactaaaaaagggaagattttggagtaaaaatggagacctgcgagagtagaagacgttgttgttttcaggaacaaaaacatcgtagccaagaatgttgccaccttttgctgctatgcaatctgatagtttagctacaatcccaacagcatcctgacaatggaagacatggacgccgggaatgagaacaggggagacggaggaatcgagggactcgccgtgaaatcgagacgatttgagaatcggaatattcttagcgaaaccagaagctctctcggtgattcgtcgtatcatggttggtct

SEQ ID NO: 5672 - DNA, 546 bp, Arabidopsis thaliana columbia
ctggtactttttattataggatgctaagaacaggaacattgagaatataatcatcttgtctggagatcacctatatagaatgaactatatggactttgttcaggtaatataatagtaaacattcctcttaccagtttcaaaactagtcttgctaactaactctaaacactatgcattggacagcaccatgtcgatagtaaagccgatattactctttcgtgcgcgccggttgatgagaggttagtttctttagcactatgatgtgacttttgtatgattttggttttaagatgttaacttaatcttgaaaaccccttatgtgaattttcagccgtgcgtcggagtatggactggtcaatattgatcgaagcgggcgtgtagtccatttctctgagaaaccaactggcatcgatctgaaatcaatggtacagttttattttctaaaacttaaatacgtacgaaacagaatggcattgatctgaatatttttctgttgttttgacggttataactgaatgcagcaaacagatactactatgcatggac

SEQ ID NO: 5673 - DNA, 532 bp, Arabidopsis thaliana columbia
acaagatatgaaaactctataaagcaatggattctagggagctgccacaagaagtatctgtcctacgttccttcatggttttgaagcttttaccaccgttttgataagaacacatatgtcaatatagaggtaattatcgtccctaacaacttaaggtattctacggattcttcttcttacgatattgagaaagaaaaagtattaatttaggagttttacttgattaaatggacgagtttctgtgcagtatgctctttctaagattccttgagtatggagtgcacggatgacaccgagggcagtaccatatccggcggtacaaggctacaaagtcaatagaactcgtagttaatgccttactaggaatctaccacataaacataacaccaaaaaccattacacaactctattggttgaagctgcatacacatatgtggtaacatgctattactcaacttgagtaacttatgcagacggtatctatgcaattcagaaaatctagctaaatcaatacctgccagtgttgcaatgg

SEQ ID NO: 5674 - DNA, 581 bp, Arabidopsis thaliana columbia
cgtttggatccgtttcaagaaccacccttaacacatattccataataagccacaatcagacaatagctaactgctaagatatatgggacaagcttaaaaaaggttgagcaaatctttagcatgcttaagacttttatgtaattgtcgtgtagggctaaactattaaacttgcatacccttgatcgaccatttcatcaaggcatagaaagatgagatccaagttctcaagggcttccatcttttccacattgctcctggtaaaaaaaaaaagggatgcatcatactttagttgtggagatggttgatcaataaataaaggcatattcagttgtcaagtcaaacaaatacctcagaagaagtgcaacagcatcaaaaaagccttgaagaacagaagctaagatgagctcgttttcattttcacctccagtaacaaagaagtgaaggtcctgggcaaacttatagacaataatattgctgtccaacagtgtgatctcagctgcacataaaacgatcgatatggctatttgaaagagataagtatataagcatacacgaagtcaggaaacatgatagaaattgtg

SEQ ID NO: 5675 - DNA, 659 bp, Arabidopsis thaliana columbia
ggtaaccttttgttctacttatctccttttaattctattcttgaatctgtagtgaaagtaaataaaggaacttacatatagtggtagtacacaattggtatagattataaaaggtcgaaactttaaagcaagtgatgatcagatcaccatagataagttattgtgagcaaacctttcgttttttatggaaattttatcatcctatctaaatttggaaaccattgagtcttaagattaggcactttctttgttagcaactagaatgataagttgaaacagtttgccctgtagtttcactgtcaagctaatggtagtatggtactttgtttaccattgtatatatggcctccgaattattttaggtgtctgtagcaacaaagcttcttggaaatgttatcttagttcttgatggatttcatattctagtgactaagatatcataagatgttcttctctatagctcactttattttctggatttggatgaaaccgaaagggtggaggtcctatggtcaaggagtcccaggggacaggacttatctggcaaagatttcagtggccagactcttatcaggcaggacttcaaaacggtaatacattatccagttatagaaaggacttcaaaacggtatacattatgaagttatagattgttatat

SEQ ID NO: 5676 - DNA, 631 bp, Arabidopsis thaliana columbia
tggttgatcaatcgcaaatcgtgttatttaccctgcaaagatattgaaattggtggagttggatgaaattttcaaaaggatgatatgaaatgtataaaggaaaaaatgctggtactaaattaccactaacctttgatcctgaatagagcactgccatctgaaacctgttggcctgctttaactttgaggtcctgtatgcttccagaggatggtgctttcacaacgtgctgaacgagaataaaacgataattacttaaatgtttcttatattatggtatatgaagatgtttatatactaacctccatcttcattgcctctaggactaatataggttgaccttgatctactttggcttcgttttcgacaaggaccttgactaccaaaccagccatgggggccacaatggttcctggagggtgtgatgatgtttcggagctggttctgtgttggacaccttcttcatcttcagagaattcgattcctaccttctgcttgaactgatggtgttctgaacatgccatatatggatatgcttataacatcctgtaacaaacatacatcataagcagcaattcgagagagcagaaagagtatgagagctgttaagagtgcttgacataatgctaatga

SEQ ID NO: 5677 - DNA, 824 bp, Arabidopsis thaliana
gcttttatagaagctttcattcttggacttaacccccaacggccacagtttgctcctctcgccgccagtacgacagtcgctgcacatccaatcggcggaaggagccgcctcaactccatcgttgacacaagacatatgaaagcctcgctcacaggcatcgcagactacaacgagctctatagactcaggtcttccacacgcgccgcacgaagcatcccgatccggttcaggaacctcggcaggggctccaggggctgggtccgggttatcgtgaattgacctaacaacttcaacaggttcatattcgccgtcgtcatcctgaccagcggtgcaaccaccgccgagagtagcgccggtagggatttcgttgagatcgatgccgagaaaggagcgactctcttccttgacagcggcggtcttagtgtctccgagttgctcgttagtagaatcagtgggttccattattcgattaggttaatggaatcgagcattgtttgcattgaagacgaagaagaagaagaagaagattgaaaacaaaaccaaattgcgagaaaaagaggttttcttattaaatttttttctttttttttgtccacttttcccgaagttctgtttggagagagaaaacaaaaaaacgtgaatgaatccttttaccctttttttttcttttttgtgtgtgccttttcctaattcctatcactactactactaaacatattttcgaagatgctgctactcacgtaacgcaccaaaagtttaacctaaaaaaaatgttaattattgtatgatgctaaatttatgttaactttagaaaaatttaggtg

SEQ ID NO: 5678 - DNA, 1038 bp, Arabidopsis thaliana
ctaccgctagcattgctcgcctcaaaagcgtaaacaggagaaccgttgatgtcattgcttccaaattgtatttttactactccttaagttacgagctaactaatgatcttgcagagatacgtaggtgagtacaagttcacagtcatctttcaacttttatcatattagttcaacactcaattatcttattaacttgtctctctttctgttgcagtactcttcttgctcttcaccattcggccacactgcgccacgacgaattgggccaggaaacacttttgaatctgttgcttcgcaattatctacactacaacctgtacgaccaagcagagaagttgagatcaaaagcgcctcgatttgaggcacactctaaccaacaggtaaccctttcatacattctagtttctaattctaagttaattgtgatgcttacttatgccaacctctctgatgcttactaatgccaacttttcactgtgaatttctccaaactacattcacatgtttcaactagaaacgatactcatctcgttatataaatttacagttttgtaggtacttgttttaccttggcaagatcaggacgattcaacttgagtacaccgatgcaaaagagagtctcctccaagctgctaggaaagcacctgttgcatctctgggattcagaatccagtgcaacaagtgggctatcatagttcggctgttgttgggtgaaatacctgaacgatctatcttcactcagaaaggaatggagaagactcttaggccatattttgagctgaccaacgtgagttcaatcttttttacatttctaacatatgctttaattaaggttttcttgctaatactcttgtttaaattttgtaaggctgtgagaattggtgacttggagctgttcgggaaaatccaagagaagtttgccaaaacatttgcggaagacaggactcacaacctcatagtcagactccgacacaacgtgatcagaacaggactgcgcaacatcagcatttcgtagtccagaatctctctacaggatgt

SEQ ID NO: 5679 - DNA, 556 bp, Arabidopsis thaliana columbia
tcgaaatgatttggatggactttaaggtaacttacatctttttcccttgattccagaagagtagaccaaagatgaaagaagagatgaaagtgtgaccgatacgcatcaagttgtaagaagggcttctccagtaagacaaactcatcttccatagacaagatttaaactgttcccaccaattctgcgcaaaagttcttttgaaatgcaaatcgcttgacccgtgatccggtttgctcagctctttaacaagctcggagttgttcctgaagaaacaacaacacatgagctcattagtcacgttcataaagctaacacaaacctagccataaatgagttatactctactcacttgtaaagatccgattcgttgtagatttttgcgaaatccatgtcgagttcagtctctacagactctgaagtcacctctagcatccatgttgctggattgtacttgtctctgatcttagcaactccaggaatattctgttattcacaccaacaaaataaataggttacttataaacaatcaaccctaattactttttatacttgtgca

SEQ ID NO: 5680 - DNA, 306 bp, Arabidopsis thaliana columbia
tggttgtagaagaaccaacttcttgttccaccgtaaaatgataatccaaagacatttcttgcatccttgtcatcaaacattcatccgaatttactgcaactaagttgtgtagatagtggatttcaatcattctgctatagggtagatattctttgccgatagcacaataaatgcggcggtatgaatgtcagacatcaatacacaagttggtgatattcgcaatcgatcatgaaatgatagacacctagctcaactacaaacccaattagatttcaacagctcgttagattttgtcacatgatgatc

SEQ ID NO: 5681 - DNA, 618 bp, Arabidopsis thaliana columbia
accatgatactcgaccaagagaataagatttgcctgtgagaaacagagatcaactttgatttcaacagcacaaaaggctgagttcattttcgacaagacgatgattacatttgtctgcaaccgacgtcgcatcttcgtcgtgaacctgaccctcagtttgacgggtagacgtgtcatgtactaatcagtcttactttgtcactaattcaaacgagtcaaactaagtcattaattaaacttctatacacaatttttggaaacatctatagttttgtattttcaaatttaagtatcatattaatgattatgatgtacatcaattattttcggggtatttttttttcaatttctaactaacgagtatgatcaataatgtaatcattattaaataattaatttgtagaaagagacaaacctcatgacaatcgtggcgtggagaagccgcacgtgtcgagaaattcggcgttctgaaaccgccgtttgatggcattgtttggagaacaaaatgaaacgggctttcacaaaaacgtttatcttccgataaatcttgagcgttcatcatcatcgcaaactcatctgaaccgttagatcggctgctggtgctaatcgacgtttcga

SEQ ID NO: 5682 - DNA, 531 bp, Arabidopsis thaliana columbia
tttccaaaattgttgcatatcgaaaagatttttttttttttttaattacaaaaaaagaaagcaactccacccaaatttaattgcggataactgatatgacacagagagaggctctatgatataagtaagtaacacaagagagaattatcttcttcttccatttttattggaccaaaaagaagatagataacaaaaatagaaaaatctaaggtgtgggaagctctgcagctcatccatccatggcgacgacgattcccactacagctaccgcaactatgtgtccgtctcctcctgtccctacaatctctcccttactcagaacgactcaccaatgtcaaccatctccttctttatcatccccattttctataaagcttagtacggctctggtttgcggtgacactacagtggatagagtggttgatagctccgtgatgatcaaacctgagaaatggggaattcagtcagaaaagagaaggaagaggagaagaagaagaagagtaggttcgaacgtttggagcatgaagaaga

SEQ ID NO: 5683 - DNA, 622 bp, Arabidopsis thaliana
tttctatctagttctttggttggtgttaatgttatatgtggtgtgtttcgattttagtttctcttttagtttctctcaagcgttttggattgctatgatcatctttatgttccctttttgaggttattaatttataaggccatggttcgtggcacttattcttttagaaatgttggctagctcccatatcacattaggataatcaccttaagttcattgttaaaaaatgagcttatatacacatattgaacctccaagagaaagtttaaaggaccctttatatcgccaacaaaaaagatatagctgcgcaaaaaaatgaaaatgaaaactctttgtagttaaaaaaaaaaacaaagataaatcgagataagctcaagaggaatggtatgtccaagattccatttcagacgggattctggtctgggatgttttaacttaaaattgaacttagaacattaacaatgtttaggtgttccaatttaaaccggtagagagaaacttcaagtgtcacaaagacagaaatagtatgactagatagcaaatggaggaagccagtaaggggcggtcagagcgcttggtgcacctttgggagctttataatgatgtgctctccggtagtgag

SEQ ID NO: 5684 - DNA, 358 bp, Arabidopsis thaliana
agatagttcacagggtgcttctggtgatagtaatacaaaggacacataactgcacacacacaaaaacgagaaagcagatcaaagagccggagatgatggagagatagaatccaaggagtaccgtaccgatcaatggagtcaatataagaagtatgtagagagcgaacgcggcggtggtggtggtgaagaatacagaaatagaatgaaccttaacgacggtggcagcgacggcgattgtaacgagcagctggatggagatgatggaatagaccttgcggatgaaagaccatcggagctccgggctctccgacatcatcgggtagagaggcgtctgagccgactccgaatcatgcttctg

SEQ ID NO: 5685 - DNA, 575 bp, Arabidopsis thaliana columbia
ctctcaaaggcgtaatgaccaagacacgaacataattacaacagattcggagagaatatacagtgaagattaaggtaactaaatactccaatttgctaaactcacgggatatgattcgaaggtgaataatatcccaatacgttttgagcctgaagtaagggtctacatcacctttcaatgccgtggagacatttacgggtcccactgtcgctcttgctttgccactgcccgggctgaggtaactaccagcgcacacacacgcacgtcattttttttgtatcatcttcaagatgaacgtataatagacaagaaaaattatcttaattatatgcaaattagtctatacaatgttgatattgattgtgacattgaaatgcaaaatgtatatgacagctttttaagagatgtccgagagataaggcggcaataatatggtacgatcaatgttttctcgagttttcttcgatcagtactggagggaagatcaattacgatgacaatatctgtattgatacagcaaggcaaggctgaatgcgaaaactcataccggtgatgattccagtttggagtttttg

SEQ ID NO: 5686 - DNA, 1778 bp, Arabidopsis thaliana
taacggccgccatccctgcagaaaataaaaaaaccggatgaagcaaatctcaaactaaaaaaaaaaatgtaccacaaaaggccaaaaatgacctaaaccttaatcaataatattccacgtcatatcattctcaaagatccaatggcaaacttcaatctgacccggaccagaacctaaagccaaaaacgctccatgactcggactccaagctgacgtatcaatgtgacagatggcaacaccatggttaatcttctctaaactcttcgggtcaagtagatccgtttcataaacacgtacccgaggaaccgagtgacaataatacagtaaatacgggtacaaactctggtgacacgaaactgctcttgttacatctccaccgttgattccattgacttttccaatgacgaccttcttctttgacccgacaacattttccgtcgtcctcaccactacgccgcgtccgagcaccgacgtagcgaaatctatcatatcctccgctgatccaacacaccgctttgtctcaccgtgactcgccggtctctcacactctgaaaccgccgacgagattatccccgccattgatgaattctcaccggcaccaaaaaccctccaaatctctccgatcgtagatgacgaaaacggtaaattcttaactatgtttcggggtaaaaatgtccttttaggcattttatctttaatatccggcatttgcatcaaagtcccttctttcaacatcgcttctctgaagaatttaccctcctcaacccacttattcaccgttttgccattagaactcacattattagaataacgcgcaaaaacgacgccgtctttagtgtaaaccttaaaactctgtccttggccgtaagttttgaagctgacgttacctccgacgttatcttggccgtaaccggtgaaattatcagagccaaggttaaaagatttaccgtaatttacgaaattgaccttctcgttgtttgagtttttagcgtaagaagagaaagaatcaactccgatgtttgattggtctctgtaatttttaaacccataaacggcgccgttacctccgtcaccgtatcctttaaattcgttaaccggaacattaccgttttctccgtagctcgtgaaactgtcgttagctccgttagcggattctccgtatttggtaaaacccgtattaactacgtttgacccggttccgtaacccgagaactcattcggagctccgtttccgtttttgctgtagcttgtgaatgattgatatccggtgttgccgttctcggagtaggtagtgaaggtttgtgatcttccgttggctttatcggagtaagaagtgaatcttccgtttggttcgtttgcgtctgtgttgtagttcgtgaattcgccggagcctcctgttgttccggtggcgtaagttgtgaagctttggtcagctacgtttacttctccggcgtaatttgtaaatccatcgtcgtgtccggcggagtttcggctgtaacgtcggaatgagtctacggcgatgttgtcaatgccggaatagtttttgaatgagtctgctccggagagacggtcggagccgtagtttgtgaagttcttgccgctgtaacggataagttgacgtcatcgccgtgttttccagggaatgagcggcgactcagggaagcagaagagtttccggcggcagaaatcagagtgatcgtgttaacgcgtgattagagcgagtgagcgaaaccgtggagtcatgcggttagagagaggctttgagagaaaaagaaggt

SEQ ID NO: 5687 - DNA, 574 bp, Arabidopsis thaliana
gtttcttaagcttcctcatcatctaccgtcaatctttatagcaaagaaaaggaaatcaaatcaagatttacccttttctttgatttctctttgtggtgtgttgggtgtgtgatgttgattaccactggggaaagaaatggcagggttcttctatctaggagggagagacaacaacagcaacaacaacaagcaagatcatcatcaagtagacaaggatcatcatcatcaagacaagagcaattatctttatctttacaaagacgagatctataataacaacaagggtttcgagatttggcctccgcaatacttccaacaacaagaacatcaacaacaacaacaacagcaacaacatgcctcagctcctgcaaacttctactcatttggaatggttcctagcggaagagcagcaacaacaacaataaccgtagccggagtttatacttcaacgtagtctccgatcatgagccgggagggttcacggtgacgagacaaggaggtatgaattgtcaagattgtggaaatcaagctaagaaagattgcctcatatgagatgtagacttgttgtaaagcg

SEQ ID NO: 5688 - DNA, 1471 bp, Arabidopsis thaliana
tcgctctagtcgtcgtttatctcctaactatgctaaatctcactggtgccttgaagaattagccatgctctgtgatctaaagtcgtctctaggtcgtctggtgttaccgatcttttacgaggttgaaccgtgtatgttacgtaaacagaacggtccttacgagatggattttgaagaacattcgaaaagatttagcgaagagaagatacagagatggaggagagctttgaatataatcggaaatatccctggatttgtttacaggtacgactccaatatccttcatctctagacttattcctcacgtaacctctgcattaaattattcatttcatgcggttattattttgagtaagacatggtcttcaacactaaagaagattgttgaccttgcttatatactaaagtcaattagccttttacattgaaagaagaagaaaataaactataaggaatttgagactgcgtgtcgttctgatcaataaggacataaaaactgtgtgacgtttcagaattagtgtttgccaccgtactaaaaaagtcaaatgcgagacttttgttttacatgagagaagaaaacagaaagtggctttttaactaaaaaatatctgaaaagccaaaaactagaactttctcaattttaggcatttctcaaaatcgcaagcttcgtcttcgtcgtgtgtagtcaaaagtttgtattccactttctggtgacttcgtcgaccgagatcgcgaaattgagctatcgattggactgcagacatggttgcgtgagttcttctctgaccacccttgagccggagaaattggaagtgattacaagaaatcggagttgagcaaaaaacaacacagacttcacggagagtttctggctttctgctgcaacttgtcgtcttgtcagagttgactaagaaggaggggggagatcggagatggaatctggcgttgtttcgaagccgcataggtcaagtatgacgtattcctcagtttccgtggcgcagacacgcgcgataacttcggagaccatctctataaagcgctcaaggataaagttcgggtcttccgcgacaacgaaggtatggaacgcggagatgagatcagttcaagtcttaaggcaggcatggaggactctgcggcctctgtcatcgtcatatcgcgtaactactctggctctcgctggtgccttgatgaattagctatgctctgcaagatgaaatcatctctagatcgtcgaatcttacccattttttatcatgtcgatccctcgcatgttcgcaaacagagcgatcatatcaagaaggattttgaagaacaccaagtaagatttagcgaggagaaagagaaggtacaagaatggagagaagctttgacattagttgggaatcttgctggatatgtttgcgagtaggacccattatctcatttagaatcatgtagacattagtagaagatgagctgaatttaggatttg

SEQ ID NO: 5689 - DNA, 1825 bp, Arabidopsis thaliana
acatgtgtgtcggcaagaaagggattgatattctttcttatctttggagtatatgtgtatctatgagtaccccctcaaatcatccttcttcattacaggctctaccaatccccctcgtcgttttgaccacacacatcatgaggctacttcgatggagagtatgacgagtgtagactaacctgctatgttcagtgtgtatggcacatctcactgggccaggaagatgttattttctccatattcaaagtaagctatgaacctctgtactttggaatttgtccttctcgctttaatgatatgaacaggtgggttccttgacttctttagaagtaccttcaaatgcttttgaattatatatataggtatatatatacatatatatatatatatagtatttggtattttgtgtttctgttttagaggatgacttgaagagatctcacattcagtttgaatcacagctcttgaacgacagtggttgttaatattcaagtgttgatttgggtgaatttgtggttctatatggtcagacttagattaatgttgcacatccgtttgtatagttgggtgtttgttttgtgtctggattttgttttgttggttttgggcctggttttaggccttatgagtgtttaacggatatgctttagtgttttgcagcctgtcttggttttcgtgttgtttttagggttttgcttaaagtgctcgtgctatttaaccaaagcagctcccacaaaagtttcattcaccttttcggctactcaaccctcagaatttaaagggtcgccttatctctaaactcaaattcatcatgaatcacgaagcgacctcgttgacaggagtctctggtgctggtcagccttccgctgcgactccttctgaccctccaaccgccttcgtctgttccgatgttcattcccaagactgaaccaggcatctacatgtccaagaaaaccaagtccaaggtctctgcaccgtctcagagcaagagacagtgtactgctgctacttcaaagacaagatctaaagcgcctgctctccgacggttgtctagcaagaagtccacccgatctgcatctgctgctggacagactgaagaacatgtctttgagtcttcagatctgcaagatggtgatgttacccagattcgtccgcctctctttctgtccgggtatcaagagaaccgtcggcttctctctgctcgtgaccgtaagtaccctgagctcaagtttcctcagagacttcttacaataactgctttcttactgcggaaggacttgggcgctacaagctcatcgggggtcgatacttcaacgatatgcgttttctttctcttgatggaaacaacaccgctagtactctgcaactcctctctactgctggtctgctccttactgtcacagagatcgactcttatgtgcaagaggttgtcatggagttttatgcaaaccttcccgatggtgaagaaggtgatcaactggcctacttcgtgttcgttagaggcaacatgtacgaattctccccggctatcatcaatcaaatttttcagcttcctaatcctccatatccgctgaacatgtctaagattaaagttcctgagtccatggatgaagttgatgttgctcgctcaaacagcaaagccaactcttggaagatgctcacatctcagttgttatctcctgagatcgctctgctcaacaagatctattgtcacaattggatgcccacagtgaaccgatctgttctgaaaccagagagggtcactctactttacatgatggccaaagctctacctttcaactttgacaaactcatttttgatgag

SEQ ID NO: 5690 - DNA, 504 bp, Arabidopsis thaliana
ctcctctctctctaacaaactcgcaaactcacatttgtggtactctcagtgttagacaagtccgatcaagtttaagcagtcatggcggttttgcttcctctgtttcttctctctttcatgtttacctattcaagtaagttctttctatcttctttgaacatttctttgtcccttggcattaagactcaaaatggttccgacattttcgcttcttggttacgttttccttgtaatgctaatccgagatatctgttttgtacagacgcggcggtttgtgtgtgcaaggacgctaacgagctggatcttcagaaggtgatagacttcgcatgtggaggaggtgctgactgtgcacagattcagacgaccggagcttgttatcaaccaaacaccctcaagaaccactgtgacgttgccgttaacagctactatcaaaagaaagcttccaccggtgccacatgtgacttcaacggcgccgcgtcatctccacttcccctccttcgagta

SEQ ID NO: 5691 - DNA, 1839 bp, Arabidopsis thaliana
ggtttcttttttttgttacaacaactttctctatatatattgtaaacatttcttttcacttgttttgcttccagagtgaagagaacagaaaaatatcgagatggctaaccaagaagaaggaagcatcttgaaagctcttgacgttgctaagactcaatggtaccatttcacggcggttgtagtcgccggtatgggtttttcacagactcatatgatctcttcgtgatatctctcatcacgaagctacttggccggatctactatcaggttcctggctcctcctctcctggaagcctccccgacggcatctctgtagccgtgagtggtgtggccttcgccggaacgtttctcggacagatattcttcggatgtcttggtgacaagctcggacgtaagagagtctatggtttaacactcttgatcatgactatttgctccattgcttctagtctttcctttgggaaggacccgaaaaccgtcatggtaactctctgcttcttccgtttctggctcgggtttggcattggtggtgactatcctctctcggctacgatcatgttcgagtacgctaacaaacgtactcgcggcgcgttcatagcatcggtttttgctatgcaaggagttgggatacttgccgcaggaggggtttctttacttgtctcgtatcttttcgagattgagtttccgtctcgggcctacatattggacgcgcagcctccaccgtcccacaggcggattacgtgtggaggatcatcctaatggtcggaccttaccggctctcttgacatactattggcgtatgaagatgcctgaaaccgctcgttacaccgctctagtcgccaagaacgcggagcaagcggctttggatatgaataaagaaattttcacagaagtggacgaaaaaagatttgctctcaccatttgtcaaagtgagaactggttttcacgttttgtgttttcattcaatttcggaccaaattaccctgggaaaacttaataatggcacaaaccaaaccgtgcagcagttcgtatcggttgagttgatggcgtaaaccaaaccctacagcagttggttttggtttagttgatgcggttcagttttgaaaacgacaaaaaaaaaaaaaaactgaaacgaagaaacccgagaaaacgaaaaagagaagagagtaacggagagatttgagagagaatcagaaagcgaaacgaaattcagtatccattgcttcaaaattcgacataacttcgaattgttgggtagttgaattgagccactgaactcccacatccggggaagtgaaagttactgtttttcccgcgaagccaagagaaagttactttttattccggcgaaatttgaacctccggcgagatagcatctttagctatggctgggaataaagctaacgacgaagtcccgaggaagcagcatggtcaaaggaaggagaagcgggtattaagagtttccccgcggagaaaacgctctgcaacaaaggcaacggaggaactgggttagaatctctaatttaccgtttgttgtctttgggtgtatcagaattgtaaagcttgtttgattaacgggttagaacttgtcggacttcagcatatctctcggatgacacactgagaagtagaattggccatctctgtcttccgcaaacacatgattctcagttataatctggaacacgtctgtgtacgtacactacttcggtttgcttaacagtatatgactttcagttgcaggtagtccaagtcttgctccgactgaagatcttacagttgaagagttacaccaagactctttgctctacaccggtaccttccgagacgatgatgaac

SEQ ID NO: 5692 - DNA, 903 bp, Arabidopsis thaliana
ccgcctaacggtacggcgcataaatactttcgtagcgcaccgtacaaaattgcggcgaaatccggtaccgctcaggtcttcggtctgaaagcgaacgaaacctataatgcgcacaaaattgccgagcgtttacgtgaccacaaactgatgaccgcctttgcgccatacaacaatccgcatacgtgtgtcgccatgattctggagaacggtggtgcgggtccggcggttggtacactgatgcgccagatcctcgaccacattatgctgggtgataacaacaccgatctgcctgcggaaaatccagcggttgccgcagcggaggaccattaatcatgacggataatccgaataaaaaaacattctgggataaagtccatctcgatcccacaatgctgctgatcttactggcattgctggtttacagcgccctggttatctggagcgccagcggtcaggatattggcatgatggagcgtaaaatcggccaaatcgcgatgggtctggtcatcatggtggtgatggcgcaaattcctccacgcgtttatgaaggctgggccccctatctctatatcatctgtattattttgctggtggcggtagatgctttcggtgccatctctaaaggtgctcaacgctggctggacctcggtattgttcgttttcagccgtcggaaattgccaaaatagccgtaccactgatggttgcgcgctttatcaaccgcgacgtttgcccgccatcgttgaagaacactggcatcgcgctggtgctgatatttatgcccacgctgctggtggctgcacagcctgacctgggaacatcaatcctcgttgcgctttcggtctgtttgtactgttcctctctggccttagctggcgtctgattggcgtcgcagtagtgctggt

SEQ ID NO: 5693 - DNA, 1485 bp, Arabidopsis thaliana columbia
caaacaagtaaaaatgagaacttaacagccctactcgatcattgggtcgagtagaaccaacaggtgacaaaattaagaactaaaatgcaataaacagaggatacaaataacaggtaaataaaagtgcaatcaacaagggatacaaatcaatctaatagaagttctaaggatggattcattgataagggcaactctagggttcatcaaatggctaataggcgaaaggtagatacccatgacgatagattcaaaaaccgggtcaatccactcttgtgacaaagatccccataactttaccacttcctaatctcaactctcgttgatgaaacatagcatagcatggtttaagaaacaatctaccaaagctaataggcagacaagccaatcccttggtcgagtctacatatctcttgaattcgtaggtcagatatccatttgaacgtcttttggacgctggacgtctatgatcggatctccacattagccagcaaaaatcgcataggggccaagcgaatccagaagggtataaacctaaacactaaccacctaactaacctagagattaccctaatctaatccatcgtcaagaaccctaatcactactcaagcaacattcttaagaacacaaacccagaaattactaaaattataccaaaatgtagatctaaacaagctaaacaactatacttaaacaaacaaatgcaaaaacgaaatagattaagagtaattaaagtttcaacattcataaacacaaagaaaaactaatagataaagcatagatcctttggacaaatcccaaagtgatctatttatactaaaatgttgaaaccctagattcactagaagacaagagacttgaggcggtttgggcgaatactcgaccttggggatcgagtaaagagggtgctgcaaagtctgcgcctttgtgtctatgctccgagtgatcaattggtcgagtatatgcttcatcctctcctatccgtatgctcagatgtctggttgagtggggaatgaggaggatccaaagacgctttgataactcaacaagtcttgtagagatggtcacccttggtcgagtaaatggatcgagtagtggatcgagtaggaggggcgagtagatcaatctgatgcttcatctgaggttgccttgatcgagtaagatggtcgagtaaagtgcagcctcctttgtagcatcctggatcgagtaaagaggtcaagtagaatgatgcctcttctgtagctgcctggatcgagtgaatggatcgagtgaatggatcgagtagagtcctttttagctccttctacacctgaaaatacaccaaacaatgcaatgcatatgcaagatgatcatagatgcctaagtatgcagaacaagctaaaatggtgcacaatgatatgatacaatgagcaaatgcaaagctaaatgatgataaacatacacctaaaatgagtaaaatacagtgttatcaactcccccaaacttat

SEQ ID NO: 5694 - DNA, 1035 bp, Arabidopsis thaliana
ggtgaactcgcggtcgagtgatgttgttttggtggtgaatctaatgagcttgaggaagtcgagtgataaatgtgagcttgaaaggcggatgtgctcttgccgtgaagtcgagtgaatggagtaaagcggtgaagttgatgatgatttgaaatcgagtacttggtgataattggagtgagctatgatgagagagatgcagtgaatcgagtgaagtggctatgaaggagaggtggtgaagtgggactgtggtcgagtgaagtatgggctagagagatgaagcggccaagtggtgcggcttggacggaggagaaggtggtgcagcggtcgagtgcgtttgttgaatcgagtgactcggttatgaagatggtggtgaagagatcgagtaaagcttgtgagaatgacaatcgtgatgagaactcgagtgatgttgaactcgcggaagaagagaagtcggtggtggctttggagaagaagtgagctgcggcggtcgagtgatggtcttggggtagacgtcgagtgattgtgacgaacacttgaggacttgaattgcaatgagcgacgatgggagatgagagagttgtgaaaagtttggtgtttggagaaagatgaggtcgagtatatgaagagggtggtgaggaggtcgagtggttgggagtatgagagttgttttgttggtgatgatgaatgaggatgggtcgagtttgataggtgaggtggagataacaaagtcgagtaagtgataagtgaggagggtgatgtcgccgaggtcgagtggagtgtagagatgggataaggtgagggggtcgagtgggtgtgagaagaaggagttggatttcttgtctgttggttaggagcgtgggagacatagggtgcagcagtgggtccctcgcttgtctctttgttctgaatcattactctttcttcactaggaaagtttcaggaaatcctaaaatttgctgtaaacttgatgaactctctgtaagactctgtagctcctgttggtcgagtaaaatgatgatttaaaagtttttaagt

SEQ ID NO: 5695 - DNA, 1804 bp, Arabidopsis thaliana
tggacatagggatgatgatatctacggcatggacgatctgaatctctgagattgtaaacgtcgttgatgaaaatctacatttaagatgatgatcgttagaggagatctcatctttgcgtagaaagagagaaacaaggatgaatgctagtgatataagtgagaatgtcaatcaagcttaattaatacgtatgaaagtaattgaacttatcttttatgagggaggtcgtcgagacagaattggagatcgcatcattgatgaatgagtggaaaccttgagcgattgctagtgacgatccattgtcacttgttggtgtaatgtacttccttttgctgatttatagaagaactgataacttccgtttgaaccgttaaactattgatcccaccgttgaatctttagctgatagtcatacgaagattttgtccgaattttagtcagatcggatattgcctgaggcttctaccgtcttatgaagttgctgtgacaaagtgaatttttcttcctttgctatatttgttttttggtttcggttgctccggtagcaacatacgatccacagtgaatataggaggcagtatgcagtgatgcttactctttggctgacttctggtgatctttctttacttctctttcctttgaattttcattacacgacatgtttttgtgagatctgaacaacgttttgtgattaagataaagcagaagctctccaaggcgaggaagggacaatttttcttagatatatgttaagacgagccgattgtagatgaaagacgagcttgaggccggaagacgatcttgatgtccgagtaagaatagagtttattcgtcttatagctgaaccttgtaaaaggttgcctacgtacccttagaaagggatcaagccacacgtagttcatatcgtgataaacaagctaggccattactggaggaaggtcgtatggtaggtgacgagccggcagatgtgcgacgagctggatgaaccgtggtagaggcgaattggacaaaccgagttctgctgaaggtttagactagctggcgacgagataggtggactatgcagccaatggacgaactgccgctaggcgaggaggtagatgagttttgcagtcgagggatgagttgatagctagacgagttggacgagctgaatagctgacagctaggcgaggagatggtcgttgagtatgggaagagcttgaagacgagctgaggagcttggagacgatctgatgaacttgagtacgagctaaggagcttgaagagcttaaaggcgagctgaatagctaagacgagctacttgagaagggcgagctacttgagaaggatgagctgacgagcttcgtgagacggacgagatgacgagctttgtgagacgggcgagctgacattgtgtctctgcgtgtcaggcggcattccccccttttgacatgacacgatattctgagtcttctgagtcgctctagatcactgggaaattgagcttgagttcggctggtcggatagagacgaatctcggatcgaggcgaggtcgatggtaactccttaatagacatctcggatcgaggcgaggtcggcttctttagaaagctgactcggggcgatctgtagataggtatatcattgcctagttcatcaggattttcaaggaaaacgattccgaagctgactggttttatagagctgggtcctatgactggctgcacttgcttgaggtaaacgtttatatctctcagcatatatcttcgattaaggcgaggtcaacttctctgaaaggaagattctctgggcgatccgtagatg

SEQ ID NO: 5696 - DNA, 1051 bp, Arabidopsis thaliana
cgccgagagagaaacgaatacatatttgaagcgctggcgacctttatcttcaggagtggagtggagatgacagattgtaccgggatttgctaattgtagaagatacagatatgtaggtaaaaacctgtaactagccatatcatcaccccttatagagtttactgcaacctctctagctctccatgctgtagaatatgagatccgaacattaagaccatttaagaccaattgaggcaaatctacagctctcggaccaccttgcgaagaactatatctattcttcataacctcgcctaaaagcttgtaagttgcatgtttacgataatcctttcgagtctcgatcttgcaaacatggatggaatcataccctgtgattttgaaacatttgaaattgggtatgacatgtgcagtcaaatgccatgaacaattgcgatctacgcaaaccatctctaatcttttagggcatgaccgagtttgtttgtaacggaagcactttttgattgcaacaagtcgcatagtctactgtatgacttgcttgtttttgaaaacacttcccacatacaacggatgacctgacgtactcaattcaacttctgtctcatcgactcgaacattggctaaatcatcgaatacaggagccgcatcagtatcgagcaactcattctcagcattatgcaatgtagaaaaccctttatacactttgtaggcttcacctgttgtcactagacggtcgtcagattcaatatttaacccacttgcagaaaccccttctaggacgactataccatcatctccagttacgttctcagctatatcatccgtgtgctcaactaattcaccttcgcatcttgtctcctctgcacagactctagtgtacgtacattggtacaaaccatgttgacacgtcggggatagagcagaggttggtgtacagtcaaccaaaacaccagtgggttctacatgaggtacatgtgtacccgtcgacgtacacgatgccaatagacgagtgagttcccctgggggttccacggtttgttgagtgtcattcacg

SEQ ID NO: 5697 - DNA, 478 bp, Arabidopsis thaliana columbia
aagtttgataatactttaaagtttaaagtttcattcctttttggtatgatatgatttatgtggtttcttccatcacccaaaagattataactttttgattgatgattatcttcaattattaatctattatgaatccccaatgagcgataaagaaaccacactaatatttgacactacaataaagttacaatgacgacttctcttctcttcttttcaaaatcctaaaacctcatgtttcctttacaaaaatcaagcagtcgtggaagcccactcatcagcctgaataaaattggcaacagagtaaacatcaacatgcttctctggtatctcactactccatggaaccctactcgatctaaccgatcccggacccgtattcttatactcaccgtaatacaaagtcttcaatgcgaaatcccgttccaaggcatccatccatcaggactaatcaaagactcaagattacagtttacaaaaa

SEQ ID NO: 5698 - DNA, 658 bp, Arabidopsis thaliana
tacataaatatggcatttctccagtctactagttttgtgacattcaaaacatgttgattttttccagcaaagtttacggcttttaaccataagatccaaaaaagagatacaacagtaaaacaaactgccaaatatagagttttactggcttgaactggcagctccaacaagaacaccttgagcattaccttccttcttgttacctccttccttgttatcttcttgtttcgttatcctgatcttatacttagcttcaaactctgtaagatctttcttctttttctccaatgtctcgtatagcttcctcacaacctcttcaagtccgtccttgttacgttggacagctggtagtacctctttgatggttctttcgacaagaacgcctcctatcatgcggaacatttcctcgattggtcgagaggctgaatggcgttaatgaccagagaatgttcgctcacttgcatctcgaggtcggttatgttggagtagatttggcttagctctgatctcttgccttcatacatgttcaaaacagcttgctcattcggcggttctcttaggccaccgcttccagatttgctggccattacttcgatcgtactacagaaattagatcgaagaaatcacgaattgcatagttgaagcaaaaatgagagta

SEQ ID NO: 5699 - DNA, 502 bp, Arabidopsis thaliana columbia
tgaaaatgttacagcaagacgtttcgatgtgcttggagttgtatgtttgtagcctttgcttagatattagctgtcctttgtttcaagccttaatatgggattgttgctgagcaggtcagcgaggaactggaacgtgctttagcaaaactaggccctgctaggcttactggaaaggtagaatacaaatttctcaatatatatcttaatggctcgtgacgttagataatggtttcctgaggtttattattcctttgcagttcgggctcttctccaaagcgaattgaaggtccggatggtcggaagttacagttgcacttcaaatctaggttatctctcccgttattcactggggggatagtataaggagagcaaggtgctgtgattcatgttgtcttgattgatgcaaacactggccgttttgggggtttattgtccagaagcttcggcaaagcttcacattgttgtgcttgagggtgacgttaacactgcagatgatgaagac

SEQ ID NO: 5700 - DNA, 597 bp, Arabidopsis thaliana columbia
  unsure (1)..(597): unsure at all n locations
tgtatgagtcagagaacctctgtttgactctgtctccgggcaatctccaacctataaactaccaaactataaattacaatccatatgcctccggaacttattcatgtctaagttctcaaccatcctattctctaaccgcaactctgcgtcgactctagctcccacctcagccgccttcttccgtatcaacgtcggagacatatctcctcctaagccttcaccgccgtttccatccttaaagacctcttcagggaaattgagtctcgccgaagaccacgtaagtaaaacacagcggtatcgtaggcccgtgccgcggcaacgtgcggttttgtatgaaccaagccagatccgtgatcgtttattaggctctcttatctcagccacccacttgccccacttcctcatccttattcctttgtatcgcttctcattagagcttatgagatcctctttggcttctcggtcatgaccattccttctttcaccataggaaactcttgttttcgtttgtattgaatcacatcaaaccctaaccaaacgtgacatgtctacgtgtgtaatatatanagagaggattacatgagggagaagatatgt

SEQ ID NO: 5701 - DNA, 1065 bp, Arabidopsis thaliana
taaagaaaatatgtcacaaataaggtaaaataaggaactagaccatgaagtcgttattagtgtcttgtctcttcctcaaagttgtaatagatttgtctttgttcaattttattttatttctataaattcatcaactcgtttatgaaaaaaaaaactgcttgttgactctagtgatccaaatccacaaagcaagaatgcgatttttctttcatatataaaagacatgggattgaccaagatatgttagcattgataacaaaaagttttctagaatccttaatgctccttctaaattttggatccaaacaaaaaagagttgtgatctttataaagttacataagaaaattattttcacacaatttgtttttttttctttccctctatattacattattatacaaattcgtaaaaaatgtcgtcaatttaagaagaaattaagattatacatttatacactagatgatcaatgttatccctggatgagccaatttgaaccgggctcagtgatatatatagttcactagggaaccaagtcactctcgagaaggatcaacttcaagaactctgcttaggaatggagcttacaggtttacgtttgttatatcggtaaagccaccgagaggataatctaagattcgataagcgttactaaatggctcaagtagcgggtgcagggtggtgggctttgtgaaccattgatatttcatatttgctcatccatcactaggctggtttatgaatcattgcgggttcgaataaatgtggcggtctctggcaagtgattgccaaatactgtagcttatatttgtttgatcaagttatttaaacactagatttatgaattattgcataatctagtgcatgatactaaatattgaatgaaaagacttgatgtgatcaataaggtaagatgaaactagaccatggagtagttgttggtttcttgtgttgtacaacattgcaattcttataaccataacaagaaatgaagaaaatcatctctttgtattagtgaatgtctgaatgactttaattacaaattttaaatctattcagacaaagag

SEQ ID NO: 5702 - DNA, 536 bp, Arabidopsis thaliana
ttttgaatgtcacaaaactagtagactggagaaatgccatatttatgtagatccgttgtgctagagaaagatttcaactttataaccggaaagtgaccatttttttacattatgactgaacttttttgaacaacagaaccaaaacatctccctctcgcaggatttttcatatatcagctctctcgttaagcctagcggcggcagtaatagaagccgctacaccaccagggtgagtagacaaattaggattgttcctcagctcagcgctcaccactccctctgcgtcctgcctggtcacagctttatctgcggctaacttcccggtcgcaccctaataagccatccggttcaaacacatttagacaatcttaaaactaaaacattaagacattgaagatgtttttaaaattggggtttaaccgccaaaacatcaatgagcttgattttatcctcatcacggtctatggtagcgttgtgatttgcctgctgattgagcagaagcggcgattccccaggagcaatcacattagtgccac

SEQ ID NO: 5703 - DNA, 520 bp, Arabidopsis thaliana columbia
tgaatcatgacacacaggtgtcacttgccactgatttcatgtacaactacttttcaagagatgtaacagctagtgtgggttatgactatatgcttagacaggtaagtaacattgccatattttccctggattgtaagtgaattgaaaacaagcaacaaaagaacattctaaatccgtattattctaataatatgggttttgtttcaggctcgtgtgcggggtaagatcgattcaaacggtgttgcatccgctctccttgaagaaagattgagtatgggactcaattttcttctttctgcagaggtacacaaatgatctgctacttagatttccgctggttcctgtattgattctcctttaaaactctggtttcgttttgttcgatccagctggatcataagaagaaggactacaagtttggtttcggattaacagttggttaaaagaccgaataaaaaccggcacacaataagcctggcgcacagagcagattgcagcagtagtggtttcactgcgagga

SEQ ID NO: 5704 - DNA, 431 bp, Arabidopsis thaliana columbia
ccctgaagccgcagagagacaaactctttctgctacgtccaaagctactacaagaatggttagtgagaggtaagtttcacagacaaagtcctcaattttgcctcacgtttagtgtaaatgtctcacataagtgaggttacattaacaggttaggtgagagcgcgggagaagctacgaaagatgtactaggcacggttgggcacgcagccggcactgcgtggaacgtcttcaatatccgcaaagctttctctccttcctcttcagtcacatcggggatcctcaaaaacgcttcacgaaagtgctatttggtgtttgtacttatctgtgggcagagaccataaggttaaaattaagtcagaatatgcaaatgtgtaatcttgagtctcagacaaaggtaacctctcttccgttccagatttatccctcgtgtg

SEQ ID NO: 5705 - DNA, 529 bp, Arabidopsis thaliana columbia
ctaatcgaatggcagcaacaagagacgagttgatacggggattcttagccattttttcaggaattatgctgcggcatttaccacaagttctctttccctgccccatccatttctcaaaacattttaagcaagcgttgtgcccacatggtttctgaaaaacaaacacacaagatttccatcagcccaagataaatagtctccatcttcatcaataatccttactttgaaaagaggtacagtacacaccatattaaatactcataaaaagcaacgtttatggtttcataaaatagatcaaccatccacataccaatcctaacaattttcaacaacacaatagattactcaaactaaataatccaacccaataacaggataactcaacaacaatgaactataaatgtaggtaacattgacacattctgtcacaaatggtaaagatcaatgaagtcaaagcctttgtaaaacagttaaaggaaccatttatgatgtcaataaagtttatgcctttgtatccgcagctttagtg

SEQ ID NO: 5706 - DNA, 576 bp, Arabidopsis thaliana columbia
ttgctctatgagtatcatattcacagtggtagtaccaatcttcagataatgtagagcctgttcaacacgtggaactacttcgactcgaattccaagacgctgaaaatggtaccacgagacttttgcccttgcaggcctatggtccacaaccacagctttcatgccccggaattccgagaatatgggctggttgttgtcattctttctttcagctggttgcatcccattggaaaatacagcagtaaatgtgaatgtggacccaaccttgggagtactcgagaatccaatttctcccttcatcagtccaactagacatttgcttatgctaagtccaattcctgtgcctccatgcgtcctggatatggatggtccgacttgcatgaaaggcgtaaaaatacgggactgcgcttctacagggatccctacgccagtatcctcaactgagacgattaggtttatatcagggggagatggttcaaagctccgatgcccgttggagctgaaacgtttaaagtttcccagctcctctgccggtctgcaactggaacccactcagtgtactttccggagatgatg

SEQ ID NO: 5707 - DNA, 1261 bp, Arabidopsis thaliana
cctttagcttcaatgatttgattgaatagatagaccaaaaattatacactacaatgtatcttttatatttgtaacattcatttatcatagaaccatttgtataggttttaaatttaacactgtaaacatgaaatatttatcttcttagaagaagaaaaaagatgccttaagtattatacccatttatagaaaaattaatgttttcggggccatttacaatatagttttggcttggttgtaatgagcgagaggaagaagaaacaaaaggaaaaggttaaaagaaactttggtcggattagtgtaacctataggccatgcataggccatttgaaactcctttgcattcacaattatgatacgtgtcgtgtcttcgtctcagctgttacccacgatcccttttgttcctcgtgccacgtgacatcatttctgccgtcggttaggaggatcatcccttccacgtggactatccttgtggtactcgatcgattggtaaactaattcttactggtggtaactcttgtaaacttttataagttttttttttggaactcatgtacacgtcacatgtgagtataaactttattattatttgcataaaactcaaaaggataccgtgaatttcatgccaatttggtttgtttaggttcggatctcaaacaaagtaaataatttgcaacgtccaatcgcgtagaataatcaggaggaacaaaacacgagacgtgagtttccttattaaaagcctaatcaaaggcgtcgaatattttcatctcttcaacaacaatgtatagagtatataagaacaacaagttcattctcatctccatccctcgcataactaataagctatggcaaaaaaactgtaatttggtcattcttctaggggtattattggtattaaccctcttccatgatccgatcattgtcgctgccctcggcggtgagagtaatccggcggtaggactgttcacttttggagactcttactttgacggtggaaacaaaatgtttaatttgtaagcaaatttcaacatcctccccaaagcttttggccgtacgggaaaatcccgcgatgaccccaacggcaagttttctgacgtgcgcatagtccctgactttatcggtacgttacagttacatatttgtacattcctacgtacttatacttttttccaacttattatgcgttctcttctaaaatctactatgcatatcgaccgatccacgatataaaatcaaattggaaacggtagtttatgattga

SEQ ID NO: 5708 - DNA, 568 bp, Arabidopsis thaliana columbia
tagactttatgtatctcaatagcttaaccttcggagcttactatctcttgattaaagaaaattgaagctttggatcttagtgttatggagaatgttgatgctttaaagctacataaaaacttgcttacgacatcactgctgattatcctttcagtgtgtgggagcaggtaatccaaaagggggatacggtcattgatgctacctgtggaaacgggaacgatactttagcaatgttgaagatggttatgcatgattctgttggttgtggtggttatgtctatgctatggacattcaaaaagatgccattgaaagcacttcatctttgctcgatcaagccgttggttcaaaagaggttagatgattaccagagcttgcttcctatagcagtgtggttcttactaatatcgagccttgttccatttctgctgaagaaatacagaaggaatgcgtcaaactttttaacctctgtcatagtaaaatgggagagattgtccctgaaaacgcccgagtgaggtacagtgtaaattcattgactcgatgccacattgttgatgacccctggcaaaa

SEQ ID NO: 5709 - DNA, 376 bp, Arabidopsis thaliana columbia
aatagtggatggtggtagtggaccacttaatgcgatttcaccttcccatgtttttctccctttcacacaaatacacgacaaaattattaaaaaaacatgtcacaccaaatgtattatttaccatgataccctatctcataaactccttaaacaaacaatagctccctaaactcaagtatccattctcacctctaaatcaatttcttacgttttctctcgtcaaagtctttttatctttgtcacgagatggagtccggtaatagtagtagcctgcaatcttcaagcggcggtggcggaggaggagaagaagaatatgattcacgcgccgcagatcaatccatttccagcttcttcggccaccacaacaaccacgtgt

SEQ ID NO: 5710 - DNA, 636 bp, Arabidopsis thaliana
cttcccctcctcgccaatactcaagaccacagaaggaacatgagatttccgatagagctttcttgcagaaggaaggtatcttggaccgcaagttagcaagctgaccaggcactttgtgatcacaagtagttgtctttgaggatgcgacgaagcatttccagatgagcgcagtaacgctctccacccgcgtaggttggtctactgtttcttcactagcggctttggtcctgagatcttccaccttagaagcttcgaacacaaatctctttgtaatgctgcttctcttgccggcttgttcgtccgcaggtagcttaaaagcctcattggctggtgggtagaaattcgcaccagcaaatacaggactttccatcgcagcggcatcgttctctcctcgagccgtggcggcccaggaccgaatgaaagtcgagatggaggctgcgtccgcgattttgtgagtgatgcagattcctatggccatgcctccgcatccgaagtaagttgccttcacgagcagcaaaggccacgtggcagcagccacgtatgggttgtctacaacatctagaggaagcaactgttggagggcgtcgaaatcagggcacttgagaaattcagtgagaggacagttattgacacgag

SEQ ID NO: 5711 - DNA, 1035 bp, Arabidopsis thaliana
gatctactacactgtctttcatctttcttcttcttcttttttgtatgtgtgtgttctttgttataaaaaactttaaatttgatttttcgatttgatcaacagactctggttatttgtaaattatctgtctttctttgttttcggacaatttcccatttctgtacaaaatcaaactttccgatttggtgattcttcttccttcttggcgaattatctgattaagtgatttcagtataaaacattttgagaaaaatcaaacaacgttcaagtcccttccgatggctcactgactaatcctctagggtttcgaatctggcagagaaggcggcggatcgtgaccaagaaaagataaatcaatctgctttgattggaattagacggctctgatgtgatgttttgatttaatattaatattcgtatctcaaattatatacttactggacccgccgagggggagggccgtttcaccgccgcattaaacggctacgacaccgtgtcttgtccggagtaagcataacatcacattaccatttgtagaatagctgtctttaattgtactaatatcttctgtcttcaagttataatattttattaaatgaaaatctttcaatccattaccaaacccgaaaaaagaaccctctttccgacaaagtttcatctttgaaattatttgagtcaagctcaatctagaagagttttagtaaagaatcaaaacagaagattacaacttttgttgaagaatctgtcattgaggtccgagcttagggcagccctcagctaaaggcaagtccaagttgtcgactgtcctaaaagtgcgtggtaccatcttatcaacgtaaagattaccatccaaatgatcacactcatgttgcaaaatcctagcttgccaacctgaagcattcacttcaatcctctttccttgacgatcgtagcccgtcactaccacctcaaggtatctctccaccgcagctctgaatccatcaacactcaagcatccttcaaagaaaagagctttcttgttgctctctccttgag

SEQ ID NO: 5712 - DNA, 549 bp, Arabidopsis thaliana
  unsure (1)..(549): unsure at all n locations
taagcttccttcaatgtggctgcttcaagatgtgattggttcgatcataaccacacttctagccacactctgcatcccttacttgctcttgaagtctttgttacctctgcttggattttcccgtagcgccaacccagctattgagccgtttatctggccggcgttgttaggcttgattgcggtctggttcatggccaagcaaacttatgatctcgtcagttactttcataggttggtcttcgatgatcggtatgtagtcggttaaagagtggacaatctgactgaggatatctcgctagagagaaataactaatccatatatgacaaacaacgacttttcattggaaaggaaaaaatgtataaacacaaacgtagattcaaaactcaaaaagttatatagtaaccaaggtctatatacgttaatattaagataatcgcagtccacttgtaagtcatgaaaacaaaaggattttgaaattgttgagatataaagaagaatanattagcttgcgtnaaagaanacaatagtaaggggctaattatgtaaat

SEQ ID NO: 5713 - DNA, 482 bp, Arabidopsis thaliana columbia
tagatagaggatccctgctggaagactaaacttgatcagttcggtcttatcgagcatcacaaatttcttgatggccgcatttcgacttccacgtgcctgtctcagggaaataaacaaaatatgctctgctttttttatggtcattttagctcttgcaaagctaaagtggcgtgggaagcaatttgtaaaccgaaacaggagggaggccttggactgcgatctttgaaagaagcaaatgatgtctgtagtctgaagctgatttggcgaatattatcccatggagactcactgtgggtaaagtggatagaaacgaatctcttgaaaaataactctttctggataataaaaagctccacaacgatgggatcatggatgtggaagaagcttctaaagtaccgagaagtggcaaaaacttttagtaagattgaagtacacaatggtcaacgcacatcgttttggtatgatgactggtcttgtatggg

SEQ ID NO: 5714 - DNA, 548 bp, Arabidopsis thaliana
tgctactatacatttttttttctattgtgtttgattgtatctctgctttgtacagagtgcaaattttagcggagaaaacctttctgctgcgaataatgcttgtaaagcaataggagaattagcggtcaaggtaaaaccaaaatgatatttctctatttattgttgaagtttctggtaaagaacaaactcgtgaatgatatgaactcaatgtttcagtatcctcaagaagtctcaccaattgtgaccaatgttgtctattcattaggcatgattattcaactcggagaggtgactctaacagccttataagttaaagattttacttgccatgtctaattatgcctcattttttagtttgtgtgaataagacactagagttgaagagtttaactacactagttgaatacaatgcaattgaactagctatgaacagtgcaattaccgttgggatactagcacggattcgtccagacctcagtgcacgatccattgagaacttcatgaagccttggtgcatgagattggcaacgttagtgaacgtttttgtt

SEQ ID NO: 5715 - DNA, 365 bp, Arabidopsis thaliana
taaagtacgcgttcatggcttccctccaaatactgaaatggatcttgcaaccaaaccatatcaacatcgttgtacataacattgtaacctagctccaaaatttgcaagagatgttgtggccttcgagctgtgaagttgaagaaaccctagtcggatatgatgagtaaattagtgaaaatatatgttttcattacaaagaaacaggggatacataatcatttggatttgatcaagatccgaaagaaaaatgactgctactacatccacaggttgaccatcttttgttattttattagaggatcagtcatttgggaataatgtcccacatcggaaactgggcaaagatcttaaagtgtaccagatag

SEQ ID NO: 5716 - DNA, 376 bp, Arabidopsis thaliana
tatagtctttcgttgcagcgtaactgcgaccctaatgcttctgcagaagaatggtctgcagaagaaaaatccatcaatatctgttgtggcgactttatttggggatggtgaagatataacatggctggagcaaaatgattatgtagactggagtgaagcggagttgagtgatgagccagttagtaagttatgtgattcttcccaaaggagagccatagctcttggagtaaacaaaaaaagacctgttatgatagtccaaggacctcctggcacgggaaagactggaatgcttagggaggtcattaccctggctgtacaacagggggatagagtacttgtaacagcgcctactattgcagctgttgataacatggtc

SEQ ID NO: 5717 - DNA, 516 bp, Arabidopsis thaliana
gtctccgtgcgagaaaggcaaatcggagacgatgagcgaaaccgaagcaaccggcgttaccgatgattcggctccagcgattgagactgaaactgtttctgatgcgatggagcatacagcgatcggagtggttgaatcggtggaaggagccatagaaggagcagagaaatgggtgggtgatttgcaacggacggtgaaggaatcgaaggataccgcaatgcgttctgctcgttccctccgtgaaaattctacctctcagttccgctctatacaggttagttaatctctcttttgttcaccaaacaatttttgcgaatcgagattgtttaccaaaaaacattttcaggatttcaaaccatggatatggtggaatttagtatctcgtaagctataatttctagaaatgagctcgattcagaacagatatttctccaattagcagttttatgtattgaatggtgctagtttttgttcatatgggtaaaatcttgttgaatcataccattataacttatt

SEQ ID NO: 5718 - DNA, 1437 bp, Arabidopsis thaliana columbia
taccctaagtactactctctgaaataagagatcaagtgcagtatttaaggatcgatttccacaaacttcttttgttcaaacaatgagttgaatgtcgagattaagttagcaggtgatgatcgaaataaaatgagaacaaagtaaaaaaaacagcagattgatagtgttgtaaaagattaaatagaaagctcggaataggaaattctcaggaaactattggttagtagatctaatgaaagctaagttcttatcgaatcattcttaaactcaaactctaattatggaataaccggtagtgttccgcaaaactccctatgtttatagctaagaataaccggagaagccaagaaatcttgaacctaaacatgcattctaaacgagttcaattgttcaccttagtagataggtcgattcttattacacacatataaactaagttcatcaaataatagatcaaactacagatacctatggtgggcattaagaataatcaaagatgaagaattctacaaataacctaacagggggcgatctactaaaccatatgaatccctaatgagaaaccctatttctaacaagcagactactcagacataataaatgaaacaaataacataattgagatagaaagcataaacacagcaataaagaaaagagttagaaaggatctcttcactgtattgaaaactgaatgaatctctgaagaacggaggatgaatagcttatgtctctaaaaatagggttttgcaaagaacttgataaaagaaacttaggtctaaacaatgtatataaaaccctataaaacgtccagggactaataatgcaaatagggaagtctcctggggcatatttccctgttctttaaacttgaaagcgtcttggactctgctgggccgaaactggtgtcgatcgacaccaagagtgtgtcgatcgatacttctcttgattcatgaatccaaaatcgtccttagcttcattttccttagcttttgctccaaaatgtctcctcatctccattatttcccactgcatagaatacttgaaaagacactaaaaagacttgagaaataacacaaagactcaaaatcctatgcctaaaacatagataaattcagtgaaaatagggatatatcaactcccccagacttagcttttgcttgccctcaagcaaaacccaaaagccgaacccgtggaagaggttttgaaaacaaaggaactcccaacattctctagcctattgccatgtcatctaaactaagtccatatgcctaacaagtctaatcaaatcctaaccaacatgtacttctcttttagcttacacaacattctagattccataccttagttccacaactatatcaacgaggcttacatcactgggtctcatcaaacaagtaaacattcaagatccttctaaactcattcctgtactatacc

SEQ ID NO: 5719 - DNA, 564 bp, Arabidopsis thaliana
ccccttcttcaagctgtagctgaaccggggcatcttaaacttgggaaagcgatccacggatacatattaagaaatcagctttggtacgatgtgtatgtagaaaccaccttgatcgacatgtatattaaaactggctacttgccttacgcccggatggtttttgatatgatggatgcgaagaacattggtgcttggaattcactcgtctcgggactttcgtacgcttgtcttctaaaggatgctgaagctttgatgattagaatggagaaggaagggatcaaacctgatgctattacatggaacagtcttgcttctgggtatgcgactttggggaaacctgagaaggcattagatgtgatagggaagatgaaggagaaaggtgtgcccctaacgtggtttcatggacagccattttttcaggatgttccaaaaatggaaacttcaggaatgctctcaaagttttcattaaaatgcaggaagaaggtgttggtccgaacgcagcaactatgtccaccttgcttaagatattaggttgcttaagtctactacacagtggcagagagg

SEQ ID NO: 5720 - DNA, 388 bp, Arabidopsis thaliana
caaatcatacgttgaaaatactcctacgattttttcttataattaacaataattaattaaatgttttctatctagggttggaggttgggaattttccgccggaagttagctcgtcggcagtttttcggtgcgtgcgtgtgagttccgtagatgatgaagaagaagagtatgcatataaaacagctgtgagtataggcggtcacgtcttcaaaggtgttctctacgatcaaggcccggccgagagaagctcctcgggcggtggatctcagccgttgaatctcataaccgcaggcccatcggcctcatcatcaagcccaaacgtgagctgcaacaatggagtcgttggctccacttcagatcattatatcgatcctgcctcacttaatta

SEQ ID NO: 5721 - DNA, 1863 bp, Arabidopsis thaliana
gatcaccatcgaacaccttttgggtgcagatatgtctgggctcaaattccagttgatcagaaagcaataggcattaagaacaactaatctagaaaggatctataaatcaaactcaaccacctagcgtattgacaattctaaactactctcaacagtttgatacatctagcggatttggatttctttaacaactaagattcctgtttttttttaaattttacccttcttcattagctaacaagaactcttttcttttctttacaaattccaaaacctttactagactttttctgcttgtttagcttacttcacctagagtcttttaccttttcttatcaatgaatccatcgttttttttttttttagacacatccccacttaaagtataagcgctcacctagtcctatctagtccgaaaaatgtaaactagaactacatgagacactatctctgtcgttacaaacctgacactttctactaaacttaatcggaataagacctcacaaacactcacaagtgatataaggcttgaaagaaagtttaggtttgggtttgggttaactgctctaataaggagagtcagctacttggattaacaagagtgattaaaatgaataagaaaatccaagtatttcagggtatccatgaggcgcttacctcagtcgaagaataaacggagttggtcgtcaatggctacctgtgattgctcccaggccatagacgattcgccttgttctatgtcagctccaacatgtgggtactcgacctcatcaactctgtggcggccagcaccgctttgacgatactcgacctctcttcttctgcttcggccagcaccccggtcgcgtaaactacaagactgcagaagtcgtcctctcttgctgctagatcgagtgagtgtggtcctcctcttgaacgtcgcgaagtgaccaccatatgtggagccatggcaatgcagcaggataccttctacttcatcttctgagacgcatctcctgtagatcttatctttatagagagtgtaaagataaggctcatcccagtagtaatggtgtatgtctcggaaaaaattcttcctttcataactggtcaggttgggaggctctactctgcacgccaagtaattgacgtgatcagcataccttggagatcttccttcaacatcgttcagttggtggaactctttcccgctgtagctcctaccgaagaattctacaaccatgagctgctcttctagcattgaatcgtctatcggaatgggttcttcgattctcatccttgacagatggtcagctgcaccattttagatgcctttcttgtctactatttccatgtcaaactcttgcaacaggagtatccatctcaacagtcttggtttagtatccttcttggcatacagatgcctcaaagctgcatggtctgtatagacagtgaccttggatccaaccaaatagcgtctgaacttctcaaatgcgaatacaacagctagaagctccttctcagttgttgcatatcttccttgagcttcatccaacgtccgactggcgtaatatatgacgtgaagcttcttgtctattttctggcctagaacagctcttatggtgtaatccgatgcatcacacataatctcaaacggatagtccaaattaggagctcgaacaacaggagcaaataccaaagcttccttgatggtgtgaaaggatttgaggcagtcctcatcaaattcaaacttggtctccttgcacaatagtctggttaacggcctggctatcttggagaagtccttaataaacctcctatagaacccagcatgaccaagaaaacttctgatatctttgaccgtttttggtggttgcaactgca

SEQ ID NO: 5722 - DNA, 337 bp, Arabidopsis thaliana columbia
cgccagtatgcttacacagatacacaagatatacttcgagaagagattataaaataaataacataaaatcatggaaattatcttcccgccatgtctatgtggtccctaacaaaagcttcgattactttgtcctctcactctctaatggcttcttcttctctacctctttctcttccgtttccagtccgatctcttactagtaccactcgatctctaccatttcaatattctcctctcttttactctattccatcttcaatcgtttgcttctccactcaaaatcccgaccgcgacgaggtcccgtggctaccggaagagctgatactgattcgcgacg

SEQ ID NO: 5723 - DNA, 2029 bp, Arabidopsis thaliana
atgatattgtgaagttgagtcttgctaaacaagcaaatgatgacaaggctaactcaaagagtaactcaggttgatgcaaatataaccatagttagttcaagcttttgggaccacaaacaaagttgctggtttcgtcaaaagagagagctgtgagttgtcttgtagtgaattcaactgtgtggctgtggtggtgtatatgtttggttacgtataaggtgacaactttgcatttaggattggaacacaaggtgtgatgtctccctctataaagaggaacattatgaagagagaagaggtgtgatgcagtgatgtgtgagttgcagaaacagaggaaaaacagagtggggaaacactaagagggaaagtgagctttgtatattgcctggggtgggtgagggaaacaagctgtaaactcttccatgttgtttagtggattccgggacaccgttcccggcgagacgtaggctataccggtttggtatagctgaacttgttaaactgtgtttgtgtgctccttattctttttctgcatcattctctgcatttaccaatatcttcttattctctctgtttcagtcttgcatatttcccaaagaaacacttctaagtttagcttgaaaccgtaataaataagcaagcaacaagcttaagccttgataaggttggattaaccttaaagatatttatcaagtttgataaagctttaaatgtatgtatatcagtcgttcaaaaatttgtagtcgcttggctccactactagtaagttaatttgttgggagggttcgagttgattttctttgatatgtgtagctcaaattcagatgtacatgaaagaggagaagaacaacattaaaaggatatacaataacagagaatccgaaaggggagaaaataaaaagaacgagaaggagaaaaagttcatgtgttgttttggtttgatcgggaagaagaggctcctgacgatatagaaacaagtggaagaggcaataaaatggtgaagcgtacaatcaagaacacatacataggtgatatgtctataatttgcatgttttcagtgtccattcatcatcgttttgagtccagtttcgtatcattcatcactgtttcatatcatttctcatcattcttgcatactttgcatgattaggatagctttgcatacatattgcatttctgagttgttttcaggtgatttggagctgtttgcgagcaaattggaagaaacgagccagaaccagaagacatactcgaccaccaggtcgtgtgcatccagcaccatacttgacccccaggtcgagtgactttggagccattcttcccatctactcagctcaggccactcgatgacgccactcgaccccctggtcgagtatcacttcgccacaccacctgaccacactcggccattcactctaccaagttactcgaccccctggtcgagtatcatcactcaccaccatcaccatcactcgaccggacactcgatcacgtcttcacagtctactcaaattcgcactcaaccagacaagctgagcacaaggaagagaagaggagaagacaaagtgtttggaagcggcctggacctccatcggatcacgaagcccatcttggcccattatcattctatgggccgggcgattaggttattggcccgtctactatcattttatttcgttttgtataaatagatgtcttagggttctgtcctgagacatctagtcgacattgagtttttgcttcagttttattttctgttttactctgctgcgccgcttttgcttctgcaacctgtaattcgagatttttccaaattattcagattcctcatttgatttcatctgtcatcttgtttttctactctttatatctttacttatgcaatattatcattaaaatgcgttaatatctttaagcatgttgtctgagtagtgacttaagattattagggatgggatagagtagttgtggaatccgtagtctgtagaatggttaactcttagcattgattgacatccttcaggactagttg

SEQ ID NO: 5724 - DNA, 288 bp, Arabidopsis thaliana
gatgctttacaataatcggtaggtaaaacattatcctgagatgaagttgccgcatactaaacttgttatcagatactgatagtaagcatatatcatacaattaacatcggtattatcaaccataacaacagttgaatggtgttaacaaaactgttagcgctagaatgatgacaaagcgttacctcgcattttgcatccacatcttaagcattgccgagcctgagggccacgacctcacgaggacctacgacaacggcgggatcttcatcggaatcagaaccaacgacc

SEQ ID NO: 5725 - DNA, 1516 bp, Arabidopsis thaliana
cagaggatgctatactaattaaataaaaaataactaaaataaatataatatattactattaaaagaaataaaaatacaatatattattataataaattgataatattagaaattgaacatgcttaataattaaaacactaaattcaaaaataaataaattttgtaagaaaaagcttaatacaggataggagaaaaacaatgatgccatgaaatactcaaagagttacactagccaatgaatggataaaaggatagatgacacttacgtttgattcttgattttgatttttatcaatttatgtgaatgccataattgagagaattgaattacaatatattgattaggcttttctaataagaatatataaaggattatattactaatagtgattagggtttgggtggaacccaaaattattttaattaatttttttaacctaaccgctaccgtctgcaaccgcaaacgcttgcgggaaggagcttttgaaatctggcaatttcgagcggtccaaagcggtatctaacggtttttatgattggtgccaatcgctaacaccgctaccacccgcagacgctgcatttgcggatcgcagagggagaaccaatcaagccctaagtctatttattaagagacaattgggatagatttctctaaatttaagaaactcatttaatatttaaattatataaaacaatttattatttgtcaagagacatgtttaaaagctcccattgaggatgttcgaagtcttaggatttttgaattctttacgtttaaactaaatcaaattattttgttcaataaccttctagttttgctagtaataataagatattacaaatttgcaatacatatctactgaatcttttttcactgatcaattatgtataggtatagcatatccctcacttgcggatgtatcttattttcctaggagttttttatttttaatttctgtggatatgttgaagtctgcaacatatcttaaagaaaactacgggattgacaatttcaaaaagacatccgagaaaattcagtttcgtaaaattctatatgcccgcataattatccataattaaaggtcatacatgtttaaccttcacacacaataaatcaaaacaaaagaataaaaataggttaaacaaaaagctcctctatataagcttgataaattttcatgaaattgctttcttaaacactcaacaatgaagagcctcatcttcctcgtaccaatcctttgtctcgtcatttcaccaaccacaacgatcgctagttggccaaaaccttcggaagtttccaatgaggacatgttgatgaataccgaacacaaccattactttggtaataaattgaacttcaaagattccaaagtctggaaatgtacatacaacaacggatctggagctgccgtctctatttcctacccttcacctccacatccgccgtctccgaagccaccaactccgtcgtctcggcctccgtcacctctatcaccgaaaaagtctccacatcgcc

SEQ ID NO: 5726 - DNA, 1738 bp, Arabidopsis thaliana
caatacaagtcctgcaatatatccctcatcctagctgacagatcagtaaggatccctcatggtgtgctcgaaaacctcccaatcaggatcggtgctgtggagataccaacttactttgtaggcccagagatggatgaagagaccaaggaccctttgattcaagggagacctttcttagccactgcaggagctatgattggtgtcaagaaagggaagattgatctaaaccttggcaaagactttaggatgacctttgatgtcaaagacgcgatgaagaagcctaccatagaaaggcaactcttttggatcgaagaaatggatcagttagccgatgaattactggaagagctggcagaagaagatcatcttaacagtgctttaaccaaaagtggtgaagatgggtttctgcatttggaaacattgggatactagaagctgttagactcccataaagcgatggaaaaatcagaacgctttgaggaattgaatggaccagcaacggaggtaatggtaatgagcgaagaagggtcaactcgagttcaacctgcactctcgaggacgtactcgaccagccactcgaccttgtctgccaacgaatctggggagccgatcattccaactttagatgactggtctgaacttaaggcactgaaggttgatctcaaaccacttcctaaaggtctaaggtacgcattccttggtccaaactctacttaccctgtgatcattaatgctgagttaaatagtgatgaagtgaacctgctattatctgagcttagaaagtataggagagcgattggttattcattatccgacattaagggaatttcacctagtttatgcaaccataggatccatcttgaaaacgaatcctattctagcattgaaccacagaggaggttaaatcccaatttgaaagaagtagtgaaaaaagaaattttgaaactgcttgatgctggtgtcatctaccctatctctgatagtacttgggtttctccagtgcattgcgtccctaaaaagggtggaatgactgttgtcaaaaatgaaaaggatgaactgatccctactagaattataactggtcataaaatgtgcattgattataggaagttgaatgctacatctaggaaagatcattttcctttaccattcattgaccaaatgcttgaacgtttagctaatcatccatactattgctttcttgatggatacagtggtttctttcaaataccaattcaccctaatgatcaagaaaaaacaactttcacatgtccttatggaacttttgcttataagagaatgccatttggtttatgcaatgctcctgcaacgtttcagaggtgtatgacctctatattttcatatttaatcgaggagatggtggaggttttcatgtatgatttatcggtctatggcccctctttctcctcatgtttattaaatcttggcagggtattgaccaggtgagaagagacgaattgtgttctcaatttggaaaagtgtcatttcatggtgaaggaaggcataatgttgggtcacaagatatcagaaaagggtatcgaggttgacaaaggaataattgaagtgatgatgcagttgcagccaccaaaaacgttgaaagacatcagaagtttccttggtcatgctgggttgtacagaagatttattaaagacttctccaagatagccaggccgttaacctgactattgtgctcaggttatagtttgtttgatggta

SEQ ID NO: 5727 - DNA, 1654 bp, Arabidopsis thaliana
cacaatctaacacaggataacaagccaccacaacagaacaaaccaccacaacagaacacaagagagtaagccaccacaacagaacacaagctcatcaagacatgagctttatgttcacacaatagcaatcgaccaaaatctgacacaagctcatcaagacagagtattacagaagctaatcaagacacaatccaccacactctaacacaagcagatcatgacaaccagctaatctggacgcgacctaacacaagctaatcattgctgcaacctaagacaagccactcaagacaacaagctagaggatctcaacctaacacaagcttcatcattgctgcaacctaacacaaactaatacagaatctaaaacaagctaataagttgaggaagagcacataccattcagtcttcggcttgggaataggagacaatacggtggtccacatttccctcccgggaaccataagtatgtcggagagagccctcgccgagtcttcttgtagctccgacaatgattgaggagctccgtcttgaaagttgttgccctgagaagatggatggctgtgtccctgagagttgggatttggagactccggaggctcttggtatagaggatcttctggcggtggattaaactgcgcctcttcagatcgcggcggcacgggatcaacacgctgagtggtggagctctggaatagttgttgcggcggcggacagttgcggtagtggggagatgacgttgaggctccagcggcttgaggcggatgcgtcagaggagcttgaggtgccgctggagtgaagtcgtactgctgaggcagcgatgctggtcttccaaccggtgtggaccctccggctctctgtgtaacgttgggggtcatcttcctctttcgtgaacctccacgaccggcgataggcatggttgaaagaagaagaagaagaaagagaagatcttcaagttgaagatagatcgaattagaagaagaggatagatcgaattagaaggagatagatcgaattagaagatagatagagatcgaagaacttgaagaaagagaagatcttgaagaagaagaagaagaagttgaagttgaagacgaagaagaagttgaagaagaagaagaggttaactttggatgaaatgagaagggaattgatcgaattagggttttctttatacacgtagtcgcaatgtagtcgtattttagtcactaattttcttggatttgggccgcgaaataagagagcccaacaacaaagacaaaagtcgccgaatagtcgttgaatagtcgttactttttattgggtttgggcttcagaattactaagcccagcaaatttatggtgtgtcgcatgttagtcgtaatatcgttgttagctttattgggtttggacttcggaattactaagccgaacaaataaaaagtctgtcgcaagttaatcgtataatagtcgcaaattatttcggttttgggctcggctagtcgtcggctagtcgtattacagtcgttaattttattgggcttgggatttcgacagccaacaaattaattatatttataagtattcatgataattataaaatttctataatatttattcaaataattaaacatgatatgattcttatacacaaatatttccaaatacaaaatca

SEQ ID NO: 5728 - DNA, 985 bp, Arabidopsis thaliana columbia
aattgataagtcttgcgtacattgcaccattgcgtacagtttcatcttcccgagactttcctcccctgttgcatataagtaatttttcttgttggggatgttttctttactacttgctttctccttcagcttatagaggagagtcctcgtcttctcgttgaatgattttgcatcaccgctcacatcctttgcgttgaaatatagaaattgttctggtaatcgatctcgccatacgtatgaaatgttaaaattgtgagaacacagttgtcgtaccatattattcttcctttgttgttcagacatctcctactaacctgtcatatatacatatatattggcacataaatcaagctctattgttttctttggtactatattatatttatggtttcgtttggtactattgtcaaaatgccaatcaacaactaaaccacccgaatatagtacaggatagtaaggtgcaccaaaaaactagtgtgcatgcatgtgtgtgtcatttatatttgcaagtacgtgacagctaatcaacaatattcaaattacgttaccccagagaaggcggtgtcaaggcaagagcggcacgtggatgtcgagagtccccccggcactggagcttgacgtagatggaattgtcaccgctaaagacgacaacgtcacctaaaattgagatagagatcatctggatgagattgttaaggtctctcgcgtatttactacctgactcgtatgtcccttgacgattaaggcataaatggtgtagatactcatttgtctggtttagggacaaaacactctgtacaaatgagagttgcatggccaccacggccaagatagggaccaaaaagaggcttttatatacaaaggatgaagacattgtttttgattttgatatgtttaccggaaggaggatgtttgctttgttatacagattgtgaaaaagttgggatgattatgtaggagattctaggaaatgggatattcattg

SEQ ID NO: 5729 - DNA, 2057 bp, Arabidopsis thaliana
gtggcaaaaagattagagttcattcaatataaatcttgtgacctgactttgatccttgcggataggtcttctagaaaaccgttcggcatgctgaaagacctaccagtcatgattaatggcgtagaagtgcctacagacttcgtggtgctggatatggaagtagagcataaggatcccttaatactgggaagaccctttttagcgtcagtgggagcagtgatagatgtcagggaagggaaaataagtctcaaccttggaaagcatatcaagttgcagtttgacatcaacaaaactccacaagggtcaaccgaagatggaagaacctctggaaatgatagagcgatctcaggagaaggatatgagactgaaagagtgaaagaacttagaaagaagtctgataagcagaatgaaactatagagaagctggcccacaccattgaggaacttaggagtaagctgaatcagatgcagaaggaagctcaacctaaaggcgggattaacactatcccgagaaaagaattcacttcaagatggtctcaagagacagattaccctccagaagagaaggaagcctattttgaagaaaggggaattgagtattctgctgcagacctctccagggaggacgctgggtatgatgatgatgctagagaggactatgtagaccctctctatcattcattttcttcttgatgagtgtgaggagtcaagctagagacttaaaacaagctcacttgggaggaagtcccatgactatccttgtaaataatttttactttcttgttatttttgatttgttttggttgtgtttgtggttctcaggaagaaaggagtaacatgaaggtagagtaaaaattcaaaacttttactctagtgatggcctagagatcgagtatagtggtcgagtatgagtgatgtttaaaaacctaaaaaaattttaaatcatcattttactcgaccaacaggagctacagagtcttacagagagttcatcaagtttatagaagattgcgggatttcctggagctttcctagtgaacaaagaatacagagaagagaccagaagacattgtgggacccgccgctgacgcccatgtcctccatgcaactgaccagaagacaagaatctatcctcttcttctcttcaccactcgacctcaacgctccttatccacaccactcgacctcaccttatcacttcactcgatcccatcgcccctctctccacaaatactcgacctcgccacttctcttcctcaaacactccaccatctctcaaacactcgaccaaacacgaactcgctcacactccgtctccactcgacttcccctcaatcactcgactttagcgccatcatcttccgtccaaagcaccactcgactgcttctctctcgcctcttcaccaccgtctcacgctgccactcgacctcttcaccaattgaccaagcagccgtttctcctctccaaggaaaacactcgaccgccgcttctctcatctctccagtcagcttttgttcttcatttactcgaccactacacaaccttcccttcctcacaactccactagacttcaccgaatccactcaatcaaactccactcttcacgcgaccagcacctccgcttctccccctccgattcaatcactcgaatcaccgctcctctaacaacacttctcgctcacagtcactcgacttcttctaacatcatctcatcaccaatccacgactctactctcatcattcactactcgaccttgccgtccgactcactcgaccgcagctcctgcataaccttgtcgttttcacaactctatctccatcacttcactcggtcctccttaaccactcgaccaattacctacaaaacgaaaaaagaaaaatttcaaaaccgggttactcgaccagtttactcaacctgtttttggtttgtggtttgtgttcctggttttgttggaactaacgtattaacgtttatttttgagttaaatttgtcttcaggtttcgtaatgagtaactacagtggagaatctctatggacctgactacaatgtggatg

SEQ ID NO: 5730 - DNA, 1427 bp, Arabidopsis thaliana
tgcgcacctaattctcattggcatccttaggtaggatgagcccatgatcatccaatctctgaccagcttcattgtaggcttgcccatcctcatctctcaaaactccttctgcatcacctctgatgactctgtcacccattgcttatatctgggtttttcggttggtgcgctcaagttttcccaagtccagaacagacaagttgatcagatagaaagcataaacacagcaatagagaaaaaggaaagaaaggatctgttcatcgtattgaaaactgaatgaatatctgaagaacaagggatgaatagcttatgtctctcaaaattaggttttacaaaaagcttgataaaagaaaacttaggtctaaacaatgtataaaaaccctataaaatgttcagagactaataatgcaaatagggaagtcctatgaggcaaatttcctctttagtaaacttgaaagcgtgataacacgatattttactcattctagacatgtattaatcatcatttcgcttagttatcactcattgtttcatatcatttgcatcacatttagcttattttgcacatttaggcatttaagatcatcttgcatacatattgcatgttttggtgtgttttcaggtgtagaaggagcttcaaggactctactcgaccctctactctatccaaccaggagagaagcaacagagcaatctactcgaccagttcactcgatccaggcagccacagagaaagcagcagatcggtctacccgcctctcttactcgatcctctactcgacccctttactcgatcaagggagaccaactctacaagcctcgttgaccgatcaaagcgtcttcggatcctcctcattccccactcaaccagacatctgagcatacagataggagaggtagaagcatctactcgaccaattgatcactcggagcatggaggcaaaggcgcagactttgtagcaccctgtttactcgatcctcaagatcgagcaatcgtccaaaccgccacaagtctcttgtcttctagtgaatctagggttgcattgttacattcaagatatcagaaaaagttaagatcaagttcttttatagttttcaagttactaactcatcttttcgtctgcttgtttttgtggtataggtattaatcttcgtgcatgcaaactcggtccaaaggttctgcacacctacaaccattcagagacagaattgacagaatagctcgtgatttacaagaaaccaaagcaaaggcagcctttgatcagcaaagaccagctgctatggatcaacagaatagactggttgatgttcaagatcacctaatgttgataaccaagaaacattggtgcttgtgatgccaaggaatcataccaaagacaaggggtagtacgtcaccagttcagaacaacaactttgagatcaagagt

SEQ ID NO: 5731 - DNA, 540 bp, Arabidopsis thaliana columbia
tctcttctcttctacctctctctagatcttaaccctaatttaccaatcaccaaccaaagcaaattaagtagacaacccccacagacacctcaaaacaccaacacatcacaaataaactaaaaagtaaaaattacaaaagaagagagtgaaaataaaaaccagccaaaagcccttttcacttccttccaagtacaactcagatcagaagagaagctataaacaaacctagagaaaaagagaatagaagacaagagtagagagagaaaataaaaccttaccaaatcaatcaaagaataagatgaagaacaaaattccagcttgatgtattttgtgaaaacattattattcttttcctcttctatctagagtctctcctaggtcaaattatcaaaatcaattctcatctcaacatagaatggatccagttcaatctcatggatcacaaagctctcttcctcctcctttccatgctagagattccaattacatctcgacaacaacaacaacatcaacagcaacatcaacaacagcaacaacaac

SEQ ID NO: 5732 - DNA, 1215 bp, Arabidopsis thaliana
atcacttacacacatcctaccgttaatgggtactgctatccaacaacgcgctgttctcttacacatgagtttgataagattagtcagtgcaccaaatgttattcaaagccaaatgacgattaataaattctcatttccatcatgtatttaaagttcctttggatttctttatattggaagatttgtgtgtggaatgagttttgatcgcaagatttgtctagtattaagaatcttaacccttcaagtgtaattacgaaaacttaaataatgaaaacaatatccaaaggaaacaaaatttctcttcgaagtgtggagaacgcgatatctaagagatcgaagactaagagagggtaacaaaagagaccgagaaacttacatcaactcttgaacaatttcctcagtaacatcaataagatcctcaaactcaacttctttggcttcatactcatcttcttccacatcactaacttcaccatcccgaagattttgcctcacgagtttctcctcttcatgcagagacttccactgcatcacccatttctgccactcttcattcaatgccctcctcttctctctgtcttgttcactcaatagcaacgacacgtcctgatcctctgcctcatacctcttgctgtaattcctcaggttctttgctatctcttcttccttctccgcagtcaagaatgatgccggtcttggacgccaagccaactgtgtaaccaaccatacacaaatattttattagacatctgaaaatggatgatgctagtttgagaccgagttttttattgttacatacctggaagaaatgatccttcagtatccggtaaaccatattcccattgaaagaccatatggtgaacccattctccatctcgtggactgttgtcactgaggttgcaacgtacctttgaaaataaaaaaaaagtgcaaacaacatcagcaattggtgaaacaaagagaaaccaaccaatggactggtttggttttaagacattagtaccttccagttgggtcccattcgatatctgtggccatgaagtgttcagctgtggccattgtctcgagctcatccacgttgaaaaattcaagctggccattgaaaccttttaacccagcaagaatgatgtacttgcctgtgggcgaccagaagagggcattggcttgtttggcttcaaagttgcgagctttgaaactcttccagtgttttgtgca

SEQ ID NO: 5733 - DNA, 464 bp, Arabidopsis thaliana columbia
tcaacatagcaatcgctgcagctcctccagtgggccttgcgggtccttctgcataaacctgaaagcatacaaaatataaacaagtcaagaattatgcaaagactcttaggcataacaaaaaaaacatttccatgtaagatgttataccgcgctgtcagtacaaatgacgaggccataacgtccatcccaagagttactctcaacccaattgacacagtttaacaaagctgcagttccaccatagcaagcattggtcgagtcaacaccttcgacatcagtgtttccacatttctgttcattcccaacatacaaagaaacatgagcggtccacgtatttacaatagcaatccaggtcaaaagaaagtacgaatacctcaaagagcatgcatcaagaaggtcttgatggacttgcttttgtcaataacagtctcacattctacttcaagacgccagatttggttagg

SEQ ID NO: 5734 - DNA, 561 bp, Arabidopsis thaliana columbia
caggccacaagacatgcagagatggaagcaattgatcagcttgtcggacagtggcagaaagatggactctcaccttcacaagtcgctgagaaattctcgaaatgtgttctttatgtaacatgtgaaccttgcataatgtgtgcatcggccttatcgtttctcggtatgaatccttacgctgaattagacagtttgtttgttctgttttgtttctgatgagaggtgatatactctgctcttaattgaaggtatcaaggaagtgtattatggatgtccaaatgataaatttgggggatgtggttccattttgtcgcttcacttaggtagtgaggaagctcaaagaggaaaaggatacaagtgcagaggaggaataatggcagaagaagctgtctctcttttcaaatgtttctatgagcaaggcaatcccaacggtaatagctctccctttaacttgtacacttctattccttgataaaacatcttgaaagatcctttgtttattatttggggtttagctccaagccacacgccctgttgttcaagagagaggcttgaggtgac

SEQ ID NO: 5735 - DNA, 367 bp, Arabidopsis thaliana columbia
tcaaagaaaaagtctgtatatcatcttcttcttcttcaaatcgagatcgaagaagaaccaacaaaaaaccaaaaatggagacgaagccaaaccctagacgtccttcaaacacagttctaccatatcaaacaccacgattaagagatcattaccttctgcggaaaaagctaggccatggccaatgtggaacaacctatctctgcacagagagatcaacctccgctaattacgcctgcaaatcgatcccgaagcgtaacgtcgtgtgtcgcgaggattgcgaagatgtatggcgtgagattcagatcatgcatcatctctctgagcatccaaatgctgttaggatcacatggacttatgtagattcggt

SEQ ID NO: 5736 - DNA, 632 bp, Arabidopsis thaliana columbia
tctgaatctcaggcagcttttgttaaaggcagactaattagtgataatatcctgatagctcatgagttgctccatgccttaagctccaataataagtgctctgaggaattcattgcaatcaaaactaacatctctaaagcttatgatagagttgaatggccctttctagagaatgcaatgaggaggctgggatttgcagagagttggattcagctgatcatggaatgtgtcaaatcggttagataccaagtgctgataaatggtactccccatggagagattaccccaactcggggactaaggcaaggtgatcccctatctccttatctctttgtaatctgtacagagatgttggtaaagatgctccaggtggcagagcaaaagcagctcataactggcctcaaagttgcaaggggggctcctctatctctcatctcctctttgcagatgacagtatgttttactgtaaggaaaacaatgaagagcttggtcagattataaggatcattgaggagtataacttagcctcaggcaacgtgttaattccttaaatcgagtgtttattttggaaagcacatccggagaaaggagagccttgtgatagaaagctgggattaagaagagggagagag

SEQ ID NO: 5737 - DNA, 461 bp, Arabidopsis thaliana columbia
gtccttggagcacctatccaccaggagctgggcttatttatttgcccagttaccagataagggctccagcctagcatacccctcatgcccacggtgctgcacggagcatgcacactgcactggggatacctgcacccccaccatcgcacataatccctgctcacagccaatctgaccccatgcacgagtgccagacacctctgttgtccgtcttctttcttcttagccgagtacttcggtagattagttggaacgattgatgattttgagttaattgaacgttcggcgtatgagtggtgatcggatagccagtgttcgtaggctccatgctcgcgcatcgaactacctaccacctatccttctcagttaattcacgggcgatgttacgctcgatgatgagttccggggcctgtgtttcgtacctaatttgaaggaattgttgagtttggtttacacctttg

SEQ ID NO: 5738 - DNA, 735 bp, Arabidopsis thaliana
taaaatgacgaaagagatcaatgaatgcatcaccatttatacatacatacatatatatacacaatcaacagtgtctgcatgtgtgagtaaggaagcttatgagacatctttaattttgatgatgtataagcatgtgcaatgttgggtctctttcaatactcaaatagtacacagaatcaacactttttgatgttttctccttctgcttttggtatgaagtgttcacatcaaatcaaaaattactccataattaaaattgcaacctttagccataattaatcaaaaagactcgagcttttttcttctttaaccaacatttgcttcactaaatacaaatttcgaagctattaaggaaaaacaataattttaacatctaaaaccaaagtttaacatctaagtgtcaaaatcagattagccaaaaatgtgtcaacatttaattaacagtaagtagacaataatgcgacaattaaggaatttgtgtgttacgaactttattctatgaattatttttagagaagaataaagtgaaaaagtacttgccttgggagattgataaccgagtttagtagcagcaccgttaaacccgacccgagaatccatacccggaaggacccgacttgaagaggaatctgagttagtagttgaagtagtggttgtacgaatgagtctctcgaagatagccatgacgaggaacatagagatgagaatagccgttgcgacgaatccaaaggagac

SEQ ID NO: 5739 - DNA, 484 bp, Arabidopsis thaliana columbia
gaccctgtcgacgactttttcacatcacaagcatcttaaaatttcttaaatcactcttttcgcgatgagacatgtctttgtcgaggtgttggttctgatctctttggtcatcttggagttgagctatgcgtttgcaccaatctcatcgtatcaatgggtcgtctcgtattctcaacgtttcattcttggaggcaacaagcaggtaaccattttcatttgaatatgtttttatttgttacaataatatggttttagctatcttatatgaaatttcagatgcatgatcaatctataggttatagtattcaccaaaaaaaaaatctataggttatagtgatcaacgacatgttccctggaccgatccttaatgcaacagcaaacgatatcattgtcgttaacattttcaacaatttgcccgaacccttcctcatgacttggtatatattttcaactttttgttttgggttaattttaggaataattg

SEQ ID NO: 5740 - DNA, 448 bp, Arabidopsis thaliana
gtctcagccttactcaggatctgatgcagtaatggttggtaatggtgagtttctccccataactcacactggatcaactagtcttcagtcaacctcaggtaatcttcctttaactgatgttctagtttgtcctgatattaataaatccttgatatctgtttctaagctcacatcagactatccctgttgtgttgaatttgactgtgacactgtgcgtattactgataaggcaacaaagaggttgttaacaatggggcatcacaataaggggttgtacatgttgaagaatcactcacctcttgaagtctactattcctcaagacagcaagctgcaagtgatgctgtttggcatagaagactcggtcatcctaatgctcagattcttcagcacctgtcgacaactaaagctatttcagtcaacaaaaacaccatgatggtatgtgaagct

SEQ ID NO: 5741 - DNA, 540 bp, Arabidopsis thaliana
gagtctatgctcaaatgaagagcgtgtcttctggtaagtatcatccttttgttgcatgtgtttgaagagttacatgacatctatcttatatatcactgaaatgtctttgttgctctagtaaccactgtgcaacatcaattgttgacttgcatcgaagctgtccaaagtgttcatatgaattgtgtctgaactgttgccaagagatccgtggaggttggctttctgaccgcccggaatgtcagctacaattcgagtacagagggacccggtatatacatggcgaagtgcagaaccgagctcttcttctgtttccgaggatgaaactaaaactccatccatcaagtggaatgctgatgaaaatggaagcatacggtgtgcgccaaaagagctaggaggttgcggggactctgtgctggagcttaagcgaatcttaccagtgacttggatgtcagatttggagcaaaaggcagaaacattcttagcctcttatagtatcaaaccgccaatgtcatattgtagatgttcttctgatatgagtag

SEQ ID NO: 5742 - DNA, 499 bp, Arabidopsis thaliana columbia
ctcatgatctgtgtttcttcttgagttatcgcggccatagcgatcatcgtctctttgtcgtttccgatggtagtctgcaaaaacattataaacagtgaattgtgctattgtggctgaggattacactattactacgcattatgtcatttgggataaaaatacctcctcttccatggcgattttgtcctccttgaccatagtttccaccaccacgccttccatttccatctgtgattaacatatgcaaaaagcatttaggaatctagtgttttgcaggctctatttacggattctcacataatttgacttgaataagatacttaacactaggaccatatcttgtttcacattttcactatctattcgaaagggaactgggaaaacaataagcagatgctttgcaagataaagagtcttattctgagcactacaattctaagtaaagcaacttaagactcgcattcatggtacttttagttcacatttgtcccagtatagt

SEQ ID NO: 5743 - DNA, 484 bp, Arabidopsis thaliana
ttcataaaagcttaacatcaaattctcataatccaatgttctgtatcttgtgattgattcttcattctccgaaacaaaaaaacaaaaaactagattggaaggcattgatgatgaaattacacattggctaatcaaaacaaagccatggacattatccaattttgacatagcatcaatgccagaaagcgtaaatggcggtagagatgtaaatcagcagagcagaggaaaccagagtgacgagcgttgcaacagcttgagccgccgatttgctgccgcaagagagcaaaccaagacggatctgaatcacattaaccatagagagcatcaagaagagacagcccattacagatccgacagcagaagccatcattccccatctcaaaaccttgatattgatgtgagctctgaaaatctcgttgacgtctttgctattaagaaggtttaaggcaagcttaagaccctgagctacaagagaggagaagag

SEQ ID NO: 5744 - DNA, 497 bp, Arabidopsis thaliana
tattcaaaatcgaagtgtctggcttggttactgcagagtaggtggtccagacagcttccttgtgttctgtcatgagacacagaggtccatctcgcctaagttttacagcattgagcaaatttgtaggagagaaccttcttaatgaaagctgttggacgcctaatccttcaggtttaacagataatttaccagccgacctacttgtaaaggctacacggtttgagtttggagcaggggttccaactgagacaacatgagggatgttacgaagagctttaaggaaaaagatattggtgacacccaaaaccattggcgggaaagtgtctccttctcggagtgagtttagtcgagcgaatcctggatcatgtatagtgaaatatggtctaaagtcgacactacaaaatagcggcgcaaccaaactcacaagacaagcaactgcctcagaacattgcggaggtgttggtgctatgataaggatgggctcgcatatgagtaac

SEQ ID NO: 5745 - DNA, 1476 bp, Arabidopsis thaliana
taaacatttttggtttttctatgccttagatgaatgtagactcaatagtatatacaatgcaacacacacttgagccctcccccaaacttaaatcacacaatcctctgtgtgaccaaatttggaaaagagtactcaggaaaaacacagcacagaaacaaaaataggagatggtactatacaacggtgaagtgaggtacttacttctgtcaaagaaggagcggagttgatcatcattgtttgcctgcgattcctgccaagccattgaaaagtctccctgttgtgtctcacctccgccttgtaggtactcgacctcatctcctttgttgcggccagcaccgcggtcgagtgatctcctggcgtggagaacccaaaataaggtcgagtatttttcatcgctctatggtcgagtatactgttgtactcttagagccagaatccacttcatacttatctcccgaaaacactaccagaatgcattaaagacaaccaaaaaaacaattgtacaagttagacatgggacttcctcccaagtgagcttgttttaagtctcgagcctgagtcgtcacacttattaagctaatggagggtgatagagaggaattcaggtctccgcttcttcctcgtttgatacaacattgtattcaacatgctctcttgatatgtcagtagttgagtacttaatggcccttttcttgtaagtttctttttgatcatctcgataatcgtcttctctagaccgttctaatgtgaattcgcatccttctttgtgaagcaaagaaataacttcatcatttgggacatccttgatgtcgagtggtgcttggttggcttttccatggagctccttgatttgatccttcagctctctcaccgtatgtgttaaatctcttatagctttgtcctaccatatagacttctccgtgaatactaaccaataatttgattgcagaatgcttgacttgagttgtttggttgagcatgacgtctctggagcaattgaaaggttactcgagatgacggtccagcaaaggtgtctagtatgagttgagttttcctcgttcgatgcaatagcctctatgtttgatccaaagaactatgttcatgttactgctgatatgtctataattttccaattgggtgtttgtttgctatatttgagatttgagaatatttaagatcaagttctttttttgtttttcttgaaagttactaactctgtgtttttttctttgtctattttgatccaggtgctacgaatcaccagcttcactagttggtactcgttgtatgcatacacgttcacaaggaaatcaaaacctcctattcaacgataacatcgaccgtattgctcaccaactgagaacacaaagagaaatatacacaatggctgcagttgtacatgagcaagtgccacctaaccaacattggtgcaggcgatcaccacgcaaccacaatcagcgaaatgacattgtgcct

SEQ ID NO: 5746 - DNA, 1292 bp, Arabidopsis thaliana
gatatgtggagagagaatcatatttgctatcaagctttgttaggcctgctagaagctgcgcaacgatagactccattcttgtctctgatgagggtggaagggaggcttggataggagcagaaattgctaaaacaggagtcgctttgctcgcggtggctaacttagctaaaattcttcgttctgtgtcaaattcctgcgtcgaaagacaagttaaagcattggtgatgaggagtaatgcttcactaatggttcttgtcatgaagttacaggagcttgctgcatcgagttgattccggtatggcttgtttattcctttgtagaataggttgatgagttggctctcttggaagccatgttggggacattcacgctgataagacctaaaacggagccaagatgctctaagggactcagctggagcctgagtgaacgaagagatttgcaaacgaattgcctctatcacggatgcattgaagaagtgattcatgaatgcattctttgtattagtccaattggttccagttaacgcaaccattatgttcctctgctcgcgagagagtggaggaagagtttgcaaagaaggtaatcaactggtacaccttcggctttgatagaggaaactatgtcttcgaagacttccaaatgatcgaatggtgattcattaggagctcctctaaattttcctctagatacaagatcataataagcagggtgtattgcaaagtcttctctttcaaatggaggtagcttgaatgctgatcggttggtgtagaagagatcagttctgttaaaattgcctattgtagccgtctggttctgcagagggtgtcgatcgacaccctgatggtgttgatcgacgcagccgtgaaagtctgccattcaaacgtgattcccaatctgtaggtacctgaaacacaagagaccaacagacaaagaaacacgtgagtaggtgatagaaaagaagtatctagacttaaaaggacacctagtctaatggtgaactaaaagagaacttcggcaacgacgccaaatttgatatagctctaaatgccttaagcttactccctcaaataagagatcgtcgttggtacttaagggtcgaattccactgagctcttgatgttcacacaatagacttatgatgttatttaataagctagatgaagtaattgaatgtaaacgacaaataagcaagtaaaataggtgtagattcaaatgattaaagcgtcgggtctaaggaattgtctcgagagatagataaattgtagatctagctaatattaagattgttg

SEQ ID NO: 5747 - DNA, 1371 bp, Arabidopsis thaliana
cttccagcggtccaccttcatatgtgcttgactgctagttttaccgaagattctagcagtctacttccatcgatctacctccatttgttgccagtcttacactacaagaaaacaggtgattgacgacctacaagtcagtcgtttagtagtcgtaactaaagataatacgactaatttgcgactaatgactgtagtcattaatccatagtcgctaagaacagtagtcgttaattagtcgttggtcaacgacaataatacgacaactgactaaacagtgaaagatcgtcgttacgtagtcgtactatgtcggcgactaattgacgaccatcctacgattatttgtactgtacagagcgtgtgagaacatggagtcgtttagtagtcgttaatagtgtacgacgacattacgattatgttgcgattaaatattctaaaccctgggtatgttttcagttgtcgtaaaatagtcgtaaatatgtttacgacgattcggcgactctttgacgattaaaagtactttaccaaggatttgaaacttttagtcatatcatagtcgtataagtatatacgactattggacgtctgttttacaattagattatgactaatttggttagtctgataattgtcctaaagttatgtgactaattgacgactatgctgcaactaaattgctacttatttactagttttttgcgactaatagtttggtccgaataaggatttggtcatcaattgttgggtttcttgtttgttgtttaaagtcatcaattgttcttgtttgttatttgatatgctataacatatgaaaagacactactcatatattgaaaatcaagttcaaaacataaaattatcttgtttctacatacaacttattgaaagatacaactagtgtttggaaacctaaaatctatggatcattagatggtggagtaattgggatacgctctgtggatgtggaagagtgtgtggcgatgaagtccaagaactgcggatcggtttggcagagatacttctcgaccaaggacaagtgcttgagcttgtccttttgctcagttgtgactcgggctgactccgcttctcgggcagcaatctcagcatctcgcttctcgttatatgcagcctgttcttcaatttgccgctgagcttcctgcagccgttcttctaaagctttaaaggttgagtctccggggagttggcggttggcactgcctagagtttctttaagacagccaagtccataaggattgtatcttgcaaccctttctgtggactacaagaaagagagaggaagataattagtgacagatcctaaatgtctctaagactctgaaaaagacaaagaacatcttacctcgtgaaatatgg

SEQ ID NO: 5748 - DNA, 1252 bp, Arabidopsis thaliana
tacaagggaagcaattcatttggcaggtgatgatgatgtctccatatcaattgagcgtggagggtataccagtgacccgctgtgtccagcaccctggccagtatgttattatatttccagggtcgtattactctgcctttgactgtggcttcaactgtttggagaaagcaaactttgctccccttgattggttgccccatggggatattgctgttcaggtgaatcaagagatgagtaaaacgtcgctgatatcgtatgataagctattatttagtgctgcaagggaagctgtaaaatgtcttaaggaatatgggttgtcgaagaaaaacacagcatgttacacgagatggaatgattcttgtgggacggatgggttgttctccaacataatcaaggtaatactcactgctcctcctctttgcttgtcttattcctcagattatgcactaaaacctgcgtagaataacttcctcagtaccttttgctaattttgtttctctcttttatgtagtcacggatcaaactggagaacaatagacgtgaatttcttatcagttcactagaatcgctaaggatggaccagagtatgatgctgtgaacaaaagggaatgctgtgtatgtcttggggatttgtatctttccgcggttaactgttcatgctctgctaatcgttactcgtgtctgaaccacatgaggaagctctgtgcatgtccgtgtgacagaaagagttttctctataggtacactatggatgagttgaatcttctcgttgaagccctggaaggtaaaaagctcagctctatgttcagatgggcaggcatagatcaaaaattctgtgcttctccagccaccacaagttcaaaacccgaagaagacaaaggcaaggaaacagatgaggttacaccctgtaatatcacgaggaaagatgtcgcagctggaactaaggaccagacaagagtgaaggcgagatctttggctgatatactgaatgttaaagatggaaacaatgatgcaaaggagactttagaatcttgttctaagaaatcaaacaggccatgcgataacgattcctctgaggccaacgcgccaaagaaacagaagcagtgatgaataatgaaggagattgtagtttagtcacaaaatgcaagacgataaaaacacttttgtcttcttcttaaatcgatatatgaagcaacttttttttttggtaggcgatacatgaagcaacttgatatgtgttttgtttgttttg

SEQ ID NO: 5749 - DNA, 1792 bp, Arabidopsis thaliana
gtgaaagactggattagtggcaatgtgaactgctgcttgactgtcgcagtagacttgcatcgattgagtgtgtggagctcccaacgccgataaaatcatctttagccaaattaatttatgtttcaaaaacgccattgctctgtattctgcctcagcagaagaacgactcattgttttttgcttttacgttttccatgaacaagaagttgttcatgcgatgagttacacaacaaaactgaacaagaagttgttccaaatatttcggttttcttagtttgttgtgatgtagatatgatctccatagatcctctaagatagtgtatgtaatctatttaaacgcttgtaatctcagttctgaatatattggaaatacatttctctttcattaattgaccaagagaaatcagatttgattgaaaatcctcaacataataaactgagtgaagatacattaactctcgactttctctctcagacacgattaccaaggcaccttatccaaacagcctttccgacgtcggtgaagtctttgctcgtaggcgccgggattccagttgctttttcattttgacatcgcatcctctctttagttatcttctgtacttttcccctttgatgtttttccccaatttgttttctctgtttaatccttctcaaacccctttgaacactttctaccaccttgcaattgcatcgcatccaggctgctatttaatcacaagcgacaaaggaaggatttgggatctgacaaatcacgcttccctcttttacctcgcagctctctccacagatcttttcctctgggctattgtatttcatgccggaaaggatccaaactcttggagctatgcttttgactcgggccaaggccatcgcctgttaccgcagatccgtcatgcatcggtgttgatctctgcgttgcaaatctcatcgtaattcacggacggtggccacaacctcctctcgatctggcaatccacagtgaaactagggttttccccagtggaccttgtttccaaatttgacccatcccatccaagaaggcccaaacccatcaaatatgcaaaaaattcaaagcctaatactctcaggtctgttttcataagccctatgctaagcccaaaactttacttgcgtcgatcttctttactctgtggttgtgactccatcgaagagaggtatcaccattaacgctttggtctttcatttactctttgcaaaccctggtatttgttgctcttagggacttgtggtatgtttacgaaagcttgaagatctataatctatctatctcgaatcgtccttgctggtggtttaattgttgtcttgttctaacctttcgttaatgaccaatgttccccaagcagttcttatgtcgtttacaagttttgtaccttcatcaccatctccatcatccagatcctatgctatccaatgtttggatctatctatcgaagtgatctctaccttccgctttgggttttaaagcctccctcaaccgactatagcaccatagtctcttgaatctctgtcatagcattattgtgggtatcgcaacgtgtcctgacgagaaccttaaccttgattcattcttcaacgtcgcagcgtctttcgaccatgaccaatctatcgtccttcaaagaagacctctcgattcaccgtgatctcacttgttgcagtgcgcttccaagcccttgttccaaagttctcatggatctacaatcgaagacctttatctttctttgtcttggcattggggaacgtcatctattgtatggaattatgttctggg

SEQ ID NO: 5750 - DNA, 1298 bp, Arabidopsis thaliana columbia
cctcgactggttcaacgttctctaacagcgatggaaacagtgggaaacgtttatcgatgtttaaaaacccgaaaagacaccatcctgccagccttcgatagatgacgttctgcaattcgcgagcgattcctactccatgccaaccactcatctcgggttagttccctttacccacaatggatcttttaatctttgatccttcacttagacgttaatcccttctcggtattacctggttcaagtgaatagcgaactcaacgacatgattgagtactacgaaaggctgctgctagacagggaaaaggaggtgatgacgtggaaagataagtcatcgtccctcgagtctgatctccgctcttcaaatgacgctaggcagaaactggaggatcaactggacaatctctcctccgaactcatgaagtccaatggtgagctgtaggagcagtaccagaggtatgacaagatccaagaagaactctcaacttcttaggacaaactttcggaatctgaatccagtgcctacgaattgtcaactagctgtccgaattgcagctcaagtacaaagcggtggccaactatcgggatgctgagttagcgaggtcgacatcaaaggccacgaaggaagtgaaaggtcgcaggatggagatggaatcagacatcaaggagtacgagagcaatctcctccttttggacaaaacccatgaagatgacttctccgaggaacgagagagggacgagttgaagaccgtcctggaagagaagcgaaatcgtttagctgcccttccttcctcatcgttcaaccctcaacagtttgaggagttcttcaccgaatcgcctcctttgagcgaatctggtttacactgggctggtacattccaactctctttttttttaaaaccaattcacagcgaattactcttgtatttttcttaatccgagataattgccttggtgttagcgatcacgtggaacccaaaatacctatcgcgccggcgtcaattctggaggcggtagtcactccgcctcaaattcctccatccacaaactcggagacagtggtcatcgagaacgatgatggctcagactccggggttcctagcgagcagcctgctactggcgagccggatgagactgaaacaactgccgcagatcccgagtcagttcaaatcgaacccgagatgcccgagaactcgtagtggctgtgtccacttaatggggattgtctcttaaactcgaaatttattattgtttttttaattactttacttgcctaagtaggctttaaacaaatactttgc

SEQ ID NO: 5751 - DNA, 1397 bp, Arabidopsis thaliana
tccctcagattacgccgtaggagctgttctaggccagaaaatagacaagaagcctcacgtcatatattacgccagccggacgttggatgaagctcaaggaagatatgcaacaactgagaaggagctttagctgttgtattcgcatttgaatagtttagaagctagttggttggatttaaggtcactgtctatacagaccatgctgctttgaggcatctgtgtgccaagaaggatactaaaccaagactgttgagatggatacttctgttgcaagagtttgacatggaaatagtagacaagaagggcactgaaaatggttcggctgaccatctgtcaaggatgagaattgaagaacccattccgatagacgactcaatgccagaagaacaactcatggttgtagaattcttcggtgagagttacagcgggaaagagttccaccaactgaatgctgttgagggaagatctccatggtatgctaatcacgtcaattatttggcatgcggagtagatccccccaacttgaccagttatgaaaggaagaagtttttcagggacatacaccattactactgggatgagctttacctttacactctttgtaaagataagatctacaggagatgcgtctcagaagatgaagtagaaggtatcctgctacattgccaccgctctgcatatggtggccacttcacgacatttaagacagtgtcaaagattctacaagcaggcttttggtggccaacaatgtttaaggacgctcaggagtttgtttcaaaatgtgattcatgccagagaaagggcaatatcagcagaagaaatgagatgccttagaacccaatcttggaagttgagatctttgatgtatggggaattgattttatgggtccattctcatcttcatacggtaacaagtatatactggtcgccgtagattatgtatcaaagtgggtcgaagctattgccagtcctaccaacgatgcaaaagttgtgctgaagctgttcaagaccatagtcttccgaagatttggagtcccaaggtagtaataagtgatggtggaaagcatttcatcaacaaggtttttgaaaaccttctgaagaagcatggggtaaagcacaaggtcgccactccttataatccacagacaagcgggcaggttgagatctccaatagggagataaaaacaattctggaaaagactgttgggattacaaggaaagactggtctgcaaagctagatgatgcattatgggcttataggacagccttcaagacccccataggtacaactcctttcaatcttctctatggaaaatcatgtcatctacccgttgagctcgagtacaaagcaatgtgggcggtaaaacttctgaactttgacataaaactgctgagg

SEQ ID NO: 5752 - DNA, 1022 bp, Arabidopsis thaliana
tgattgcactgatgtctctggtaagtaccttagcttcatctgagctaatttcattgtcaacaagtcgcttgacatacatgttgagtgaagcagaagatgtctcagaagcatccttaggaagagtatggaggatcttctccattatggatgtgcacttagcagcatgaatctcttgcttagaaagacgcctcctcggatacgggacatgaggagtgtagacagactcgggcagcataggtatttgcacctcataaggtgttgtccggatccagtgtcgatcgacactagaggggtatcgatcgacaccgtcgtattgagtcgtctctgagaatagcgtcccatatggtgccgatcaacacaggagggtgtcggtcgacaccatctctgcaactgcgagctccaactcgtcttcagtgtccaattcctcccacacatcatctccttctctgatcaagatggcattgcggctcttccttgggttagcatcaggattaccaggaagaaaaccctcttgtctcttgatagattgtgcagtttgagcttcttgtacatctagcttcttcaagtgagagctctgattatcgatcttcccattaagatctgtgtagacagcatcaaacttgccattaaactccacaacaagcttagtctggctctctagaatctgctcaagcatcgattccattcttgtctctactaagggtggagggggggcttggtaagttgaattaccatagttcctttgaaagatgctttgaggaaaggtcttttggaaagcaggctttggagtgtagttgaaggaaccctagttccctgtaaacctgttgccactgaagttgccctgtggctgcccaaacttcctgtatccctgaccatctatgtagaagactccttcttctgactcaggctcaggctcaatagtttcttctttagctgcaaagtggacatgcttcttccctgtgagcaagttatgaactgaatctagcttagcattcacctctgccatctgatttcctgaaata

SEQ ID NO: 5753 - DNA, 1299 bp, Arabidopsis thaliana
tccattctttcatcgcgagcagtgtattccctgttgaacagatttgcgacgagttgagattcacaaaaagtccttttttttgcaattttagccatggctaattttagcccggccacgagcgcttcgtactcggctacgttgttggttgcttcgaaatttagcctgaaagactgctcgagaaccttgcttgtgggtgaagtgagaaggatgcccacacccgaaccttgatttgatgacgagccatcgacacgtaggagccaagttgtgtcaagcggattttcccgagcttctttcatgggtagttaggatttgggacttcgcgaacgtcttgttatgatattcgatgtcatactcactgagttcgatcgcccatttagccaaacgaccccactgactcaaactatgtaggatggcgttgagcggcatagatcccagtaccacggtcgtaaattccgagccgacataacgactgctaaggcgagtttttccatttgcggatagcgagattccacgccggtaaatgtctgcgaaacataaaaaatgggtttttgttcgcctctgtcttctcggactaaaactccgctgatcgaagtgtccaatacggcgacatacaagtagaacagttctctgatcacaggtttggcaaggattgttgggctcgctagatatttcttaagttcttaaaaagcttcctcgcaccgagccgtccattcaaactttttgttttcccgaagcacgtcgtaaaaggccaggcatttgtcagttgaccgggagatgaatcgattaagggttgcgacccttccagttaagcactacactccgcgcttgttttgaggtgatgccattcctaaaagtgctttgatttgcttcgggtttgcctcgatgtcgcgatgtgtaactagatatcccaagaactcaccagaccttaccttgaagcggcacttggccggattaagcttgacgttatagaggttgagctgctggaaacattcgtgcaggtgagctgtatgttcgtcttctttcatagactttaccaacatgtcgtcaatgtatacttccatcgtctttccgatttgtaaggcaaagatattgttgacgaaacgctgataagtcaccccgacgtttttaagtctgaatggcatcacttggtaacagaaaaggccttgcttagtatagaccgccattttttcctggtcctcagggttcatcattatttggttataccagcgaaggcgtccatgaacgatagcaatttgtccccgaggttgatcaacgatgcgatcgatatgtggtaatggg

SEQ ID NO: 5754 - DNA, 531 bp, Arabidopsis thaliana columbia
atcttaactaaaatattagtgagagaaattcaaacattaaagacaaaaagtgctgctaaaaatgtgtatatagatttaacattaactagaaaaatgatacataattttatttcctaataaaataggcacatttgaaagaacaaaggtatacatcaactttggtgtcagaaagcttaagaacagaaggaagtttgcatcgagagttacacatatagcaaactggtctacaaatagaggtgttggataccacgttagctctccatgttgttatatgagaacctggcatgatatatgagaaatctcccacaacacaagatatatgtaatatggttccacaatcgttgcatgtatagaaccattcctttgggttcactttcgtttcacatgcttcacaccaatagtcaccactcacattcttgtcaccgaaagacaagaagagaagatgatcatcgtatctatttctcattaccttttttggaaaaagagcacagtttccatccaaaatgtagtcacactcatcacaacgaaata

SEQ ID NO: 5755 - DNA, 611 bp, Arabidopsis thaliana columbia
gatggattgatatggagatgggaggttgtttcctcttcttccatagttgataccaatcttgctagccaaatctagcattgttttcctctgcatgtacctgtgcccttggaaccgagttgcggaacaacatgaacctgtaaaaccaagaaaaccatgttcaatatgggagattacgtaaagaaaatgtaaacatgatgcattattaagatgacttacttgaaaagacaaggatggtgaagaggaagaaagcaagaagagacatgtctttgtgtttgtgtctggtttggtttgcaatgtgttggtgatgatcagaatgtgattttaagatggaatggtgtggcattggagatgaggtttataagtaagagtatggtgtagtgtaggtttattgagtcatgcaagaaaagctttgttttggcttttgattttctttttgaaactctcatagttcttttgtgctatgattttaaaaggattgttggttggatggctcaaattgaaccaagaaacacttgccccaagtattgttaattttgcaaatacatttctgattgtagattgagagactaacatcaataatgagtctagtagactaatgactaaaatgtatg

SEQ ID NO: 5756 - DNA, 563 bp, Arabidopsis thaliana columbia
  unsure (1)..(563): unsure at all n locations
aggtcagggttgataccattccctgtaaagttgccattttttagagctcgtaatctaacagtatggagaagagaaaatacagtagcttacagatacgaattccatggccgagcttcccaaggttatgcttagttccatattctacagaagcaaaaaaatccaaaatttaactactttctaaaatcttccacgaaattgaaactgagctataaagcttaatgagcaaacaaataagacctagggatccgagaaaaatgccgatgacgagaagaacgacggtgtacggaactctagtgccgttaaacaaatatctacaagcggtgccgagaaccagcgaagttcccgcgaaaataacagcatcaacaggactcgaatcgttctcagctgaatacgaagaagatgcaattgctttctccggtgatttgtacggcaacgcgcnngccgattatactcgtcatctccggtagaaagaagcaaacgatcaatctttcgttttgccagtgattacggtcaaagatgcttttaccgaccgaatctgcttcgtttaagagtgaacaagattg

SEQ ID NO: 5757 - DNA, 724 bp, Arabidopsis thaliana
ccatccacacaatggaaaaggaaaaaaacgagctaagcaaagaatgttttacatgccgattaaagatcgattgaagcggctataccagttagagcgtaccgcaaaggctatgcgatggcatgctgaacatatgtctcccgaagagaaatgcaccacccgtccgacggagcagcatagaaatatttcaatgagatatatccgaattttgctgctgaaagtcgcaatatttatctaggcttatcaacagatggatttaatcatgttggtatgaatggtgtggcacactcgatttggcctgtgatagtaactccttataatttaccccccagcatgtgcatgaagagagaatttttctttctatcagtccttgttcctggccaaagcatcccaaaaaaagtttagatatttatctccagccactgatcgaggagttgcagagtctgtggattgacggggcagaagcgtatgacatatcaaagaaagaaaaattcacgatgcgagctgctttgatgtggacaataagtgacttcccggcgtatggcatgctgtctggttggatgacgcatggtcgtttgtcgtgtccatattgtctagataataccaaatcattttggttaccaaatggaagaaagcatagttggtttgattgcacagaatatttttactcaaggtcatatgtataggcaaatgtcaatcatttcgcagaggaaaggaagtgaaagat

SEQ ID NO: 5758 - DNA, 253 bp, Arabidopsis thaliana columbia
tgtttatgttattgagttcccttttcctgttcttgtgtttgaatttgctgagcatggatttttgaattaccgaggaggtattacggttaacggtgaagagtctttatagcctttaagtttaaggttgaagattgggaaggagattgcaaatgccttggcttatcttcacatggcgtttcctaagaccctcttacatcgccccgtgtagcctctgcatgtcttcctggacaattattggcctgtaaagttgtct

SEQ ID NO: 5759 - DNA, 535 bp, Arabidopsis thaliana columbia
attctttgtcttcttctgatgatctttctctcttttttttcctactttcttaaacagcagacttgctctatatgcttgaacaagatgaaagaaggttgtggacatgcaattttcacagcggagtgctcgcacatgtttcattttcattgcattgcttcgaatgtgaaacatggcaaccaagtttgcccagtgtgccgagctaaatggaaggaaatccctatacagaagccgagtttggatcttccttattacccctttgacaggtgcaataatgatgcagccattagccttttccgctgcttacctccttctcaacgagctataacccaagggcatcccgagccagctactttcgatgatgatgaacggttagaagagcagattgattttgatggtgaaactgaagtcttgaagaaggataacagtgattatgtgcgaatgatggacatgaaagtgtatccagaggtctcagctgtaccacaatccaagtcttgtgagaattttgatgtcaagtgcatctcaagcagtactggtg

SEQ ID NO: 5760 - DNA, 533 bp, Arabidopsis thaliana columbia
gtaactgttatagtagtgatccaagagagtcttcttccttgatggtttcgcagtttcgtaatgagtatagtagcggtgtaatgtcgtgttggccatctaattcaggcgagtctatggcatgtcctccttcaggtcaccttgagtccaccatgtgggtagcgccgggagatttaaacggtttgaaggggcagctcgtgaagctgctagagctttcaggtggatgtattcctcttatgcgtgttccttctgaataccaacggaaattcagtaaaccgctttttgtatcggattatggggtggccaagcttgtggatctgttcaaaaagatgagtgatgtgattgtagttgatggtaaaggcaacaagagatttgtttacctgcgcaactcgaaaccgaacattatctctccttcttcccctgtggttctactgagaagagagaggaaaggaaaagagcctaacggggtaactaccaatggaggagtccctctgatgaaatgtcagacacaggctcggttcagagcgagaggaacc

SEQ ID NO: 5761 - DNA, 564 bp, Arabidopsis thaliana columbia
cccacataaaaagttgaactaggtagacttctgaggaaggagctggagcactcgagatcgaactctgaaatgactgatttacctttgaaaccaccgtcccaatcccaagctgaccggggaatcttacagatatcggtagttgccggattgcagatcgtgtggtcaagacagtgccacgtgggatatgcatctgtgaagacggtgatgaatatctgctgagagtcaaaggttagcgcgagccaacgagaactatctgtaagaactgcgagaatccgaaatcagacaagcttttctcgaggatcttgtcgaaagtcagaggtgaagaagtgtcttcatcttcttcaatgtgggtgggcaacaatggtgccaacgaatccgccatggttgcttactttgatcgatcttgttgagaatgtgagaattattacatcacaattaaaaacaaacaactagtacttttgaaaatatataatgtgtggtcaagagatctgatctttgatgatcaatgagaaattgctttttccctgtttgtatttgtctttttgacaaactgtttaagatttg

SEQ ID NO: 5762 - DNA, 1425 bp, Arabidopsis thaliana
tacctaaaatggtcgtgtgaacatttttatgaagaagttctacaaacgcaaatgggagtagtcgttgcatgatggcatggcaatcatggcttttcagcccagataacttctttgaagcgtatccatctggaaaccgtatatcatttttcatccaacagagaaatgcttttttttatcaatcgagaatctaaatatttgtactagtattgttccatctctggtgagatgtaagccacttctgttgcataaagtcgcaagatccattcttgatttaattttatcttttgttttttcaagaactttcagaactgtgttgatgagattatcgaagaaattcttctttatgtgcatgaagtcaaggttatgtcgaagaataagattttcccaatatggtaactcccaaaatatactccttttcacccaattgtgatgaatcccgtatccatcgatagtttgggcaaacttctcgtgttcgttccctccacaatcgactgtactaaacaacccaacaaatattgtttattctctcgtgaaaaatttcctctctagtccaccacaatggaggatcatctctcacttccttccctccgcgaaatgcttgaacattttgcatgtacatatgacctagaggtaaaaacattccgtggcaatcaaaccaactatgctttctttcatttggtaaccaaaatgatatggtattatctagacaatatggacacgacaaaagaccatgcgtcatccaaacagacaacatgccatacgtcgagaagtcacttattgcccacgtcaaagcaactcgcatcgtgaatttttttttctttgatttgtcatacgcttcttccccgtcaatccacagactcaccaactccttgatcaatggctgaagataaatatctaaattttttttgggatgcttcggtccaggaacaaggactgatagaaagaaaaattctctctttatgcacatgcccgagggtaaattataaggagttactatcacatgccaaaccgagtgtgcctcaccattcatactaacaagattaaatccatcagttgataagcctagataaatattgcgactttcagcagcaaaatttggatatacctcattgaaatttttccatgctgctccatcggacgggttgtgcatttctccttcgggagacatatgttcagcatgccatcgcatatccattgcggtattctcttgaacgaagtttttgaaaactttgtcgttggaaatctctataactagcaataatgtcttgtatgtttttttttaaagattgtcgtctacgatttcctcgtgaaccaacataaacttgtgcgcttcgccagatctttgtgaactaattccacttcaacatgttgactacaaattaggcctaattcgttgttggtttctaggagcagaatttttgaagg

SEQ ID NO: 5763 - DNA, 535 bp, Arabidopsis thaliana columbia
caccgtttcgagcccactgattgatgatgatggatctcgggtcggggcaaactgatgagatccgacatccacattttaccccccaagtctttgaaagagagaaatcaattcggagacttaaatcgatttcagcccgtgatcctagcaattacggcgccagtcagggatttctttccttaactgcataggctcgaggtaaaacaggaaataaaattccgcgagttttgagattttatcgggaagagtgtgacatttcgtgatcctagggtttcctttttcccgctcgttcgtcctctatttaatcaaatcaatccctcgtcctcttcactttcatttataagaaccagcaactcatcttcaagtctttccaggtaaattctctcgctcctttctctgtttctgcttctgttctttagacgctatgaatcttgccggaaattatttagtttaggctcgcttagggtttaaacggggtgtcctcgatcgaaaatccttatcgattcatagattttcagcgctgattccgacggtttcg

SEQ ID NO: 5764 - DNA, 571 bp, Arabidopsis thaliana columbia
ctgtattgatcctcatctgcgtatacgtgtctggatttgcatggtcttggggtccattgggatggcttgttccgtctgagatctaccctcttgaagtgagaaatgctggttacttctgtgcggtggcgatgaacatggtctgcactttcatcattggacagttcttcttgtctgctctctgcagattcagatcattattgttcttcttcttcggaataatgaacattatcatgggactatttgtcgtgttttttcttcccgaaaccaaaggtgttcctattgaggaaatggccgagaagcgttggaaaaccacccgcgttggaagaaatatttcaaagactagatttcattttctttctttctttttgtccccaaggtccctagttaataactagtaatttgaaccttttctaatttttctagctagggtttgatttttattttctgctatttttttaagtttgtagttcgaattgttaaagattcagttggatatgtttacaatcagttggagaagtttaatattttcagttctggtattcaaataatcaggcacaattatagtttgggg

SEQ ID NO: 5765 - DNA, 447 bp, Arabidopsis thaliana
atcattacaccacttcccaatacacatcaatcagaccaaaccagattctgataaatatagatggatatatcgacaatgaagcacacctcggtcagttcagacaagtgacagattctgcgttcataaatcgagtaagcaactaccgatgtaggtaaattcacccgacatgtctcaaaccaccgaatgatcatacactgcctaggattactacttcaacgagatcaggcgacaatcatgatttaccagagcaagaactgcagctgccaactgtagactaggctccagagtctccgggacaacgcaaaagtctttgtgatcgaagtattataagtgtacgagtgacagagcagatctatagtctagatgagagtgaacgggtctatgagtataactgcagtacagctggctttttctagattacgaccatgaacaacatcgtgagcacgg

SEQ ID NO: 5766 - DNA, 543 bp, Arabidopsis thaliana
ttaagttattattataccaacatgagaaaatgactaaatgagaaactgtatttcccaaaacaataattaagagccaacaagattagtgggaaaagagagaagacagaccctccaatggctccaagaagcactgcatctgattcttttgcagctgagatagtctcctccggcaagggcactccgaccaaatccaaagcagctcctccaatgggcatctcacggaagttaaattccactcctgatacagagcacagacgcaatgtattaggcaatctccgtggcctttgagcccaacccacgattgtaaatcccattcaaaatctcgccaatttctaatgctcacatctttcaattccaagcagaaaacagtagtccccaattgaaatgaaacagcaactaaattaaataagaaagggaacaagagagagagagagaaccttccaaagatccagcttgctgaagcacatttttggcaatggagacaacctccggaccgatgccgtctccgggaaggagagtgatggtgtatcgttttttccaggg

SEQ ID NO: 5767 - DNA, 584 bp, Arabidopsis thaliana
gatctggattggtggccaaatcggctaaaccggtggctagctgaataaccagtgcgtcacgtccgacttctccacttgccggttgataggtcatgccacgtggacccttatcggccgtgtggaaaggccaagcgcactctccgggacattccacctccgggttgcttaccattatgtaccgtcgtggttctttttgacctgcgtgggatttacgtaatgacgtcaaatttttcttttgtttgttgtctaatactacaatcttttagaacaaactaaaaaagctacaaaattatgtagaaccaataatctttttctcaagggtaaaatagattaatgttatgcaatttaacgaggagaaaatcaagacatacttaaaatatatttattgtactagtgtcgatctctcacggtgccatattaatccaggtttaaatctgagagatgtagacggaaaaaaaaaacgaagagaaaatcaaacctttaattttggctagggcgttatgttggcaagttccgtcacaaaaccctacgccatgagccctaacttgcgccgaaagtaatccacgggaacactttcgacatat

SEQ ID NO: 5768 - DNA, 464 bp, Arabidopsis thaliana columbia
cgtgatcccctatgagtacagaaaccggttcaccttccggtctaacgggaaccgctcttaaccctttatctcctaagaccgtggaggaccagggctggcttcaatgtgagtctccaagagatgtgtactcgttactataacaaatttttaccaaacgtttccaaaattaatatacgttttttcacagctatattttattcatttaatgttgtatagttaacattttcacaaaagaaattgcaaaattgaatttttttttaacaaatgacttgggttctctacagttgtagatgggtattaaggcttactttatttcatttaacgagtaagttctatttgaattattaattgaagatttaggtattaattaccatagtctaaaataataataacaaatattttgagagatgatatacgtattacatacaaaagagcatgctagcttttagtttttcatacatgaa

SEQ ID NO: 5769 - DNA, 1005 bp, Arabidopsis thaliana
tgtgtgcagttcagatcatccctataatattagtcatggatcatgttatgtcaaagacagagctggaatccactcgaagtcacatgcatatgaatctttctcacttttatatccttactttcttaataaatttgtaccaacccatcatatatatataaaattggacatataagttgagaaaaatcatgatttttaatctcactcaattggttagaggagagttttgttcgggaagtaaaagagagtggttatgcttttttgaaccatttacatatattgtaaactgtgatcaatccacatacatctaacaatgttacggccgaatgcaaagaactttatgatttttattaaattaaagcaacaacaaattttcgcactatacaccaatgctctacaaacccaaagaaaacaaaatgctccattaatttaaattgaaatgagtagcaataacataattccaaagagaagaattgtgtcttgatcttctcctgatgatatgatgatgatgattatgatcatttgtcttgatgcgtgctgatgacttttttttgagctttagaatcatgaatcagttgaactggtggtggtggtggttgtggtttgggtcagaccatgcccagtaaccagccggcgtcgtttcatcaatgccattaaacatgttacaaaggctttcttcttgaactatttcatgattctgatgatgatcatcatcatgtgcagatgatcgaatcgatgaagggaataggtctttgatcgtgttcacatgtgttgtaatggtctctctaggcatctccagattgatgtctgaactattctctgtgcttccgttgttgctccatgaagcttctgcttctctctttactatgtttccttcattacattctttgttctttaaagccattacctttaaccatcatcacacacaattcaaatgttaagttttagaaattcagatattaaaaattatcatttctatatatcattaaaataaacataattatatat

SEQ ID NO: 5770 - DNA, 418 bp, Arabidopsis thaliana
catcttcctcgcagcaatatcccaacaacttgacaagtctcttgtgctttagctccccagctgtttttgcgtcttcctgaagaaacaaaagagatcaaatgaacgttgcaaactttgataacctttaaaagcaaagaacaaggtaccgtgaagtagtcaggatcatcccaaggcgtattcttgaatctcttgacagctacgaagccaagattctctgataaacaacctttgtagacaacattggaagattcttctgcgttctctgatatgatctcgtcggaactgaagttattggtcgccgtggtgatatcggagaggaagaactctgtgacaggccagttgacgaatccgtcgttcttgcgttcgccgggaggaatctgcggctgttgtggaggttgttgattgttatcaagaggcg

SEQ ID NO: 5771 - DNA, 1155 bp, Arabidopsis thaliana
cataaatatcaattttacaagatttctttgttgggcataaataagactgttttacgaagtagcaatttcactgaaactcaaatgcgttatttaaatgttgaattggcgtgatcacaaacctcatgtgattgtgaatgccttgtgggaagcctttcgcccttcttctcccattgattctcctatgaaacaattgagagctatttcattaaggactatctaacagtaacgcaaagtaggataaatatactttctacattacaattgccatttgccaatggcgtagcttaaactcaattgactataagcttctacgaatcgtgtatttcagctaaattcaatgaggttccaatgtttatagatactgagtgataacttgagttacaacttgctaatcagagttctggtttctataaatcggttcgaatttcccaaacggtttgaattttgacttcttacctctgaattctggcgacggccgtgcgacgatcctcccgcgcgattctgatcctcttcctcaccggaaaccacctgcgaccatgtccagattccagaagaagaatcgttcaacagaaattcaaaatctctcaacaataaataaaaaaaactgataacgcagaagaggaattgatgatgtacgaacattagcccaagtagatctggatctctcgtccctcgagttgccttcatcatcaccaccatcgtctccgccgcggcgttggtttcctccgatagccacgtcgaccaaacctctgatcaatccgtccattgtctctaacaggaaagagatattttgttttgatttaaaagagtgtgtgggagttgtgatccagaaatggtagttgaataacgacgtcgacgatttacttcctgttttttcatcacgcgcgtgacgtttagatttttattacggcatttattgtttaccgatccactagtagcactatgctctcataacggtttttcgctcctaccgacaaataatagttgattcgtaaattttagttaaaaaaagaaggttatggccaaaattgactattcttttcagttattttagtggagggtaatatagagaaatatatatacatagtgatcacctgctttctataatcaaaatcaaaatctaaaatattgtttctcattttagatgcaagagag

SEQ ID NO: 5772 - DNA, 991 bp, Arabidopsis thaliana
tggtgtgaggtatctgtttctttcttcttgctttatatgtatcactcacagcctaacaatgaaacatgttactaatccccttttaaatacaaaactttatattcacaagtaattaccttgaatgctgcactggttttgagtttgacaaacttttgccactcaacaggattaatattagttggtctcaaattcatcctctcttggttatttgcaaccaaattaataaccttcaccctgcgcgacttgtgtgctctccacatatttcccatctggtttatcacagatatactttgccaatcttcatcaagctcaaaccttgaatgcattcacgaacaatcacaccataattatagaagtaccagatcaattacagtcaacttttttaaaaaactacttgttacctgaacagatttccacataactgttttcagatctcgagtcactttcttccagttaacaatgttgatagggacgtgttccatcactcgatcacatcatctccatcatcagaccaccactcgacctcgtcactcaacctggaagtcgagtatcttctaacaccactcgatcacatcactcgaccccaacgccgagtgacttcatcccattgccagacctctactcgacctcatcactctacctggatgtcgagtatcaccatcaccaccactcgactgcatactcgatgacaagcttcagagccttcttcattccgcactcaaccagacactcgagcacaaggaagaaaagaagactccagctattcacttgacctctcactcgaccacgtgggtcgagtacagttcttaacccatcccaatacttcgtcgttttgagtattagggtttcgggatatttggctataagtagcatgtacttctcattttcgcagacaaaaagtttttatctagttttatttccgcagaccttgtgttctagactttttgtaatccggatttctctttatctattcagtattcagtatttagtt

SEQ ID NO: 5773 - DNA, 1280 bp, Arabidopsis thaliana
ctctagaggatttcgacactgcaatgcgtttgctccacaggcagcttggcattaagaactttgcgcctttgaaatcgatgtttcttgatctgttcagtgggagccatagctatctgcgtgccttttcttcatctcctgtggttcctcttgccattgagcgtggatggagtgagtcttccagtcctaacgtccgtggcccgccagctcttgtttttgatttctctcagcttgaagcaaagctcaaatccggctacaaagctacaacagctgggaaactatctgaggctcttcgtgtcttcctctctattctccaaaccatcccattggtggtagttgagtcaagaagagaagtagatgaggttaaggaactggtcatcattgttaaagaatatgtcctcggtcttcaattggagctcaagaggagagagatgaaagatgatccggtgaggcagcaagagctcgctgcttacttcactcactgtaaacttcaaacacctcacctacggctcgcgtacttcagtgcaatgaccgtctgctacaagtcaaagaacatggctactgctgctcacttcgccagaagtttgttggatacaaacccaactattgagagccaggccaggacggctagacaagttatgcaagcagctgaacgcaacatgacagatgcaacaacactcaactacgactttagaaacccgtttgtgatatgcgggtccacttatgtgccaatctacaaaggacagaaagacgttgcatgtccttactgcactgcccggtttgtaccaagccaggaaggtaacatttgctcggtctgtgatcttgcagtcattggcgcagacgcatctggcttgctatgctctgcctctcaagtccggtgaacaagtcagaatgattatgtgcttcaatcgtgaggtaagtacgagatgctcttttatggaagaagagtgttgagcttttggtgtttgtgaattttccgctgcaacttctattactctttaaagtctttatgttgtttcttatcttagtaacaaacgcatgagaactttatcttcttgctttatctctttttgtttgattttatttttacagtctcaggacatttcatttaggcttatcggattttaaactcgattgagaaatatagacgtaatattttataaattttcagaattgtatccattttcttttggtgaattttcagttgatcctaatttactatccaaatacttataaaattaacgaaaagttagaaatatcgaataaatgtggttagttagatg

SEQ ID NO: 5774 - DNA, 1198 bp, Arabidopsis thaliana
atcagatttggattaagagaatttagtatcttaactgggctggaatgtgggaagtatcccaagaagaaagacgttgatgatgttatcagtgtgaaacctgagtgtgagagtgtttggaagactctgtttgatgagaggttttgggacacggttccaacaattgctgatttggtgagctggctgtaggaggaggaaagcatggaggggtggaagcaactggcactatctctttttattttggttgacggtgtggtagcggcccacagtaaccccaacaggcctacttcgaagactgtcgagatgactaagaacctggagttcttctgcaaatacccatggggaagggtgtcctttacccgtactttggggaggatagcaaatttccaaactccttacgatgctcaataactaataaggggtttacttgtagggtcttatgcactccatggcttctcattagctctccatcttttagctttcgaaacaatcccatcaattgctaagctaggacctgatgatgtacctaacaggacatttgctgagaggtctatccatcgtcttgcctctctgcgagcaatccggacatctcgcattttggagtgtgaggctgctgatgaggtgtgttaaattgtgtatgtacgtacataataagtaaatgtacattatctatggttaacatacttatttgtgtaggttgaggtcaactatattgtgaaaccagctgataatgtttgtcctccatctctttcatgggatgatgaagttgatgatccaagggttgattacattgaggcactgttgatagatgggcaccagtggcaggaggatgaatgggttggaggctatgctagagtaccaaagcagttgcgcccaccacaacaagaagagacaggtaagtataagtataaaggttgtttacaaatttttttgttatttcacccagaagaaaaccaattaatagcagcaactggtctattgtagatgttaagaggaaacgaaatgcacgcggcccgagccctaaagaacctgctatgaaaaaacagaaatctgaaatggactgtgataatgaagaaaatgctgaggattgttttggagaggctgtgcctgagaagtttattgttgaaatgaggaggtctttcaagaagctggaagaccaaatgtatcaaatgcaagaagatatgaaagactttgtccgtga

SEQ ID NO: 5775 - DNA, 567 bp, Arabidopsis thaliana
ttaggcatttcgtcgataatagtaattactgctttctgaacaggagggactagtaaagcctcctcttctgtggcctgaagaggctccaaagaatcaacaatgtcacgcattaaaggccgagccttcgggttacggttcaggcaatggtaagctaacattgcagccttttgaaccgctttaaccggatactcacagttcatttttgggtctacaatgttcaagactttcttcttctccttcaacaatggaagagcccaatctatgaggttttgctcacgtgttggccgtgatttgtctaatgattttcttcccgtaagaagctctaacagaactacaccgaaactatacacatcactccccggtgtcaaatgccctgtcaccaatacatatctaatcagaaagaatccaaatacaacaaactcattgtgttgtccttttagctttaaatagctaaaagtgtcatgcttttagaagattagatttcaaagagcatagtacattctacaaatgtgtaacttgtgagttagtagactggatttcttacctgtcatgatgtattcaggagct

SEQ ID NO: 5776 - DNA, 1715 bp, Arabidopsis thaliana
gctgcagatttggtggttatctctgaaagtctccctgcaaagtcttctattgtatctgtctctttcatcttaactttctcaaattttgccatgagagtctgaagtcttgcctccataactctttctactccaacgtgtttcatctttatagattcccaaacttccttcgcagtctcaagttctcccattttgaagagttaaagactcgtgtactgattggaagatgagggcttttgcgatgtcgttcttgtccacgtcttctgatcccggttcaacagtatcccaaactttgtgtaccttgagcaacaacctcatccgcatagtccatatgttatagtttgtagcgttgagtaaaggacattggatggaaactgagctcgtttcttttaacttgctgcatgtagttaccagaactatatctcccatagtttgattctctgaaacaaaacacgactttgttattgttttagagttttgttcgagaattcaatattgctttgataccaaatatcaaattatagaacaagagaatgatgtatataaagactcactctttattaatctttcagaaacttactcaaaacctaaagctctcaccaaagctctcaatctctcaaactctaaacttctcaataggattaccacaacttggtatctctatttatatgaacgcttctagtcattagataactcctaataacattagataactactaaatattgtatttagatatctcctaaatacaatcttatcctaaatctcttaggatttggttagcttatttctcaagctaacttcaagcttatcaacaattagcacaatattgcagttggtggaacaaaacagatctagtaaactaaaaagcttagcttgagagaagttattatagttcctggataaacaccaaaaatcagtcaacccgaaaaggtacgagttaaagctctaacgattatgtccataaatgtacttcaaagaaattatccgataagtattggaatagcgcggaaacaagagcgatatggggtacaacacttaccagtatgttacagcggaatctctcggctcccgtagatgaaaatgtcaccagtgcataaacgacgacgaaacagtgaacgtagtaacacagccggttctgtacggggttgtgacaattatagaaaacatggagtttattgaagggaaaggagccaatcgttgaaaccgatgagctggagaaagatcgtcagtttcatcggttattctgtaattagagtttgagtttaagaatggttcgttaacaacctagttattcctaaatctactaatcatttgtttcctgagaataccctaaacctgacattttattatcttgatttacaaccaaccaacatgctatttgcttactttcctttcgttttattttcttatactcttttagcttaatcttaatacgtaactcattgtgtgaacaaaagaactttgtggaattcaacccttaaatactatcgacgatctcttatttgagagagaggttttaaggcaatttgacctacatcaaggtccgacaatagagattcgggaagaagacggtgaagttttttcaaataacatgaaacatggaaaaattaaatgaatttatcatgtaaatgacatgtgacattgattagaaccgtacaattgtgtgaagtaaatagaaataacatgtgatattatcatttgttggaaaaaaaacacc

SEQ ID NO: 5777 - DNA, 1389 bp, Arabidopsis thaliana
tgccacttcgggccatccttcacagtccgtctcagtcaggacggctagccaaatgggccatcgagttgagtgaattcgacctcgaatttcgtgcgcggacaagtctgaagtctcaagttctcgctgatttcctgatcgaactccctctagctactgctgaatccgatgttccgagtcaaccctggatccttcatgtcgatggcgcttcatcaaaacaaggctctggagccggagttcgcctcaagttacctacgggcgaagtccttgaacaatctttccggctcgctttcaacgcctccaataacgaagcagagtatgagtctctgctagccggtcttcgcctcgctattggagttggggttcgagccctacaggctcactgcgattcacagctggttgcaagccagtactccggagactacgaggctaaagatagtcgaatggaggcttacctggatcaggttcgggagctgacagcaaagttcgaaaagttcgagctgacgctctagccgctttagcatctacttccgaagtaaccgtcacacggataattcctgtcgaaacaatagcttagccaagtatacatctcgaggaaacgaattttgtcaccactcgagctatgcgcaggcgacttgacgaaaaagcaggcagtcccgaacctcaacaacctgacgacggggatgacagtccagaatttgtacctcccgttgccgaggacgaggtgcccataactgataatcccgaggtttctaatcagatacctcacgattggggggcagactggagagaaccaattcggaattacatcctccacggagtgcttcctcccgacaaatgggcagctcgtaaattaaaagctactaacgcgcgtttttgcatagcaaatgacatcctctacaggagacttatttcggctccggacgctatctgtatctttggcgaacaaccccgaaccgtcatcaaaaaaattcatgacgggacttgtggaaatcactccggaggtcgttctttggcgttcaaagtcaagaaatacgggtatttctggccgacaatgatggcagactgtgaagcgtacgcacgacgatgtgagcaatgtcaaaaacatgcaccatacatcctgcaaccagccgaactccttacctcggtgtctgcaccttatccatacatgaagtggtcaatggatatcatcgggccgctccacgtttcaacccggggcgtgaggttcttactcgttctgaccgattacttctcaaagtgggtcaaagctgcgacttattcaaacataactcaagttcaagtccgagctttcatttggaaggaaatcatttgcaggcacggcttaccatatgagattgtaaccgataacggacctcagttcatctccaaaca

SEQ ID NO: 5778 - DNA, 588 bp, Arabidopsis thaliana columbia
tccccgttcttaatatagtcttaggagctttaagagaccctgagctagtggttcgaggggctgcatcatttgcaattggccaattcgctgagcatcttcagcccgagatcctatcacactatcagagtgtccttccatgcctattgattgcaattgaagatacatctgaggaagtgaaggtaaaatttaaagaaaccaattgagtgtggtttgtgtcttctttttgaaaatacacctttctgccgattatcaccttaggttattagtaacatttcttattattgtctacaggaaaagtcacactatgctttagcagcattctgtgagaacatgggagaggaaattgttccgctgcttgatcatttaatggggaagcttatggcagccctagaaaatagtccgcgtaatctacaagagacatgcatggtaaactgacaatctttgccagagtttcttttgaactggtgtatctgaaatattgatttaagcgtcgtgctacttgcttgcagtctgcaattgggtcggttgctgctgctgcagagcaagcattcaatccatacgctgagagggatctagagttgatgaagt

SEQ ID NO: 5779 - DNA, 1252 bp, Arabidopsis thaliana
accggatgtgactgacgttaccctagacgaaaactggacactttactcggatggctcctcatcattacaaggctccggtcttggaattttacttcagtcaccaaccggagaaatcctcgaacagtcactttggctccagtttaaagcatcgagtaacgaagcggaatacgaagcacttcttgcaggacttcgactcgctaaaggactcggagctagacagatcaaagctttttgcgactctcaactcgtagtcagtcagttcagcggggaattcgaagccaagaacgaaaggatgcgggcttatctctcactggtccacgaactttccagccagttccaccagttcgccctggtcaaaattcctcgaaacgacaactcagcagcagacgcactagccgcactggcctcaagcgccaaccccgatttaaggcgaacaatccctgtcgaaagcatagcaaaaccgagcatcgagccaccaaattcgacctgcgtgatcgtagaccccgtaacggccatggacatagacggcaacgcaatcaacgcgccgggtatagaagaggatccggaaccatccgattggtgactccccatcaaaatgtacattgccgacggcatagttccaacagatcgatgggaaactcgccgactaaaaaccaaagcggcgaactacatgatgctagatggcgaactttacagacgaagtgcgacaaaagctttcctcacttgcgtggatcaaaaagaagccctgacactcatgaaggagacgcatcacggagacggtggtaatcattcaggcgggcgagatctctgccttaaaatcaaaaaagatggtcattactggcccactatgctgcggattgcgaggtctacgcggcaaagtgcgagccgtgtcagagcacggcccgatgaagaacgtccctcccgagatactgtgttcggtcacggtgccatatccattcatgcgatgggccatggatatcgtgggaccgatgcctccttccggatccaaaagatttctgttagtcctgactgattacttcaccaaatgggtcgaggcacaggcgtaccacaaggtcaagtcacgcgatgttgtcgcattcatctggaagaacattatttgccggcacggtcttccttatgagatcgttacagataatgggaagcagtttgtctcgctcattactagaaacttcctcgccaaatggaacattcgcatgagcaactcgactccaagatacccacaagggaatgg

SEQ ID NO: 5780 - DNA, 1613 bp, Arabidopsis thaliana
actctctgtgacaagaaggttagagttcattcaatataaaccttgtgacctgactttgatccttgcggataggtcttctagaaaaccgttcggcatgctgaaagacctaccattcatgattaatggcgtagaagtgcctacagacttcgtggtgctggatatggaagtagagcataaggatcccttaatagtgggaggaccctttttagcgtcagcgggagcagtgatagatgtcagggaagagaaaataagtctcaaccttggaaagcatatcaagttgcagtttggcatcaacaaaactccacaagggtcaaccgaagatggaagaacctctggaaatgatagagcgatctcaggagaaggatatgagactgaaagagtgaaagaacttagaaagaagtctgataagcagaatgaaactatagagaagctggcccacaccattgaggaacttaggagtaagctgaatcagatgcagaaggaagctcaacctaaaggcgggattaacactatcccgagaaaagaattcacttcaagatggtctcaagatacagattaccctccagaagagaaggaagcctattttgaagaaagggggattgagtattctgctgtagacctctccagggaggacgctgaatatgatgatggtatcagagaggattatgctgaccctctctacagttcattttcttcttgataagtgtgaggagtcaagctagagacttaaaacaagctcacttgggaggaagtcccatgactatccttgtaaatagtttttactttcttgttatttttgatttgttttgggtatgtttgtggttctcaggaagaagggagtacgggaaggtaaagtaaaaattcaaaacttttactccactgatggcctagagatcgagtatagtggtcgagtatgagtgatgtttaaaaacctaaaaaaaaattaaaacatcattttactcgaccaacagaagctacaaagtcttccagggagtctttcaagtttacagaggattgtgggatttcctggagtttttctagtgaacggagaatacagagaagagacaagaagacattctgggacccgccgctgaggcccatgtcctccatgcaacagatcaaaggacaggaaatctctcctcatctcttctcctccactcgacgtcaacaccatcactcgacctccatccctcttaactcgacctcatcaccttgttttctcctccacaaccccataaactcgacccatcactctcattcatcaccaccaacaaaccaaactccaaaccactcgaccccatacctcttgaatcaacgctcctttatctcctttactcgacctcgtcacctcctcctcaccacctcataaactcgacttcatttctcccacttctctcccataaaacactcgacctccaaacccatctcctccccacaaccatccctcgatcgccgcttctcaccgcctctccatcatcgctacctgctcactctgtccaaggaaacaaatcgagctctccatttcactcactcgacctctccaccatcaaccaaccaaattgattctcctccattacagcttcactcgaccgccgaacatttatcacatttaa

SEQ ID NO: 5781 - DNA, 1087 bp, Arabidopsis thaliana
acaaaaggtcaagaacactgtgtctgcggaataaaacttagaaaaaacttgttctcaaaaatgtaaagtacatgctacttataggcaaatattctgaaaccctaatactcaaaacgacacagtattgggacggattaagaatgttactcgacctaggtggtcaatttattagtggagtgaatgatgatggtgggactcggccaggatggttgagtgattggtcgagtgaatgatgatggtgggactcgtccatgttggtagagtgattggtcgagtgaaggatgatggtgatactcgacctgttggtagagtgattggtcgactgaacgatgattgtgggactcggccatgttggtagagtgattggtcgtgtgaatgatgatggtgatactcgacctgttggttgagtgattggtcgagtgaacgatgattgtgggactcggccatgttggtcgagtgattggtcgagtggtatgatcgagtgatggtcaggtggtggaggtgatgatactcgactggtggtcgagtgatgtgatcgagtgactctcatggtggtactcgaccaggtggtctagtggtaacgtgaactggtgaagtcttctactcgacgagggggtcaagtggtttgttgtcgtggaaccatctagtcgaccagggggtcgagtgttttgcagtgatcaggtccgcttcttccaattagctcaccaatagctccaaatcacctgaaaacaacacaaatatgcaacatgcatgcaacactatcctaaacatgcaaagtgatgacaaatgatgacaaatgatataaaacagtgatgatatgatgttaaagtgatgacaaatggatgctcaaaataggtaaaatgcacacttatcaaaacaccaaacttagtctttgcttgccctcaagcaaacaattaagaacaagctggaggtgaggtttgaaaccggggactcagagccaaaacaccagataaataagatgaaatgagtgtccaagttgatagttctaagctgcgatacgatggaattctactcaaaaacgttagtcacgccttgttatcaatcaatccgactcttatgctcaacc

SEQ ID NO: 5782 - DNA, 593 bp, Arabidopsis thaliana
gggttggaatcgcgagtgctatgttggggaaagagcttagagttcgaagaggaggttacagggacttctacagaagaaaagattcttgatttaccaccaaaagagccactcttagcagtggtaggtgggaagttttatgcttgtggaatcaaacgctatgatcatagtgcggtctgttggggttttttcgtgaacaggagtacacctgctcctacaggtatcggcttttatgatcttgcagcggggaattacttcacttgcggagttctcacagggacttctatgtcacctgtttgttggggtcttggtttccctgcttctatccctttagctgtctcaccaggactctgtatagacactccttgtccaccaggaactcatgaactcagtaaccaagaaaactcgccttgcaaatttactggctctcacatttgcttgccctgtagcaccagttgccctcctggaatgtatcagaaaagcgtatgacagagagatctgatcaagtttgtgtttacaactgctccagttgtcctcacatgattgctctcaaactgctcttcttcggctccagtggaggcaagaaaaggaagttt

SEQ ID NO: 5783 - DNA, 441 bp, Arabidopsis thaliana columbia
ggctttgtttcaattagggtatacactgtattataatgcagtcttctcatgttttgggggggttttgcaggtcgtgacaagtttggcagacccatcggccaacatcatatttggagctgttgtggatgatcgctacaccggagagattcatgtaacgataatcgccacaggcttctctcagtcattccagaagacacttctgactgatccaagagcagctaaactccttgacaaaatgggatcatcaggtcaacaagagaacaaaggaatgtctctgcctcaccagaagcagtctccatcaactatctctaccaaatcgtcttctccccgtagacttttcttctagtgttcttgtcttcgttttcggtttcaagcatctgaaatgtaacgatcttcaggctcaaatatcaattacatttgattttcctccaaaatgtctct

SEQ ID NO: 5784 - DNA, 465 bp, Arabidopsis thaliana columbia
cacccattgtcctcctctaaaaccattaataaactgatacgtacaacaacttacttgttcaaatttcagacttttctattcaagcattcttacaatgcctaattgtaccactttacctaattttcacatatacgaattagttaagcctggataactataactactaaagaatgtaagaaattaatagtcgcttatggatgaattcttgtcgatagtatttttacattttctccaatttacttttcacatttacacataaatgaacaaagattgttgtaaaaaaaaactaataaatgatgaaagtagcccttataaacctgcagatataacctaaagaattttttcacgagaaaatatgaatccctaaaccctaattaattttttctttaagggcatttaggatttttccctggtcctcggtaataaaaataactcccccaaagccctattagacccaccttgaat

SEQ ID NO: 5785 - DNA, 1785 bp, Arabidopsis thaliana columbia
tgacaaggatcttttcgacattttggggatgaattctcaaacgcctacaatggctttgcacctaaaggactcttctcagagctcataagcagcagtcttagcaacaacacttgtagtagttctctcacgaacgtgcaagagtactctggtgtgaaccagagcaaaagacggaagcttgatacatcatcggcgcatagctcaagcttgttccctcaggaggagacagtaacaagtcggagtttgtggattgatgatgatgagagatcaagtattggagggaactggaagaagcctcacgaagaaggtgtgaagaagaaaagagcaaaggcaggagaaagcaggaggccgaggcataaggaccgtcagatgatacaagaccgtatcaaggagttgcgagggatgattccaaatggagctaaggtaaattgaataataatatagtttagtttagggcatccaaattatagattaacaaatgcattctctaataagtttcgatatatatttaaacagtgtagatagatacgttgctggatctgaccataaaacacatggtgttcatgcaaagcctcgccaagtatgcagagagactcaaacaaccatacgagtctaaggtaatgaatcaaatatatccattcagtaagtacacaagtgtttgagtattgatgagtgaatgatgtttatcagctggtgaaggagaaagagagaacatgggcgttggaagtgggggaagaaggagtggtatgtccgataatggtggaggaattgaacagggaaggagaaatgcagatagagatggtgtgtgaggaaagagaggagttgttggagataggacaagtggtgagaggattgggattgaagatattgaaaggagtgatggaaacaagaaaaggacaaatatgggcacacttcatcgtacaggcaaagccacaagtcacaaggattcaagtcttgtactcacttgttcagctctttcaacaccacaccaaacatgatgatttattatcatagtataatacctaccactttgattttctttctttttgttacaacaacaacacaagaatctgttgataaatagtagtaacattacatcaaagaagattgtatgggctcgtggaaaaaaaagaagaagattgtatgggctttaaaacattgactaagacaaagaaagaaggcccatttaaagaaaaaaggaacgtaacgacaccgttttgggtggataacagttaactgactgaatcagaaaatagatgcccgttatccttgacgaggataaaggggagacactgtatataaataaaaagttgaacaaagatcaaatcctcaatctgtttttagggtttcgagagagagagagaaattgatttttgttgatatttgtgaaatttggtggcgaaattgaagcttcttcatcggtcgttgtctaaaagcaatggtggatggttgatgaatggaggagatgctcttcttcttctatccaataacaataataagagacacgacgctgacacaaacgcagaaccatctcaccaccgtcatcatctcggagatggccgccacactcctctgttcccgatctcgattccgatcggcgatcgactcctattgcttcgcccgtgaggccttctccgatccaatctccttccatctcctcacccttctgtaaccaccaatcatcatccctcctttcttcttcttcttcttctgcttccggattattagtatcattaggttagaatatctgccatggaagaggctgacttcgtccagaaagatccactg

SEQ ID NO: 5786 - DNA, 2004 bp, Arabidopsis thaliana
ccccatcacattaaataaataaaatctcatcttctaacagttaaattaaaaagttttaaaatccacatttaaaagacactagtttctgatttgtcttgaccaaaacctgtaatttatttccattaggggaatgtaagcaaatcataaaaaaatagagaccttatgctataaacttgaattataggtactaattaggtttataatacgtttttttattttttgcttaatctgtacactttcttctttttcttcttctgtttcattgtcttcatgcgactcgtcgagtttcgtcccttcactctcttcacatcaaattccgcaccaccacatccacgtgtctcaacctccactctcctacgtctctccaccgtcgccggcgtctgcagcgtctgcttcatcaattcctcgccgtctctctgaaagaaaaaaaggaaccacctttctctctctgttttgctcgatctgttgtaatttactctgtagcgatcatcagatcgccggcgttttaaaccgccatgaaactctccgacgttggattagacgttgtcaaaactccgagattggttaaattgattgcgtttgcgtttctctcaatctcaacaatttttctcttcaatcacttctcagattccttctcttatccatctcttccttttcccatctcctcttcttcaaacgtcaccgaagctattcaaaccaacataacatccgtcgcggcggtggcaccatctcctccaccgcgtcctcgtctcaaaatatcacctcctccgcttccaccgacagtggtgagaacaggtatcatcaacgagaatggtgccatgtctgattccttcgaaatcggcggattcgatccagattccatcgacgagcttaaatcagccaccggaaattcgtcggttgaggaaaaagaatcgccggaagtcggttttcagattgagaaactcaaattgtgtgacaagacgaagatagattacattccttgcttagacaacgaagaagagataaagagattgaacaatacagatcgaggagaaaattacgagagacattgtcctaaacagagcttagattgcttgattccacctccagatggttataagaaaccaatccaatggccacagagcagagacaaggtgaaatagtgtgatcaagttcttacctttatctaagccttaagtgtaaagtcactaactttgatttgtgctttgtagatatggttcaataatgtgcctcatacacgtttagtggaagataaaggaggtcaaaattggattagaagagagaaagataagtttgttttccctggaggtggaactcaattcatccatggagctgatcagtacttagaccagatctcccaggtttgttttttgattcttcctacctgtttttttggtgtattggctaatctgtttttttttgtgttgatcttatattctcttagattgaaatttgcagatgattcctgatattacatttggatcacgcacccgtgttgctttggacattggctgtggtgtggcgagctttggtgcgtttttgatgcagcgtaacacgacaaccttgtctgtagcaccaaaagatgttcatgagaatcagatacagtttgcattggagcgtggtgttcctgcgatggtggctgtctttgccacacggaggttgttgtatccaagccagtcttttgagatgattcattgttccagatgcagaattaattggacacgcgatggttaatttctggctttttgcttctcctctaatgttatttgagctttagcatagtaagtgactacagcattttgtttctatgaattacacagatgggatacttcttcttgaagttaatagaatgcttagagcaggaggctactttgtttgggctgcacaaccgtttacaaacatgaggataacttgcaagagcagtggaaaggtttgtatattatcaacaaaataatttgtctgctatggagtttactaaaatatgggtgttgctctgcgctttga

SEQ ID NO: 5787 - DNA, 524 bp, Arabidopsis thaliana columbia
tcatgagagtatgagacaaccatttttggtgaagcatctaacttgtaaatgccaatgttatttcaggagaagcctgagttaggtctggttcaggctaggtgggcgtttgtgaacaaagacgagaacttgttgacccgtcttcaaaacatcaatctgtgttttcatttcgaggttgagcagcaggttaatggggtgttcttgaatttctttggtttcaatggaactgctggagtatggagaattaaagcccttgaggaatctggaggttggcttgaaaggacaaccgtcgaggatatggatatagctgttcgggctcatcttcatggatggaaattcatatatcttaacgatgtcaaggtacgattatatcgcgtgttcttgtccagtttcatgaagagcccttagtaaatttgactgaagtagaaacaatctttaggttctttgtgaagttcctgagtcatatgaagcatacaagaagcagcaacatcgatggcactcgggaccaatgcagctatttcgcttgt

SEQ ID NO: 5788 - DNA, 1105 bp, Arabidopsis thaliana
actaaaatgaaacagaataattacaaaaacaaggagtcatgagttattatccataaaacagtaatattaattacagttatcaataagttacatatataaatataagtgagaaaaccatcattgtgcaaaagggagagtacaaggaagaaagagaatatagtgatagacgttctatacgttctaacaggaaacgagtgtacggccaagagttgttacaatgggaaagaaggttggttcaaaacataactcaaaccttgatttattaataatgcgataattgcttcatgctaggtttaaactcttacatatttgcactgcagaaacggatggggaatattgtagatataaaccaagatgttttggataaaatggtaagcattattgctagagacagagttgatgtattgaaaagttggatgaacacaagaagggccggtaaaaaagcggtttactctccggcgactctaagctccgtacgcctagacctgaacgaaaattttgtccaatggtcagaaagttctaggacgtactacgcctgttattctgcctgcctaaaacaaagacgaaaatctttttgctctatacgttgtaagcctgaaattaggattccgtaacttagatcttgatggagctatttcggtactgaacaaagtacaacatacctacctagtcgcggctctattactaattatgctacaaagttgtgcatgcacgcttgtggaaaagaactactggaaattccgagataagttcaatgtcagacgaattaatgtttcatataaacacaatcggtcccaaacgattcggaaactactgttacacatggcatttcgtggattttccacactgttggttttcccataatcagcgtaaagaatacaatggggagcgatgtatgcaatgtatctactattatctgtctagagacatcatactactctcataatgtctaacttagaaactttagttactaaaaatgttttatgaaattgaagatggacatattgtaatatttactctcatccagatatcacattattcattataaatcacaacacatggttaatggtatcgagtattatccacaaaaacaggtttgtaagta

SEQ ID NO: 5789 - DNA, 537 bp, Arabidopsis thaliana
ggtttaatagtgccgtgtggtatgccatttattaaaactgagtaattaactgatctcacagtgcccattatccaatttatccattgctcgctaaaaccaaatagcctcatcgttgtctcaaggaagttccactcaactcgatcgtaatctttgctcacatctgttttcaccgccatataggattgagaaaccctttttcttacttttaatgaatgcatcatttcatgcgctatcatcacattatcattgaccaatcttcccggtatgaaggcggcttgaggatcagacacaatcgcatcgagatgccgttttagtcgttctactaggcattttgagattattttgtataggaaattgcataaagctataggacggtaatcagagagtgttacaaggtttgttatctttggaatcatacagagatttgtgtggttcattgattgtttcatgtatgatgtcctaaaataattttttacctcattaagtacatcttgtcctactatatcccaataagatttataaaacctagctgtaagg

SEQ ID NO: 5790 - DNA, 535 bp, Arabidopsis thaliana
gctagataacaagttagttggaacattctttttgctgaactacgaaagtttggacttgatttatctattgcagcttccagtgggacctctaaagcaggatacatcagatggaagtatagtctctaagttgttggacaaattgatggtcgtagcttttgagcatcttgaatcctgtcaaaatgatggtcgtttggatcaggtatggcaccaaatgggacctcattgacatatgcatctatactttccttaatgatggactcgagaatcttcttagcacttctgattttttttaattattttggcgtaggtgtttgaaagcctcttcaagtcatttgaaaacttcattctgaacacatacaaatcaaaattcacccaggtagtccatatagctatcatattttgcataattatgtacatattcttctagactctagcatggtcgacatgaaatgtctcggtttatactcactttctatatcatctgcagtttctgatattctatgcctgctcactggatcatagaaattgtggtgtg

SEQ ID NO: 5791 - DNA, 893 bp, Arabidopsis thaliana
tatctactgacatcatgaattgcaaaacaactgagagaaagaaccaaacctggtaagccatcctattcaggttcctagccccgtaatagagtcttacgtcagatcttctatcagcgccaaatcctgattcgattagtgagcggatggggctgcagagataagaacatgtgagattacattccaaattgaagacagttacttaattcacatcaccatcactaaacatttttgattgaccaggcctagaacaatagatgattgaaagaaacacctttacttggcataaacaacagatctgatcgatcaccaaagtcataaaaacattgacctttcatacatgaaactctatttcagtattacaacatcatcacagtaaaaaaatagccacaaaattggtccatggcacctttggatagattgaaatcatactggagttcacaaaaaaggtccacaaaaaagcaattgaacccggcatcacagaggattcaccgcaaaatgagtaactaaactagattcaagatacttgagtttgaaagctttgtatctagctaatgctctgcactgaaacctttaaactagaccacacttggatcattgaatacatgaagtaaaaaagacaacttcagcaatccaacaaggtaggagagaaaatggaaaaagctctcacctaattccagatccagtggcgaaaatcaaaacggtgggatattcctcaggaggatcaatcagatcgatattgaaaccattacccatcacagagctaagctcaacggtctctcctttcttcaacccgcagagaatctccgcggtagaaccagcgatgctcttgaccaagaattcgaaagcccacgagaagacgcaaaggaaggaggagaagcgattgccataaaaga

SEQ ID NO: 5792 - DNA, 518 bp, Arabidopsis thaliana columbia
gaatcagttcgatcttttaattcgtagttgtggaattcatcagctgatagttcgtcaaatatgtttgttttgttgcagggattgacatggctgcttcctgagaagttttctgcttcagagattggaccagaagcaggttttgtgatactttggtaacattttactgctttcaatcttagaataactgtttcctttatccctgttagctcctaaagtctcttgtctgaataatgaacactgtcctatactcagttttatcggttcttctcaaattacatacttcacttgtacctcctcacatgtttcgtgtcctaagtctttaacattagaaccttcaagttccaaagaatgtttctttctttcttcttttgtcagttttgtgttcatggaagtgtgattgaagttttttggtaatcttctttgtagtaacggcttttttgggcatattctcaacgataaatgaacacataattgaaaatgctccaacacctcgtggccatgttggatctccgggaatg

SEQ ID NO: 5793 - DNA, 1659 bp, Arabidopsis thaliana
ttgctctcgttgagatcaaagcaaggaacggatttgatgctttccacattgctgcaaagcaaggagatctcggtacgtgtaaaaccctttgaaaattgccactaaaaccagttgattgcgtcttaagcattagttcttttggacttttacagatgtgttgaaggttttagcagaggctcattcggagttagcgatgacggtggatctatcaaacactacggcactgcacacagcggcaacacaaggacacactgaagtggtaaactttcttttggaactgggaagcagccttgctggaattgccaagagcaatggtaagacggccctgcactctgcatcaaggaacgggcatgtcaaagtcattaaggctctcttggcatccgaacctgcgatcgcaataaggatggacaagaagggccaaacagcccttcacatggcggttaaaggaacaaatgttgaggtcgtggaggaacttatcaaagcagataggtcttctatcaatatagccgacacaaagggaaacacagcgttgcacattgcagcccgaaaaggcagatctcagattgtcaagttgctattagccaacaacatgacagacacaaaagctgttaaccgatcaggcgaaaccgcacttgacacagcagagaaaattggaaatccagaagtggctcttattttacagaaacatggtgttcccagcgccaagaccattaagccatccgggcctaaccccgctcgggaactgaaacaaaccgtaagcgatatcaagcatgaggttcacaatcagcttgagcacacacgcctgaccagaaaacgtgttcaaggaatcgccaaacagcttaacaaaatgcacactgaaggtcttaacaatgcaatcaactcgactactgttgtagctgttcttattgccacggtcgcttttgcagcaattttcactgtcccggggcagtatgtagaagacacaagtaaaattccagatgggcattccctcggggaggcgaatattgcatcgacgactccgttcataattttcttcatctttgattcgatcgcactcttcatctccttagcggtcgtggtggttcagacatcagtggtggtaatagagagcaaggccaagaaacagatgatggctgtgataaacaaactcatgtggcttgcctgtgttctcatctctgttgcctttttggctttgtcgtttgttgttgttggtgaagaagagaagtggctagccatttgggtgactgctatcggggcaactataatgattacgacgttagggacgatgtgctactggataatacagcacaagatcgaagctgccaatttaagaaacattagaagatcctccatcaacagtatatctggatcctgggggattccccagcttacggattctgatattctccagaacgagtgtaagaaaatgtatgcaatctgacttgacgatactcaatccgttttcacatttatgtacacggcaagaacttgatgtacctttttctgatacggttgattcaatgagttgatgcgggtgaagcactggtatggaggagttacctgagatgcttcgaacaggagaaatcgaataaggattagagcagaaaggaagagagtaacattaatgtaacaccgattctaaatgggggaagaaatgtg

SEQ ID NO: 5794 - DNA, 844 bp, Arabidopsis thaliana
gaataatgatttcttgttctctttgttgacacataatttattaaatgaaagctaagattaatgattttgggtttaattaatttgtactcttacataacaaaataggatgtaatcataatattgaaattttcgagtcacatcattatcatgtacttataatttgatattctccattgaccattgttacatacttaatttacatttgaaatatcattaagaaactataatacaaataagttcatagtgttatttggaaatatttgtcaggatggacctacgggaaattggatgctaatgaattctggtgcgttagttggatattggcctaaggaattattctcacacttaggattgggagctgatacaatccgttacggcgggctaacggttggaggtgctccgatgggcaacggaaagtttccagataagggaaatgatctaagtaaatcctcgtattttaaagacatgaaatatgttgatgccaatttcaagaacaatcccatcagtgagctggagatgattgttgatacgccaaaaccctactgttttaggttgaattatttgaaagatcaacaaaccattacatatggtgggcctggtccttgcccttattaaatctcttctttttatttataaacaatatcaattctatagtgtttttctctagtaatttcttatctattttatatgaacaatttgctttcactatcaataaacttaggaattttgttttctcgggttctgtttagatgagtttgtatgtataacttctcatattgaatattgattataggtatgtgaaaactatgtggatattaagacgtacactacattttggcttttg

SEQ ID NO: 5795 - DNA, 669 bp, Arabidopsis thaliana
tgtttctgcttaagttcttctgattggacatagtatgatggaatgaaggatgtatgtgtacaatatggttcactttaacaacacatcaactcgatattatagtcttttgtgctgtcataacctgatacatgcagatatagtcagatacatatttggttgtaaggttccacgttgaagatacacagactgttatttgtttctggatccagttgtacattgaaatcaatatcttttttctaatgcatatagggtgagatccttactcgcttacgtttatgtcaaacttttcagactgatagtgagcatcttgtatcgcacgtcctccctttgcttctgcgagcctacaatgataacgatgtccgcattcaggaggaagttcttaaaagatccacatctgtggctaagcaactcgatggtcaggtgatgctcaatgctttgttttaatgttttattggaataatatgtttttctccgagaagagtagaatcaatttttgatgtatggctctgtggtattgcagagtagtgtcggttaattatgctggatgagttttctaattacattttttcccgtctttctttatttaggttgtgaggcaagcaattttgcctcgtgttcatggcttggctctcaaaactacagttgctgcggtatgttatgctttgttag

SEQ ID NO: 5796 - DNA, 559 bp, Arabidopsis thaliana
aaaacaacactaaaacaaaccacgaaaagctccgaagagtactaaaccaaacaaatcaaacacctacattggatcattatcaccacccactctcctaaccatgatcccattcctaatctcatcttctgtgtacatataagccaaccctccgtgactcgtcggatccaccccagctatctcatcctccgccggtatcctcaacagtttcagcttatgcaaaataaaaaacagagtccccattgtcacactaacccaacccgtaatcaccaaaatctgaacgacgtgcgccgcaagcaacctacctcctcctcccattagcaatccgaaaggcctattcgggtcgcctccaaagatctcggcaatgtatcttttctccgcgaacaacccggtgaaaataatcccccacgcaccacaaccaccgtgaagctgagccgcttccaacggatcatcaaattggagcttttccgctagtctattgcatcccatcagcacccatgcggctacaaacccacatacaagcgcacgccacggttccacaaccgaacatccgctagttata

SEQ ID NO: 5797 - DNA, 597 bp, Arabidopsis thaliana
ctaaagtaatttcattatcatggaagttcgtatgtctggttctgttgccgtgacacgcgccattgccgtgcccggattgctgttattactgattatcgcgacggcattaagcctgctcattggggcaaaatcactccccgcttccgtagtgctggaggccttctccggcacctgccagagcgccgactgcaccatcgtgctcgacgcgcggctgccgcgtacccttgccggtttactggcaggcggcgcgcttggccttgccggggcgttaatgcaaaccctcacccgaaacccacttgccgaccccggcttgcttggcgtgaacgcggagccagctttgccattgtgctgggtgcggcgctgtttggttactcttccgcgcaggaacaactggcgatggccttcgccggggcgctggtggcctcattgattgttgcctttaccggcagtcagggcggcgggcagttaagtccggtgcgtttaaccctggcgggcgtggcgctggcggcggtgctggaaggactgaccagcggcatcgcctgcttaatcctgacgtctacgatcagttgcgtttctggcaagccggttcgctggata

SEQ ID NO: 5798 - DNA, 582 bp, Arabidopsis thaliana columbia
tccgtacgcttgaccacacactgtttggaccgcgctcgccattcctaactagtcaatttgattaacaaaactttttaaaactcaagaatgttcgataaggagaaaccgatcaacatatgaagtgtacaataaatatagaattaaacgacgttgtttcgtgttcttcactctgttttttactttatgaactcaaatgtgccttcgtaccatgataccgtaagctaggccttggattccgacggtggcgatggaagcgccggcgagctgaagagaaccgagatgaccggtgaacatgacggtgacgaagctgagcatgtaattcagaacagagaccactatagaggctccagagagtgtccatagaagctttgactcccacactgccagctttagcaccaccgtggtgtcactgtggatccacgacggcggagaaactcctctatctctggcgaagaccgttcagttatctgagaatccgagtggagtcgtgtcaataacggctcgtatgtctctgtggagctcatggtccgtttattagttcctctgttttttttttccttttcttttggtgttgttgttctg

SEQ ID NO: 5799 - DNA, 376 bp, Arabidopsis thaliana
gtctctagcagcaagagcaacgatgtcagcgcaagacacaacgcccggacaaaaacgttcaagctctgatttggcttcgtctataacatcgaaaccagccacccccgcgttacccgcagcaaacctttcgtcatcgttcccaccatgcttgattagtattgacccatcacaaccctacaacatacaaccaaaccaatttatgtcactagctagttataaaaaaagagattttacttcgttttttttgctttgcattggacctcgacaaagcaatcgtggaactggagacggagtaagacagcagccttccctgggtcgttggtcaccgcctgttgaacaacatcacgaacgattgactctgctgatggacatgttt

SEQ ID NO: 5800 - DNA, 858 bp, Arabidopsis thaliana
cagtcgactctcatagaagatcccccaataattttctaatctaatagaatctttttataacttgataacgacaaccattttaagttattgatattatattgttctgtttcatctttctttctctctttttttttttttagttattgttgatacaaccttgatttcctaacacaataaagtagatggggctggctctggctccactattgagtcaaaagttaaaaaagcatatattggttggacatttaattttatatttctttagtagttaacctaaatttaacccatggattaatgtatacacacggtgaagttatagttttactgattttattatttttccttaaggcatatcttccaagtgaaacaccggagctaatcaaagagctaagagaagaagagctaaagaatctaagaggcaatgagaaaggaggagaattcaaagaatgggacagagtttacgactacgcttattacaacgacttgggtgctcctgacaagggtcctgactcagttcgtccggttcttggcggttcacctgagctgccttatcctcgccgtggcaaaaccggccgtaaatccaccaaatcaggtagtcaactcaacatttcaaacttacataccacatagcaaatcttgatagttacttgttctaaacggcaccgttttttatcagaccctaagtctgaaagcaggctggctttactaaacctaaacatatacgtgccaagggacgagcgatttagccatgtgaagtttcagactcctcgcttatgcctcaagtccggatcaagtgcttgccctgagatcgctctgtttgcgaaagaccacaacgagtttgactcctcgaagatgttt

SEQ ID NO: 5801 - DNA, 517 bp, Arabidopsis thaliana
cgttcccagtccacgagagaatcactctgccaacttggttgcgaaggatctggctcttcgtcgtgcaatgcaaacactgatgtgtaatagttgattcctacaaaatcagctgaatttttcaacttctctttctgtgcctctgtgaatttcggcagtcgatgtccgatgtgatccttcattgattgtggataatctccatatgtggtcggatgcaaatgcctgtggagtcagaatagtatttgtcatatattttaaattttgatactaaagggtaaaatagtaaatgatattttttaccatcccaatatgaagtcaatcaggccagttacaggagtttcgtgctcttcatccgagagctcatgagcctcaaaccaagctggactgtgagcaatcccaattttaccacctttgcactagaaacaattagaaataaatgtttataagtagtactcgttcattaaactacgtaaaaatattcacaatagaatttaaatgaggctagtttatgtttatatag

SEQ ID NO: 5802 - DNA, 932 bp, Arabidopsis thaliana
cagtactctttcgtttaggtgattattctggttagatattttaacttgtccatttttctttaataggattcgacctacaagtactacgagatcagcatggttgagtcagatccttctgatatgcttttccacccgagaatcaactggatctgcaacccagttcacaagcaccgtgagctcagaggacttacctcagagggaaagaagaacagaggtctccgcggaaagggtcacaacaaccacaagaaccgtccatctcgcagggctacatggaagaaaaacaactctctcagccttcgtcgttaccgttgattgccttttgcttttattattactgttatcatcttctaggttccatgttgttgcacttttatctctctcaggatgacttgtttttgcaaattttggagactatacaattatgctttgaacctaaattttatatttgctttgcttttttgttgatctcagtctggttttggaatatatcgaggcccctttgcaatccaaatcccagtaacaataaaaaatagcatttatttctaacttaaatacaaaacataaatgtccagttctaagagattattagtagttattttctgcaaatatctaagtgtttacacttggttgttaataaaattaagatgatctgattattaaatattctttggtattatgtttgaaatgatacagactgagcaaaattgattatcctctgtcaaacgttagaaaaaagctttgctattatgatggatatctttgacacaatgtctactggcaaaagcaccagttactgcatattatgttgtatttggaaactaaacacttgttttcatgtatgtgttgtgtttaatcatcagggaatccaaggaacctgtcgataatgcgagcaacaggagttccatcacctggagtatactgaaccagagacc

SEQ ID NO: 5803 - DNA, 498 bp, Arabidopsis thaliana
caaacgaaaattcaacgatccgaactcattcgacaaatagattgagtcaatacggagaagaaaaaaaatctcaggaagcgaagagagagtagagaaaagttccaaaacctcagcgcgaacgaggatgaagacgagatagttgttgaaatcaggaaactgagagaagtgttgaagctgcttccaaatctgagacttgtcaacgacggaggaaggagaaatctgttgttcgagaagagaacagatctcagcgagaccatcgtctcggggttgccagaccaccgccgtcgccgccatgattgttgtggcaaaaaggtaaatatgactcgtgtgagagggcaaaagaatatgattctttggacaaaaaaaaacgcacagcaaaaaagtttggaaaagacagggacgacgacgaagaagaagagaatggagagacgctactaagttgggttttgttgggttttttgttctgttcaagttttctcttatgggctttttatgagt

SEQ ID NO: 5804 - DNA, 899 bp, Arabidopsis thaliana
aacactaaagaatctttaagaaactcctaaacgaactatgttcagagaatagcaatttcacatcatacaaaacgaattaaacatcttaaaagatctttctttgaaaccaaaaagcttgaaaaagacgaaccttgaacgaggaggagatgaaccagcatgagaagcagaatcagcagcacgtttagaaccaacagaaggaaaatccttagccgtcaaaagccttccacgctctccccacgcgccaccaccacctgatttaccaatcttggccgccgttccaccgccaagactcagccctagaccaagctcaagctcactctcacctttccccatctcaagttcagtaatcatcagagagaccacaacaacaacaacaaaaacccactaaaagaaagagagccctagaatccaaaatcaatccaaaagaaagaaagagtcttttgaaagtcaagaaggcagagagagcaaaaaaaaacaacctgggaaaggaagacaaagaaagaaagagagagagagaaggaaacaagaaaacaaacaaacagaaagagacagagagaggattttaagggtttcttgaaatctgaaagagagtttcaagaattgaggaagaagaaagagagagaggattaggtggtggagagagtgatgagaagagtaggacccatatgtctggtagtggccataccaacaacaatgccattctttcttcttctcttttaccctttttttattccctaattttattattaacaaagaaattctttttaacttttcttcccgacattatcaaacttgtcgtgctcccgtttaccttattgttttctcctgtgtttataaaaaaatatgataaacaaaacaaacatatcttattaaactatttaccttacccgttagatgtt

SEQ ID NO: 5805 - DNA, 522 bp, Arabidopsis thaliana columbia
ccagaaggtctggtcaagcaagtacagaacgcgacaaggcaggccggaaccgaactagcaggggagaacgcgctagaacgatatgactcaagcgcattcggacaagtggtagcaacaaataggtcagattctggaaatgggttaaccgcatttacttacctaagaatgaacaagcggttatttgagggtcaaaattggcagcagttagtggagtttgttaagaacatgaaggaaggtggtcatgggaggagactctcaaaagaagacacaactggaagtgacctttatgttggatttgtcaaaggcaagatcgctgagaatgtggaggaggctgctttagtgtaatttcccacataggtacatacatatagtgtggtgtttattgtattcctgtctgataaataactagagagatcaaaccagtaagagtgttaaagctatagatttgcacaattctgggtcagagtcagagcaaagagaagcaaaatcaagatgatgtacacttagatgtttcctatgagt

SEQ ID NO: 5806 - DNA, 849 bp, Arabidopsis thaliana
taaagcattcatatccgggtcaagagaagtaccgataaccacagtcgcgttgtcggaagcaaatgcacggatggtgttacctaccgtttcgaactcatccagacgcaggtcgaagcccgccgtgatgttaaccagcacgccgcgccgccagacaggtcgatatcttccagcagcggagaagagatagccatttcagcagcttcttccgcacggtcttcaccgctcgccacgccagaacccatcattgcgtagcccatctcagacattacggtgcgtacgtctgcaaagtccacgttcatcaaacccggacgagtaatcagttcagcgataccttgcacagcgcctttcagtacatcgttcgctgcgccaaacgcatccagcagggagataccgcggcccagaactttcagcagtttgtcgttcgggatagtgatcagagagtccacatgcttggacagttcagtgatcccctcgtccgcgaatgccatacgcttcttgccttcaaagttgaaaggcttagtgacgacagcaacggtcaggatacccaaatcttttgccacttcagcgacgactggtgctgcacctgtaccggtaccaccacccatacccgcagcaataaagaccatgtctgcaccttccagcgccgcacgcaatgcatcgcgatcctcagtcaccgcattgcggccaacttctggattaggccagcgcccagtcctttggtgataccgctaccgatttgaatcgtctgtccaaccgctgttttacgcagcgcttgtgcatcggtatttaccgcgaagaattcaacaccttcaatgcgctcgcctttaaagcacactggcggacgttact

SEQ ID NO: 5807 - DNA, 493 bp, Arabidopsis thaliana columbia
gaaatagtccaaattcagaagaatatgccaaccttcacggtttgaataatgttgaggacaatgaagatgtcagcgaggagagtgaaaatgaagatgatggagaagtttttactgttgacaagattgttggtatttccttcggagtccctaaaaagttattgaaacgtggactttatttgaaggtattgttgctctgcttgtacaaatttcacattacatctcatggtttagccttgttatatagttaatcatctctggtgttttgatataataggtaaggtggctgaattatgatgattctcatgatacatgggagcctattgaaggactcaggtgagcaaaacattaagaatgtttgcattaaagttatatatgttaatgcgttgttaaaatctctaaatttgtccttgaacagtaattgccggggtaaaattgaagagttcgttaaacttggatataaatctggcatccttccgttaccagtatgtatttt

SEQ ID NO: 5808 - DNA, 612 bp, Arabidopsis thaliana
gaagtgcggagcactgatccagctatacaagattcttctgaaggctcctggtgtatatggagctagattcagcggtgcaggtttcaggggatgttgtctagcctttgtagatgcagaaaaagctgaggcagctgcttcatatgtgaaggatgaatatgaaaaggcccaacccgagtttgctaacaatctaaatggaggaaaacctgttctcatctgtgaagcaggtgacgctgctcgtgttcttctctgatcaatcctggagtttttggtttcttccccacttaaactcgatttttttgtcccttatatctctcacgcttattgattctttgcttgtttatctctttttgatcctgtctgagaaattctctggtctctttggtcggagtttcatcattgcttgatacattttttttgctacaaatacataatgtaaatcattctctaccgttttcgagtcgatagaagaatcgcaaacttcaaaaatgtgactaacatttctccataaatttgttaaattttcaacaattggtgaatttagttctgtaattgatctaacaaagacactatacaagtatgaaattagaaattgaaatcgaaagttagttatta

SEQ ID NO: 5809 - DNA, 728 bp, Arabidopsis thaliana
atcatcgttgttattgcgctcatcttgtagacccaatagattctccccccaaaggtacggcctatctgaagatgaacgccgatgattcctccatgcccttgacctgtgggatcttgatccaccaccactcccactagcgctagaacctccattgtctagagagccaatcatctgaaacaatagtaaagtggtccaaaggtcgctcccaccatttcccgtttccctctcacctgcaaacctatctccgttttctataacataatctcctactacaacagcaccgggcatggcagaacggattgcactgactatatctccatactccctctggttctcaagccgcctccaagctctctctcttgatggatcagtgtctgaaggacgagttgttgggtgagtcctcctggcatggcggcgcagatcctggtagttgccagtaaatgagcaggattctcgggagcaacttcggttcttatgatcaagatacgttcttacttcttctacaaccttccatcctaaaacagtaccccggcatagaggacatttcaaatttgtgatatcttctgactcaacttcttcctcaactctcctcctcctcctcagtgattcggaatccaagaagagctcggtttcagactcacggtgaaaactgcttcgactggctgtccatgctcgtatagagattcgttattatgttccttgaaccaagttcgctcgggagtagggca

SEQ ID NO: 5810 - DNA, 1463 bp, Arabidopsis thaliana
ggtacacctagagtaaccgtcattccccatccctgagatatccacattgaaaaagtttttaaaaggcatttctatacaatacagtgaagcaaaatgcaaacaagttgagagagcaaatagaacataaaatcttacatccgagcacgattgtaaagcagttgtagctattcctgtatcaccaacacattcaaatgagaaatctgcacctcctcctgtcattcttttgatcacctaaaatcccaatggttcaaacttttacaccagcaattactacaatgtaaccaacatgggaacaccattttatcgaaaacaccggcttttgttatcctattataagtacataggaagatactgtaattacctggggtataggttcagagaggtcatttgaattgatgaaatccgtgacaccaaatgtctttgctgtaacaaataagaaacactcaaaaccagtccagaaccgcattatatcttactgccatgatataccttgttcagccttagcgggatttatatcaaccccaagtatttgagctgctcctctaagtttggcaccttgagcaacctactcataggagattaatcccacatcagactccattaaaacagaatcatcaaaacttctgtatctatacttacagaaagaccgacagttccaagaccaaatatcacaacacttgaacctttttgtacatcagcaacattccatgctgcaccaagacctaaatttacacccaagattctcagtactgactatagataattgttggcatttcatcactttaaaaacattattttttaactacctgcagctactccacagcttagaagacaaattttatgcagaggtgccagtggatcgactttgacagcacagccagagtgaaccacagtgtactcgctgaaacttgaaaccgcgcagtaatggtaaacaggtttgcctttgatggagaagcgtgtcttctgatcactatgcatcaaacctttcctctccattccaagaacctgacacatgttacttttcccagatatgcaatgccgacatgacccacattctccagtgaatacagcaagcacatgatctcctttttcaaactcagttacaccttctccaatgctctccactatactgcagaaacatacatggacacaatgataggattcaaaccagtaaactctttctttcactcaattcacaaagaagtagaccatagaagacacttgaataatgagcaaagtctctaactctcgaccaatgcctaaaccaagaccctagacaaatccagaatgcaacgcattctcctcgctcttctttaaaccttcacctctcaactaacccacgaaaggtctgctcttgagctggcaaatctagttataatagtcctataccaaagactgcaacaatggtgctacatcacactaagaatgacaacagaacactcaatttcacaccacattctaca

SEQ ID NO: 5811 - DNA, 532 bp, Arabidopsis thaliana
agaaggccatccgctctcggaaacaaccactgggagagatccaccgcctgagcgttcaacggcagagtaaacaacgtcaagtaaagcgtcaaagaggttttggtagccacgagagccgtcccatacgacgacggaaggagaagtgaagagagcgtaagagagagatatgtcacgtggattgtcaacgtagctgaagtaaggatagatgttggctagtaacgctgagttcgtactcgtaagaaacctaattagccacataggaagaaattaaataatcattccacaagtaaccagaaatgaaaaatattgggaaataactaaatctaatgaattttggttatttggtttggttggaaaattacccgatgacgggatcgatataccatctaacgtcaccacgaaactctccggaggaaggagggaaagagtttccaatcaaagtcatatcaatggcggtagaaactttaatacgatcttgaagatttgcacctcttagagcatcgtaaacgttacgcatggcagggagcacaac

SEQ ID NO: 5812 - DNA, 743 bp, Arabidopsis thaliana
ttcattccttttcagtccttttcctcttcttcttgccccttgacgttgtacctgtctctaaactaatgacctcatcatcagatttgtcgtcttcctcattctgctccattgtggtgttagcttttccatcttcattcggttccattgtggtgttgtcttccccgtcttcctgctgcttctccattgagctgtcttttgtagatcgcagtccaccacagccacatttgatcagaccctcgaataactgaaccatctctttcttcaacgtgcttgctgtttctttgtgttgctccacaatgaattttttcaacatctctatagtttcttcgtcatctttaattacagcagcatcttattggttcttctcctcatgtcctcctctcgtagctggctctttcttgactccccctctcctagctggccctttttgttactccacctcgccttgtaggcgctttcttaacattctctgggataagaggctccagtccactagtctctgtgtctccacctggccattctgactcagtaaactcatgtccttcaattagcagcttctccatataatcctccttctcatctatagcatcgtcatcccacccaaaattcatgcattccacgcctcatcaccctcaagcgtgtaagcaaccttcaactgaaaaatacatgtcttaaaacaatgtacaaaaatgtgataaattagtgtacaacattaaaattttcacttacaaagctgtacacca

SEQ ID NO: 5813 - DNA, 576 bp, Arabidopsis thaliana
tgacgtatcttccgctatatcaaggggtctccttcttaaggtcttagtattactaagtctccatcaacgaaattggtcgcttattcggatgcggactgggctgggtgtccaaacacgaggcgttcaacttcagggtactatgatttccttggtgatactctaatctcttggtcgtctaagcgacaaggctcggtttcaagatcaagtgcagaagcagaataaaaggcagaggcaaacgcggtggcagagacttgttggatacggaacttattgttcgagttacattatccgttatcgcaggcaatgttggtgttttgtgacaatgtgagtgtcgtatatctctctaccaatcttgtcaagcatcagcgaaccatgcatgttgaaatagacatacactttgtgcgggagaaggtcgcaaaaggcgaggttcgtgtcattcacattcttgcaacacatcaatacgcatacattttcactaagggccacattacttccctgttcaatcaattcaagtcaagccttgacgtcattacaagaccgatgctaagactgcgggagggtacaggagataggata

SEQ ID NO: 5814 - DNA, 522 bp, Arabidopsis thaliana columbia
acaacgcatcatctcccaaacaccagactctctctgcgatctcattgtaccggttgtcacatctgctcttgtataaaacctgtaatccacggaaccaaagtgatgaggttagagaaacaaactgattgatagtatgtaggaggaacctgaagacaactacattcctagaacttttgagattacttcaaaaaaggccagatcaaacaacacacttatatacgaccatagttcgagcaattttcccttcttctggttatcaaataagcggattccattccagaaaacaatttaaaaggaaagaccaagctgaaggagccgagattctaccagttcctgcaacctagcaccggagaaatccattttccgcctggaattcagctatttctttttggagttcatccacctaaacaccaaaccacaggaattaaaaaaatgaaaggcagccacgcaagtttttaagttacgccagcaaatattgcatggataactgatcaattatgcgggaaaggtcggatgatatgt

SEQ ID NO: 5815 - DNA, 578 bp, Arabidopsis thaliana
caagtcagaatttctctcagtttttatttcgtttcagaagttggtagagaaccagctaaacactaagatcaaagtatttcagagtgatggaggaggagagtttgtgagcaacaagttaaaaacacatctcagtgagcatggcatccatcatcgaatctcatgcccctataccccacagcaaaacggattggccgaacgaaaacatagacatcttgtggagcttggattgtctatgctctttcatagtcatacacctcagaagttttgggtagaatccttcttcactgccaattacatcattaatcgcttaccatcctctgtcttgaagaatttgagtccatatgaagcgttatttggggaaaagccagactattcatctctccgtgtgtttggttcagcatgttatccttgtctcagacctctcgctcaaaacaaattcgatccgcgctccttgcaatgtgtgttccttggatataacagccaatataagggatatcgctgtttttacctccaacaggcaaggtctatatctcaagaaatgttacttcaatgagtctgaaaaccattcaaggaaaagt

SEQ ID NO: 5816 - DNA, 587 bp, Arabidopsis thaliana
  unsure (1)..(587): unsure at all n locations
cccgtcttcctgctacttctccattgtgctatcttttgtagatcgcagtccaccacagtcacatttgatcagaccctcgaataactgaactatctctctcttcaacgtgcttgatgtttctttgtgttgctccacaatgaatttcttcaacatctctatagtgtctccgtcatctttaattacagcaacatcttcttggttcttctctgcatgtcctcctcgcctagctggctctttcttgactccccctctcctagctggttctttttttactccacctcgccttgtaggcgctttcttaacacaccctggggtaagaggcaccagtccactagtctatgtgtctccacctggccattctgactcagtaaactcatgtccttcaattagtagcttctccatataatccaccttctcatctacaacatcgtcatcccacccaaaatccatgcattccacgccctcatcaccctcaagcgtgtaagcaacttcaactgaacaatacaggtcttaaaacaatgtacaaaattgtgataaattggtgtacacattanagttttcactacaaagttgtcaccatatggtta

SEQ ID NO: 5817 - DNA, 543 bp, Arabidopsis thaliana
atgcctgcatgaaacagtaaagagaagcaaaacaaaatcatgaatcaaaaagaccgtacctgaacaaagccagttagacctccaacaaagagacggttatacctacggactttatcaagaacctccttcacctcttgctcctgacgctcttgcaaagatggttctggtgacagcttcgtgatgtgcctaacacacatgggacacttgcaaggcctagatattgcagcatagttccagtactgcaagatgcaatttcctgtaacaaaatcagcaaccggtttaagaaactttcagatctttttatgacattgcaaacaacactccatagtaacagagcatggtttaaaaatcaacactttcaaaagttaatcagttgtgataaatcattcttggctaccaaaaggaaccctaaaccaattccaacccaaacaattctccaaatttacctctgacgaacagaaatatccaaaaagacacaagcttgatacttcaatgtagatgaaatggctcaagagaatcaagaagaagaagaaagatgaaaag

SEQ ID NO: 5818 - DNA, 1036 bp, Arabidopsis thaliana
gtctggttctccgttcatgagaaaagctagtgcacttggaacaaagtctcttacgaaaacctaaccaacattttgaacaaaattgtaataacagagtcattacaaaacagaacaaggtttaattatgaaacacaaaaacaatccaaataaccaaacctgatcataattcaagacttcctcagtagcatggtcataagcagcgatagtaccaaccggttggccacgaaagtaaaccaatgatcgtctcaaagcatcccaagcctctgcaaccataggatgtggctcaaacgagtttctagccgaagacaccggagtttcccatcctccgggagaattaacgttgtcgaagattcccatttcgctgaaggacctctcgtcaaacgatcttttccgttcaatatttaccctcggccggtcaagtaaccgagccaattcgtctaggtcggatatagagcttgaagagtttactccttccatgaggattctttaactttgtgtttctgtgtgtatagatctggaacaatggataattataaatgaattaaaacgtatttgtttggacatgatgattaaggaacattaacgtaaaaaatgtaacggaaatattaagattggacttatctagattaaagtaattaacattagttatcgtcataactactgttcttatggatgtaacaagaaatcgttacaacaaaatgtcgaagctcatctaagaaggtaaggataaacataacggaccttaattacgacggagagataatctccgggcaaacaaatcagccggtgaagaaaaatgtgataaatatagaaagaaggaaaaaaaaaagagagagaaaggaagatgttagatataatatagaggggagattagagacgactacgaacgtggaaagtctctcatttttcttctctcattgactgtggtaatggtggagaagagagagatgaaggcatgaagggtcgtagagagcaggtgattggagcgtggcgttcacgcgaagaaaacgacatcgtttttgagtctgacatgtta

SEQ ID NO: 5819 - DNA, 1151 bp, Arabidopsis thaliana
gttcaaactctctgcagatttgtcttgtcaagacaggtaattctttgccgttcatatccgccctggaactgaggcttttgagaaacgatacttatgttgtccaagacgtttccttgaagcatttatttcggaggtactatagacagtcagatcggttaatccggtaagtgttgcactatatcataatctgtaatttgatgttgatatacaaaatttccctaaacttagcaatatatagatgcatgaagacaatacaagaaaccttcaaatgtctgaccaacatcaggaagtttcctattaatgctcttaccaatgaactttgacttatataatagacgtattgaaattgtttttaatgatcgtaatgtctttcatagaccagttgtttgtgaactggtgaattagtgatgcatggtttatcaatccatgtagatgtgttttctgatgtccgcaggtatcctgacgatgtctatgatcgtgtttggtccccattcttcttaccggaatggacgcagataactaccagtttagatgtgaataactctaacaactacgagccaccaaaagcagcattaacatcagctgccacacctggagacaatggaacgcgattgaccattatttggactttggataaccctgatgagcaaattcacctgtatgttcactttgccgagcttgaacctgttggggaaaacactgacgaggccttgagaactttatttacaaggaccttttactttgtggtgaatggaaagattagttatgatgagagtattactcctttagacttggctgtaagtactgtagagactgtggtgaacaaatgcgatggcggtaactgcagtttgcagctggtacgcagcgaagcgtctccgggagtacgtgtacctctggttaatgctatggaggcattcactgcaatcaagtttccacattctgaaacaaatcctgatgatggtacgtacgtatatatctcaactacttttactaaaattttgggatatatgcctcaaactattatatggaatgctattccattagctcgaccagttttctgtagtatcatattaattttctacagatggtaaagcaagttaatgtgaaccaaattattgcactttatctaacagtagtccacatacgagaca

SEQ ID NO: 5820 - DNA, 414 bp, Arabidopsis thaliana
caagtaaacatggagaacacctgtctcgaggattaacagtgggcttgaataatggtggcagtagtaatagttacaacggaaatggactactttctggacctagcattgggaatagctttcagagaactgggtttgataaggattttccttctcttggagctgaagagaagcaaaatgggcaagatgttgtacgagtctcatctcctggtataagtgcagttgttcagaacttgccagttggtaactcagctttgattggtggggaaggttggacgtctgctctggcagaggttcccaatgtcatcgagaaggcttgtactgggtcattaacgtctccaaaagcatagagcgtgttagcgcgggaacttctactgcgccaagtggtcttaacatggctgaagcattggtgcaggc

SEQ ID NO: 5821 - DNA, 540 bp, Arabidopsis thaliana columbia
  unsure (1)..(540): unsure at all n locations
nnnnnnnnnnnnnnnnnnnnnnctaaagtaggaagatttgaaattgttttagcgcacggcnagtttcatactatggcggtaaaaaaatttgcatggtatttaaggactcactatgttttccgcattgcgccaccgtaccgctgccctggcgctcggcgtatgctttattctccccgtacacgcctcgtcacctaaacctggcgattttgctaatactcaggcacgacatattgctactttctttccgggacgcatgaccggaactcctgcagaaatgttatctgccgattatattcgccaacagtttcagcaaatgggttatcgcagtgatattcggacatttaatagtcggtatatttataccgcccgcgataatcgtaagagctggcataacgtgacgggaagtacggtgattgccgctcatgaaggcaaagcgccgcagcagatcatcattatggcgcatctggatacttacgccccgctgagcgatgctgacgccgatgcaatctcggcgggctgacgttacaaggaatggatgat

SEQ ID NO: 5822 - DNA, 488 bp, Arabidopsis thaliana
ctaaagccgggcgtcggtccgggtgcggcatggttaaggcattaagtttacgtgccagcgccattttttcgcgtttctctacactttccgcagtctcttcatacagcaaggctgcctcgctggcggggcgacgctgttcagtaatcgcctttacaatcaccgtgcgttcgtcatttccctggcgcagagtgagcgtggcattcagctcgacgattttgctcggcttgctgcgctgcccgttgtaatgcaccttaccgccttcaatcatttcacgggccagcgcgcgggttttataaaaacgggcagcccatagccatttatccagtcgaacctcaacagcaggtttctctttcatggcgtctccttcacattagcgaggggatcaggcggcggtagtcattcagtgacggatggcgttgatactgtttctcggcaatcccggaatcaggattagtcacgccgaggcagtaacgaataccaaattgcgc

SEQ ID NO: 5823 - DNA, 1090 bp, Arabidopsis thaliana
tccactcgtcacgagagtattgctcttttgtcaccgattttcagaccagcctcgactcaacaaccaaaacagatacgttttgctgtattcgcctcagacataaagaaagcaccaaacagacgagaaagggaaaagaccgccggaaaattaaggactcaccggagagacgacgggagaggacgaacgaggaaccgtgactccgtgagaaacccaaaggaaagataaattaaacacttttttgcctgttaagacagaactataaaaaagacatacagctgccagttcattaatctctaacggttaacctgaccagccggtaaccttcgacttttgttgacttttttaaacgcgttcaacgtttgagtcgaatctgtccaaacaaagttttaaaccaacccaattcgtacgataacaacatccctctatttaattaaaaattaccatatgtcccaaaattttagttttgttagataaaactcgaaaaatctttccaaaaacaccccaactgaatttttcttaacggttattaaaattataccgaggaggatcaacacaaactggaacaaaaacaagctcaatcaattattaatctctccaacataaatagagattatcattcgctcattgcctattgttctgagttttggggttctacttttactgctactactaataaaagaagaagaatatgatgagaatcgtagcagggacataaaacattaggcttgtgttcatttcttcccatccacttcgactggttcaaccacttcagcttcaaacgtctctgcatcgtgagaatgtgccatctgctgttgctgcggctgcacctcagggcttgaccatttcccggaaagagctacatccatcatctcatatatcttcccacccagctctgctggattatcgggctgtagttttgagaaacaacaattaagttttaccagtatttactttatttcaattctagagacaacaaaaagttaagaatgttaatgtagaataggactcaccgtgaacccattagaaactagtgctgcgtcatacataagatctatggctctcattgcatcttcgtcatttgggttactat

SEQ ID NO: 5824 - DNA, 627 bp, Arabidopsis thaliana columbia
  unsure (1)..(627): unsure at all n locations
aaataagtattgtcacaatagagacatcgaaagtaaaggttccctgaacaactatctactgcaacggtaatcatcattgcgaatcagtaagcttagtgctgaaatcccaaagcttcttcgccaattctgtatctttgacaagttctattggtttagcaatgttgctatctgagaagtattcccctgtaactcctgcaacctgtggattcaatgccacatagcaagttgttgccgccccctaccaagtcgaatactcagacattataaaccagattaccaacaaaaaccaaatcaatccgtaaagctagactgctgtatcattctctcctacttaagctgagaaacctagtgacaagtttgcaagtgattggttattagtgtgaggttcagaaattagatgcatacctgcggaacagacttgaccatatatttagccactgcaccaacagctcctgcattaagccggtgacagagagatcagaagagactcaaaatatatgtatgcgtttgttactttgagtgtaacttatgaacatggagtgatgagagttgatccgagaaagaagttacagcaaataggagttgagtagccgatagnattgcataatgcccctggatgaagtgaat

SEQ ID NO: 5825 - DNA, 455 bp, Arabidopsis thaliana columbia
aacacccgcattacttctggtcctctactatcaacacggatgttggacccaacagcatcactaacatcaatagtttctgttgctttcaactcccagtttctggctttaaaggcaaaaggctttgaggtcaaggctccaacaggacagatatcaataacatttccagagagttcactggtcataagcttttcaacataagttccaatttcctctccactaccacgacctagtataccaagatcctgaaccccagcaacttcagaagcaaatcgtacacacctacaaaaacattatacatacaaaacctaatcaacaggatagcgtatctatcacattaactaaaacatcacactataagcaaactatattagtaaccttgtacactggatacaccgagtcgtaacagtcttcacaagaggaccaagattcttatcaacaacagatcttttcatctc

SEQ ID NO: 5826 - DNA, 499 bp, Arabidopsis thaliana columbia
tgtctgaaccagaaagatccacaccgattaaggtaacaatatcaagaatctttatcttaaacttgaaccaactttttgaaacatcaacactacaccatgttcttgattttagtttattgaaatcttgataagtcgaatcttgtgtttaaaatgttttttttaagtaattttagagctatgtcccctcgagtccaccttctggtgagcacaaggctttgcttttttgttgcagactacaggaggacagtatcgtttctgcaagtcatgtgttgaaggaagtagttgcaggacagtgaggtcaagaaccaagcttatgaacgttttgatagaacgtggaagacctcacgaggctcaaactgttttcaaaacattggcagagacgggacatagaccgtctttgatcagttacacaactcttttagctgcaatgacggttcagaaacagtatggttccataagctctatagtctctgaggtggacagagcggaacaaacttga

SEQ ID NO: 5827 - DNA, 603 bp, Arabidopsis thaliana columbia
gtgagtcgtttctctccttattggtcgccacctatatgtgtatagattgtttgtcgaattcatataaaattttcggagtctaaaatacttttgctatttgatcttggtccaagcctgatttttatatcattgcatttgaggaatgtcctgagaggacaagatccttgtcttgtgcaagaagccattgattgaatagaagctatttaaagcgttttgtacaattgcatttgcaaattgtcaagaactcaagtatgaagactggataaaaacctgctcctactttatttgtgtggactcatatatccatatgaaatgttagtcttcttttcctcatattacattttatttaaagtatttctattttgcaggcttgtgagacgctcaagttgtggtccaaggcatcatggagatgtgttgaattacattcttagatgtttctaaatcaatctagttcaccggtcagaagatgccattatagattttgtgggcaaagcatgtaataggtgtgcatgctaatatactccacaaatgtagcaattgtaagaccagacaaactacgatgcagattcaagagaattgggtttcagcagagcatatatatga

SEQ ID NO: 5828 - DNA, 755 bp, Arabidopsis thaliana
ccagttcattaagcggacaaaggaaatggcaaagacaaagagagagagagatagaaaacatttaaaaggataaaagagtccaaacaaaacaagtagaacagttacatttttgacattgtcttttaaaaaaatctcttatcctcttaagaaaaataccccaccaggatctctcagtgtaagtagccaaatatacatacaacaatcaataattcttacataaataaaacaaagctctcttagatctctctttctctctctccacttattcattgctcatgagcttgatggttatatgaagcagccgagattcaaattattggcgaccgagctctctcatgttcctaaaccggaacacgattatatgggatgatgaacaaggattaatgaaaaatgtacctcgtttctttgtcttataatccgttagtagtaatgatttgcctggaaaacctcattgttgagtcttggtccatgttccagacgaagccaggcatgtcaaatcgaggaccagccactgttcggtatatgaagactctctcaacagggcagctctctggtctcgagtccggtgcaccccgttcatcgatgacttccacattcagctttggcatcttctgtcctagtaacttgcaggctccaaaactcacggaacaagaagacatccaaagggatcgcattgtctccagctttgaagcattggccaaaagcgccttgtctccaaacgggcagtcccttatctctagtttcctcaagctatc

SEQ ID NO: 5829 - DNA, 1315 bp, Arabidopsis thaliana
tctcaaaaccgtcaacgacactaagcaagtcgtcgacactattacgttcttcgaaggtctcggaacctcaccggaaacgcgttgagcatgatgttatcgttcgacagtttcggagacgacgtcgtttcgtggattcgtccagcgacggaaagagacgggttttgggagaaagctgggccgagtttgggctcgggtacgggtacagaggctagtttgggttttccgtctggtttaacggaagacgtgacggtgtgtaaaaacggagggaaagattgtaaatacaaaacagtgcaagaagccgttgattccgcgccggatacaaacagaactgtaaagtttgtgatacgtattagagaaggtgtgtatgaagaaaccgttagggttccgtttgagaaaaagaatgtcgtcttcatcggtgacggaatgggtaaaacggtaattacagggtcgttgaatgttggacaaccagggatgacaacgtttgaatctgcaactgtcggtgagtttttttcaacctcgttaaacctttctttaattaagttcttatttttctcgtcagtttattaatttaattaaggaacataaataagaagaataacattaaagtcaaaacataaatttgtcttgtttcttttactgtgtctagatttgctctgccacgtaaaaagaataatatttattgttatttagttttgagattcaagttatgtatgtctatagaattattatgagactgtccctggttccactagggacagaaaccatgtgacatttacttgggaagatatatacataggattttgttttataaacatagaatataaaagttgctaaatttgattaaagatatggacaaagttccaagattttttgtttcttaatcttaaaatgttttatgttattacttggttttggttttggtaggagttctcggtgatggatttatggctcgtgatttaactatagagaacacggcaggagcagatgcgcaccaagcggttgcgtttagatcagacagtgatttttcggtacttgaaaactgcgagtttcttgggaaccaagacactctttatgctcactctctccgtcagttctacaaacaatgtcgaatccaaggcaacgtagacttcatctttggtaactcagctgccgtattccaagattgtgatatcctaatcgcttcaaaacactccaaactcgagcaaggcggtgcaaacaacgcgatcacagcacacgggaggattgatgcgcgcagtccacgggatttgtgtttttgaactgttcgattaacggaacagaggaatacatgaaggag

SEQ ID NO: 5830 - DNA, 521 bp, Arabidopsis thaliana columbia
tcgactctagcccggaaccgggacgtggcggatcatcctttgggtaaatttttgaatagggtgattgcgttggaatatgcaagattagcaccttcagtgtcgtttagcttcaaatgaaaatccccctttagtcgaaatatctctgccttgttcttcgctagaaagaactccaaatttgtgctattaacaagattaagaccagtagcaagctctcctttcgtttccagatgagcttttgcttgctctttaattttaacaaaggcttcctgcatacacaaacatgaccaagacaactttaaaaataacaatctttcaacctcaaacaaacacagattcagggaacggcaacttattatataggatcatggcaaaggatgaggtggcatacatggcttcaaatatcacacacatattaatggatggattaacagctacgccaagacattttttaataaacgagggaaagttttttaaaaaagaagcaaattaatgtgaaactacttgttgaatcaaagatgcag

SEQ ID NO: 5831 - DNA, 474 bp, Arabidopsis thaliana columbia
gataatctttttaagatggagaacacctaaacgaatgaaacatcattcaagtagatctacacttacttactacactaatcattctcagactcaaactcaagcacgaatcaagctcaaagcttacaaattcagtaacctcagcaccagattaaaaaaagccaaacttgaaaatccaactgatactactaatccttacttccaccaccagctacaacaccaaattttgatataaagttgctaaattcctacatcactctacaaaaaggagtaaactttagccacagatctgttgaaatcatgggcaccgatcaagctaacttctgtttacctttgggaatggtgacagcggaataggtagagcattcacaggggcaagaaggacaagaggaggcggaaacggcggccaaagcctcagtgagatgccagtagagaggcggaccaagaatgtaaccagccatgctcagccccagtaaa

SEQ ID NO: 5832 - DNA, 553 bp, Arabidopsis thaliana
gttttgtaatgacgacgaagaagatgagcttgagcttgccttagctgtttgtgaaggacaaaaaaacagtgatgcgtattttagagtgctaatgtgtaccaaatgacttgcgtattttagatatgatactgtgttttttttttcgtgcgcttacagaaacagaggaacttactggcggtgaagaaacagaggaggctgccattgggaacataatcggaaatgagaagtttctcgtcgtctccccagcagaacccacgaattctgacgagatttgggtgacgaagcttagcgatggcacgaacctccctctcgaattccttgggtttcgcagccgcacagctctccgtctcgatccgcctcaccgcgaatgccgtgccgttctccagcaccgccttatacacgatcccggttccggtggttccaatatgtaagcagatgcctttagcagagtgtctagatctagccgagtctcgccgtcgactgtaaccaattgagtttgggagctctgcttcagttgcccaccatctgttcgagtgaatgcctgaacggtttg

SEQ ID NO: 5833 - DNA, 455 bp, Arabidopsis thaliana columbia
tgctaatgttaaaagaaaatgcagatctgtggaagcaaatagttggggttccaaacatggaggcttttgtgaataaaccagatattctatccttttccattgcgagtaaaattcccgtgtctgagtcaattagacaagagctcttggagctggatggagtctcctatagattgcagcgagaaattgaattgcttgaaagttttgatcgtgttcgatgtatacactgtcaggtattttgtgtgagcatggtaaataccatttccacttcctcttcattgaatatttggcttactgatacgtttgcatattaataatgcagactgtcatagcaagaagaaaagacatgttggttatgtctaatgaaggtcctcttggtgcctacgtaaacccacatggctatgtccacgagataatgaccttttacaaagcaaatgacatagcgcttagaggtagac

SEQ ID NO: 5834 - DNA, 548 bp, Arabidopsis thaliana columbia
ttcgtattcgttagcttaagctttacttttctggaataacgagtcagactatattataaaaattcaaaacaaataatattcccaccgttgatccataatgcatacctgacttgacctttttttaattggtttgttagtttggaatttggatattttcaaaaccaaatccttaaccaacgaatccacaataatgaccaaaaaaaaacaatggagcgtgaagtagacgcgtggattgttcacaaatcagggctattttcgtcaatatgtagaacgacttgaaattttcgtaatccttaggggtactttcgtaaattaatagaacgacttgagattttacactagcttccgtggaagacgaagacgaagatacaagcgtcgatcgatggggagaaaacgcagagttaaatcggagtcgtctccgttcgattcatttccggaagattgcatctcctacataatctcttttacaaatccacgcgatgcgtcagtcgctgctacggtttcgaaaacgtttgaatcgacggtgaagtcagatattatatgggaga

SEQ ID NO: 5835 - DNA, 527 bp, Arabidopsis thaliana columbia
taatgaagagtgatgagatataatttgacgtggaatactggaaaacggaaaaattccagacaatataaaatcgaaaaaaacaaaaataaaagccaagataagacgacagcgtttatagctgtgactgactgatgtatgtacagtgttgagagtgtggatcaagtagaagatggagtagtggtggtgggagtaatattacggtttctcatatacgtcaaaaattgtgttggcaattctgctagaagtgcttctaccactgagacctctccatctgcaacaacaacaacaacaaccacaatgatcagagaccaaaactctgcctgacaaatcaagaaacacgagactcacattgtatgtctcgtaatgcaacaaactggacgatatcgcgcgatgctattcgaccactggagctctctaatttctctcctttatctccatctagtacctatacaaacaaccaatacataaaccttgtaagaatctatttcaagaagtttttcaaatgaagttaagcataacgtttttgt

SEQ ID NO: 5836 - DNA, 987 bp, Arabidopsis thaliana
ttcttttttcttttttttggtcacaagtgtgtttattcataatataaagtcaatgtaacagaccaagagtttacaccatttcacaatgtcatgccttactcatatagtgttatcgaattacacaaataggttcaacattttacctacaaaaattacgattcatctctcgcacttgcgtagactatatagagtggttgtaatgtgtaaaataatctgtgtattgtttttttcatttatgtgatttaaacaaatagcatggtattatataaaacaatgtgttggtataccaaactggttaggattaagcttaatattcagaaacattcacaagcaattcaaatctagaaaacagagcaatacagcatggaagttccaacatctatccgaattctcaaacaacgagatttaaccaacttggtttaaacatagaccggccaccagttcatcactagagatgagtggaagttcctaacttaaggtgctttcgctgtttcacgaacaatggataacttagccagaagaccacatagctgaagataagatccaactccatcacagattctcatatgcgcaaatccagtttcctgaagaaaagcattggtgttagacgaaagtttggatgttttgagctgtcaaggagaatcagatgtataccttcatgaactcaagtttcagatactcagccatatcgtaattctttattatacggaaaagcgttgtgataatgtcggttggagagtagcccaaatcatagagctgctttaagccgtcacaggcgatgtcaaacttactttccaacacattgcgaacaatgttcttgacatgaagcgggtgaggctggtcacagacctaagtgaagagatctttgattgatgatatgaaaccaatgtgttttataagccaaagtgaattaaggttttgtttcaaaccttgaagacgttttcttggttgacaaacgaaaacccgctgaatgtggcttgcaagttg

SEQ ID NO: 5837 - DNA, 556 bp, Arabidopsis thaliana
caacatatttcctgagagaaacagattacaagattgatcaatctctgctgaaccgaaagtgatcaatggttcattaaaaaaattaactcaccagctggatctcctttcttgcacaatttaatgctgcaaaagaacgaacacgaataattttataaggttagaacggtaatcattccaggagacaaaaaaaaagaagatagatagtgagattttgtttgataccgtaggtaagaacttctttgcctccttatttcattcaccacgtcattgaacttctttgatagctgattatcatacttttgcagcacatactgtgaaggaagtaaaacacaaagagtatcattttaagcaggtttcactaacttaagtaaatatgtagaaacaatcattttcgagcgtgtaacatggaatgagcaagtaattcatgatctgttaggtcaggaactatggtccgatttgaatcggagaggtcaattccgttccacttaaccccgtatggttttagttggaagccggtatgggcgggcaagtttaggcaaaactcgacaatatcaaa

SEQ ID NO: 5838 - DNA, 530 bp, Arabidopsis thaliana
agtcttgaaaaactgaactgactgatctcaatgcattatctttgaagcttaatcctaaccaatttggtatatcaacacattgttttttatataataccatgctatttgtttaaatcacataaataaaaaaaacaatacacagattattttacacattacaaccactctatatagtctccgcaagtacgactgtacgagagatgaatcgtaatttttgttggtaaaatgtcgagcctatttgtgtaattcgataacactatatgagaaggcatgacaaatgatttcacaacgaagaaaacccgaatcagaggctagagtctcgaattgggaaagagacctctccttaccacctgagcttactgctaacatcagcatgtccataccgaacacaatgttagaagaaatgtcgttaatctttggttcctcgggcgtaaccacctcgactattatcacttttcctttctcgggaagacttttccaataattttttaggatctttacacaatcttcgtcagtccaatcatgtagta

SEQ ID NO: 5839 - DNA, 584 bp, Arabidopsis thaliana
cgtacctccatattctgctgaatgggattcgacaatgagtttgagtcaatgattgcaaaacttccttttctcgatcttgatttgcgtagaattttaggtcaggaactatggtccgatttgaatcggagaggtccgaattcacacgggtgtcctagaattccttttttttaatagcatattattaggtatcatatgaacaggcttgagaaaaaccttgtatagcttcctcgatttctcgataaaaagaaatatgaccaactgtggttcgaatatatatacaaaaattttctttttttacacttcttactattagatagtgtgcataaatctcatgatagttaccaaaagattcatagtgaacttcgataggaacttctcttgaagcaataacgcgttgatctaattgccaccgaagccacaaaggactatctaaattgatttttttctgtcgataagctccaattgcatcataggaattgcaaaaaaagggttctttcgtatacttatagtttgtttcgtaaattctttcattttgatagttttttcgattacatggattatatctgtttgcacaaatacctcga

SEQ ID NO: 5840 - DNA, 604 bp, Arabidopsis thaliana columbia
  unsure (1)..(604): unsure at all n locations
agccttagcaaggtacacaattctctcggaagttggtgctgattgccacagcttgctccagatatttacaggtgcaataacgataatgcttcaggaaatggaaatgaatcagcgtacctgacagtatcttactatatcgtagagattttggagaccagaatactcgtagaagaccatggaactctgttgaggagaaaaggaaagcatcaactaaatctaagaaatatatagatatatacacaggacagataaccagggtacagtaacattgcagcatacctgcctgggaacatcagccgaacgaaaaaagaggatacattcggatgggaggccatcacgaccggcacggccactctcctacaatattatggttaagttataagaggcagccttataactatatcgagttttagtggacaagagactggaacctggtagtaagtctccattgatttgctcaaactgtggtggatgcaaacctgactacagcaatgccccatgtatcagttagagaagatagtaagaatggtgattaataaaacgcgaangatggctggttttagaatataatgattttaagaatcagtagctctagtatatgtac

SEQ ID NO: 5841 - DNA, 601 bp, Arabidopsis thaliana
atgctgaagaagatagccttgccagtctcttattatatattttatcaaagaaaattcccaaaaaccaaaggggaatttttattactgaaacccaagctaaagataacggttttgacatatagggattaggatttgctacaagatataaaagtgaccgttgaagaagattcacacaactcttaagagtatgcttgcttcagcaattgaagtagcagaaacatgcgaaacccgggaactgagcgtgacaagccccgtgtgaagcacgttcccatctcttacactgactgtcacagccacgagtgttgccacaaaaccctgtccatgtcttgcttctcctctcgcaaattcttccttccaccgccatcatctctgcaaattctccaatcacaagattttatatatcatcatctttcatcaatgagattcatacatattacaaagagattacagtcgaagaagcttagagtggagtgatgatcataccagtggaagctataaggaagatggagaggcaaaggaagagcataagtgtgtaagaagaagccatgactttttgttgtatggttaatatcactagctgagagcctttatatcaaatgta

SEQ ID NO: 5842 - DNA, 360 bp, Arabidopsis thaliana columbia
gggatccctagagatgttaggtttagtatcagagtgtgatctgtttgacattcatgtgttgtttagctcattgtgtttgaggttaaacttgtcaagaaaaatccctcaagctttgtgatgtagtttgagacacccatgattgtgaaacttgtgtaatagctaagattatcttgatgagttaggtttttgactcatctgcttttagccgtatttgctgattcatgagcttgattgttcatttgttcttggcattcgactgagaaggttgtggctgacaagatagagctggaacatcgcgtgaaaagtctaaatgataagcttaactctgtggaggctgagagcaataagcatgagactgag

SEQ ID NO: 5843 - DNA, 581 bp, Arabidopsis thaliana columbia
ccaaatcctccctgaagagctgctctgtaaccacacttcttccttccggtagtctctctactccctctctgtaacttgctttgtaacccttttcaaatttggtaaacctgtgtaaccctttgaaactttaaccaaagactggaaaccctaacctgcaacccaaccccttaaccccttactactgttgcaccatgagtacacgaatccccaaccacctcaaaggcaaagaggttgatagaggctgctctccaccaacccgtcgcagaatccgagcaccagagttagacacctctgctcttatagccgccaactctcttaccctgatgggtcgtttaacgaatccggcggttcaaagactctggtcactattccctttcatgaccaaccgttaggatctaaaaggcaatgctatagggtcagatcttggtagagactgctttcaattctgctttgatttggaggaagacctgcaaaaagttcttgacaacagaccttaccactacgaccattggatgatcatcctgcaaagatgggaacaacaatctctgacaccttccctcaaagatcctttttggatagat

SEQ ID NO: 5844 - DNA, 500 bp, Arabidopsis thaliana columbia
agaggatgtgctcaatgctcatcatcagaatcggtggacggagatgttcccgtgtaacgtcgcaagagctacaaccaccgacgttatatccggtgggatggctggaacaataaatggtgcacttcaactggtaaaccaaatatcttcttaatcaatcacattccggtttaatgttatagtaaaccggtttgaatatactaatgtacgtacgtgcagatgaatgcagagctacaagttttgtctccactggttccggttcgtaatgttaatttcctccggttctgcaaacagcacgcggagggtgtgtgggcggtggtggatgtatcaattgatcctgtcagggaaaactctggtggtgccccggtaatccggcgactaccatcaggatgtgtggtgcaggatgtgtctaatggatactctaaggtaaatcaactcttttaccccaaagcgttacataatagtagtgaataatagtaataattaatcagaaacatattgga

SEQ ID NO: 5845 - DNA, 504 bp, Arabidopsis thaliana columbia
gcttcctcatgttatggacaataatcactcctgttcataatttctagaaccaaatttcggattgttcttgaaacttttgctctctctctctctcgcagggttttctgctagaacataaacctgaagaagctgctgcagtcatccaaattatctgtcaggtgtgagcaagaacctgttaaatatctttttctttttccagggatcaaagaagtttcttaaataccttgtgtatatcattcacaggcgtatcctgatgagaagaagtcagcacttgaggctgaattcaagaagctggtaaacgagtggtctgttgacattatcaagcaccaaaatgaacaagataagaaggtagaactcactcctctttatgtttacctaaaaccaaaaaagctcgtaacctaaaccatgtctccttaaaaaaacaggacgtagctgcatcactgaaatctgacatccctgcaatggtcaatgctttggtaaactctggttgagagtaagagtgga

SEQ ID NO: 5846 - DNA, 559 bp, Arabidopsis thaliana
caatttaaagctgaaggagaggtttgtattccgttagttagttaccaagaaactcgagattggtgagtttttttttttcatgtttgaatctattctctttcaggggaagtttcactctttccacccggtagctaccatactcagttacctcacaaaggcacctcttgtaccgcccggaacaccggtggttaacgctctgtcgaagcagcgggcaatgctggaaaacattcttagggcatgtgttgggcttgcgccagagaacaacatgatcatggagtacaagtgaaggatgaggaagaagaagtaaaggtacctaagatgaccttaggatatgaaggacactgctccattgtttcatttatatatatcattttgtatgtatattatatgaatgtgtgtgtgacggataatatggataagcttagggttaacttgtgtgatatggatctggtcggtttatttggtgagaagattagctaagcttttggatcaaatgtgtaaaagatttaagtaattatgcttgtgtctccttgtaatataaccaaacttatgatctatg

SEQ ID NO: 5847 - DNA, 764 bp, Arabidopsis thaliana
atataagttggcaaggaaaacactccttccaaagactaagccgggagcacaatacatctcccgggactaagatagatctaaaggggaaaacccaaattaaataacaacaatgatactaaacctaaacttcccagatccattactaaaaaactcaaaactgaaaaacaaagtctaaatccaaagttattttaaaaaacagatctgagactagagatctaaccaaagaaaataaaatcaagactctccttaccacaaacggcggtgagacatcaaacaacaccccgaaacccaaaggacaaggtctcaagaagaaaggaaggagaactagatcttcaatggagagagatctgcatctgaggcgatgaaagatcgaaatgaacctgcctctgccatggttggaacggccagaactgaagctgcagacgaaggagacaaacaagcagcaaaactggaagagcaaaggatttagacttcacagatctagatctgtgaatttagaacagagaccgttggaagaaaataggattcagatcacattaaacccacaagaaaacgaaactaaagagattacaacaaagaaattccggttttggtgctgaaaaagccaccggaactggaaaccctaggcggggcggcgaacgttctcgtaatatgttttttatttcttctagaaggaaaactataaaattacatggaagacattttgattattataatgaaatgtaatgctctccccaacaatagcgaaatatctcctttttgag

SEQ ID NO: 5848 - DNA, 747 bp, Arabidopsis thaliana
actgtggtggtacgacggcggaggaggaagaaacaaccatgcggaaacagccgccttcgcctccaaagccaccacgtgtcaattctatgctccaatggtggcggagatggacggtgttggtggccgctatctggattcaagcattcaccggcacgaacttcgatttctctgcctactcttccgacatgaagtcttccatgggggtttctcaatctcggcttaactacatggcggttgcttcagatttgggtaaagcattgggttggtcttctggtttcgccattgcctatttccctgtctccggcgtgcttttcgctgccgccgcaatgggactcgtcggttacggtgtccagtggttatccatcgccgatgtgatcgatctaccttactctctggttctggtttgctgctccttagccgggttaagcatctgctggttcaacaccgtcagcttcatcctctgcattcgacatttcaaagcgaaccactcgttggccctgtctctcgttgtgagtttcaacggaatcagtgccgcgttgtacacgcttggccatgaagccattagtgggaaatcatcggcaagctctgatatttaccttctccttaactctctcatccctctgatcgtctctgttttagccctttggccggttcttactaaccctaattcctctgaaaccgatactacgcgaacgcatgacgaaaccagaatcttcgtagtcttcaatgtcttagccttagttacat

SEQ ID NO: 5849 - DNA, 952 bp, Arabidopsis thaliana
atccgagtaggtttcagacaaatggcttgactcgccgactgtgttacctgtatctttcaggcatcttattcttccagaaaaatacccaccacctacagagctactggatttgcagcccctcccggtgatggccctaagaaatccttcttatgaaactctttatcaggatttcaagcatttcaatccagtgcagactcaggtctttactgttttgtataacacaagtgacaatgtagtggttgctgctccaacaggaagtgggaagactatatgtgcggagtttgctatattaaggaatcatctcgaaggacctgattctgcaatgcgtgttgtctatatagcacctcttgaggctattgccaaggagcagtttcgtgattgggagaaaaagttcggaaaggggcttggtttacgggttgttgagttaactggggagacattattggatcttaagttgcttgagaaaggtcagataatcataagtactcctgagaaatgggacgctctgtcccggaggtggaaacagagaaaatatatccagcaggttagtttgtttatcgttgacgagcttcatttaattgggggtcaaggtggtcaagtgttggaggtaattgtctctagaatgagatatatttcaagtcaggttgggaataaaatcaggattgttgcattatcaacttcccttgcaaatgccaaagatcttggagagtggattggggccagttcatgtggcgtttttaacttcccgcctaatgttcgtcctgtcccactggagatccacattcatggggtggacatattgagttttgaagccaggatgcaggcgatgactaagccaacatacactgccatagtacagcatgccaagaacaagaaaccagctatcgtttttgtcccgacccgtaaacatgtccgccttactgctgtggatctgatagcatactcgcacatg

SEQ ID NO: 5850 - DNA, 630 bp, Arabidopsis thaliana
ttcctctagctttccgacactggtcactggaggcaattaatgagtaccgctcttcaatagctttttgcattgctttcactttgaatgttggatcttgcctaatgtcattcaagaacatatctacgatgatccgactcttgagaactttgcaaaacccgtcctttgtacatgcatgctcatcaatgaatgttttcaccatgtacactccaattttttcatcataagcacaataaattctgaatttgcagttacctccaatagaacaccttacttcagatttctctgatccccatcttgtgaacttaatattgactccttccttaagagcatagtcaatcacagcttccttaaactcagctatactgtcaaagacttgctctattctaatatcgccactacctttcttgcatctaacatatcgtctttcaccttcctcacaatctgagttcagaggggtactttcatcattatcatgctcttcttcatcaacaaagcctgctaagttctgctcaactcttgcttccatgtcaataaaaactctatcacactcagaaccatccccaacagctccatcaccagcagctccatcaccaatagaaccatcaccaacagctctatccacatgagaac

SEQ ID NO: 5851 - DNA, 799 bp, Arabidopsis thaliana
gttaaatattttcctaattttaaaacaaatcaactaaaggtttaataggggcataagactttagatggtagctagaattaattagcctggtaattcaccactaactaatttaatgaattttcatttctattatttaaagtctttaactcggagttaataatcaagaccgtcagagaaagtaccaatcactgtagtagtgtaaactaaagaagttaaaatcatccattaaggtaaagccacgtgttaatctaatcacgacaaaacaaatccaaccgtacgattgaatagagtaagctaaaacttgtacctctcaagtctcaaccgccgactctaaaaatctctctcgtgaccgcttttaaatacaacgaaagcttcacataacttccccacgttctctctaacacacacacacactctctctctctttcattagataatggatcaaaaaagtaaaacgattggagaacaatggtggaggtcaaatccaacgtttaaaccgcctgaaacgccattagattctatggagtttttgtcacgtacttggagtgcttccgctactgaagtttcaagagctgtcgtcgcgtctccaccgacttctcaaccgccgcaaatgcgtttctcggagatccaaaacggttcttctgacgtcactttggtgccggaatatgaagaacacggcatcgttcttggaaatactttttcttttgcttcttcagaaacttcttgaatggtcatggaacgtatcatggctcagtcagtaagtaatcttaagatatatacggtatttatattcaggaag

SEQ ID NO: 5852 - DNA, 839 bp, Arabidopsis thaliana
ccaacttaatagtgccagatcgttctaccttgtatagaggaatgccgctgacaacagccccagctttgcagacagcaagagacacagcaagaatcgcattggctccaagctaaacacagatagaaggcgcaagatggtcagacttgccttctattcttaagtgaatacacaaaaaatgaattttcccttttaagtaccttttgcttgcaccacccccactcgttttgggttccgtcaagttcatggaccatgaagttgtcaatagcagtctgctgagttgggtcctgcaagaaataataaaagcaacaaaaataaaatgagtgagcctagcgcatagaattagacacaaatttgatgttctgagagtagcttaaagtgagtcactcacctttccaataagtgctggcccgatgatgttgttcacattgccaacagcctagtgatataaacaaataacgaatcagtcaacatgatcaattgaaataactctactaacactaaaaaaacacacagaacagatcgcagtctctcaccttagatacaccctttccaaggtagtcagatcctccatccctcagctcaagagcctcatagataccagtggaagctccacttggaacagctgctgtaaccttaataccatttgacgtgtggatatcaacctaaaccaacatcatcagagaaatcattagctttcttttcaaattcgtcattagcaaacaatcgaaatcgtaaaaaccagatggaaataaatagatccgtcgcaaaaatcatataaacaaaatcaactccatcatcgacaactcacgatccaaatcgccgagatcaaatcaccgatc

SEQ ID NO: 5853 - DNA, 627 bp, Arabidopsis thaliana
tgaagaacatcaatatcatccatttttattttgataatatcatacttgactaggactgagcataatacgcgagtctacgaaaacaaaaacggtgaagcattataacaacaccaattattcattaaatctatgagaattcacgttggtttcggtttataaatctcgctaatatttgatgtaagcaacggaagaagtgttggcatctttgataagtgtaccaagaagaggagcaagcaaacatttcttgtccttctccttgtagaagtaacccaaacacttgcaatcacgatcgcacttagccttgcaatcgttcacagaagttgggccttgtccatcattaacatacggcccagtaaaatgctcaacaccgactatcttgtaataattgacagctttacccttgcctccgctgcaaaactgcgtcgttttaggtggagcgcatttatcactccatccgagtaatccatatggtgtaggacacgcgttgcacatcccacgatcgcagtaaccgtaatcgccgcaaaacgacggcaagccacattgacggacgaagtaagtggagaataatgagaaactctcttcccatttgagatacgtagctgctgggtaatacgagttagccttgag

SEQ ID NO: 5854 - DNA, 1066 bp, Arabidopsis thaliana
aatgtgatatgccaggtgcgttttcaaacatgtcatataaatacacaaaatctgagagtcaaaactagtctctcaagccatatcttgcttatcctacattcaaccatcgattcatccaagcgattcagcaaaaacattcataccaaagcatcagattagttcagttctataatcttcctacaaccaactaattagacaaccacctgaaaggtctaaggtcactgaatctctaatcgcagaaagaaggaaaagccaatcaaacaattcacagtgttgctatctatatagcttatgacctcacactctctacatttctgatcccaagtgaagctacttcaccagtaaaagaggaaatattgatgaccaatttcaatttcaaacaagttcaatgattcataacaaaaagtatacagagagaaccgccactaaaggcgacatttttgttgttggcaaaagaggagaaaacccctaacaagagattcagatgagcttgaaaggaagaggccaaggagtagacctgggaagctcaagcttgtctttgattctctcaatcatcttctgtttcttccctctcgaattcccgtacgatcctttgaatcttttccctttcttcgtcttcttatctcctctcccacacaaatccatttccgataccgccggagctgcacacgccggagataacgatgaatacctcgccgaacaattcagagctgcagatgttcgctgcgtcatcataatccgtcgtgtcatcgcgccgcaccactgcatcgccgccatctcctctttctcacacactctcgtcctcctcctctccgtctctcagacttcaatcaaagattaaacacatggaccagaaataagactaaatgggccttaataatgaatatcaacaaagcccaataagggcctttaagttgtctccgtgcaaaatacgacgtatatgtgtctccaccactcactgttaacgatcagtttcagcgaaacgatggagcttctctgctcaccaacgtctctttcctcctccttcgctctctcttctgctcttttagtccctcgttcgttctcc

SEQ ID NO: 5855 - DNA, 967 bp, Arabidopsis thaliana
cactcaaaccaaaggcaacaccagcacatgaacttatgggcacataagcttcaggactactcttggtgtaatcaaaattcaagctctctttgataacaagtggttcatgagccaaataggtaatcacaaaaccactaatcataaacgcagaaaccaacaaggcaaacaacatgatccccacataaacagcacaaaacaaaccccatgttactctacgcacaagctccaacacaggcttatcatcttttaaccctgaatcacataacccaacaatccacgatactaaatagcgtctaccacgcctcattgttcgatacggatcaaaaacaaagctcaaacatttactaattaaccatggaggaaaccttataaaggtaatcatcaaactaacttgaaattcaattgacctgatcactagactcgtcaaagaccaatccgtcgaagtatattccggtccggtataaatctcacctcgctcatcattcaaggtggtcactgtaaacgggtcgacccgacccgaatcattctcacccatattcttctccgtatcggtacacgagtcaattacttcaaagtcttctcctttttccgaaatcgagtcgattgagctatttgcagagtcagtaacatcgacatcaatttcaattgtttcgaaatccactagagaaacctcaagctcgtcattttctcccacggtgctccgtttctcacaagattccaatgaagacgtagaagaggaagaagaagaatccgtatccataggcaaccttcggcgacggagattcgcggggggagacgaattgaggcagtcgtagtggttcgagaagctatcgtaaaagaattcgtcttctgcgtctaggaatcgatcgcagctgctatgtgttgatgatgattctgattctgattccattgatcaaataaagaaaagcttcttcatatagcttaaaacaaagacaacgcaaacaca

SEQ ID NO: 5856 - DNA, 1038 bp, Arabidopsis thaliana
ctagataatcaaaactgaaaccgtcgtagtagtagcagaatcccaagacgaaaaatacgaaaacaccccaaagattatggcttatttacatctctaccacattccaatttctccgccgccgcttcacataacaacacaagcattcggattctcatcgctaaaaatctgcggcgcgtgggcctgaatcggatatccataaggcccacccgggtaatacccataaccgtaagctggctgagccgccatgtactccatcatattcactccctcaccaccgcctttgttaccggttttctctttcccaccaccgtctccgccgccacctttcttcttctcgccattttcgttaccattctctttatctttctctttcttcggcggcacaatctccaccgcacgtttgagcttctcactcaaaatctcaacgagctttttaacatccattgttcctttaaccgtcagcaaattcttctctttgtccattgttaaaccattaacacctgcgtttcacaaaaccgctgttagcaaacgccgcgttttgataacgcgaatcgtacagatttttgtctctaacctttggtttttgtgacagtcttttggattttcccgatacaaccttgacaatggaagttcagcttcaacaccgccgttgttaccggagtctataaacattacaaaaatgtcagaaacaaaaaaacatgctctcattatactaatcagcaaaacaaaaacatttttgagaatcagattcttcagagataaaaacaatatagtaaaaagcaaatgagattacctctttgggttttttgtcattgttgtctggtttcttcttctcctctgatttttttttgtcttcatcgtttttgtttttgttctctttctctttttccttttttggttgaggagaaaccaaatcgactttcttctttgtcttctcttcaagtttctcccttaacttcaccggatctaatgctccggtcaccgtaagtttccctgtagccgactccgatttcacagtctcaacacctaaaagacaca

SEQ ID NO: 5857 - DNA, 839 bp, Arabidopsis thaliana
gaaaacaatcgcgtctccgggacacggaattatggcgatggatgagtccaacgcgacttgtggaaagcgtttggcgtcaattgggctagagaacacggaggctaaccgtcaagcttacaggacgttgcttgtgtcggctccaggacttggacagtacatctccggagctatcctgttcgaggagactctgtaccaatccaccactgatggcaagaaaatggttgatgttctcgtcgagcagaacatcgtccctggcatcaaagtcgacaaggtactactactgtagtaaacctagctaggtttatgcatttcggtttagctccggtatattcttatcgagttggaatagttagtctgttttggactagcaaaatgccggtttggtctattcttagatttgaccggtttacaaacagattctggtttagttttttatatttgttcgattccaatgaatataaatagggtttggtgccacttgttgggtcttacgacgagtcatggtgccaaggacttgacggtttagcctctcgcaccgctgcttactaccaacaaggtgctcgtttcgccaaatggtacgttaatatatgctcggattgcagaatcaatatcatatatttgtcaaatggtgtctttttttaattgagctccatgtatgtatgattaggcgtactgttgtgagcattccagatggaccctctgctttggctgttaaagaagcagcttggggacttgctcgctacgcagctatttctcaagtactagcgatttctaactgcaccagctgtttctgagttccattactgtcttgaatatactcatgcgtttgagtttgtgtt

SEQ ID NO: 5858 - DNA, 550 bp, Arabidopsis thaliana
ctaaagtcgttttcagctgatcgaaactgtagagcgtctcttttgccgtctcgacagcctgacgcactttccagtagttgttacggcctttaacgtgcagctcagtcagaaagcagaccgcttccattgagccagtatcattcagcgtattaatggttttctgaataacctgcttgtactgacgctcatccagctcacgttctttgccgcaaccaataaggagaattcgctcggaaagtacattcggaacatggtgcagcaacaatgtctgccccggttttccttccagttcgccccgacgtagcagggcgctgatgtacccatcgctgattttatcgagctgttctgcaatcggagaaaggcgacgtggttcgaagacgcccacgacgatgcaggcactccgctgtttctccgggctaccgctttttacactaaactccatgcactacgctcctgaatcttaaagacaacggcggtggctacagatagaattgcaagctttcgtaactcatgtccgctgttgcgatgacttcgtgttaatcttacgtta

SEQ ID NO: 5859 - DNA, 1173 bp, Arabidopsis thaliana
gattcggcgaaagttggtataaacgagcttagtttagaaaatcatttcatggatgctttgcaaagcccttctttatgatgggagtatagtaaatgccaaatttgttaaagaacaatagaatgtgaactgtagacttttgtttgtgtcgtctttctgtttgcttcaacttgtatcatctgcttaaaagagttgttgcattcgtgttttgatccttgtggtaggtcaatgagttcaaatcaattgagaagttcaagatattcaacacaaacaacctgtaagtagatcacgtccctaatgatagtaaaacaaaataaacttatttgatacacactaactgtgtaagtttacagatgggtgaacttgaaagccatcaaaaagcttgtggaagctgatgcacttaaaatggagatcatcccaaacccaaaggtactagatctacaatcataccacaagacgtagttagtctattgcagttctgcataattagtcttaactcttctcaggaagttgacggagcaaagttcttcagctggaaactgcagctggtgctgcgataagggtatgcatttcgctctatctttaattaacgcagttttaaagaaacacacagttaactgcctttattgtttgcccatttgaaacagttttttgataatgcaattggtgtgaatgtacctcggtcacggttcttgccagtgaaggcaacttcagacttgcttcttgttcaagtaagccaaacacactccttcccccctgcaaaaccccatatatccattaaatgatcaacaaagagttaacaattttcaatcatttttcacagtcggatctgtacacactcgtagatggctttgtcacaagaaacaaagctagaacaaaccccacaaacccagcgatcgagttgggacccgaattcaaaaaggtaaaataactctagtggtctctctgaaagatagtatctcactctaattgcttcttgttttctttttgttcgtttatattttggtaattatacaggtagcgagtttccttagccggttcaagtccatcccgagtatagttgagctcgatagtcttaaggtctcaggtgatgtttggtttggctccggcgttgttctcaagggcaaagtgacagtaaaggcaaacgccgggactaaacttgaaatcctgacaatg

SEQ ID NO: 5860 - DNA, 898 bp, Arabidopsis thaliana
ttcatacttgaactatatcacatgttccaaatatagacgagaacaaaacaaaaaaaaaaagtcgtcgataagagagtcctttgaaatccccaaaatgcccttcaacataacctccgtgaaaacctcatctaacggagtatggcaaggcgacaatcctttaaacttcgcttttccgttactcatcgtccaaacggcgttaatcatcgccgtcagtcgcttcctcgccgtcttattcaaacctctccgtcaacccaaagtcatcgccgagattgtcgtacgttaaaaattacactctaaccccacacacactaactatttacaattttaccataataatcttcttaatttacaattctgccatcgtcttcttcttcagggagggattttgttaggaccatcggctttaggtagaaacatggcgtacatggaccgtatatttccgaaatggagtatgccgatactcgaatccgtcgcgagcataggacttctcttcttcctcttcctcgtcggtctagaactcgatttatcatcgatccgacgaagcggcaaacgcgctttcggaatcgcagtcgctggaattacactaccgtttatcgccggcgtcggagtcgcgtttgtgatccgtaacactctctacaccgccgcggataaaccaggttacgccgagtttctcgttttcatgggagtcgcactctcgatcacagcttttccggtacttgcgcgtattttagcagagctcaagcttttaacgactcagataggagaaaccgcgatggctgcagctgcttttaacgatgtagccgcgtggattttactcgctttagcggttgcgttacggcgtaatggccgtgagggatgtggagagaaaagagccgttagtggtcgtgtgggttttgtt

SEQ ID NO: 5861 - DNA, 724 bp, Arabidopsis thaliana columbia
gccatggtacaatgcttcactagctgtttctcaccaaaggcactcagtgtcttgttcattccctgtgattggaccacaaggcacaggaatcttgcatctcaaagctgttcgcaatggaggtaaacattctcaaacccgaacagtcactcaaagacaaaacatatgtgttaggtatctgcatttgccatttttcttactcattggatccccttttctgcttgggatagaagatagcatgttcgggtttctccagcaaagggactgggacattctgataatggacgcacttgtccatgtcccgtcaaacgagggaccccaacaaaccttgagaatcaacgttactgacatcgttgatccttcgcctggtacccacgataaacctttggaaccattagagccagagaagagctaaaaagagaaagagagagagagagagaacgcttggtggagctcctggctagggttttattccattccattatatcttgtggaacaagagagagaattgggtcttttatttactaataatgaacaattttttaggagtatacaaaagttggaatcacatgattgagagtctagtgaataacagcattgctatatccgttttgatttggcctcctttatgttttcatatatatgttttacgtgtttgtttaagcattcaagtcctaattgcatcaatcaaaatgtaaattagaatcctaacactgcttcaatcagg

SEQ ID NO: 5862 - DNA, 627 bp, Arabidopsis thaliana
cctcactcgtttcttgccacttggtcttggacttctatacctgggcaaacaggttagcaatgtgttttacataatctcgctctttgttcgtatatcattatttgcattgcttgaccaacatcaacttgttccaatatctaccaggaaagtgtagaggctacagctgaagtttcgaagaccttcaatgagaagattagaaagtattgtgatatgacacttctttcttgtgcttatgctggaactggaaatgtcctaaaggtatctaatcaattgtgctggtggttgagtgacataattcattacttgtttagttgttgactcctacttatattctcaggtacaagaccttcttgctcagtgtggcgagcatcttgagacaggtgacatccaccagggtccagctgtgcttgggttagcaatggttgctatgtctgaagaactgggagttgatatggagatccgttctctggagcggatgctacaatacggagaacaaaacattcggcgtgctgtgcctttggcccttggtctcctttgtataccaatccaaaggtaaatacttttgtaaatgtagttttactgcacctgcttacaattattagtgggcgtctagagtaatactgggtt

SEQ ID NO: 5863 - DNA, 530 bp, Arabidopsis thaliana
ccaaattcaattaattacacaaaatctatattttacgtggggcctaatccatgtcagtatcagtcggaaatctaagtataatcgctacatagatgtaatcttttaacagtgcagagacttttctacactttcgtcgatacttaaatgagtatatgccattcgctttccttgtagatagtaccatacgagtcggttgagtgacgcaagtgctgtttacagttacgggattgtttgattagagatgatcacaaaccaagcagtgattgatcgaaaccgcagaaagtctcacataacactatgggtagggtctgagcttaacggaggagatattgctaagatcatggatctaaagcttaacggtgattatgattctcgtgctgcgtggagagctcttgagctagcaatgtcgtgcgcggatcctacctcagcaagacgaccaaccatgtcgcatgtcggtattgaacgtaaaagagtgtctcgtgtctgaaaactcgaggagcaatatgagtcgaggcatggatacactaagt

SEQ ID NO: 5864 - DNA, 919 bp, Arabidopsis thaliana
actccattaattcttctgtctgactcatcctgtccatcttgatacatgctgaaacagaccagagaccataaggagaggaagcaatatactaaatctggcaaaacatttgaaaatgagttccctatattacctcgttgaaatgttgctgcagcttttcatttgcaaagttgatgcaaaattgttcaaaactgcagaatgaatcagcccagataaagtttacacagttcacagctaaacatagtgcaccatatataactaacaaagaattggggctgagaaaggaaagaactatcatttaattagttccatggatcatcgctaacctgttattcttaaaacattcaaagccataaatgtccaggactcctatttgaaaacgagattctggatcttgcccaacagacttattgatcttatcaaccagcctgacagaagcataaaacgaatagttcaaacataagtgtagtacatcaacaaaacatccattaaatgaaaggattaagaaagtcgaaagcaaaccagtcaaatagatgggcgtaaacagtcttcgcgagggtatcccggctagtaacagcagcattagggtcaagtgctttgataatgataccttcacgggtcagaattgaacgtgtgcagagcgaacgcagcaaaagatttgcatcacacctgattaattttgcatggatacaacaaaataaacaagctatttcttcgtatgcataattaaaaatgagtactatcagaaaattttatgtacttgaaaagatcagcagccatctgcagatgatgtctagattccggatcctttaccactgaagagtcgtgctctctccctgaggaaaactcaacatttccaagatgtagaatcgcagcaagtgtgcgagatatcccttcctgatacatgatttgtgcaggaaca

SEQ ID NO: 5865 - DNA, 1339 bp, Arabidopsis thaliana
taataatctttctctgtacgaaacagactagttggaaacgcgaaagaacaagattcgacaaaagctaaaaattacattacagaagaagcaaaaccctagagctcaaggtaatcgccgtcgatttctcaatctctcaccggcgattacatgccgatgaaagttgtacaatagctgctgtaagagagagatttatcaggtatttttagaatcatgtatagagacagaggaacggtgaattcgagacctgaagttgtggatcgtaaacggatcaacgacgctcttgaacgtccttctccttcaacctctcgtcaagttaacggcaaaggcaaaggaaccgttacggcggcgacgacgacggcgaacttgattgggaagcagcagtcgaataacatcaaccatagagattctcgttctgcttctctctcgaagaacaatacggtttctgatggttagtctctcttgctctattgaaatcgaatctacatttagaaacagatacttaaccctagagtttcctgatttgggaatcaagttttgatctttatgtttagtatcttatctccatgagctgaattaagcaaattcctttattagcctatggaatttttgatgtgaatagatgaatcagacacagatagtgaagaatcagatgtgagtggttctgatggagaggacacttcatggatatcttggttttgtaatctaagaggaaacgagttcttttgtgaagttgatgatgattacattcaagatgacttcaacttgtgtggactcagcagtctagttccctactacgagtacgctcttgatttgattttggatgttgaatcttctcaaggtaagttgttatccttttattagtttttgcggtttagctaggtacaggcacagcatctgcatttagggatagtagggaaaccgatatgggttcgcttttacgattgtgtctcttgaatgtttgatttggattggtcggtaacaggagagatgtttacagaggaacagaatgaattgatcgagtcagcagctgagatgttgtatggactgattcatgctcgttacatattgactagcaaaggattggcagcaatggtaaacaaaatccttaaacactcatttgcatgtctttcacattctataaaagattcacagattgattctgtttatttgcagttagacaaatacaaaaactatgactttggaagatgtccaagagtttattgctgtggccaaccttgtcttccggttggtcaatcagacttaccgcgatctagcactgtgaagatatattgcccgaaatgcgaagacatttattacccacgatcaaagtatcaaggca

SEQ ID NO: 5866 - DNA, 557 bp, Arabidopsis thaliana
gaggacacgaatgatgaggataatgcctacaggaagatccgtcttagaggtgaagatgttcagggaaggaatgtgttgacccagttctgggtaagataaagaccactcctttactggcatattgatacagagtgcggtttttaatctgtgatctctgtagggtatggatttcacaaccgacaagctaaggtcattggtgaagaagtggcagactttgattgaagcccatgtcgatgtgaaaaccacagacggctacaccttgaggatgttctgcatcgcctgcacaaagagacgtgctaaccaagtgaagcgtacctgttacgctcaatccagccaaatccgtcaggttacaacattatcataccatgtgcttactatttggctttctgtaaacagaagattaacattttccttgtaaatgtttcttgattcttgtagatccgcagaaagatgagtgagattatggtgaaggaggcttcatcttgtgacctcaaggagctagtggccaagttcatcccagaggccattggaagagagattgagaaggcaacacaggg

SEQ ID NO: 5867 - DNA, 1125 bp, Arabidopsis thaliana
ttgatgatgcaacgactcaaaacaaacagacatacagaaacagcaatgcttttctagactaagactaggaacgcacctcatcatcactgtcatagatgcaacgcttcaatagaacagtaatccggggctgtcgagcattatcatcagtcaaagaagataaacggaaaataaaaataatggttgttatgatgactataccttcaaggattcaaccataaacccaaactttgcaagtgtggaaacagcagcagcccggacagtggcgttttctagatgcacacgattatatatatatcgtatatacttgcttggatctgaggtgttaggcccctcaattcccagaaaatgaaggatctgtgcgagaataaacatttcaataacacataagtttttaatagcaaccccagatggatgatggaataattacctgtgttgaaagatatgtgaattcacaatcttcaatgaattcacatagatgaagcagtccactttcctttgcatccggaatatctctgataatggtcacaatagaatctactattgctcttttatactcaaatccaccttcttccctaagaatgttgcttaagaaggtcatcctacaaatgaaaaggtgatagatcaatcataagccaaatgctaaaaagataccataacatatttaatcattcaaaaaaatagaaatgctcgagaccaaaactacaaataacaaaccctaaaactttacttacaaggatctgtatttccaatgggaatttcacacacaacgatcttattgcgtccacgaccacaattttgaactcatcagcaatatctgacataaaattagttatctgcttcatcaaacgttctacacttgattcgttccctgttttcaatagtgtggttattgcgagtgtagcaatgcttctattttgatcagagattaaactctccatatcaatgttgcagttggtgacagccataggatgagtcattgcaacctgtggttcaaacttgtgtttagtatacagtgaaatatctcctcatcctcatgataaaggtaatgatgaatctacccagaatagtaaacatcatttcggtgtcaatgtacaaagagaacagttgaaagcattgcaaaccttg

SEQ ID NO: 5868 - DNA, 1505 bp, Arabidopsis thaliana
taaacaattatatacacacacatgcaggcacatcctccgaaatatggtagtattagaatttatactacaaaagtcaaaatacacgaaggccaaaaaaagaaaaaaaaccccaatgaatgctctaaagaagcgcaaggtgtgtgtgtgtaattaaattagattgagtcaacattgttgacctaagcccaacaacatgtctctcgcatgcatttatccattttagatcccaatgaagaaataaactagtactaatatagatgtataaactataattatatagacattaaataagtattcattttaccatagtttatttaaccgatagagtagtatctagctatagtggaaccttaattagtataacaaaggaaaatagagaggaaacaaaaccagatagtacgaggctccgtgttgaagagggtgaagagcgacgccatattcatcggtgacaatgggctgacccgcggaattaatcagaacaacctcttccccaaatgcatccctcacattgaacggtcctgagctcacttcaagctccatttcattgatgaaaactcttattcgtgcgtccgctgcatccatatttagccattgttatcccattatttcatgttagtataatgactataacaatctatataaaacaaaattgtaaagctcacacaatctattttcaagaaagagagagagggtatatagaaataaagaatcatctaaaggctactaaacatgaaggttttaaaaaaagatttgtatggatcaatgtgtcccttacattgttgacacaaaattaatgtatctctacgattgagtaaaatttcaacatgtatataagtaatctataacttaaaaagggtgataactttatatattaacattaccttgaacttgaagctggtccgaagttgatgggacagtagcgagagagtgcgaagtagtaatagtggtggcagtagaagtagtgggaggaatatgaagcatgatgttattgttgttgttgttgttgttgtaagaagctatttgatgattagtggtagcgtaacaaatctgagtctgtggctgttgcaacatcttcatcctcatttcttcaacttctttctcactcaagtgttgttgatgatgagttccataactcacactaccgttcatgatctcactcagcaggagtccggtacacgttggagccggtttttgttgctcaatcatatcaccggagagaaaccctaattgggatgagacggtgataccttcaaaccctccgacagtggagaccgggaagagaaacgccggttccggtggaaacatccccatcatttgactaccacccaaagagagattagtgttgttcttgttcttgctttttcggggtttggtggatttggaggaggaagaggaggaggaagaggaagaggaagccgaaggttgcggctgcggctgcggttgcgtttgagggagagagtgtttggagtggttgtggaggaggcggagtatccactttgaagttg

SEQ ID NO: 5869 - DNA, 1008 bp, Arabidopsis thaliana
ttttataagcaaagcttatgaagtaaacagtgttatgcatgcaaaggtcagcactgagccataagaagcagattttgatccataaacttgaaatactaaatagaaagaaaaaaaaagagagagagatatcttaaaagtaacagagtttcaggaactattgtgacctgttttctttatttcatgctacaaagcaaaatctcagttacgattaccaacaatccaagatttgaggtattgaaagaagtctgtaatctcacttaaccacacagatcttaataactgaggcagctccaatacggtgcagcgccacgattgcatcaccacggttgcacagtcctctctgagtagccgacttcagagcagcttcaatgataacttcggtggcttcactatctgttgcctttgcagatccttcagccaacatagggattagacctctgtatatcagactatgccttgcaggtgactcgtcactacaagaccagtcaaaggaatcagtggtcataaccgggacaaccactgacagaatcggaacagccggtctgtatttagccacgagattagcagttgaacctccacgtgtcaacacaatgatgagttttgccctcgctttgttagcagtccgtacagcggatgatgcaagactctcgagtgggctcattggaagtggagttgctcggatcatctctttaaagattgtgttgtaatcaagcgaggattcggcttcaatgcagatcttagccatgactttcacagctatttccggataagctcctgctgcactctcaccgctaagcatcacacagtcagtaccatcaagaacagcatttgcaacatctgtggcttcagctcgggtaggccgaggtgattagaacattgactccagcatctgaatggctgtaacaccggtataaccgcaaggttacacttgtagatcaatcacttttgagccaagaagatcttctctatcggaatctccatcccgagatcacacgggcaaccatgaac

SEQ ID NO: 5870 - DNA, 807 bp, Arabidopsis thaliana
tgaatctagcacgatcgatgcagcgaattttacaaagagtaacattgaggatttaatgcttgcttcagcagttacacggggtggaaactctgagtcgagattttcactagagtgatgaccattcgagagggactgatgctgctgctggtattcacgttgtaaccttacgtactcacttccagcgatgacagcactaatacaccgagccaagcaatgaatattgttgctgaatccgccagtctcgatgttgaagccagtagtgttccaggcgtttgaggtcatgaaagaggcaaaaaagtaaggtaacaaactccatgagttgtcatttgcacctcctacctcttctaggattaatctaacccattcagagtcgtgatcacctgctacgccaacaccatttgccacgcctttgatccttctgatttctttcttttcaggtatttcttcaggtatgtgctcaacgatgccagagatcatcgagtgtatcaaggatgcattgtcttcaagaacagcaccagaggcttcagcgaggaggtcatcaaaagccaacgcttgaccagcttcaatacaaaatcctattacggtatccaaatcaactatctgcctaacagatgcgtctctctccactctgtcaccagaatgcatacttgcagcagctgcttcaatcaattcccggtttgatctcagagaagtttctatgcagtttaccagggcagctgtatgtactttcatcatcctatccagccggtcaactccatagccgccgaagatacgaacaaacgcctgtaattccttgaggtcggtgac

SEQ ID NO: 5871 - DNA, 1038 bp, Arabidopsis thaliana
aattacaatcccctactctattatttagaaatttaaaaagaaaaaaagaaaaagtcgcaaaacccacaattaaaactaaaacaaaagtaacgagttaaaaaatgacacgtcaaaactcggccgagttaacacaagatttctcaccaccgagtcgacaccggctccgactaacatcaccggaattaagcaactcctcccaatcaatctcctcattctccaccaaatcatcatcttcaattttagctctcaacacttccaaaactcttctcgccttctgcttagctctttctctcccactcctctccactttcaccaactcctccaccgcattcgccgccatagccaaccctttaaacctcaaaccaccgtcgtgactcaacccatacaaaaccgcaacacagctctcccgagtcgactcattaacctctctatctcttctcaaaaccccaaccatacattcaacaccacccgagtcaagcaaagctggtcgactcaccggacacgaagccatattacaaagaatcaacaaaacacgaccaatcatctgtcctaaactcaccatacccaaaagcatttgaacagctccaagcttaactagcttccctctattactctgtacaagagaaagatgatacaaagctaaagccgagtcatgccgagttaactcagtaccaactcggatcaaatgaagcaacggctctaaacctccgagaacaccaatcgccgttttgttctcatcttcaagagctaaactgaagataactccggcggaatgctcctgagcttcgacggaaccgcatttcaaaacgtcgatcaacggaggaacgattcctgaccgtacgatcttgactttattagatttttccaaagacaagttcacaagaaccgccgtgacattcacctgaaccgtcgcgtatctggaaacaatcagtgacttaagtgcagagattactctcgttgtacataaactgattcttgaactttcatcgattcttgtgatgcgtcgaatcgaaatcaaagcttcttcaatctctgaga

SEQ ID NO: 5872 - DNA, 480 bp, Arabidopsis thaliana
gtacctcctctggtcaacacgatgatgagtttggctttggctttgtttgccgttcgtacagctgatgatgcaagactctcaagagtgctcattggaagtggagttgctctaatcatctccttgaagattgtgttgtagtcaagcgatgattccgcctcgatgcagattttagccattgttttcactgctatttcagggtaagctcctgcagcactttctccgctaagcatcacacagtcagtgccatcgagaactgcgtttgctacatctgtggcttctgctcgtgttggccgtggtgatttgatcatcgactcgagcatttgagtggctgtgaccaccggtttacctgcaaggttacacttgtagatcatcatcttctgagccaagaagatcttctctatcggaatctccatcccaagatcaccacgagcaaccatgaatgcatcagtttcacgcaaaatctcatcgaaattcaggact

SEQ ID NO: 5873 - DNA, 1121 bp, Arabidopsis thaliana
gatggggtgggtaaagaaaagacgaagatgtggacgagcaacaatcagatcgtaaaccaaaacaaagaacgactgaaacgatatctcggccagattgatttccctcgccggttcatcaaggactcagagacaccgttactctctcttgccccattttttagaacctcgaggttttcctttttccaaaatcaaatccaaaaacatttcaattcagaaacttagatccaatcaaagagacgagactaataaaagtaagacatttaataaccctagaaatcgagataaaaaggcttcggagcgacagagaggtatttatagtttgatattgactgatgccctaagttctccaaaacaatgtaattgcttttgggcctttgggcatttgggctgaaatgtaattcggcccaacttatataacattctatttgattggaaaggtttaattcatggaaatgtaaatggctagagctaatggcttttgtgtgacaatcttcatatgctataaacttatagtctaaacttgaatatattaatcacataaataacgtcattttttttcttctaattattgtatctttaagattgtattgtagttagaacttagaacccacacaattattgcataaatagtcactcactcccacgcttaacacataatattcatcacttagttattgattttactaacatcaaccccaatccttttattgacattaccacacatctttttatcatcatatacttttagctttcgtagaagatcccacatccatttagaatgtctcaaccacagccaccggattcaaatccgcagctgcttcagcatttttcatcgcctcgaaccgtggctccttggcctgaaacttgagtccggcatagagtttcatgtagtcatcaaacacaaagcttgggtattttgagtctttatccacaagagatgttgccggagagagtctcagcatcgcttccggggttgtaaaacgacgcgatagacatcctgtttccttctttctgggtcacacacggtgcattacctcttgtacttcccgtttgttatccctacgcacatttgacaaaaaaggtatatatcccggttaccctaaaccaatttgttgattaat

SEQ ID NO: 5874 - DNA, 616 bp, Arabidopsis thaliana
  unsure (1)..(616): unsure at all n locations
gtatgaagatataaaactttattcatagtgtattagtgttagacgttttgaagatgatggactactttcttttcttggttttgtgatgcagaacatgggaattctctgttgcattgtatatgatccacttgtggccaaactctctgcttctcgctgccatttatggtgctatagaatctggttctactgcaatctttggtcccattgtggggcaatgggtcgagggaatggactacgttaaagttcttagactctggctcctgttccagaacctctcctacactattgctggtggtgcagtcatcaagttgttgctagtttctgatcttaagtcccggaatctcccggtgtttgcaatcttgattgtgttaacgaatcttgctggcgccattggagttctttcgactcttgctggcaccattctgatcgaacgagactggtaaatgtctagactgtatatatttgcaacacatgaatgcaatcttatgtatagtgtcatatttgcaacatgtatttcttttggctcttttggcaacaacagggctgtggttatgtctgaaggtcatcaccagcagtattgacaanaatgaattctgtcattagaggcattgatttg

SEQ ID NO: 5875 - DNA, 882 bp, Arabidopsis thaliana
gccgatccgtaatcataatctgaattcgaatcttctttctgcggcggtggagacaaaggcaaaccatgtttatcacactgagcaatacccaatttcatcttcgatgacaatacactatggttgtaacaaagatcactgtttccaccgattttgaacacttcgagattcttgataaagctcgcattgaatggtagaactccatggaaggcattgttagctagattcaagtgtgtgagatacttcattttggagatgaatcttggaatggtgccgtttagttggttcccactcagatctaagtgtgtaagctctggaatggatgagattgaatctgggattggtcctgatagcttgtttgaggataaagataggttttttaaggagattaggtcaccgattgagtcgggtatgtctccggagatggtgtttttggataaatttagagactttaggtttgagagcagagtaatggaagtgggtattgagcctttgagtagattgtctgataagtcaatgaatgtgagatttgagtggaatgatttagggatgtttccggagagatttgcgtgtgagattgtcaaagagacgatctcgtgcatatttcctaggataacgaagagaccagaggttgagactggaacagaagagactgtgaggtcagtgaggttaacgagacgagctaagaagactccggagaggccattacggcggcggaggaaggaggagacggcggtgaaggagtggagtgagtcagggagacgtggaggaggggagagtgaaggacagttgaggaaagagagagaggttagagatggtgagagactctgagagctgttgtggagatggagagatcggtggagcaatttgtgaaggagatggaag

SEQ ID NO: 5876 - DNA, 575 bp, Arabidopsis thaliana columbia
atctcgtctgaactaaaacttggaagaggttgcaaattagttgttattgcagtctatatgaacccaatgtttcgtctgaacctaacgttgggttcaggcagatagtattgtcattttttttggggattccgaccagccatcgtaggaggagatgtcttacggagccccccttaatgtgacaaatcctaactatgatattgaagaatcgcgttttggaaagattgtgtgttatgaccaaagtcttctctttgagaagagagaacaaaagggatgggagagcggaagtacgctagcctcttcccttccgttcttcataacgcaactctttgtcgcgaaccttagctatcgtgtcctctactatctaacccgacccttgtatcttcctcctttcgtagctcagatcctcgtacgtatgcaatttttgctacatcaattttttagctctctagttccgtatgtgtcttgatttgttgtgattgtatttttgcagtgtggattattatttagcccaagtgtgctcgggaacacacgtttcataatcgcacatgtattccctacagattccaatggtcttg

SEQ ID NO: 5877 - DNA, 598 bp, Arabidopsis thaliana
gggaaagaggattggtggcctcaacttggtttgcctaaagatcaaggtcctgcaccttacaagaagcctcatgatttgaagaaggcgtggaaagtcggcgttttgactgcggttatcaagcatatgtttcctgatattgctaagatccgtaagctcgtgaggcaatctaaatgtttgcaggataagatgactgctaaagagagtgctacctggcttgctattattaaccaagaagagtccttggctagagagctttatcccgagtcatgtccacctctttctctgtctggtggaagttgctcgcttctgatgaatgattgcagtcaatacgatgttgaaggtttcgagaaggagtctcactatgaagtggaagagctcaagccagaaaaagttatgaattcttcaaactttgggatggttgctaaaatgcatgactttcctgtcaaagaagaagtccagcaggaaactcggaattcatgagaaagagaaagccaaacagagatctgaacactattatggacagaaccgtttcacctgcgagaatcttgggtgtcgcacacgaaatcagccggggatttctggataggaatcgagagac

SEQ ID NO: 5878 - DNA, 751 bp, Arabidopsis thaliana
ggtctcgggaagaagctcaaagacttgatggatagttttcaaggtctacgtgctcgtatgaacaatgagtataaggaaaccgtagagcgcaggtctttgtttttctttaggtttcttgtgttgcaagctatgctctgtttgggttgcaagttatatgattatgttaaaattggtgcaggtatttcacaataacaggagaaaaagcagacgagcaaacaatcgataacttgatagcgagcggtgagagcgagaattttctccaaaaagcgattcaagagcaaggaagaggtcaaatcctagacacgatatctgagatccaggagagacatgatgcagtgaaggagatagagaagaatctactggagctgcaccaggttttcttggacatggcagctctagtagaagcgcaagggcaacaattaaacaacatagagagccatgtggcgaaacggagctcgtttgtgagaagagggactgatcagctccaagatgcgagggaataccaaaagagctcgaggaaatggacttgttacgccatcatcctcttcatcgtcatctttatcctccttctcattccccttctacctcacataatgctcatgttgaagtgaattttctaaagagttgaacttgaaatctcaaaatcatctcttcgcttgttatttttcctcgtattttatatttagttaatattgaatgaaatagttagattacggtgaaccatggcaacgatttgtagagatttttgaag

SEQ ID NO: 5879 - DNA, 580 bp, Arabidopsis thaliana
ggaacacctaacttctacatgcgtcctatcgaaggtttaaccattctcatcgatttagatacaaagcaagtgatcgagataaccgatacaggtcgggctatacccatacccggttcaaccaataccgattaccgcttccaaaagctcgcaaccaccgacaaaactcggcctctaaacccgatatccattgagcagccacgtggtccaagcttcgtgatagaggacaaccatctagtgaaatgggcaaattgggaatttcatctaaaacctgacccgagagcaggtgtggtaatatcacgggtaagagtacacgacccggatactcatgagacacgtgacgtgatgtacaaaggtttcgtgtctgaactttttgttccgtacatggatccatcggacgcgtggtactttaagacttacatggacgcaggggaatacgggttcgggttacaagccatgccactcgtaccgcttaatgattgtcacgaaacgcagcctatatggacggagttttcgccgcagccgatggaacaccgttcgtgagagcaacatggtttgtatctttgagagttcgctggagata

SEQ ID NO: 5880 - DNA, 912 bp, Arabidopsis thaliana
gcacaagtatagggtcaatgacccccggtggatttttaaaaagtagctgatattttatttaaactatgaaattgaccccaataaaataataatattgacccctatcaaatttatgttacataactataatattttaagcccaataattatacaatatttgtatacatattgtgctaagtctaataaaatttgttttgagtaaatattaagcccattgatataaaaaaataacctaaaattttaatatttattcgtccttaatctaacaatgttatagtttttttgcttcagtttcttatttttgttttcaaaaaacatttgaccccgatgaataagttttttggctccgcactggctccagcggcatggcttgtaacccgaacccgtactctcctgcgtccatgtaagtcttaaagtaccaagcttccgatggatccatgtacggaacaaaaagctccgacacgaaacctttgtacatcacttcacgtgtttcttgtgtatccgggtcgtgtattttgacctgggacataatcagaccggctctcgggtctggttttaaatgaaattcccaatttgcccattttactaaatggttatcttcgataacgaagcttggtccacgtggctgctcgagtgatattgtattgaggggtctggttttgtcatggtttggaagagtagaatatcgataatcggtattagttgaaccgggtatgggtattgattgaccggtatctgttatctcaagtattcgcttcgtgtctaaatcaaaaagcagagtcaaaccttcgataggtcgcatgtagaaattaggggtatcttgagttgagaacactgaattttagtaaccttttggtgttgtcgctttattacaaccagccctagagattgggatcaaacacgtcgttagat

SEQ ID NO: 5881 - DNA, 555 bp, Arabidopsis thaliana
gaaagctcctcaagtgatttcccattagtctccggaattgtaaacgtgagaagcaagccaagcaaattgattcctgccatgatgtataacgtgttactcatacccaaagctttaaccaaagccgaaaacccgaaagaaccgaccatcgcaccggctttaccagacgccgccgatataccgtgacaagtcgaccttatcctcgccgggaaaatctcagccgggacaatgaaagtagttgcgttaggtccaaaattggagaagaaaaatgtgaaagagtaaagaacgacgaaaccaatccggttagccggtaaggtccaatgatggtacggtatggctaaactgagcatgaagatggtcatcatagcgaaacccatgatctggatctttttccgtcccatataatcgatgaaccctacagtgaaaaagtaaccgggaacggtgctgcaacaagcgattatggtttgagccttagcgatcatgtagagctcttggattgcgttcatggttttagcgaagtaaccaccaatggtggtgaagataccttctggacaagtt

SEQ ID NO: 5882 - DNA, 493 bp, Arabidopsis thaliana
caaaatctctataccaataatttgaatgtttgtgtttatgtaggtgatgcatcttaaagagagactagaggaagaagaagcagtgactagaactttacgagttgcttttgatggctctattgtttctctcccaagtctctcctcattgtttcttccacctcaggcaataccaataaacataacctcacataatgttaattatttcttaatgatcaaacaatgatgagattttattgttcaacagttttctgagctcatacaagaactagccatcgtggaggcagagattctctgtctagaccgaaaaatcgaggagctaaagcttaaactgtattccgaacagagacaaacgcaagagatacaattgcagatgaccgagcagaagaggacattggcaagacagagccatgtgagacagagtactctgccactaagacatgatcttcatcaacgatctttgtctcattgttaccaacgttctacactagacact

SEQ ID NO: 5883 - DNA, 699 bp, Arabidopsis thaliana
tccactacacgtcactggtgttttgtcctttctgatcgatactatggaggctgctctatggtgtggttttttgggataattggtcccaactccaaccatgtagctcattttctgggggttcgacccaagtatatagtcaacctatataacatgaggacatcgtcattagtatatatgatattgagtaagtcatgctatattttcaacaacatgtcttatagttggtactatattaggttttattaactacctgggaacgagcgacttggagaagatcagaagcttgaagagcaccatcgggacagtcgatggaggcttttgcggcttcaagatatttagaatatgctgagaggacgaaagtagcggctgtggtgtattggaggttgttccacggcaagaagtagagcaaaccgccaggggttttcttaacgttgttgtcacctttttgagcacagttgcagataaactgctccgccatactcttgtactctacgatctgttcactgctctctactttcccttcaagtgctagctgcatttgcaaatttttgtattatgtttgtttcttgtcaaataagtcagtgatatgtttctttagtgaaatagtcataaactaccttggcgaccaagacttgtgcaccacgaacttatcatcccaggcaaaaacagtccttggacctcctgtttctgcttctgtta

SEQ ID NO: 5884 - DNA, 529 bp, Arabidopsis thaliana
aacaccggaggagtagagctgaagataaacccaccagcatcgattccaactgatactggctgttgagctgcagcgatttgtaggctcgcctcgttttgggctaccttttggtatccttgtatcgtaactaccttatttttggatttttcttggtcgcaggtaccctctatgcctgtgtatgggtagtcggtctccgtggcgagtccaccattggttttgatgaattcaaatgctgtttccattaatccgccactacagcctttgttgtaagtgccgacatcacaatctatgagttgttgttctgagagagacactaaattccctgttttaatcttgttgatgccttcaatagctgctactgcagagaatgcccagcaacctcctgcaacaagaaaaacaaaacgcaatcagaatgtcatcagttgaataatgaatgtttgcaaggttttatgtttagaatgaattatgtaaaaacataatttcataccgcattttccttgatttctgataggagtcacagcaccttgag

SEQ ID NO: 5885 - DNA, 1108 bp, Arabidopsis thaliana
tagctggtagtaagatttttgttctgccaatctcctaaatgattcttatctttctcccattttattaggatgagatgtaattatctacttagataatagatgtacacctttttttttttgtttgttctttcttattatctctggtaagatgtattacatcgacatttataatcagtgtaacacgttccaaacattttactatattttgtattatgattgatggactaaaaaatatctgcagtcttgcattctttttcatcgttataaataatttagaaatttcaaaccattaatactaaaaacacgtaattacggaaaaagtaagatactaatcagattctttattaagctcagctaaaccagtagtagtaaaattatcactggccttaaaaccctagaaatagaattaatctcagctattttgtcttaacgactctttattgtcccgacacacgaaaatggcgtctcttagccaaatcaccctgccacgcgcgccgtcgtcggagattggcctcttacgccgtcgattggagcggccgatcatcagaacccggatcggattcaacggccggattgcgagcgtattgactaacgcaggggaccaagcggtgtcggtaaaagcgagtgtgagccagaaggtgattgaagaggaagccaaagttattgtgggtacctacgcgcgactccagtggttctctcgagtgggaaaggttgtaaattgttcgaccctgaaggaaaagagtatctggattgtgcatctggaatcgctgtgaatgctcttggtcatggagatcctgattggcttcgagctgtcactgagcaagctggtgttcttgcccatgtcagcaatgtttattacacgatccctcaggtatttattcgttactgtatttttgcattactgattctgttgatggctgacgaaagcttaaaacttttgttgttttaatctctgtgtgattgagctatggcctatggaaacatgctaggggaatggtggattagtcttctacgtataatagcgagattattctatgacaagtacttggcatttgaaatttcatcaaattggattgtttctacgccttcctatagaaatttttatgag

SEQ ID NO: 5886 - DNA, 605 bp, Arabidopsis thaliana
ccgccttgaaacaaaaagatggaaaggacaagacctcagagaagacagtatcagcaggtgtcgcaggaacagcatcagcaggaggtgaaatgggaggcaagctagtccatttcgatggtccgttcgtgttcaccgccgatgatctgctctgtgccacagctgagatcatggggaaaagtacatatggcacagcatacaaggccacattagaagacggcaatgaagtcgctgtgaagcgtctgagagagaaaacaacaaaaggagtcaaagaattcgaaggagaagtcacagctttaggcaagattcgtcatcagaatcttcttgcactaagagcttactacttaggacctaaaggagagaagcttctcgtctttgattacatgtctaaaggaagcctctctgcatttcttcacggtaagtaaaatcaaagcaaaactctaactttggatttgataaagttgacatttttattgatctctgacattttgaatttaacagctcgaggaccagaaaccctaattccgtgggaaacaagaatgaagatagcaaaaggaatcagtcgtggtttagctcacctcacagcaacgagaacatgatccatgaga

SEQ ID NO: 5887 - DNA, 415 bp, Arabidopsis thaliana
caactagccatgttctttcgcgatgagcttctgtcatggtttggaagaagacctcttggagtgcctattcctcctgttgcaggaattgctactttgagttcacccgagctgaagcacaaagttaactctaacgtggacgatgtcattggacgaatcaggaggaatagcaccacagtatttctctgaagaggtagaatcagtgtttacatctccacgagtttttgatgcttactaacattctcataaaactcggagacggtcctgtccattctctgaactaataaatctgatattttcgtgttattcatttcaggatgagaactcggtggagccgccacagtctgtacaaagaggtgtgagtgaattggtggaggcagctttgtcgcctcgcaacctatgtatgatggatccaaca

SEQ ID NO: 5888 - DNA, 961 bp, Arabidopsis thaliana
gattcgatcacaaaacattattatcccctccatcactctcccatacaacacatatatcctatcccgtcccgcaaccgtcaccgcggtcggaaagccctcgatgtcgaggtcaatttcgtcgtaaacaactccttcgctccagctatcttggcttttgagtaaccaaagcttcttctgtgacaccaccatgactgtgccgtctctccgtctcctcgtcatcccgtccgccgcaatcagatcaccgtttaacaacaccagcctcgcattcccgctatcttcgtcaactttgaataccttccctgtgttgctctgcaccaccaggagatagcctttgctgatgtacacgatcccgttcaagccgcaatcgcggaaacttgcgtccgcgtctgccgccacaggctgcgaattgaacaacggcgatttggagaagatcgaagctgcgccgtcgcgatcgactttccagatgaagtttttggctgagttggtgacgtaagcgttgcctttgaaatcaaccgccacgtcattggcgacatcacgagcgatgtcttcgtcgtctccgggaagagacgggagaggagagaggaatacacgacggcctccgctgcggagatcgtaggaggctagggcactgaagggagggagaggcggcaaactctggatacaggcaaggagacggcgattagtagagtcaacggcgagaccgaggatagtggagttctccggtagatcgagatcggagattagggtttcgatgactccagcgtcggagacggaatgaattgtgcggctgtggagagaaccgactagaaaatgctggtcccttggatcccaggttagtcctccgggtagagtcccggcgatcggaagttgataacgtggcggttatcggcggaggagggaatcagaagtcccaggaacaagacggcgaagagaattgggaagacgaagaaggatctgtatc

SEQ ID NO: 5889 - DNA, 727 bp, Arabidopsis thaliana
ttttttcttaacaaacatagcatattatgcactgtactagagtgtaacgttcaaacaataaactaactgccaataacgaaatagactttttctcttgaagtaatattcaaatctttcataatgcattttaacaaacattcacgataaacttctttgttacgttactcctttgtctcgatgattatcccacatgtcattttccataaccaaaaacaaaagtatttacacgagattcgttaaaacagccggaatgatgacactgccattttacgtcggacacttttagttcccaacatctaaacacactaaacacaattagtctcaaagcttaatagtaatcaaccattccataatctttgtcacaaaaagagctaaggaagagtaatgcgagatattgttgaatccatttaatgtttgaatcataagaatttctcagcttaaaaccaagaagatcaattctacatttccccttacatagtcgcattcagaaatacaataaaagaatcatagtaattgagtttgttgtctacagagaagagagtccttcaaacacgacctgacgcaggagttgatgcggcggcaactgcggcggaagtggcggctccgctaaggaaagacaataagccggtgttagcaggttcttgatcatccaagaaaagatcctccgggactctaaacgcgccgtgtaagcatacgattccgaaaccaatcatcaaagcagaggtca

SEQ ID NO: 5890 - DNA, 581 bp, Arabidopsis thaliana
ctttcttctcccatctggaaatcgaacacaaatactgcacacaacgcttctatcacagtctgctttaggctcttctgtcaaaaccggaaactcaagcaggtcgcatgacaaacaagtttcctcctcatgttcggataaagtcattatgtcttcaaattctggcccccaagaaggagccacaacgcgatcagacgtaaaagtctcctcctttccagatttgattacagtcttttcttcttcaatagcgtttccccagaaagtagccatgtcttgatcatcagcgttgttacttgaacaggagatcttctctgttttcatacgtttgttgcttgtcagagatgcaacgtgttcgtgaggaccagaatccatgtacttcatcaaatcctcgagaaagccctgaggttcaatcacaccgctccacatacgcatcttctggccagtgatgggatcgatgagaagcaccacaggaggaacagagtcgatcttgtagaaagtagatattttctgaccttcgctggtatcatcatagacctacaacaagatgaagctggacttgatggcttgaaaaacagcgtcgtgtg

SEQ ID NO: 5891 - DNA, 971 bp, Arabidopsis thaliana
tactatttacaaggtatcactcgccttatttcgaggagctgaagctctttatggatcaggcgggtccaggctaatcaagttgggtttataaaagggcggttgctgtgtgagaatgtcctccttgcttctgagttggtggataactttcaggcagagggtgagaccactaggggttgtcttcaggtggatatttctaaggcatatgataatgtaaactgggagttcctcatcaatattctcaaagccttggatcttccttcggtgttcattaattggatttgggtttgcatttcttctccttcttacagcattgctctgaatggagagttggttgggtttttttccaggtaagaagggcattcgtcaaggagacccaatgtcttcacatcttttcgttcttgtgatggatgtgttggctaagtctctggacttaggagcaatcaattgtcttttcaacctccatcctaaatgtttggctcccatgattactcacttgagtttcgcggacgatgttttggttttctcagatggcttagagtcttctattgctggaattctttctatattggatgactttaagcttggttcaggtctaggtatcaacagagagaaaacagctttgcttttggatagaggaaattttgaaagaaagagacagttggctgctaaccttggaatcactcatggttctcttcctgttagatatttgggagtgcctcttatggctcaaaaaatgaagagacaggactaccagcctttggttgaccgtataagcatgaggttctcctcttggacagcgagacacctttcattcgatgggccgcttcagctccttcagtctttcatctactccaccattacattctgggcgtcgatttttattctcccaaccagtgtcttcggaagcttgaacaattgtgtaatgcttttctgtggacaggtgcgcctaactcagctagaggagcaaagat

SEQ ID NO: 5892 - DNA, 540 bp, Arabidopsis thaliana columbia
ggtaattcctctgaaacaagtccatcctgaggctgtgtaacggacatgttacacggatatccacctgctactggtgacaaagggtacccattctgtgttatttctgcaccatttggggatgctaaatagccatttggtgacactggatacccattagaaacccaaggttgactcggtatgaactcagcagcatgggggttcattattcttgggccattgaattgattagcctcaccattggactcggtgctattggggaagcttggtttgttacgcggaaccctgtttccagatcggttgtaaccaccaccagagagtctaggcccataaggaactcgagctgttacagactgatgaggagttgatctgcggacatggttaataggaagcattggtggcatattcaatggagaggggaggattccaccgtggtctttgaatcctggaactgcaattgatccaaatattggaatggttgttggggtatacggcggtgcagaagcagagagcttcttgctcatctctttttgtgctcacatg

SEQ ID NO: 5893 - DNA, 1529 bp, Arabidopsis thaliana
ctcgacaatgatcaagcagggtaccatgtccttgacgagtccactcatttcagcagcgatcttcaaccttcttcaaagcatttgaggaagccgagtattgggattcttgagcttgggattctcagtgctaggaacttgatgcctatgaaaggtaaagatgggagaatgactgatccctattgtgtggcgaaatatggtaacaaatgggtcagaaccaggactcttttagacgcacttgcgcctaagtggaacgagcaatatacttgggaagttcatgatccttgcacggtcataacaattggagtctttgacaatagtcatgtcaacgatggtggtgactttaaggaccagaggattgggaaagttagagtcaggctatctacgctggagacagaccgggtttacactcatttctacccgttgctggttcttacacctggtggtttaaagaagaatggtgaacttcagctagctctgaggtacacctgcaccggctttgttaacatgatggcacagtatggaagaccgttgttgcccaaaatgcattatattcaaccaataccagtcaggcatattgacttgcttaggcatcaggcgatgcaaatagttgcaacaagactatcaaggtccgagccacctctgagacgagaggttgtggagtacatgcttgatgtagactaccatatgttcagtctcaggagaagcaaagctaatttcagcagaatcatgtcgcttctctcctcggtcactctggtctgcaagtggttcaacgatatctgcacatggagaaacccgatcacaacgtgtctggttcacgttctgttcctgattcttgtctgctacccagaactgattttacccacagtcttcctctacctctttgtgataggcatgtggaattaccggtacagaccaagacacccacctcacatggacgctcgagtgtcccaagcagacaatgcacacccagacgagctagacgaagagttcgacactttcccgaccagcagaccggcagacattgtcagaatgaggtatgataggcttaggagcgtcggtggtagagttcagacagtcgtaggcgatctggcgactcaaggggagagaattcaagctcttcttagctggagagacccgagagcaactgctttattcatcgtcttcgcattgatctgggccgtgtttatctatgtcacaccgttccaggtgattgcaatcataatcggtctgttcatgctgcgtcatccacggttcaggagcagaatgccttcagtacctgccaatttcttcaagagattaccagccaagtcagatatgctactgtaagtgtaaaagacaaaaaccaaaaaaaaaaaaagattctatttgttgtagtttgtaacaaagaacaaaagtggggaactttgtagaggggagcgaaggaaactagtttttgcctctgaggttgaatcattcgtatattctgtattatacgtgagcttaatcataaaccaacaaatattttttggggtcaaaatattgctttgggt

SEQ ID NO: 5894 - DNA, 412 bp, Arabidopsis thaliana
atttgatagctttgaactggtttggaagaaaaacatccatattaagttctgttttcctcatgaaaaacagataagagaaacaccacataagaggcatcacaaattcgtcgagttttatgatgtccgcggtgctgaagcagcattgaaggcattaaacaggtgtgagattgcaggaaaacgtataaaggttgaacctagtcgccctggaggagctcgtcgaaggtttctttctttcttagatctgctacatgaataatgaatgccattacatttcttacatctgaccatttatttgatctgctagcctgatgttgcaacttaaccaagatcttgagaacgatgatttgcactacctaccgatgattggttcacccatggcaaactctcccgcaagtgagtctatttcttgatg

SEQ ID NO: 5895 - DNA, 921 bp, Arabidopsis thaliana
agcttctgagacaaaacagaagaaacaagactggaaacttaaaagagggaaaaaacatgttcaaataaaatcaaaacattacaatcttatagcttgagaatgaaagctgacatctgctggaattaatccttcccatgaactcaaactccattggtatgtggattctctcgtccaacgtgactactgatgagaatcgaatactcatagtctttatgaagtttccattctttaacaaatacttcaccacatccttctcttcttgtgtccctttgtacaaaatccacttaacagtttcgagactcacaagtaagcattcaggaacagaattgggttgctcccatttagtacggacatgtttggaattcctgcagctccagtttctctctctctgagatcaaacagttcatgacaaagagttgcaatttaatatactgaagatgcaacaacatcatctagttttggatcaaaacttactgattggtagagtttgagagatcggagtttaggtgaacgtctgaggataagattcaaccaatctaaggagcacataacacatagctctagacacacgagctggtcaaagtctcctcccggatatgaaccctgcaaaagtgacagcatcatcagccgaaactaaatataataaacgcaaaagaatcttaaacacgagaaacatagagactttaccgtttgtggttttaaacacaaggaaagttttttagacgaggtaagactttccagaagcttctcagaatcaatatgtctaaggtggatttctgcatccaattgctcgggcatattcactaatgagcaaaacccactaaaatgatcaacaatatctaaatgctttaaagaaggagcattgatcacaaatccatgatcagtttttggattgtgataaccttcctactgtgtagcgga

SEQ ID NO: 5896 - DNA, 1147 bp, Arabidopsis thaliana
cttcttttggcgggaagcactaaatagattttccctggctcgagtgttttgtccgcgggcaaaggagccagctttctcttcaccgtttttgcgtcgttgttgaatgatatcgatgacggatcaaattcgacgaccacatgttgcggattttctagcataatctcagccaccgttgtctcttcctctaagttttgtacccttccgtcggataatacaacttttccggcagccatcccggccgcatccaactttcgggaaccagcaacgttacccattctcagatcacagtgatcctataagtgtctttgtgtaaattgtaaatatatataaacacacacatacacacaacacatgaaatggtttggtttgtattgagttcgttaaacggttccatcttttgactttaatgataaattattcatatacaaaacatgtatattgtattggtgggatcatggggagaaaaatttgatgggtttgttgggtaatcttttgctgctgctaacacacgtacttaaaacttgtcttatttctaagtatgcgtgaaacaaagtgaaaaaactgctcaaccacacatctctttctctattgggttagttaactaactacacaaagtatataatctaatctttttttcttcccttatttgaataaattacgaaacgtgtaaaaaattcactacaagaacaaaccagtcgaggatcagacaaacgagaaaaagctaggtacggtttaagacattttcttacaacacaattaaagagaggaaaaaacgaagcaagacgatacaaaaaacaggatttatagaagcaagcttacggcttaataataacacagcgtgtgtttgtcttacttgatgtattgagaaacccatttgaaagcttctccgtaatgcattttcctgacaatgctgcacatgaaaacctccaatggcctacacgtgcgaatccgatagattcagtttaccctggcctgtagtgaagttggagaggccgagatggtaacggagctcgtcctctgatgcagcatacggtatgtctatcttgtttcctagaatgaggaatggaacgctggctagggattcgtctgagagaagtgcatcaagttccttttttgattctgcaaatctctctttgtcgtaagcatc

SEQ ID NO: 5897 - DNA, 978 bp, Arabidopsis thaliana
ggttttcacagaatcttcgctattttgttcagatctgccactgtttcaggtttgaactaattttacataaattttctctcctaatctttctctgtgtcatctttggttttctcaatcgattcgatatgaatttgatttggtttagcttgattcgatttgatcatcatgtctaactagttctatctaactttgttagtttactgttcttttgtgtggttcttgttcttacttcagaccgatctatgttttttttgctttgtctgcttcacacaacacaatcgtgagcttgctcttatgaaaatctaatctaactaaattttcttaatttgtggtctttttaatttcataatggattaataaactaaatatcctcaaaacgttcttgaagttttataatttgtattttttgttttctccggagatttggtatttgaaatcttcttactatctgaaatgaccctttttgtcggtttttcttgaatctttttatttatttttattttccgggaaaatttcggtttgttaggtaaagttgactgatacaaaggacttgagttgctaaataaaaagcatttgtattgtgcttttgtttggttactctgttctcaaacaaaagctgatacatttgtatttgttgttgcagcaaaaacggtcacaaaaaatatgataaatgtgatgaatccaatgaaaggtggaacagagaaaggtttagatcctcagctatggcatgcatgtgctggtggtatggttcgtatgcctcctatgaactctaaagtcttttactttcctcaaggtcacgccgaaaacgcttacgattgtgtcgatttcggtaatctcctattcctccatggttttgtgtcgtgttttagcattaagtatatggctgatgctgaatctgacgaggttttcgtaaactgagattgatcctttgaaagatgatgagtatgttgatcacgagtatggtgatggtgaagatag

SEQ ID NO: 5898 - DNA, 627 bp, Arabidopsis thaliana
gatgaagatgagaaagagaaagttgatgatgttagagacatagctggtcttgatagttcagtggttgcacgtgatgcagcagttgtgcaagtggcgtctagtgagcacaaatctgagaataatgaaccatttagtgggttggatggtggggattctaaggctcaaccatcagaggcagtgcttgaaaaatctgctatgtacaaccaggtatctgaggtcatccccgttacagggtttgaggtaaaatctgattgtatttctactgattctgtgtcaaataatgaaaaaatagaactaaaggataacaaaattgctgataatgtcaaattagaacaaaatgttaataagttccaagagccatcaacagtcgttggcgaatcgcatccaatggatgtcgaggagccacttgagcagaagacatctgttggaggtggggatgacagcaatgctgcaaacgcagatatgatcaaagaaaataatattatcgatgcaggcgactcagaaaagttgaatttagatagaagttctggtgatgagtctatggaggatgagccggagacaaagcaatccgagtcaattacatctgatgataagagtgcaaaaattgaaatgctttctaaggaggaa

SEQ ID NO: 5899 - DNA, 543 bp, Arabidopsis thaliana
tacttcacggcttgctctcttatcttttcttcatctcctgatatcgaagaaactaaaaacctctctggcttaaacatatcaggatcttcccaagaatcaggatctctattcacagcatagagattaacaacaagtgttgttttctccggtacgtagaactctttgacctcgcaactttctccaaatacccttaacaagacaggagccgagggatgcaatcttagcccttctttaacaacagcttgcaaataagggaggtttggaagatctgattcttgaatcaacctttttccccccacaacggaatcgatttctgctcttaatttctcgagaacgccggggttgttaagtatctccgccatagtccattgtatcgtctgcgccgagctgtcagtgcctccaagaaaaatttcctacagttttttttatatagtcagacctaatctcaaaacatagattataaatgaagcaaccgaaaaaaaaaacatttaactttaccacaattaaagacttgatctgttttctagtgatcttatattctgc

SEQ ID NO: 5900 - DNA, 991 bp, Arabidopsis thaliana
atccagcgaaggaagaaaatggggttgtctcttaaatcatggatgtataaatataaaagggagcactaaaaactactcaaacctactttttcaagagctgtgagaatggttgaagttggagagtggtttaaaaatgggaacatgtatatgagattgtttgtacagatcagacatgcatcacaagctcttttaagaagatacgacttgtaaaggaagatgtaaacactgatgtgtcccaaatcctggaaatttaagtttaagaacagggacttgagaacttctaaagggtctcttctcctcttaaacaaaaccggagctagatcccatacctttttagcaaaagggcagagaagaagcaaatgtagggaggtctctggacgaccacaccttttacagttcaaatctgcaataatatttctccttgctagagcctcgcccaaaggcaaagcgcttttcattgctttccacaggaaatgtttcacttttggcgaagtatggagcctccaaatgtttgtctgccagttaaagtccaagcgtgagtccggaagtgagtttagcttggctagcgcataacttgtcttggtggtattgtcctgacttcacaggtaaccagaccatataatccttcaaaggcaagacgttgatggtaattttccgaatttgatcctcatattgaggtaaatgttttcttatagctgttatatcccacatcttcaaatcatgacaaataaggtcagaaaccaaaagggccttattgtccaacgttggtggtccgatgggcaaaaatgggattagaggtgagagccaagcgtcagaccagacattgatattatcccttgaccagcagaccatcctaaccgttttcttaacaattccttgcctgctaaaatgcccctccaaccatgagaagcagaggaaggagttaaaaaggatgaagagttacagtttttcccaagtagaacccgagagagaaatgagtttggtccttgag

SEQ ID NO: 5901 - DNA, 859 bp, Arabidopsis thaliana
ctctaggataatataatccattacacaaatatgtctggatagcctagctcaaaagacgtgttctcttgccggaaaatcctggtggatcacatccggatctgtcgaaaccacggttttggaaccaaaaatgtttgttcgaaacaacggcccatacctagaaagattcatacaaacactacacttaccatatatatacaaaatctcttcccgtacgttacatattattgaaatctaaccttatcatcctcttcttaacaaaggttgggataccttcgactccacaaggcttaaagaaatcgagagtctctccaatgattggaaaacccatcgatccaggtggtaacttgccagggcacttagggtttgaccatcggtaaagccagtggctgatcctcacaaccaccaaagctaccatcaacattgcaacgttccatatggagctcatcgtgctgcctctcaagtgttgaccacagctacaactcttctcgatgttttttacttttttaactcttatcaaggttaattgaagaaattaatatatgtggatgttatagtgttgtagagattaagtactaaattttcagtcacgttttaattgttctagtatatagcaagttctagattaataagctacattaattaatagttttttctcttgcacaccatgcatgacactatatctcccaatattttttccttttattagtatacttgtccgggtcagatttttgagatcttttggctgtgaccagtctagggagtgtgaatattaaaaatttatgatgatgaagagttggaaagcatatgaaaagtaagaaaatcactgatgattcaccaatcctcttacacatttctctag

SEQ ID NO: 5902 - DNA, 597 bp, Arabidopsis thaliana
ggaaccatgtctctccttagcgtttcgtagccgatgtaccgtttctgcgccatcagtactctccggctgatctcagttggcattagatcttcatcttctccgatgatactgtttcggatcaacattgcgtcgatctctccgttgggagacggaatcgggaacgcatcggcggagattaagaggaaaagaatggcgaaaatcaccaacgctgtagagttaaacatgtcgatgttggaaattgcagattgtgccgacgcgatctctctctatttctctgtctctaagcagaagaagaagcagaaatggggttagttggtgaagaagaagaggtgacaaatgtacagtcaacttaaaccggatttaggttttggtttaagtgttcggatttagatcggccactcaatttaaaccggccggtttgcgaaacaattaaagtagattctatcaacgtttagaagcaagtcttatacaattgtagtcagcttaactatttatctaaacaggaaaaaaaattataacccttcagataaaatggtggtcacaaaactatttaatcataatcatgaacctgagcataaattaataccaaccctttga

SEQ ID NO: 5903 - DNA, 1254 bp, Arabidopsis thaliana columbia
gaggatctaccaaaaagaagacaaagatttgtaagtagaagcaaatcaaagcgtgtagagaactttttttgttgatacgatgtatagctttcatgggtacataatacaaaatcttgactgatgaaaacgtgttgttgtgtgaggtttattggaaaagaatatgatttttttcgtccggaattgtggcaagagaatgcgcgtgaaataatgaatgaaacataaaaccatttattagttatggaaggaagttgttggatacaactaaacacgtattgaacataaacatagtaccatcatttcgatttagaatggaagtggatggatacacctaaacacgtattgattgatagttggaaattaaaataaccttttgatttttcacattttttaacctttttgtgttttcaccttgttatgggtaaattaaaggacagaaaaaatatgatgaattcagtagaaagtaaattacgtactctcaaatccgaccaaaaaagaaaaattattgtcttaaagtataagcaactctcaagattttgttcctaagttatagatttttactaaaaattattttgaaaattcattcaaatttcaaacttgtatctcttaaatcgttaattaaataacactaaattttaagttaatattctttctatatttttcaattttcacactcaatttaaatttaatattacataatttattcactaaaccttcaaattattctaaaaaatcaaacatatatacagtctccaataaacccctaatcaaataatcccaaaaagttttgagtaaattctgcgtttcctctttggcttctcgaagaggaagaaaactttggcagagagcgaacatcacacatattttggcctctccttcacgatattcgaagaagtctcctcctccttctccaacgaatcccagatcaggcggcaagtaggcgaatccttacgaagaattctaacttcatcatcaacgatagatactctagtttgattttcaaagtagtagtgtaaaggaatcagaaatggcggtgggagagaaggagcacgaaggaactgtggttgaaagcggcggcgagaagaatgattccgccgttgtactctctgcttccggcgagaagaagacgacgaagcgtaaaggtttgttctcgcgtctttggaatgcgatatttagggttagaggtgatgatttcgagaagagacttaaaaatatctcaaaggaagaagcgactgttcggaatagaatgaagcgtag

SEQ ID NO: 5904 - DNA, 653 bp, Arabidopsis thaliana
tgatcagtggttctttaccttatcagaattgcacacgttaacatcagttgcaatataaggataatcttcctctgtatcaataccaccgttttcaataatgaacttaaaagcataatccataagacctccaccacatccatcattgtaacttgtgtcacaatcaacaagttcttgctcagacaaagatatcaactctcctgtcttaatctgatttataccttcaaccgctccaatcgcggaaaacgcccaacaacttcctgttatatcaaccaacccaaaaaaaatccctgattagctcaaaaccaaaaaatagaaacgccaaaaaataagcgattaaaacgcaaacgcaattggacttaccacaggatccttgatctttgactggattaacagcacctttagctctccaatcgatagcatcaggtaagctgatctccaaccttatacaaatacttctctcccttcaccggaaccctagttctctccatcttgctcctcaagtaaatcgcacgaaactcatcgttagtcaaatcagcgaaccgggtcaacccgacttcgtaagtccgattcgggatggaactgtgctcttcgacgaacttcaagttgtctttgaagatctcaaagcgtctctctttctctccgagaccattata

SEQ ID NO: 5905 - DNA, 704 bp, Arabidopsis thaliana
tgaatataccttttttcttccgttaagagtgaaaatgattatctcaatctcatctctataaataccaagaagtcatccttgttatcgtacatctctctttgtctttgcttaatcataaactactctttcttccttgtcgtttcaaatggcgcaattgtattcttccgtgaaacccacgccaatgttgaaagatgagctagacattgtgatacctacgattcgaaacctcgacttccttgagatgtggcgacctttctttgagcagtatcatttgatcattgttcaagatggtgatccttcgaaagtcatcaacattccagtagggtttgactacgagctctacaacaggaacgacatcaatcgaatcttgggtcccaaggcctcttgcatttccttcaaggactctgcttgtcgttgcttcggttacatggtctccaaaaagaagtacatctacaccattgatgatgattgctttgtaagtgctctatttcatgttatgcttaagtgaaaaagttcttagactctgtttggtcaaaccaaagtcttcttcaaagttgacaatatatgtgcaatgtaggttgcaaaggatccaacagggaaagagatcaatgcgcttgagcagcatatcaagaacctcttatctgcatcaactccgcatttctgtaacacactttatgatccatacagagatggggcagactttg

SEQ ID NO: 5906 - DNA, 721 bp, Arabidopsis thaliana
gatgttgttcgtaaggaagctgagaattgtgactgcttgcaaggttagaaatcgctctcttcgatctcgtagttgtgtagaaacttagcaatctagctatcgatttggtcatatttaggattgatgttgatttagatttgtgtgtgtgttgttgatgtgaatgattcttcaggattccaagtgtgtcactcattaggaggaggaactggatctggaatgggaacgttgttgatttcaaagattagggaagagtatccagataggatgatgctgacgttttctgtattcccatcaccgaaagtgtcagacactgttgttgagccttataatgcaactctctctgttcatcagcttgtggagaatgcagatgagtgtatggttcttgacaatgaagctctctatgacatttgcttcagaactcttaagctcaccactccaagctgtaagatcctctagttgatttagtaatttagtgtatttgtatgatcaagctatatgctaatgggattctttgtttgggttttgttcagttggagacttgaatcacctcatctctgcaaccatgagtggtgtcacttgctgccttcgtttcccgggtcagctaaactctgacctgcgcaagcttgcagtgaatttaatcccattccctcgtctccacttcttcatggttgggtttgcaccactcacatctcgtggatcacagcaatacagagccttaacc

SEQ ID NO: 5907 - DNA, 568 bp, Arabidopsis thaliana
acacttttctaaaagtgttcgtgctctgatcaatcttaccatagtacacagtgccaaagcctccatctcctagtaatctgtctttactaaagttgtctgttgctgcttgaagttccttataggagaagattggtatcttaaagaagacttgactaaactcaacgtcagattttgagttgtctctggagagctctgaaccatctttccttctgtaattcctatggatgacagcaaagagtgccaccaagatgattatcaagatgacagatcctcctattcctatcgacaattagagaggtaactgattcaaattgagtatttcatggaaaaagatgaaacttaaggaggaaaacaggacatctgtttcttacctaatcctagcctcatctccgcatggtagttatttggttctgcaacaaagggacagaagtcgaattatagtcatatagccaaatgttttgcaagtagaattgcagaagttatgatcatgtttcattgtgttcatactgtgtttgcgccaacgcaacggtaattgtttttaccctttgtacattctccacgttattgt

SEQ ID NO: 5908 - DNA, 644 bp, Arabidopsis thaliana
cgtttgtttccattttttttctttccaaaaaaaaagaagacaatttctttttcgaatttgagggcacaatgaaagtgagatactttttttttgtttattgaagaacaatatgatagtaacaatgaacccaacagatttcgttggcatatataacaggaaatttctaagcctaacttgtttgttatttctttgacctaagtccaagaactcaagtcgagatctctcctttgcttattatacacacaagcaaatgtataagtccccatatgcattaccagtaatctccacaagaacacactccattcttgaatcgatgaaaccggttcacatctctgactagaatctctttctccataaacttcgagatgaactttgtaaacaagtgacagtcctcgcacaaacgcaagttcttcgtgattctgattggttctcctttcgatgtatttatcagcccaaacgccaacgcaagtttctcactgtgtcccaacactatcctctctttttcttctgtttcaagctcatacagaactcctttggtctgtggtatgtaccctttctccttcatatcttcggctaacttaaccaagaaagcatgaatctgttccataagagggttaaatcatcaaccgagacaaacgagtaca

SEQ ID NO: 5909 - DNA, 500 bp, Arabidopsis thaliana columbia
gtgaccatagcttcctttcttcactttagccacttcttgtgtctttcttcttcaactcctttcttgccttacgaccacctgtccttgccttcctcttcatgaatgccaaaggaacccgtagcttatcattaccccggaaagagaagcaaccttgtccacaaaggttgaaatcagggaattgctccatcatcacagtaacaggttcccaagtcgcctcaaactccggaagctctttccacatcaccaacccttctgtctcttgtcccttaaccggtagcctgacatctaacaccctttctggttcaaccacccactcaaaagtcggtgtgagcaaggctggtatttcctgcaccgtgtagtcagctggtacaactttcttcagctgagaaatgtcaaacaccgggttgaaatccggctctgagcaggcagctgtaacttgttagcgactctcccaatacgctctatgataacataagggcctgaagtagcgctgtgctagc

SEQ ID NO: 5910 - DNA, 924 bp, Arabidopsis thaliana
cttgttcatcaacagtgatcccttgactcgttcaggaacactctacatatgtccatcagtccatcttggtctcatcctgtaaacaacaaaaaccatatctaagattcgatatcaagtttcagattctctctagtcacattagttatcagtagttcaatataaccttggcacttccgagatcatcccagagcctgagaattgtagctgcagatgatacaatccccgggttactctctattagttcgactttctcttttgttagttcttcgcctaacaagatataggcatgaagcatcactaaatgaacacctgaactcacaaccccattcttcatatactcttcagtggtgggtaagtaacccgaattaaaccactttgcttctaccaagaatgctttacacaaacttgcccactgagaaacaaggacatcatatttttagtagggtttgaaccagttgagctatatgatacaaaatatatatacacattacgttttgaatgataattaccgattgtcgaagagcgtatgtcgggttccaaccatgtgatttgtagatcttcatgctaatctccgttgtgatcatatctagagcttcaaaacaaaccctcatgtatttgggtagcgtcttaagccccttatgatcccatctagacgaatgatttcattatgtttgacagaatgttaatcaagaaaatgtataaagtaatttgtatgtacctctcaacaactcgtgtgaagatggttagttcttctagctccccatagacatcgaaaatgtcatctataacataaacaagcgatattggtttggtaagatcaagcctttgttcggttaaggtcggatcttgaagaattttcatggaccacgtatgccattttaacggctggcttcttgccttctccacatctttttctaaaccaag

SEQ ID NO: 5911 - DNA, 1242 bp, Arabidopsis thaliana
ctcggagtttgcttcaggaaaggatgctgcactgtaagttctctctctctctctttcgaattcctcaattttgaagaatcctggaacttcttatagagactgtaattttggattgattataatgtaatttggtatgagtaatgaagggagtgcttaatctatgatatgaatcgcagaaattctctggattggatcaatttatgtttgattcattgattcctgaaagcttggataatcatttgaagaaagttgaattttttttatgtgtggtttgttttggcaggtggagtttttgatatgcctggtgttgacgatcttaggctatgtcccggggataatatatgcgatttacgtgattgtgtttcagcaccgtgaagagtactttgatgaatacagacgccccatctactctgcttgatttctgtttctttggaactgtgttgctttgacttgtaccaataaagttgctttgcagttgttttcagagatttgaaaacgtttgtgtgtcatttatatgcaatattgaaagtttcttctgttatcagcttatgaaccctcctgctatgtgtgcttatgcatcaggttgttgacatagtgttttcgcaaggcacaaattaaattattaaattgaaaggttaaaaaaaaaaagagtttaattagaaggcgaagaacatcaacagaattgagctcgcgaccgtggaaccgtagcgcaatgccatcgagagacaaggtcgactagtagcggatgatccacccgcaccatgaccactactggggacacgacggtggctacgaccaccaccacgactaccaccaccaacaccaccaaaacgagctttcctcatgaaaactcgaagagagtcatgatgatccaacggattggagtcaccgtgttgtgcaagtcttcgttcactctccttattttcagatgaaattggcaaaggctgagagagtaacaataggagtacaatcaatgaacaagaaaatgccagtgaagtcctcatttctgttttatcaaataatatgtgtgtatatacatgtatctgatcgaaaaaaatcagaaatatgtgttaattttacaatgatgggacgcattatgtgtgcaaaagaattagtatttataatatcgctaggcttaggtaacgaaacgaccatggcttaaacatgggctacttcttctttgaaatgatgtttaatactatcactcaactacacacacatactaaaaacaaaacataccac

SEQ ID NO: 5912 - DNA, 452 bp, Arabidopsis thaliana
cgagaaaatcgccactaatctcggaaccctaggtttcatttgggccacggtggttcttctcggtggattcgctatcacgctcgaaaaatccgatttttggttcatcaccatcattctcctcatcgaaggcactcgaatcttcagcagaagccacggagctcgaagtggcagcaccaggccacgtggactgtatccggcgtcggaatcagtagcttccgcgtgctccaatcaagctcaatttcacttctcagaaatttaaaacgaatcaggtttcgataatctcttctctctttgcttaatcgaattggaatcgattcaatttagggtgaacattttagtttctctgcagcgatgggatctttaagccgatcctcgacaatggattgagagaagcgacgacgagaatcggacgacaagagatctttgatcgtcgaacaactctgacatggaag

SEQ ID NO: 5913 - DNA, 926 bp, Arabidopsis thaliana
ccgggtacgagatctaattttctttttgtgtgctttacaatatcttttttgcaaatttaaaatgacaaaatggaaaattgagctggtagcaaaattaaatacaaacattagacccttttgaaaaaggaaaaaaaggatcgtacgttacgttgttatctccaaactgtggaccaaaactgcataacgtgttaaaaggtgagatagtgtaaaagcattgatcaagattcatgcaatgggaggagaaggtggtgctgagcccgtaattcactttgtgtttgttcatggagccagtcacggagcttggtgttggtataaactcaccactcttctcgacgccgccgggttcaaatcaacctccgtagatctcaccggcgctggcatcagcctcatagactctaacatcgtcttcgactccgaccaatataaccgtcctctcttctctctcttgtccgatctccctcctcaccacaaagtcatactcgttggacatagcatcggtggaggaagtgtcaccgaagctctttgcaagttcactgacaaaatctccatggccatttacctcgcggcttccatggttcaacccggatccatcccttctccgcatctttcaaacgtgagtgtgactcttttactaactcacctctcttcttcttcgtttttttttgtaatgtatagaagatatatagaaccactcgctagctatttaactcttgtgagtatttgatagatacatgtgggagaagaagatatatgggagtacacatatggtgaaggtaccgataaaccacccaccggagtcctcatgaaaccggagtttatacgccattattactatagccaaagccctcttgaggttaatctcttaattactagtatacataaattatatttcaacactatagtattattattattgtgatcctcta

SEQ ID NO: 5914 - DNA, 668 bp, Arabidopsis thaliana
cctgattggtcactgcttgagcgagggttgagtttgagcctggacattcaatatagactgtggcattggagacaggtggtgcgcttggatctccgtcaaggctacaatacacgacaccacgaatgctgactcggtcgattgtgtaggaccagagtttaaaggcgtgggatatgtagaagagtgaagccatgagaagtatggagaggaggaaaacattagatttttccatattttttttatttttttggttatcagctgttttgatttcgttttaaagatgttttaactgaaggtgttgtgtggcaaataaagcgtaaggggagtagtatttatatgagtatatgtatgagatatttgatttgctaattggataaatcatggactggcaaaattaattccaaaattcgatgatagttgtgtttgcttgccaaaatccttttaggaagtgtacgtttactgaagtaatgtatttaattgtgatccttacttgcacgacgagatatatatatgtataggaatatagtatatatgattcacaagcaaaagctttgaatgcatgaaaatgctccaaggagaaggagatagaaatatgtatttggtttaaaagtgtttcgtttgatcacatttgaagttgtagtaatgtgaatgtgtctagtgaacaagaatag

SEQ ID NO: 5915 - DNA, 1052 bp, Arabidopsis thaliana
tgtattctgactgcatcttggtttgagtcaaatattgcaaatccacataaggtttttgccaaattaggattcacttaatttacaaaaggtgttttctttggttacaggtttggagtgctaataagaccaatactgatgatccagagcagccaaatcatgagatggatgttctggctggacatgagaatgatgttaattatgttcagttcaggttggctattcacttttgaaattacttttctcatgagatcctaattgtcttgatcctattcatttgctgttgtgctttccagtggttgtgctgcggggtctaaattttctgtaactgactactcaaaagacgagaatgttccaaaatttaagaattcctggtgtgtgttctctgctgcaactagataatcatgcaactactattaacttttcacctttttctaatgtttttttttgtttttgacatggtgtcttttctaggttttgtcatgataacatagttacatgctctcgtgatggtagtgcaatcatttggatcccaagattacggagatctcatgtaacattcagttttgctaagataactgcgactttaatagtttatttacatattgtatattttcataggagcagaaaatcagatctttacttgtgcctttcagggaaaaagctgccgatggacacgagcatatcatctcaaggttccacctccgcccatgccccctcaacctcctagaggggggccacgtcaaaggatcctacctacaccccgtggggttaacatgattgcttggagtctggataatcgttttgtccttgccgctattatgggtaatactattttgacactcttaatggctatgagtttatccaggtcgatttctagaacgctgcactctttctaactagaatcaatttgtatgttaaagattgtagaatatgcgtgtggaatgcctctgatggtagcttggtacattctttgactggtcatacagcatctgtgagtgcttgatcccttctgtatatttctctttctctcttaaggcaggtttgggaattgc

SEQ ID NO: 5916 - DNA, 487 bp, Arabidopsis thaliana
caagcaaggctggaaaaacgaactttctcggttatgattcctgcaatcagctctgctggagtcatatcaaaagctgggttccaaactgagatccctggtgctgcaatgcgttcaccaagtcctccgtgtgtgtgcatcaactcctttggagatctttcctctatcacgatttctttcccggatgaaagtgacagatcaactgaggtaagaggtgcagcaacataaaatgggatcccgtgatgttttgcgcacaaggcgagactgtaagtcccaatcttgttagcagtatcgcctggagtatatcaatgaattggttaagaagtgattcagtcataaggaatcagatttgtgagagaaaacggatttatctaaggtgtttgagtgtaccatctgaaaccacacgatcagctccaacgatgacaccatcaacacgaccatctttcatcagtgcagctgcagctgagtctgcaatgagagttgcagggat

SEQ ID NO: 5917 - DNA, 1044 bp, Arabidopsis thaliana
taatggccgtcgtcttcgtgttctccggctgatgggttctctgctgttcacagttgctccaccacgaggaacagatccatgtctgcttctagtcctccacaaatcccatgtcccgtgaggacgcaacaacactgcttccgtctgttcaagacaagtacggtggcgtgatgaccgagatgactcatcccatggatccttctctcttctccacacttctccgatcctctctatctacctggactcttcaggttctctcttccttcttcctcttgttaaatttgatcttattggattcgatcaaaatgacaaattttgttatccgaatcaagatactggtaccgatttgttgttacatagaagaatcattgtaaaagtttgggtgttaaaagtgttagtgtcactattccgcttgaaaattgttgtattctaatgcgggccagaaactctctttcactttgctgcaaaaaaaattaaattcaacttttccactacagtaatagacggtgaataggactatgaaccgatctactgtgaaatgtttacaaacgtttttatgtacgcagggcaaaaagggagtgtggatcaagttgccaaagcagcttattggtcttgctgaaactgctgttaaggtcttgttttgttacctaatgcgcaatcagatatctttaaacccccttttgcttattgtttggagagtcttcatatcacttactggttgtgtattatgtgtaggagggattctggtttcaccacgcggagaaagactacttgatgcttgtctattggattcccaaagaagacgatacgcttcctgccaatgcatctcaccgtgttggcataggtgcctttgtcattaaccacaacaaagaggtttgattactgatgagatgagatttttagtgtgtctttttggaacatctccaagaatggatcacatctcttttcttttctgtatttgaatccaaaggtgctggtggttcaagagaagacagggagatttcaaggtcaaggtatctggaagttcccaccggagttgtgaatgag

SEQ ID NO: 5918 - DNA, 324 bp, Arabidopsis thaliana
aagaaattattgcaatcatgtttcttgttaatgaaacaattcaaaatcaataatagggtgccttgtagacatatggaggtgggagagacttataagtgactttaggagaaggcgactagtatggtagaggtggtgagctataaacgtatggtgatggcggagatttgtagtcaacttctggagatggagactagtaccgtggagctgggaagttctagacatatggtgcgtgctcaagatttgcaatcaacctttcgagaaggagagtagtacggcggaggtggagagccgtagacgtatggtgatggtggagacttgtagtca

SEQ ID NO: 5919 - DNA, 1025 bp, Arabidopsis thaliana
caaagactctttcacattactcctcttgcaataaaatttagcatctttgattaacaaccatccaaaaaaatactatttctccatgtacgtatactcgtatagagtgagttagttatactgacatatactaaatcaaaacaaaatagatttaaaccgaaacaaaatccaaaaccaattttagctgaccaaaaaacccgtcaaagtcaacgaggaaatagcaaaatcggatttcgcaatctgtcgtcactcgtcactctcctctattattaaagctcaccagaattcgaaaccaatttgatcagaaatttgaatcgaagaagcaaatcacaaaaatgtcaggagtttacgatagtcaagctgatatctacttagacgcacgacctacttatcccgccgattggtactccaagctcgccgctctctcccaccgtcacaatctcgcttgggacgccggaaccggaaacggccaagctgccatcggagtatgtattttctcctccctctctttcttctttcttacatttcccgatctgaaatctcgtaacgcgaatctctgattttttacgacttgttgcttagatcgcggaacactacgaaagagtcgttgcgacggacgttagcgagacgatgttgaatctcggaaaaccgcatccgaaagtaacgtaccaccacacgccctcgtcgatgacggaagatgaaatggtagatcttattggaggagagaactctgtggatttgataacggtggctaccgccgtacactggttcgatctcccgagattctacgcgatcgcgaatcgtctcctccgtaaaccaggaggaatcatcgccgtgtggagctacaacactgacatggtggtgaatcccgagttcgactcggtgatgactcggttcatcgctgaaacgttgccgtattgtaaattcccagagagtcagtattttttggacggatataagacgttgccgtttccgtttgagagcgtgggtttgggctcagagggaaagcgatggaactggagatgaag

SEQ ID NO: 5920 - DNA, 1360 bp, Arabidopsis thaliana
tgtatcagacgatggtgcagctatgcttacatttgaagctctctctgatacagctgagtttgctagaaaatgggttcctttttgtaagaagtttaatatcgagccacgagctcctgagtggtatttttctcagaagatggattacctgaagaacaaagttcatcctgcttttgtcagggaacgtcgtgctatggaaggttttctttgctgctttttctctttctgagtatatcctatcataaaagtgttgtttcaagaatctgatttacgttttttgcttgtttgtttgttgcagagagattatgaggagtttaaagtgaagataaatgcactggttgctactgcacagaaagtgcctgaggaaggttggactatgcaagatggaactccttggcctggaaacaacgtccgtgaccatcctggaatgattcaggtaatgatgagtttgattgaataggcaaaaaaaaagcggtttttgtcctcttcactttgttttcctggatctgttaaattggaatgagcactctagttctcaatatatcctcagaccgaagcctttttaagagattttgtaaatgacaggtgtcttgggcatagtggagttcgtgatacggatggtaatgagttaccacgtctagtgtatgtatctcgtgagaagcggcctggatttgatcaccacaagaaagctggagctatgaattccttggtaagtataatgtgtttctttatttatgaatctctcttttcggagccctgacttctcataaactaaaactcatcttacttcttcttgaagatccgagtctctgctgttctatcaaacgctccttaccttcttaatgtcgactgtgatcactacatcaacaacagcaaagcaattagagaatctatgtgtttcatgatggacccgcaatcgggaaagaaagtttgttatgttcagtttccgcagagatttgatgggattgatagacatgatagatactcaaaccgtaacgttgtgttctctgatgtatgtgtccttatctcttttgctttgtttctgtttatgttttagtgcttttcctcttttctcatttgatattgttttggtgtggaaacagattaacatgaaaggtcttgatgggatacaaggaccgatatatgtcgggacaggttgtgtgtttagaagacaggctctttatggttttgatgcaccaaagaagaagaaaccaccaggcaaaacctgtaactgttggcctaaatggtgttgtttgtgttgtgggttgagaaagaagagtaaaacgaaagccaaagataagaaaactaacactaaagagacttcaaagcagattcatgcgctagagaatgtcgacgaaggtgt

SEQ ID NO: 5921 - DNA, 620 bp, Arabidopsis thaliana columbia
gaaatcctgacacaaaaccgtcgttctttgatcggatcagctcaaacattctgatggatgtagaccaatcactcgttgaggatgatagtgataagacaactagtaaggagtcaagtttactggatcttaatagcacaccggttgatgagtctgtttccgagcctcgttactctctcttacaagatctgaactgtgcatacatcgaggaggagacagaaacgagctacgagaagagtggaatagatgatggttctacaccgctttgctctcctcaatgccaaaatgtccatgaaaaagacggcacagcatctccagcttcggatacttcttgctgcaccactgaaaacaactcgaggattgagtcaagaagaagttcttctcctcgagcactgcagccttcttgccgtacccggcttgagtttaccaacacagaagacttactggaggagaatggatgttgtaacgaggaggatgattcgtctgaagtgattcaaatggcagctgagtcattagtccacatatcggagatatcgtatcaaaaccaagacttgcaatcaaagcttgtgttaagaactacagctcatctgaagatcaagattttcagataaccggagatgggt

SEQ ID NO: 5922 - DNA, 766 bp, Arabidopsis thaliana
taaaaattaaaagtgaaaacaatttttttttatttttttacctaagtgatgatttgttatcaataccttttaaaatcatcatattgtagcaggctagcagccagtgctttctatataaagaatcaaatatactctgtgactaattacatcaaacacatcaagcaaagtaacaaattccataaacacaattagctaaaagaaagaaacaatcatgaaggccaccatatccatcactaccatctttctcgtggtcgctttggccgcaccctccctagctcgtcctgacaaccatgtcgaggactctgtaggccgtctacttcgtcctggtcaaacgtaccacatcgtacctgcgaatcccgagacaggaggaggtattttctcgaacagtgaagaaatctgtcctcttgacatcttccagtcaaacaatccgcttgacttgggcctacccatcaaatttaagtccgagttatggtttgttaaggaaatgaatagtatcaccatcgagtttgaggctccgaactggtttttgtgtcctaaagaatccaaggggtggagagttgtgtactctgaagaattcaaaaagagtcttataataagcactggtggttcatcaaacccaagtggcttccagatccatcgagtcgacggaggtgcttacaagattgtatattgtacaaacatctcgactactacgtgcatgaacgttggcatattcaccgatatctctggtgcacgacgcttagccttgaccagcgatgaggctctc

SEQ ID NO: 5923 - DNA, 601 bp, Arabidopsis thaliana
atgttctattttcttaacaagggagtataaaattcgtttctaatacaataacgcttttatcaaattattttgtagaaaagtctaagtgtgtaactcttttttctgttaaagaaacaaaagatttagctatttaacatcgtttcgaaatttcaaaagaatcttaaaagtgatgatcattcagtcaacacttggaaatgtcaattactttatactagttactaaactaaaacaaacttaacccaacacatttatgtcgaaaagaataaaatggtaatactatgaaatatctcgtagttatcctatagaaaatttgtgggacgataataacttactctgtcaaaaagctaactcgctcagctagaggtgtcagccctatcaagctcagtccaaatatcaacggctgtcacatattttcacaaaaatagaaatattttagagcagtctttctttacctttctcgacgaatatttggtaacggataactacgtgtcagaaatgcaccggactccgaaaaacacaaatcattaattttctactgacaaaaaatagttacaaacacgggattatgcttgtagagatatgatgataagtgatatatgta

SEQ ID NO: 5924 - DNA, 905 bp, Arabidopsis thaliana
tgtgtcaaggtttaaagttcaaagttcttgcttttcgtcttcgtatgctctgcatgtgagtgaatgctttggctttttcctcctttgaagttgttttcttggtcttgcagctcgtgctttggtgcaactagtattggccttatcccacgttttgatttcttaggttcactgtaaagaataatcaggagagtacacagatggattaccgaccttctgatagtagtggtgagtcttatgtgctttttcagttagaagcattcgttccttctctaagtttattttacttccgtatttgtttccgtgtgttttgtgatatgtttttttatgcgggaactcaggtacagatgatgacctgcctccatctcatcaaggtagatatcaaagaaacgccagacctaccgggaatggaaggccttcagttctcaattctgctcctttatcacgggtgcacaatgaaatggaaactcaaattcatctcattgagcaagaagcttatagctcgatactccgcgcatttaaagcccagtccgatgctattacctgggtactattttgcttgtcttcttcattagtttagtacatgtttatgtaacttcacaagcttaccttttgtcctttttttattcttgttccttcggctggaaaaaaaatattcaggagaaagaaagtttgatcactgaactcagaaaagaacttcgagtgtctgatgaggaacacagagagctgttatcaagggttaacgctgatgaaatgatcaggcgaataaggtctgttgtatatgtaattgatcactgataaatctctgcaatcaatcaaaagtaagccaacaaggttaatttaaatcatgtcagggaatggagaaaggcaaacagccttcagtctagtgtcctcagctggttcatgat

SEQ ID NO: 5925 - DNA, 1603 bp, Arabidopsis thaliana
accattctgatttgtgtaaggagacataaaagcctgaagcagagttcctgatttctcaacagctgttttattgttttcgatcagtttcaagatagaaacacggatttgcttctcaattctccatatctctctattcgtcttcgaaggaaagaatctaaaaccaccattcaaaactcaaaaagtgagcaataaggttctagttccaaacttgttctcaaaactaggaaaatttcccataagacttacctgaatcctgggatataaacgctccatcgaaccagataaaaaagacgcatcatacgctcctgcaattcaaagattcctttcccttcttccacgctgttcccaaaagctgttcttgataacatttctgcagacaaattgtgcatctctttgtgtacctctaactcaatctcttctcctccgtttctcatatcttcccacttctccatcaacatcatagtacttgttaccatttgtggcacccacctctataaaagaaaaaaagatcttagctttagccacaatcctataaagcactccggatttggtaattttcaaactaaactcgacctgagattccaaatagcacaatgttgtctgacttacagatcttagcttctacattgatgtgtgtcagtgtcaccttgagtctctccattgtaacaccttgtctggcgattcttctatggaaagcccattatcacctctaagaccaggaagaccttgagcataaagcagcttagacaaagggttatgcccaattcggtcaaacgacccacccgtcgtcaaagcttcccggattagtcttggatccgacgtagccaccacaggtttcgacccgaaccagtagaggaacgtcttcccgtagacacgtgaccattcgtggtagtgaggcgccacacggtggacgaactcatgaggatttctcccggaaggaatcggctttgacttcgcctccgccgttagccggctaacctcgccggagtttccactgaatatccggtaactaggacccgtcacgctctgcttcttgaagtgagattggattctccacggaacccatatattactgtagatgaatctgaagacaaggaagaaaaagaccaagaccaagatgaagaacactgccatatcttgacgtgttaacctcaagtctctctctggttcagtttcatttatttgatcttgaattttttttaatctgttcttaatcttgagattgtgaaaattacagttaagaagcattaaactaacaataagtgaccggagaagaaacaaagcaaccggtaaaaattttatttcttcgccggagttttacacattagaaaattttcaagcgttgaccggtaaaaaaagaacataacgaactatgaaaaaaaaaggaactaactttcgtcgtctaaagctttgttattaccaaacaaactctctcttcttttaccaaatccgccagaatcaagacctgacccaccacgatacttcatctcctgtgcggttgttctgtagttagtagtttccactggagctcttgagctcgggtcgttagaccctactgaacggtaagcacctgttgctgctccaggaggataccgagatggcg

SEQ ID NO: 5926 - DNA, 866 bp, Arabidopsis thaliana
aaattgtattaatgtatgaaactcataatttttgcccaaaaaaaagacaaaactcattatgtgacatggttattgaagaaacaacgatagtggtctcacagtaaagaaatataaatctttgagcaatcaccaaaatattccttacagtacaaaaatatatgcatttgttattcttcctagattatacatgaagtgtagttgttactccaacctgctatgctggatacgattctgtcaatttgagactcttatctatctctaagttttgaatcacaagagaagacagaagcagcagcaggagagggactctattaacaaatgtaagtaagatttcccccaccaaacacaacaacagtataccatacaaacatacgctaataaaaagaagattccagggaagaacattcataagctagtaaaacacacaagaacaagcaggggacacaagtctattacaacacaagatcagagcacaacagctacacaatccattatgtgaaaattcccactaagcacaacattacaccactccactttaccccaaatctctccaccctcgcgtctttccactgcgatttccgcacaccaaatctctgttttctctgtgttctgcaagaacagaaccaatttcccaccggtgtaactcacagttttggaccacttacaagccacaggcaacaatccttcaaaacctttaacgactccccaagctctctgctttggatcataagctctcaaacaattctcacgaacatcatagtaatacgagacatcatctatcacacacgcactccaccactccttagaatgcaaaacctcatctctatcgcaacttgtatcattcggatcgcaaacaaagctattgt

SEQ ID NO: 5927 - DNA, 653 bp, Arabidopsis thaliana
atggtcatgatagacatgtgaacatgtacactatcaatcatgaccatatctcatacaagacacgtcggtagcaaatccgactatccacaaaccgtacacaaacacaaatgacgacatggcaacaccaacacactcgccgtaactcaccgcaccgtttacatcctccgttaacaaccgccgttacatcacctccgtcacagcttccacagctagattctgcatcatcagcttcttcaaccaaaggacgacgaaacgcatctaaatcatcaacttgagccaaaacttgttcgagatttgatctgagattattcgcagtagcttcattagtttgtgctaaatcacgccagatctgattctctacgtagagattcttcacacgttcttgtaaaacccagtttaatttccccattcttataatctcttcgtctttcgctttcagctttttcaatatcgcgttttgtacccgtgacgctaacatccgcgtttgcgttctttgtctcgcttctaattcgattctcaacgtttccgtttgttgcgctacgaatctatcgatttctgagttttgctgttggatctgtgaaactaactctgcgtcgattaatgacgccggagaaaacgcgattgctctgcgtttctgagatgcgattaaagcg

SEQ ID NO: 5928 - DNA, 976 bp, Arabidopsis thaliana
atatacatataattgtttttggttgaatccatttgaattaattaaaaaactgaagagacaaaaatttgcaagacttaaagtttttctatgataacccatgaatgctaaacataactctaaaatatacatttttaatagccaaccataatcaaagtctaaacggagaattttaaactcttgttcaccaccatatgggttggtttggtgaattcaatgatagttaggatattttctgagaaccgatttgttattttgtgtaacaaggccttgcatcaacgtatattctatgttagtgcaaatgtactcatcttctaagcatatcttctagattaatttcttgattcaaaaggttggtaaaaaataattttgtttagataaagatacgtaccgtgaagatgaagttgtatcccatttctagcacttgtgtgagaagctcgattcttcgccacatcattttgaggtaatcaggagtagcaaagagtttctcgccggagaaatcagtccctgtggttttcaaatagtagcaattagggtgaagttgtgagcagcgagcaaatgccttggaatccaagcaaaccacaaccacatgttgaagtaacttctttgttccttgtccgatacgaaaactctcaagaaatagatcgaacagagagtttggctctgcccatgcttggttcaacgttgttacaataactgttcgattctctgttgatgcattctccagaacttccctaaaactgatcgattttgatctctgaaagaaaccagaaattaacaaatttctgactaacagatcttaagaaagagatcagacccatgtcagacagaagatgaatcgagacatatacatgtacagtctacagatcaatgtatagttgcaattaataactcactgttagtggagaagacgaagaggtgtgatcgagcaaaggacgagagctgagattgttacatcgagctcttgatgaagaggata

SEQ ID NO: 5929 - DNA, 1896 bp, Arabidopsis thaliana
tgctcatatgcgttttcatctactcggactcctggaccatacactagtcggcatcgatcactgaatgcccccacaagtcttgatgctacctccttgaagaacattgacgccaccttcaaagaaaatacacaatctcaaactactttcaagcttttacattaaccaagattcatcttttgagtaacaacgaaaccatcatcttcgtgttcttattaccaagtttgaatctttagaggaagaaataagtcaaaaaaattcttgtagatttctcctatgaataacaatgtctaaggaattaagaaatcataacttcagcgtagatttctgcggttactaattaacaatctccaagtttcaactctttagaggaagaaaggaatcatatcttctcttgtggatttctttgaatcctaacaattccatagcaccatttactaaacagtttgactcttaggtgcagaggttttgcaaagtagtttttttacctggcgatagagaggtgaattgaatttgaaatctacatggaagtgaaggtcgcaggttccaggaatgggccctggcttaaattgccagaggtttatcaaatggtcaaacaggccagtgtccctcgctgtagtctgaaaaatacagattcgaatcatgtcacaaattcatcactcactcaaattcaacaaaaaagaaagatgaaaacaaaagcaaaaacaagtctttaccttaatccatttcggcctctcggattcgacatgggaaatgtaactctcaacaagaaacttgaaaccaatctccaattcagcatcaaatgacccatcagggtattctttaagaacctcagagcgctgacaccaaggaacaaatccatggtacaagtctacagctgcaactacgttaaacatttgctccggagtatacctgtaataaaatgaaacacacatgagtaactcaatcttcattgcttgaggatatgaacttcaagtccttagtatcagaaatgagcaatgtatagccgacgtaatattctcaatgcagcaaacaaacaatcaaggaatccctgaaactgcacagggaacacacaacatctgtctaacaaatcatatttctgcagaattagttcatagaagatcactagatcggttggaaacaagacaaacacaaaggcaaatcatattcctgaacaattaaagatcattgaaccattctttcaatgttgatttgatctacaaaacaagaacttaaggaccagtaaacaacataatagatcattgaacctattctcaaagttgtgccatttcagatgattttggaagaggcgagaaaagctattgtaagcacaaaacagaggatagatcaaagtttttaagtaattaccctaagacacgtctctcttcatagatctttgataactcaccaccaccttcttccccatctccgcaccccagaaaatgccgtctctgaagtaggctcacagagccaggcaatctccggaaagagactctagcgtcatcattggacatcaaccaattagaagaacatctctcgacgccggaaagagaaccaaatctcctaatttgatctgatacaaaactccctcgagggatcccagaacgactaacgagtttcctgctaatcgcgtttcgacatgaaagtaaggaagatacagctctgagaccagacataaacggtggcattattcccaaaagcgccccaatttggtagagatccaaacggagaaattctctctgcgattttagttttagggatgctaatcaaaagaatagagcgtattgagggacaacgacgaaaggtcgaaactttcaattcgataacgaattcgattagaagctgaagaagaagaagaaacaatcacaaggtcttcttccagagagagagagagagaga

SEQ ID NO: 5930 - DNA, 641 bp, Arabidopsis thaliana
tccatcaccctcaggtgtatcttcttgaacctcaacgtttgtgaaatccatccccggagaataacctggacaacagactcactaactcactcaatcttacttcataattataacttttccaacctggctagttatctgtgtacttaccgccattcttggcatgaaccttccgtggcaattaacaccgcgtctagcacgagctctcaagactttctcgagttttacatcgaacccatcataaagtccccactgttcatcaatctcctgcctcgtgcttgttataacaagctctgcagcatccagagatagctcctcggcctcgatcctcctcttgatcttatatgtggaatttatatcctcctttgattgcctcccttgtttcaaaagctgctcaagcttgtttcttcctagagaatgacccgtcaggaccataggaacgttcaacgcaccagaaagcagagcggtcactatcccctgcatccgcgtaatgtccatgaatcacatatggccacacaggcttcgccttcccaatctgctctcccaaaacttttgacatgtttagaatgtgagctaaagctccatcaacaaactcttggacaaacggccagagaatctctttgtttaagtacttatcccgtgga

SEQ ID NO: 5931 - DNA, 816 bp, Arabidopsis thaliana
ttctggtataggacaaaaagactccagacattgtcacaagatctgttctgtttatcataaatttgtgtttttattttcccttttagcttattctttcttgttttgttgttttgtgatgtgtaggtttcttctgtgaaagttatacgcaacaagcaaacttgtcaatctgaaggatatgggtttgttgagtttctttcacgttcagcagctgaggaagctcttcagagctttagcggtgttacaatgccgaacgcggaacagcctttccgtttaaactgggcatctttcagtactggtgagaaaagagcatcagagaatggtcctgacctatccatatttgttggagatttggctccagatgtgagtgatgctgtcttgcttgagacttttgctggtagatatccatctgtcaaaggtgctaaagttgtgattgattccaacactgggcgttccaaaggttacgggtttgttaggtttggtgatgagaatgagcgatcaagagctatgacagaaatgaatggtgctttctgttcaagcaggcaaatgcgtgttggtatcgcaaccccgaaaagggctgctgcttacggccaacaaaatggttcacaaggtaagtgatgagataatctttgtgacttaatgtagcattagtttcagtttattatcatttattatgtttttacgtccatgttttctctctgttcagtgaatgcaagtggttttattttctgtttatgtcacttttagtaactatgaatatgaattttaaggtttaataacttgtcttgatgcggtaaacatagcatctgaagtgaattg

SEQ ID NO: 5932 - DNA, 626 bp, Arabidopsis thaliana
tttctttatcagacctatgtgtatgtatatattggagcaaatacatcaatttttttttgtatactttttatgaacgttcacacgttataattagtcgtattagttattattctttattttctgttgtatataacggataaagttgtatatatacaatctcaaacaaatatcttattgcatcatttcaagtatattataattttatgaagaagtattgaaataacatgtctaacataatcataaaatttaaaattcattatatatacaagaaacgatttgtataaaactaacagtttcgactcttttccgattatactctctgatccaatcatattttttttttgatgaagtgagggagagtgtctcccgttttattaaaaaaaaataacaattacactacaacatgtcgtgagcttgcagcgccactagtatcagcagccgagatcgaacatacgcaatccggcaaaaaatcaaaataatgaaaacctacggaaagagaaaacgcatagttcgccaaaccgtcggcaagacgattcgcctccctatacacatgaacaatgcggacaatctagtccttcgaaatgaagccatagcacaagcgtactaggaatgacaatgggtgagac

SEQ ID NO: 5933 - DNA, 1616 bp, Arabidopsis thaliana
tgcctaccacctcgttcaccgtacgccccgagaggctgaggcaaagcactcagcattgcccgaagattttgtttccttgggttcaccggttttgcaatgaaactaaattgagtttcctgaagagcctcatcacaaattttaatcgggagattgattgcttcctcttgtattcctaacgcaatatcttgcagttgtcgttggagattatctgccattgtcaatatgaacaaaggaatttgtgtactttcactctgatcaacccaacgagaacagagacatgcgcagggtataaataggtttggttgagaagcagttatggggtccacaaccgttctaccgttattcatccctgaagtaaccgccggaaactggcgaagaaaactctcggcgagcgagagacagccgtaggaatcgaagagatgcaatcgttcgtcgtatcgcctctcttctctcatttgattttgatttagagagagagagatttttcctgatattcattttttgtgtgtattattatgtaattaataattttatatgtattttatataattatactgctgctgtttcttagaatgagggagactagtctcccatattattaaaaaacaaaataaaagaaattacacacgaacattacgtgggcgtgtagcaccgtacaattagcatcctcaaaaataatcgaagtagcaaaatcaggtctaaggggaaatctatgaaaacccaaaagtaacgaaaatgcatagttagctagtttatcggcaagacgattaacctctgtatacacatgagacattcggacagtccagtcctttgacatgaagtcatagcataaacgtaagccatttctaatgatttcttactatagtaaacaaatatgcgaaaagacttacgacagtgaaggacagtatccagacgctaggttcctcccatcttcatcaacagctccttcccactttgagaaaccaaaatttatacatcattcaagaaaagggaaatggagaacaaagataggattgcttacctgataagcagatatcccggctccgaaaacgaagccttccgggaaatcgctcctgctgtaaagatcgctactgcattttccaaatccatggaaagctagaagaagcaacacaatcatggtaatgagagtcaaaacatcttccatttttttgtgtcaattttggctcgtgttgggaagtaagtagacttgtcgtggagagtataaataaaacacgtttcaaagaggcatattgactggttgttatagccacttcgaacatgttccatactttccatgtctctgttcaccggagagacatatttctgttcaccggagagacatatttgtattaaaggatggtccagtgcaattaacaccacttatctttccctaccgacacctcccattagttgctgtcaaactttattggccacaatatgtttaatagtcgttttttaattgaaacacagttctagtgttacctatttccctctcttccaaattataagatgttttagctaaaaatatatatatgaattttcaaaacaaaacattaaataactaattagtcaaaacataatttaaccaaacgtcacaaaattacagagatgatcaa

SEQ ID NO: 5934 - DNA, 1165 bp, Arabidopsis thaliana columbia
tgatcagaagataagatggggaggaacaggggaagaatcaacgcgacaacgagacacaaaactactaaaaccaccactgaccagcttgagtgagggatgcctaagagctgttcttcacaaactgtcaacatgagagttttcagactctagaagaagcactacacttaatacaagttcttatgttgtgaaaagaagaagattgatgagatagtaagtagaaaaaaaagcttgcctatgttgtaaatgatggacggtctttctttaacatttggtatagccacgattccttcaggttccaccgtcaccaaaacatacaatccctcctaaatcagaaacaaactcctaaacttgtattcgttcttctttctaagttttaggaactaactgaagaagatggcaatacctcgttatcaacttcttcaatactttctgttttgaagatcaacttctcagtgtttagtaatctcctcatatggttaaccttcaaacccattacaccgttcttcagtaattgcagcgaaaatagagccggtatctgttatcataacaaaaaaggatgagatttttaacaagcacaagaaccttggaaacataagaacatagaacaagataacaaatttgacatacagaagctgggtatgatatcttgacttcataccaagagttcgacttaagcccttgtaatttgtaaactcgagatccagatttcaatggcagtgtctctttccaaagttccttcccagcatataaagtttttccaccaaacctaagagaaacctgataacatcatttctacagtaccaataaaagaatccaaattgatgagtttggggataatgtgaggtttttcaacaacacttacagtctctcatcgctataacaagtcacaaaatttatgaagacgataagacagatgagcaagtagcattctttatagcgtaaatcgatcatcctacgagttctgtatcaatccctaaagaagaaaacgatttttgtcaatttgatgaatcggttaaagtatcagcttcatgttaagcaatctctgcaatattttctctcagcaacggaatacgaaaataccagaagttataaaacgcgcgaaatcgaattgacttaccagagatcagtctctcgccggagatgacagtttctatgcgacaattgg

SEQ ID NO: 5935 - DNA, 698 bp, Arabidopsis thaliana
aggactgggaacttcatcaaatggatgttcataacgcttttcttcatggtgatttaaaagaagacatctatatgaaaccacctccgggttttaaaacaacagatccatctcttgtatgcaagctcaagaaatctatctatggtttgaaacaagcgcctcgttgctggttcgaaaagttgtctacatctctactcaagtttggttttactcagtctaagaaagattattctcttttcacatcaattcggggatccaaagttcttcatgtcattgtctacgtcgatgatgtagtcatttgcggaaaggctgtccgggaaaataatacctcaaaactcgctctcgggtcgtcaccctaaaagcgtgctctctgatcgtcacccgaagccaccgtacccctcgcactctaaagacaaaaagtccctcgagttaccggtacctcaggagcataccccgctcctcacgagtcgttgggaccctcatgtccctcgagcaaacaatactaaatgcttccgagcatatctccagactctctcatggatttgcgtaagacacctctatatctcaccatccatcatatcccctcgaggatatctttaggaccaactcccggccgtctcgtaaacacacatctctcttaggttgtttactcaaactttctaaaaatagacaagtccttgctcctacaagtagcctctctc

SEQ ID NO: 5936 - DNA, 511 bp, Arabidopsis thaliana
gaaaatgatcagatgattgtatatatatagcaaaggaaatgacaagaaaattttcgactcacatctcagccaactgcaggatgagatccattgactgagagttgctacgggatactggtaacaagttttcttggtaaaatactggtaacaagttacacgaccatgaatacaagcctacagataaatcaccttgggaggcctgaccacattttacagttgaattaactttgagaatacagatgacaaaagcacacaaatttcgacactagacataaggggaacaaaagatcacatgaacctgagccatcatccaaactaaaatcggaagcttgtcatgtccttgatactcgtcttccttgagagtcggcaatacaataaccaaagtattaggttcattacgcaataccattgctagtgcaacaaatactgctacctataattgtgaaacagaatggagttagtcaacaaagatacttacatacatacaacacagacataggagaaaaattga

SEQ ID NO: 5937 - DNA, 487 bp, Arabidopsis thaliana
caaactacttccaaatctcaggtgatttggaaaacctttctcgatctctaaactctgatctttgattatcaatgttattacctttcgattactaagtccattattgtacattcgtataggtggcaatatttgttgcattagcgatggtattgcgtaggaagcctgatgctttgactaatgtattgccaactctgagggagaatcctaagtatcagggtcaggataagcttccggttacagtttggatgatggctcaggtttgtgtgatttgttttgtaaatgagtattaattgtgtcaagatttgtgttttctgtgatctttattctaatttttgtaaaactgtaaaatgtggacaggcctcccaaggtgatatagctgtaggcttgtattcatgggctcacaacttgttacctgttgtcggtaataagaactgtaaccctcagtcaagggatctcatcctgcagttggttgagaagtgagtaaaaa

SEQ ID NO: 5938 - DNA, 977 bp, Arabidopsis thaliana
catctaaaatgggacaccttttgtccgtgtttaatttctgacagaacggagagtcacatatacaataactttgccttttataataccaagcagatccaaaagtcacaaccaaatttttagagcgaaaaaaaattcagctgcgtaaattctgacaaaaaagttcttaccgagccatgccactcagcacggtggacagtgccaaaggaacctgaaagagcagtcgctcaaattagagtggaagaattaaaggcaacagagaagaatgtaatctcaaaatgggtggcactttttccttattttgttcgagaacagagtccaaagcaaaaccacttcctcaagaatttcatatttctttgcatttttagaccgaatcattaatttttccgtaaaattattacctgctccaatcttttcttttatattaagatcacaccacgggatgtccatatcatcaccatcaagtccaagttccctatttgccctgtttggaactggctgactgattggtggggcattcataggtgctgcttcaatttgatttgacgcacgcatcatgttctgtggaggcatattagcactgggtggcaaagacccaccaccattttctgccaatgcgtcattctctccacccggattatcatattgcctatgaaacattgagaatcccatatcatctacaaccattcaaacaagcagatataagaaattagagtccagaagacaagtcttgcacataaatgcactagaattcataagcttgaacagcagactaacaagtttaaccttaaatatcattaggcaaagaacccaccaacaaacatacacatcaacagccaaaaacaactaaagtgaaaagagacaagaaaacaaacaatagaatcattctaagactactaacacttcagatactgagacatgatcaagaaataccctaaatgataggagattactcttttaggggaaatcaaaacgagatg

SEQ ID NO: 5939 - DNA, 770 bp, Arabidopsis thaliana
cactttattgcagattgaaaacttatgtcaagtactacatttccgtttttttatcacctctcagttgaaccccaatcatgtaatgctttcccgtgacaataagatgcgaacctcaaaacatcttgcatcgaaacaccttgagaggacaaaatcgaacgcatcgttaagtaacttaaatggtacgccgaaattatggaaggcaagaacggttctattgacttaattgggtctaaaaactactctaaacgcctcttgtcaacgttcgaactagtccctaacctttgactcaaatataaatattggctacaaatagacttatagttctgcctacattggtcgtctgctttagtatatttgttaccaagtaaaatgctgctgtagagtttaatgatctctttgtctactgggtttctccaattttctgatcgttgggattcgtgcaagtcgagagagtctacttggttgaaactttctgggttttgatttgagttgcccattggatttgaagttttagtcttttgttggtaagttttaccctttgagatatgctcgtctgatagtatagggctttcgagtgttatgaaaaattcgccttttcgtcttctgatttggttttcatttccttcagctaaatcttcgtaatacttggatcctgaatgattaatcatagctagaatccgtttggctttgttatttgggtcagagattctgagaggacgctttaaagagtcaagcttttcattcctctgaatccgtccttgtattggacg

SEQ ID NO: 5940 - DNA, 584 bp, Arabidopsis thaliana
tcgtcaaacaacggaaacactgaatcctcctccacatctgattctgaagacgccagtcagcaatctgaaggaagagagagtatagttgttggtacacagaacgatatcctcataccagatactactgggaagagtaaaattccggaaactcctatagtagtaactgggaacaacatggataataacagtaacaataatatggtacatggtcttgttgatgtgcaaccacaaggaggcatgttccctcatttgctaacccagaatctacagtatcccgttttccagactgcttcaccaatgggctacttccatcaagcaccaccagtctcttggcccacgggtccagccaatggattgattccattccctcaccctaatccttatctatacacaggtccgctcggatatagtatgaacggagatccccgctgtgcttgcagtacggtagcccattgaatcatgcggcaactcccttcttcaaccctgggccagttccagtgttccatccattttccaaaaccaacaccgaggaccaagctcagaatcttgagccgccactggaactaaactgtttggctccaccg

SEQ ID NO: 5941 - DNA, 1296 bp, Arabidopsis thaliana
ccttacggcagatggccggacacctccaagggctgtgtagagagaaagtttcccaacaggtattcccattccctgaagacattaatgatggcatgtaatgtgcaaattagtaagaggataaaccctgactcaccactctcatgaaagcagaaaagaatcaaacaacttgcctgacatccaagatctcctaaccctaaaatgcgctccccatcagtgacaacaatgacctggatgttcttctcaggccagttcctcagcacttcatgaatcttacctctattattgaaaattgtatcctcacttaaaagatgagaacaagaatagtgaaagtggtagttgatttccgtataaaaaggctcacttttctttcaagctgataaaaagcccctgtggacgcaggaaaatgctaccatacttctggcaggcttccccaaccgttggagtgtagataacgggtagcaactcctcgacgtgatcaatgagaagtttgtaaaacagcctctcgttggtctcctgaaatacaaaagcattgtgaaagaagttgggtaacaaaggaaggcacttggtgtagttgagatagcgagacttcctaatcacttagtgtacctggctacaggtcgcaagagagttctaaactcgaatttaatttgtgaacataaagaggagtaacagagattaaaacagagcaactcatttagggaaaaaaaaacttataaaggtgataaaatctaacctcatcttcagtgcgctatgatacttatatacaagcttcaagaactcaaacttccgggagagctccaccgccagatccccactaaaggaatcggcttcagcagcgtcagtagcgaaacgccggagctccaccagctgagcacggaaagccttgtggcagtaaacgaagaaaagaaccggagcatcagaaagcttggtatttccaacggtcaccgcataagatgcagaaacggaagcgttttccggcggaagggaatgaagatttccgcctcccatccaccgcaacaacaataacggtgactgaaatcaaaaatttcgtcgtcgtgaagcgaaaggagaaaagggaaagaagaaggaaccgattaaaggagtagagaaggtttttaaaggcatgatacattttcgtagtcgtcactcttctgcgtaagccagtttgtttaatcaatttgagattttgagttttattatattagaagtgactgagacgttgcagctgaaaaccaactatagcttatatcatatttatggcgggatgtatatttaaatatctgttttgtctctggg

SEQ ID NO: 5942 - DNA, 1687 bp, Arabidopsis thaliana
tgtttaacatatgcaatgattttttaaatatgaatattaattacttgagaaacaaatatctactacatattaaaaatgaatttgtattttcccctttgaatagaaatcaaattcactatatgtggcaaatagattaattcattttgatttgtattacataatttaaattgtttatctactactatgtgatgataaatccatttaatatgtgttcttctatgaaaactttatccgaccaaaaaaataattttatgaaaattttattccaattttctagattgtataaaatttccccggaaccatgcaaattcagaattttttacactagagacttctacggatggcaaaattgtgaagtgtaatattgttttagacattaagaaacaagtttcgaagcggatcgttttagttaaaaggtttacaaacaatattatctcttattgaatagaaaaagtgaattggtgcaataattatgtatctgtttgtaactgtaattatagaaacatccaataatgtgaatcaatatcattgttctagcataataaaactgtagatttacaaacgtcaaacgatatgaaatgttttaccgacctctaccaaaaaatgagtgatgtgagaatatacgcgcgttatcggttgtttctcactcacctagtgacattggtcgagcggcaaatggtggtgatgactggcctcttttacgagtggcagttttagattttagtccccttaattgggtattctcagttatggggagacatataaacagattttgtatgttttgacaaattcagaatatcaaaacaagacacgtttattatgaagtgtgttaaataatacaaatagattagatgagacacaaatatacaaaggaataagaatctctcacaaaaataataattgaatgaataaaattttgaggagggaaggaagatgtcccaatcccatatatatcatctcaacgcatcatcaaaacaaactcgtcaaagctgagaactccatcgtcattctgatcaaacccacgaatcataaccttacaagcatcaaccgtacacgactcgccgagtcgactcaacgtcctccgtaaactcgccgccgtaataaactcttccccctccataacatacatcccaaacgcttctttcaactccttcctcctttcttcatcactaccatcttccccttccataagcttcaaaaactcctcaaaatctataaacccgtctccgtcaacgtctgatgtcttcaccacttcctccacctcacgtgacgataacgcgccgcctaagagactaacgcagctttgtagctcttcaccggagattttcccgtctgagtttgcatccatatagtcaaaaacggttcttagctcgttaacgtttaacgagctgttccgctactattactgctcgttcttgattcgtcttcaaggtttcttgacgattctgatctcttcgaggaaactttcttgtatagtcgtgacaatgatgatttttggttcttagcgagagtcatttcttgatttgaatatgaatctagaagatttgggaaatggatttctgatgcaaattcttttcaagaagtggtagattatatatagatgagtatgtgaatgcgtgtaatggtggagagattcttgattgttcgacggttaaaacacgggtttgaatattttggtgttattatt

SEQ ID NO: 5943 - DNA, 505 bp, Arabidopsis thaliana
cgagacatgacaaacgtgatttgctataggtgtgataagctaggacactatgcttccgactgtcccgatagattgcttaaacttcaagaaacacaagatgttaagaatgatgatacacaaaaggctgacgcattaatgatgcacgaagtagtgtttcttaacgagaagaatgtaatgccaaataaacttgaggcgagcttggatgttgataatgtgtggtacttggataatggcgcgagcaaccatatgacgggaaacttggcttactttggtgagattgacgaaagagttacgggaaaggttcgttttggtgacgattctcgtattgatatcaaaggaaaaggctcgattacgtttatagctaagaatgaagagagaaaaatcttggctgatgtctattacattcccgatttaagaagcaacatcgtgagtcttggtcaggctaccgagtccggatgtgatgttagaatgcgagatgaccatctaactctatatgatagagatg

SEQ ID NO: 5944 - DNA, 886 bp, Arabidopsis thaliana
attgaaaatgataaagagggacgatgaaaatatgtaagtctcgtcagataattattaggacacgtgttaaaagatgagaaaatagtagcgtgaatgacgataataaccattatttctggtatgtatatatatagccttctgtcccaagatgctcatcactcacaatatggacaaaacacaaacttggtcttgaagaaaccaataccaaaaccccaaaccgcagcgtttaatcaagaatcgactatggcttctactaccttacttccttctacttcaacccaattcctcgaccgaactttctcaacttcatcttcctcttcgagacctaaacttcaatctctatctttttcctcaacacttagaaacaagaaactagtagtcccctgctatgtttcttcctccgtcaacaaaaaatcttccgtctcgtcttctctccaatctccgacattcaaaccaccgtcttggaagaaactatgtaacgatgtcaccaacttgatccccaaaacgacgaatcagaatccaaaattaaacccggtgcagagaaccgccgctatggttttagacgcggtggaaaacgccatgatctcacacgagcgccgccgtcatccccatcctaaaacggcggatcctgccgtccaaatagccgggaacttcttcccggtaccggagaaacctgtcgtgcataaccttccggtgactggaacagtaccagaatgcattcaaggagtttacgtcagaaacggagcaaatccacttcacaaaccagtctccggccaccatttgttcgacggagacggtatggtacacgctgtccggttcgataacggctcggttagctacgcttgtcggtttacgaaacaaaccggttggtcaagaacgtgaatgt

SEQ ID NO: 5945 - DNA, 515 bp, Arabidopsis thaliana
tattttgatttcaagtggtattactatgctcaaatgactttgtttatatcattgatccctttggttttgtagatacctgaaactggaaatcttcgggagatatttttgaaaggcatagaggaaggattaccagagataaaatcaacagcgacgaaaagtatgtcatcgagattgtgtgataaaagaggagtgattgtgttgggagatgcattcaatatgcgtcatcctataatcgcgtcaggaatgatggttgcactctcggacatttgcattctacgcaatcttctcaaaccattgcctaacctcagcaatactaagaaagtctctgatcttgtcaagtccttttacatcatccgcaaggtgagttatggattacttagttttttactaggggttttggtttaattaaatggagtgactcggatatttatgtatgctagaatgtcatatatactattatcaagttgtgctggactagtggtatgctcttactttctatttgtattgatttggat

SEQ ID NO: 5946 - DNA, 594 bp, Arabidopsis thaliana
aaagttaattaacataatctgtgaatgtcctgaatgcaaaatttaggatccttttctaggtcagctgtgaataatgaaagtgaagctaagactggcctatcagggcttataacaggaatcatcattggatgttctctactgttcttgacaccgatgtttaaatacataccacaggtctgtctgcccgtggtgaatatatcagtttctagtatttgctactctttctgaaacttcagagaattgtgaaactaaattttggctaacattcactctgttgcttatctctctcgtaatcagtgtgctttggcagcaatagtgatatctgccgttagtggcttggtaagttcatataaaccaacctgccaaggagcgaagatgaattctgcttctggtttcttatgtatacttttcggattattatcattaggtggactatgacgaagctattttcctctggcgtgtggacaagagggatttttcgctttggaccatcactagcaccataacattgttcttcggaatagagatcggtgtccttgttggtgtgagtatcagatactatagtatgtcagattcactactaatgttatatga

SEQ ID NO: 5947 - DNA, 718 bp, Arabidopsis thaliana
  unsure (1)..(718): unsure at all n locations
ttgagctttttaaaggagttttagttttcgattatgaggaaataatcatgtgttaattgaattataggagcgtgtagctaagaaagcgaaagtggtggaggtgaaaccaaaaagcggtgcgtttcagccgtttcaaaagcgcgttttggagactgatttgcaaccggcggtgaaagtagctagttcgatgccagcgacgacgacgagttctacgacggaaacttgtggtggtaaaagtgatttgattaaagctggagatgaggaaagacggatagagcagcagcaatcgcagtcgcatacgcatagaaaacaaaggcggtgctggtcgccggaattacaccgtcgattcctaaacgcgcttcagcagcttggaggatctcatggtaattacgattaattttaattacctgattatcttctatctgattggttcattagtgattcataatcgggttgataaagaactgtttttaaacattaaaacgtctcaacatttacattatattagtaagtaacaaagattattatcaacattaaaaaatgatttttatttgacattttatttgccaatcttgcagttgctacaccaaagcaaatcagggatcacatgaaggttgatggattaacaaacgacgaagttaaaagccatttacaggttagtgattaatgattcttatgttataatcacaagttcgtgaaattggtaattanatgaaat

SEQ ID NO: 5948 - DNA, 599 bp, Arabidopsis thaliana
gttctttaatcacagtgattaatttaattgattatgtttgattaacaattatttatcaatttttaacgaaaaagtttagatctttagggtttagacttttgatgatacttaaaattattaatttattgggaagtaatgattggctgactaaaatttagggttatgcgagcaacatgtgtaaattaatctgtaattagaagaaatattatgataatccttaatttaagtatctaattatgtattaatcaaagaattttggtgtcttctttttcatttgttttgtttaatctagtgtagatctaatcatattcacttataagttataacctatagtatttgtcagtttgattgtacttattataatggcttgatccaatggttggtgtaatttaggtgtcatcatcgtcgatggaagtgggagtggtgccagatggtggttcggtggctgatgtatcgtatccttacggtggtcctgcaaccagtggagctgatccggggacacagcgggctgttccgctgacttcagctgagagagaagcgagggtcatgaggtacagagagaagaggaagaccaggaagtttgagaagctataaggtat

SEQ ID NO: 5949 - DNA, 1417 bp, Arabidopsis thaliana
ctgcatatgttaaatattcgataaatacaggttgcaactgttttggtggcattgttcattggcttcgtagttgggtctgttacgcttgccatttctggtttggttttgctatggctctatggtagcttttggacaacactgctcttcctcttctttggaggtaaaagtccttcctgtctcaatcttgtagcaacgaccaatctcttgcattattttgtctaatacagtgtgcattgttcgttaatataaaggtctggcattcatgatgaagcacgagcgcgttgcactgtttataatcacagtgtattcagtctatagtgcattgagttatgttggatggctaggtcttctattggcttttaatcttgctttcatctcaaccgatgctctcatatatttcttcaagaataaaataaatcagcagagcactgctgatagacccactgagcccgtaaatgagtcatcttttgaaaatggccctggctttccgggagaccgtggcccaagagtcgcgtcaactagcggaacagactctgagttaacatctgaagatgaaattgctcggttactgtattgtcctgaccactattcagctttgggcttagctcgatatgggaatgttgatatggcttatctcaaacgagaatataggaaaaaggtaatgctgcttatttttctatttgaagtgaatgtttattggatactcctgagcagcaaaaaggtatgttgggtttataagcattgtggatgattcaataggcgatgctagtccatcctgataagaatatggggaatgagagagcagctgaagcttttaagaaacttcagaatgcatatgaggtaatgttttgtttccctttccgtttcatcaatttgtaatcgctgcatcaagaacccgcatctctaatctccttagctggcctttaggtattacttgattctgtaaagcaaaaatcatatgatgatgaattgaagagggaagaactactgaactactttcggaggtttcagaactcttctcaaaaggtatgtttattgttgtcttactctgaagtgcatctttcttgcttaaagtatcaggttttttgtccttcacacttgtaaacaagtaggcatgtttctctctactcggatatatgtgtttattttaagctgcaatgtataatcatgaaccaggacactcggggacacggtttctctgggtcgggttttggaagctcagaaggtgaaggagaggaagcatttagagagtgtagacagatagcgtgtaaaaaatgtggcaatctccatgcctggtttcttacaaagaaatcagaatctacagctagatggtgccaggtttttccaactcttcccactgcatctttaagatcctatatattacccaattatgaaactacttgagagggaagtataa

SEQ ID NO: 5950 - DNA, 661 bp, Arabidopsis thaliana
aaagggtttaatattattttttttactctagttatttttttactttttgtgacaatgttttattttataattgcctctatgtaggtatcgacttgggaaaccgtcaaagcaatatgctccatggtttgaaactgttatgaaaacagtaagggttgcgataagcattttcaatatgctcatgagagaaagtagggttgctaagctttcatatgcaaatgtcataaaaagactttgtgggttagaggagaacgataaagcttacatttcttctaagctcttggatgttgagagatatgttgtcgtccatggacaaattatcttgcagcttttcgaagagtatcctgacaaggatatcaaaaggtgtccatttgttactagtcttgcaagtaaaatgcaggatatacaccacacaaaatggatcatcaagaggaagaagaaaattctgcaaaagggaaagaatttgaatccgagggcggggattgcacatgtggtatccagaatgaaagctatgcaagcaacaacaactcgcctcgtcaataggatttggggagagttttactccatttactctcgtgaggttccatcggaggcgattaatgctgaaaatgtggaggaagaggagcttgaagaggtagaagaggaggacgagaatgaggaagat

SEQ ID NO: 5951 - DNA, 1575 bp, Arabidopsis thaliana
ttgatgtgaattctttgtgcagttggtgcagctgttacgtggagaagacggaccagctgagctacagcagaaggcaggtgatagaacaatgagcgtgaacgcttgtgatctacaagatcacacctcttcctcatacctcaacgaactccgccgccataggcaactcttaatggagtgagtagaagcaataacatcaacttaaagaactgtttatcaacctctttctttttagatttttattttcttgacttgagttttgcttgttattctccattggttgcttttttttcttgtccaaccaaactgtgaatatcttcaacttgtgtctctctgttgcttctactgaactttgttagtctcaacctctcggtagagttgtcaatttgttaccaatgagctcacaagtagatagatatcaaacaaatagcaacacagaactttctgaagataattttttcataaatggaaacagagtacactgcggataagctgatagccttatacatacaagatacaaaagaaaccatcccccctaattcccaaaaactaccatttttctccaccgagtttaggtttaatacattcttccacatttccaacccccaactactcctgcctaaacaacaacagttaatcaaaaacaaaagtgagatttttaagattcttctagtcagcttatgtgttagccagaatcaagaagttgtgtctcttataacgataaaaacttgactcaatcaacttatatgattggttttagtaagactgattaggccagaggaagaactcagccggatttggtgccataagtcccattgttccctgaacgttggagttgttgttagacccggtcgagtcagaagctgcattcgccggaaaatgctggaagaagttctgttgctgctgctgctgttggtgttgctgttgttgttggtggtggtggtaaagagcagctgcttcaaaagggattccacaaggaatgatctgttgagactgaactgctgaattaggacagagagcgaagttaatgctactgtgattaggagatgactgaagctgaagctgttgttgttgttgttgttgctggaaatggtgaagttgatgatgaccgaggattggtttctgctctgatgaagcagcagcttccaaagagagcttaagacgtttagctgcaccaccgatgggaagtgcactcttcatgatggcttcaacgtcgtaacggttcatctcaaagttagttacagcgtttattcctctgaatttgattgctgctatgtcatacgcttcagctgcttcctcttccgttgctacaacaacaacaccaggactaactaattaaccacagacaatgattgttaaattagctagaccaagtttgaagattttacataccaaaggttccaaggtaaagatctttgttcccagcaactcggccaatccttgcttgccaacgtccttgttgatgatgccttgtaacacctcggtatatcgaagctcctctagagaaaccgctactcttcctgtgttatatcagtttttaaactctggttaccatcaaagaaacataatataaaacca

SEQ ID NO: 5952 - DNA, 490 bp, Arabidopsis thaliana
agcgcccggcagcgacgatcagataggccgcctgcatggaactgttgcgaaacgctgtttcttcggcaagttgtgggctggaggtaaaccaactgcgggcatcaccgtggggaaacagtagtggtaaccgttcataaaattcactgtcccaggcgacgatagcggtgacgggcgcggtcagggttttttgcagattgccgctggaaagtgccgggcgcagacgttcttttccttctgccgtgcgggtaaacacgatccgtgccggagaacagttagctgatgtcggcccccatttcatcagggcataaatctcccgtaacgtctcatcgctgacgggtgtctcccgccagccgttgtgagtgcgggcatcggtgaacagggtgctaagcgcacctgggctaacggcttcgttcatagcaattccttacagggcggcttcacggtgatgtaacaggctggcaagcccgttgagtaacagagcattaaacgt

SEQ ID NO: 5953 - DNA, 523 bp, Arabidopsis thaliana
atactgggtacatagtgaatggactaaggttccacacaaatgttgttgataagctaagtcagaatagcggagtgtattatgaggcaacgacgataagtcgttctagtgccaaggacacatcccaagtagttgattgggtatcatactatgggagagttactaagattattctcctcgattacaatgtgttctatgtccctattttcaaatgtcattggtaggcctaggcatttcggttttcggttcggtttaggtcgggtaattcggtaatacgggtagggatgttaaggaaccgactggttttcggatctgattcggttcgggttcgatcggttttgggtcggttttccattttgaaatagaatccgatgtagaactgaactatatttcgggtcggttcagatcggtttatgaaccaaaaaaccggatattccggttatttcagtctgtgaattcttagctaagtctgagactgagttgagcttgttcactcacatcctcacctatcttagtttttgacact

SEQ ID NO: 5954 - DNA, 606 bp, Arabidopsis thaliana
  unsure (1)..(606): unsure at all n locations
tttccatcgacattaacagattgaaatgtaattaggaagagggcgtcaaataaaaactaattgttttaatttgaccagtttttcatattgtacttataccaaatcggactacttgtgtaattggttacactagttttgacatgtaataagttgtattagttttcctatataatattaaaaaaatgtatttgaacaaaggttaaataaatattgtcatcatctcgagaagacataatcaatacagtcattgtcataaaacttaacatactttgtagagcttatgacattttgagtagctcattgatacattacaaactatagctgatgagtccacattatgtagagaatctaaatataaaaactgagcttgtttttgggggtttcatcgatcatacattgataaacgtaactgaaactataacccactatatatcactttcttggagcatttttgacgattcctgatgtaagagaagatgaaggatagaaagtcttacggatcttgagaacattccaggcagttccagctgcgtggccgctgttgctagaacatctccggtggcctccctgcgttacnccanacctgttttcccaacatgttattat

SEQ ID NO: 5955 - DNA, 494 bp, Arabidopsis thaliana columbia
tcaaggaataataaagagagttcttcgaaactttgtcccagatgagtttaacccacacagaatcccaagaaggctattcgatgttctgaactccgaggttagaaaaaactgtcttcatagtactaataatcagtatgtgtgtgtgtgtgtgttcttgaacctttttgtcttcaacacagggattaacggaggaagacaatggatgcatcacagtcttcccttccgctgcatcgcctacggtctacctaatgccgtctacagattccataaaacgcttcataggagagttgaacaatccgtccatatctgaaaccggatcatcggtatttaagaaacaatataccagcgacgatgagcttgatgacttagatacgtccattaactctatattctctgctcctggaacaaccaattcatcagagtggatgccgaaaggatatggacgcagaaagactgtaagatacaactccttagatgaatatggaaagaagatg

SEQ ID NO: 5956 - DNA, 866 bp, Arabidopsis thaliana columbia
atggattacttctgggtacaggtcgtagctttcaacttgggaatctttgccaacatctcttcctcaagttctgcactgctcttaactctcaaaggacgagctcgttgggacgtcacaaattcgggttcctttggtcttgtcagtgtcagcttaggtcgattctggacgaataggtctcgcgtgcttgtttggaacttcttcatcaattcagcagttgaaacaaaaggtgcaatttgctcacgaacataaacctgaaaagtgaaaacaaggtttgagagggtctgacagaaaaagtatacaagcaaccatgaagcacaacacacctttctgttttccttcggagtgtgcttagtgactgaagggcataagttgaaaccagtgttaacaagaccatttcttgtcttgtggagcagagttgctggttttggattgagaatctagataaatcaatgataagaaggaaaaagtttcagtcatgcagtgaggtatggagtgaatgacatgctgattttaaaacaatttggctcacctgtcttgattttccatcatctagcttttgccttttgatggcttgattttcttgaatcagattggtagtgctagctatgttgttaagattcggtttccctgcagtgagacaatcaacacattaaaacaactatcacaagagaaacgtgaaccagattggttattaagaatgtgaggtacctttcacacttttctgatgactgcctttgcttgagactggtttttaggccttagtgtagatggattcttcagcagactagctatctttctagcagtttgctgcttcttaagatccaccgactttggccctagaagaaactgcatttggtggtttgggt

SEQ ID NO: 5957 - DNA, 549 bp, Arabidopsis thaliana
ctggtatatggaaaggttagaaattttatattctcttctttgtttgctctttacctcaagataggcttttgaaaattgatttgtaactttggagaggccttcgttgtgttgtagcaatgtcggaactcacaaaggcaatgtgctggaagctggtgacaattaagaaagacaaactgaatgaggttggtgccgccatataccaaaagccaacttcaaataaatgttacaacaaaagacctcaaaatgagccacctctctgcaaggattccgatgatcaaaatgcagcctggtagagcaacataaaccctgcgtcagtttactagttaaccaatgcaatctgatgcttatatgttgaatttgcggtttaggaatgttccacttgaggcatgtatgcataaagtgacagaagattcatcaaagcgaggagcagtgtggccaaacatgtggccagagagggttgaaactgcgcctgagtggttggattcgcaggaaggtgtttatggaaaacctgcaccagaagatttcacagcagaccaagagaagtggaaa

SEQ ID NO: 5958 - DNA, 529 bp, Arabidopsis thaliana columbia
gggcaagcgatttatgaggtaaaccgcagttccaaacgcatatgtccaatatgaagttggaatagaggcttgagtgagaagagttaacccggtttcgaggatgtgacgatgttttcgttctgcaattccattgtgttccggcgtgtgaggaagagaggtcaagtgtgaaatgccgtgtgttagcaggaattgtcgtagcgcaatgaattctccaccgttgtcagaatataatgttcggattttggtttgaaaacgattctccactagagctttgaacgccacaaaagtctcccgtacttgtgatttttgtttcaatgggtacagccatgtatatcgggtataatgatcaacaaggattagataatatttaaagttgtcgacagatgtaactggagaagtccagacatcagagtaaacgtattcaagaggtgtgtaggagataattgtgtttgaataaaacggaagcttatggcttttattaatgagacaatgagaaccaggaaaatgtttttgagaggaatttgaaact

SEQ ID NO: 5959 - DNA, 473 bp, Arabidopsis thaliana columbia
atcccgaatccttaagattctgcttctactttgcgtattcctataagactcctcttcgtgtaaaagaggaacataaaaactagatgcactatctgtctcttccgcttgcgattgagacgaccttaaactccttctctcatcgctttgtactatagcaggaacaccgttatacacagagataaagagccaatactcaatccacacggtaatagtagcccaagctgcaaatgtgatagctgatgctctaagagatactaaagctaatgatcaaaccagttataaccggagacagtagcttagagctcaagtcaatgcctctaataacagagttcattcttgttaaaaccgctggtgaatgaccttccgacataacaacaaccctgtaataaaaacaacacaacaatctcatatcaaagagtgcaattacaatgccattttatgaagtgaataatctaaaaacattaatttaccag

SEQ ID NO: 5960 - DNA, 1012 bp, Arabidopsis thaliana
ttattcgccatgttgcaaaattaactacattagcacaaccctcaacttcaaacattttcttttaatgccttcacatattttcaatatatagaaataaagaggaattataaaaccatggatcaccccaacaagcatcatatctccttcattgtctttgaagacaattttctattgattgtgggatttgtaattcactgttgagatcaaagagtttctctagttccactctcaattgttcatcatatccatgtaaagcatttaaatctatagttttgcccatggatacacattgcatctagacatgttcgataacaccacataaagatcatgtgaggtgagtagagtcatcaacgccttacgcaaatttctttctaaaaatatatttgattcttttaaaatgtgaagtacatggaatgcttgtttaaatacactagtttcacatatataagagatgtcatagataaatagtacgaatggtgattttatgtttgccttagtacaagaattccctgaagctaaaacacaaaccaaaagtacaataacataaacaaattataggcacaaaaccacaatcaaacaaacaaaatctaatatttaatatctagttaattcttttgagaagcatctgaaagacaattacttcttttccaagaactaaattttgctgttgatgacgaaaaatgccacaaccaccggaaaactcagaactacttgccttctcttgttgttaaacagacttaagaaattaaagcacctaattgaaaacccagcttgatgaggcttcgctgatgaagctttggaaccatcaaatatatgttgacaccgttaagttgagattcactggacagaaaaccggataagcgaaagtagaccttttagatcttgaccagtttgtgaattcttgtttgaagaaggtgaaggagccgcctaaccacaacatctcccatctcagagattagggattgggatcaatcggttgaaggcaagagacagtaatttgacggatttgaag

SEQ ID NO: 5961 - DNA, 1013 bp, Arabidopsis thaliana
tttctgtaccttaaactttagaacatatagaaccggagcaaatacgctcttatttgacgacagcagcatctgctgatatctcgactatcgtaggctccacaaagtatccttcaccttcgactgctctacctcccgttagtattttaccaccctgcaaatgcaagactggttttaagtctcaaccgaaacgatcaaacatttttaagtgattcttgattatgcagcaaagcatagcaagagaggtacttgcctgggattcgatgacttcaatccctttctcaaagttcttttttgattcaggagtatgtaatggtcctaacaatgtccctttctcaagaggattgccgattttgacttgtttgtatgaggtaagcagttgctcgagtactttgtcatagacactctcatgcaaaagcttaaaatacaagaacaacatttagagtattgaaccaaaggaatagtagtagcaacaaagctaaggggattagattttgttaccagcctacggcaagttgtgcaacgttgaccagcagttccaaccgcagcgaatagaacagatcgagccgctaactgtatatcagcatcgtccatgactatgattgcattgtttccactcaactcaagcaaagttttcccagatctcgcattcactgtttgttgtaccattgagcccacctatgcataatattcaaagagaagacaatgatggaccagtaggctcagtgtgtttggttgggaggtggaatatagttaaggaagtaccctggagcttccagtaaaggatactaagggaatgcgtgtgtctttggctattgcttcaccaatttcagcaccaccacacatggcccgtaaaaatggcaccgggtaagttgtttttctctaaaacttcagctactagcttggtcattgcgatagttattaacggtgtagttggagcacctttcctgtggaatcacatgtatgatgtattaagtattagctacaccaatcaaaccaatacaaattttcattgt

SEQ ID NO: 5962 - DNA, 936 bp, Arabidopsis thaliana
taactcattttttcgggttctatcctaaccttggagactatctcaacaatgtctttgttgctctggttctgaccaatagaatcaatgagatcaccaaacaataatgtcattaaaggaaaaccaacaccgtttcctatagctccgatcgaaccaacgatcatcaacaacacatcggtagaatctgagaaggaaaacaatttgtagaacggtacggtctttgtcttttcttccatttctatcttttttgttttccttttttctaactacaaacatgattgattcatttcttatgtctctttcatttgatattttcttaaaatgattctatttaatgtttaatggcccaattgaagtgatctatattattttaagaacaaaactgatcattagttataaaatatgaaaatatcgtcagtcttgtgtcgtcgtgtatgccaccattattccttattgtattatgttaatagtgtgtttaagcattgaacaagccggagttctcgtccctttttagattatcacatgtgatatgtgaaaaatgacagttgcgtagctaaaaagcaatgactaataacaataaatgtttgcgtcaattagaagcattgatgtggagttgaacgagcgaggcataaactccaccttcgatattgatcaacgtctcgtgcgtccctttctctgcaatcacaccgttcttgacgacggcgatgacgtcagcattcttgatcgttgaaagcctgtgagccaccacgatggtggtccggttcaccatcacccgatcaagcgcgtcttgaaccacccgctccgattctgcgtccaacgcgctcgtcgcttcgtcgagtaacagaatcttcggttctttcacgatggcgcgtgcaatcgcctacgcgctgcttctgtcctcctgacaattgtatccctctctctcccaccaccgtatca

SEQ ID NO: 5963 - DNA, 483 bp, Arabidopsis thaliana columbia
aggatcccctgtgtaaagaaaaagtcaaaatgcaatttttaaagcagaaacggatgttcttttggcgattgcgtttagctttaaacgtttagtattaaccactgtttgtaacactacacttgaaatcatctggactctgattttggaagaataggttgaaaaatcagataatgttactatttcttttcggtctaggcaacttgagtggtcataatggttgtgtgatgttcttgtaacaggactgtgatatcaacttggatggagaacttgatagggaagagtttgtgaagtttattgagcagattacggctgagacgtttaacgtggttagtcagggtttgatcatagctttgattgttgctcccactgtggctattgcgacgaagaaggccacggaaggtgtccctggagttggcaaagttgtgcagaagctgcctacttcaatctatgcttctcttgtgactcttgcagttatgtgggtga

SEQ ID NO: 5964 - DNA, 615 bp, Arabidopsis thaliana
catatctagtatacaacaggtaaactacaagtacaacaagacttttattcacttttgaaaaacagagagattacttactatgcaagcaaaaaaactctttcttatttcaatttagggttatgatacggtggtgggagaaagagggatacaattgtcaggaggacagaagcaacgcgtggcaattgcacgcgccatcgtgaaagaaccgaagattctgttactcgacgaagcaacgagcgcgttggacgcagaatcggagcgggtggttcaagacgcgcttgaccgagtgatggtgaaccggaccacagtagtagtggctcacaggctttccacgatcaagaatgctgacgtcatagccgtggtcaagaacggtgtgatcgtagagaaagggacgcacgaaacgttgatcaatatcgaaggtggtgtttatgcttcgcttgttcaacttcacattagtgcttctagttgacaaacaattgttttcctaagtcctctcaaaatatattttgagcttaaggtatttttttatactaacattgtttctaattatgtaaagctttgacaaaaaaggaagttacccaaagaaaattggtctttaccacaaggtttattgtt

SEQ ID NO: 5965 - DNA, 815 bp, Arabidopsis thaliana
  unsure (1)..(815): unsure at all n locations
acagatacagagatagagatagagaacatctctgtctcaaaccccgcacactgttgaaatatcccaccagttccccattgacttgaaccgaaaaagaggttgtggtgacacaaagcataatccaatgaataaaaaacaatggaaatttcatggcttcgagtaccttacggagaacagaccattgaaccgagtcgaaagctttagagatatctattttaattgcgcagccagtcgataccgattctttgtgataatcttttactaactccgtcgcgagcagcacattctctatgagcagcctatcttgaacaaaagccgattggtttcctacaacaaaatttggtagcactcgcttcaggggattagctattatttttaatatgactttaaatatgacattgcaacacgatattggcctataatctttcatctcattagtcgttgccttctttggtatgagagcaagaatggtggaattaattgcctttggtaagaatcctttcacaaagaaggatttaatcgcaagaataaactccttcccaatgatatcccaagtcgatttataaaactccattgtataactatctggtcctagcgacttatcttttggcattgcaaagagtactcgtttaatctcctcctctgttactgacctagtcatctctgttttctcctcctctgagcatcgataaggcagcaagtcttgaagttcactaatggatatttcctcatagtcatgtgaaatcagctgaagaaattctctanaaaagtgttctgcttcctcttttatttctactactttttttgtaactgag

SEQ ID NO: 5966 - DNA, 417 bp, Arabidopsis thaliana columbia
ccgaagaaaggaggagtaacctttctctattgaaacatgaaccatagggttaaaatccttaagtgaatcacaacaaatctcagctacggttttgcctacataagcattttcatcaggaagaatcaagaagtttgcgttgaagacttccgttgtaaccaatcgatcatccaacagagtcacactacctactcctgccaacacaatgttcttacaaaactgcaacaccaaatggaggaaaccaagtaagatgccaacactcactctactgcaacatagctaatagagagtcacaaaataaagtaagaggtacctcagcaacagtgcccttaattccagataccaaaacatgagatttactcaatctgcaagcaaaaacacaaaacaaaattcagagaagccctaatcaaaattttcaca

SEQ ID NO: 5967 - DNA, 622 bp, Arabidopsis thaliana columbia
ccatatatttttgtagtgatgacgtcagctctcctccaataattttttgattttttcccatagccgacgacggtagaggaaacttgtcaatggacctaaaaaacggtgacgtttcgtaaaaggtagatgaaagtttgaacaagtagctaagctctctctctgcacaagcttccagaaaaaatcaaatcaaaagagagagagatccacaaaattggattgaatcgtcgccggatattccaagagtagagagcttagtttgtctcgcgttgcgtctagatttactgaatatggaggcggagaagtggaacagcgacggtggtgaatacacgtcggaggacgaaggtacagaagattaccgacgcggcggttaccacgccgttcggatcggtgactcattcaaaaccggccggtacgttgtccagagcaaactcggttggggccatttctctactgtttggctctcctgggatactcaatcctctgtacgcatctatctctctctctcgccacacgaattgcttgaaatgctttagagattaatttttcgttgctttgtttgtgtgattttcttactcgtatatcgaatgtacagagatatgtggctttgaaggtgcaaaagagt

SEQ ID NO: 5968 - DNA, 565 bp, Arabidopsis thaliana columbia
tgcactccaatacccagcctatcctgactacgctttggaaatgggtctaatcacgcaaaaagagcatgatcgcttagaaaagattgtcccactgtgcgaactatcaatcaagctttgtggtacttactcctttattccttatcaatttatctttaaaattgctctgtgtttgatgaatcctgaatccgtgtttttgttttaccaggaactgatggcacaacttcttgtttggcatcatatcttgtctgcaactctttgttcagtggtgtaatgagtcatgctggtggagtaaacgtaagcccaaaagaactgctcaatttttattgctcgttggatttctagatataattcgttctggcaaaccatttctatccttacttgtagaaagaaattgtgtttcatatttctgcatttgaagtaaggaaacaaggctaatgagggagttcacatatctttgtgtagtatacgacatcaggaagaagtgcgtgggaagtttgtgctacgatttctcaaacatggagaaatttttgaatctgcaatctgtgaggaagtcacttggtgttgg

SEQ ID NO: 5969 - DNA, 619 bp, Arabidopsis thaliana columbia
tgcatgatatctccccaaatggttcagttccttggtcttccaggattgtggtatgttttttatctgcaaactttgctgtccagtatgcaaataattctgatgaatacgtcctgaggtgttgcctacatttttctaaagacagctagtgaaattcaagaagtcgacggcagtagaggctcaggtgaatatgcacaaagtaggtatcaaggagccaagtcggtttcaggaaagccaggcttaagcgattcacctacgtcagaaacatggaggacgtggagtatgagaagagctggatttactgatgaagattttgaaggtatggagtgacttctgtcttctgccatataaagactttatagtaaaaatatctaaagccttaatgtataaatggtacagctgctgaaatttcctccagtggtttgactggtgtgaagaaagatgatacgaagaaggattctggtgatagcatgaatgggaaagatagaattgcatcttcctcagaagatgtaaataaaactcatatcaaacaccgtcttcaacagctccagtcagaactttcttctgttcttcactcccttagatctcgtcgtgataaagttgtgacaagtaaggtaattgt

SEQ ID NO: 5970 - DNA, 560 bp, Arabidopsis thaliana columbia
acataaatgaatgagaatgaaaatgatttattgaaaataacttcacctgatagacaaacgcataacgcgacattttgtaattttaagttcgcgtacctatcatgactcaggtgtatttcctgcgctccatttcccagaatagcatcacttacagtcacactccttaacatattacactcccccaatgcctggaaaaagctttcactgatatgaccctttcctattgttaagacctcaagattcctgaaacagatcaaaagcattacgtttgatatataataactaagttatcgaaagcatatccgagggtaaacaagacagatacctcaaagtggtagcggctttcatagccagagcattaacagcaggagcgccataaacattaacttcagtagcatttggatagcgactacacatgttttcaactgcacataaagcacaggaggttatattgtacccacgtatattccacaattagcactgtttttttgtttcctcaaacggcaaataacagaaagcagatttatgtatgtatgaagacgacttcattgttcatagaa

SEQ ID NO: 5971 - DNA, 597 bp, Arabidopsis thaliana columbia
ctgaggctctaaacacatttttcgaacatattctctgtaactcttaactgaacagattatgttcttcctcaccatgagtcctagtacttcctcaactttcatccagttgttacctttacaataaccttgaaacatcacattgtagattttgttatacgatgaaagcccgtttgataacattatacgtaactgattttctgcatcgagcattttcccagctaagcttaatccttttatcaaagcatagtgtacataggatgaatctatttgctctgctaaattaaatgctgttcctgctttgttagctctacaaagccgaggaatcaacatcaaacaacttcccaaacttggaatgtgtttcttgtctagcatttcatcgagtatagcaaatgcagctgaatccttcttttccgtgcagagtcctttgataagatgattgtaaacctcttgttccacaatgcaaccctctccttcaagccttttaacaacagaatgagcgatacaagaaaacccaagaactgtcagcttctcgacaaaaatcctacacgcttctgactgagatagaggataagatatgaatacacgctcaaagagttg

SEQ ID NO: 5972 - DNA, 794 bp, Arabidopsis thaliana
tatttttgttaacccagtatagaagttgttaacattgagacatgatataagataaaatttgaccaaaaatcaatttaatttatcaattactcaaccctaaaaatttacgacgtacgagcccctcattcacactcttatgttaaaaatactgaaaatcaatccatatcgatctaatacttgtgcggctacaaataccaatgcattggttattttctaaattatgttattgtatcattgatagttgacacagtgtttatatatttaagaatacaaactggtatactttctgtttgcatacacaaatattggtgactccattttttttattttttttgtacatgtaaaatactaaagcaaaccctcacataaagattagtagtaacaatttggttaaaattatgatatcaggttggttaaaatttgattaaaacacaacttttggatccttatcaaaaattttggtccggaagtgaaactgtgaaagaattgggaaaatcatttataactaagtagcaaaatgtggaaagatcagtgagagaagaacaaacaaattcggaaacattaccatttagtttttcattggaagcacaatcccccaagacattgcaaaacagaaagaaatggttgttgtcttaaggccattgagaaaggataaaaacaaaggaattattgtgtgtttatgttgtggtgaaaaagcatggctttaagacatatcattgctatgttttaattatgactttccgttgactttttagtacaaccgtggatccaacaacgaccaaagtttccgcggg

SEQ ID NO: 5973 - DNA, 449 bp, Arabidopsis thaliana
agtctgaagatgatcaacaaatcaagagtttccagaggaaagcggaggtgaattatgaaattcaacagctaaaatcgaaaatgcgtgattcccaggtatattacttactctctcacccatgagtaaatgatgcatggaatcctttattatgtgtgtcctatctgcaaggaatatctcctttccagtagggttgttacttggcatgataaattctgcttgtatccaatttgtactgctttcgattttactatacttaaaaaccgtttagctacgtatagactaaaacaatataaaaaggagacgaacttttacgtttaaaagcaaacaaattgtagaatgttcattgattactagactcactgctagagtttaagatttctatacatccctcttgtgtcttacagcatatttaaaaaatttatctctgcagctccaaaagtttcgagatg

SEQ ID NO: 5974 - DNA, 458 bp, Arabidopsis thaliana
tttgttaaagttgaagatttactcaacctgaatttgaaaacttgtgcaaatattcagttaaattcacacacgattgatgaaattagagaggctgtgacaagggacaataaaaaacggtttagcctcatcgatgaggatggagagctcttgattcgcgctaatcaaggccactcaatcacgacggttgagtcagagaagttacttaaaccaatattgtcaccagaagaagctccagtgtgtgtacatggaacttataggaagaatttagaatccatcttagcatcgggcttaaagcgtatgaatagaatgcatgttcacttctcttgtggattacctacagatggtgaagtgattagtggcgtgagaagaaatgtaaatgttatcatcttcctccacatcaagaaagctcctgaagatgggattgcgttctacatttcagacaacaaagtgattttgac

SEQ ID NO: 5975 - DNA, 466 bp, Arabidopsis thaliana
tacttgacgtgttatgtgttgaatggttcacttggtcttgcaaaactgatatatcttgttatccagattgatccagcgaagtacaagagcatctcgtctggttttggaattttgctgaaagagcaaggagtcaaaggctttttccgtggatgggttcctactcttttgggttacagtgctcagggtgcctgcaagtttggattctacgagtactttaagaagacttactctgaccttgctggacctgagtacactgccaaatacaagactctcatctaccttgctggttctgcttctgctgagatcattgccgatattgcactttgcccatttgaagctgtgaaggttcgtgttcagacacagcctggatttgctagggggatgtctgatggattcccaagtttatcaagtccgaagatacggagggtgagtttttccatccaataacattatctcccttgttact

SEQ ID NO: 5976 - DNA, 716 bp, Arabidopsis thaliana columbia
gcaaaaactttggatggactcttacatgatcaaaaccacctgagacacaaattgtaacactcaaaagttttgttccgaccaacattccacattactgtctaatgaataaaattaaaatttggtttacctgaagaaagatcccagttatcgccagctgctccttcataatctccagctttccaaaactgcttacaaccgccaatcttcccagacgtgccggcatacggtggcggcggcggcggcggtacaggcctgaagacattacacggattcgcaggaataggatgcgtcaaactttccggtggattcgattggccgaatccttccggtaacccaactcctaactcagcaagtgttgttaccttcttcacattattcctatccacttcggaagaacctccaaaagtatctcgtcctctcttcagaccgacgaagttgtttcctactttctctaatccaccggcgacttctccaatgtcggagtcgtcatcactactacagagatcgactacagttacagattctctccccggaaagccagccggagaagtagatggaagttgaatctctcgcttcacgtgaatactgttgtccattaatagaaaatttggacaagaagatgaaagagttgacaagcaaaagtgatgatgaattctaagtattgactattgactagttgaaaagagaaaacttttggaatgtttgcgcgaatgaat

SEQ ID NO: 5977 - DNA, 605 bp, Arabidopsis thaliana
tggagatttagaggaaaccatatatatgaagctgcctgatggttatgcagatattaagggaacttctctgccacctaatgttgtttgtcgtttgaagaagtccatttatggtcttaaacaggcatctcgtcaatggtttttgaagttttctaactctctgttggctctgggtttcgaaaaacagcatggtgatcatactctctttgttcgctgtattggttctgagttcattgtcctcttagtttatgttgatgacatagtgattgcgagtactacagaacaagcagcacagtcgttgacagaggctttaaaagctagctttaagctgagggaacttggtccactgaagtatttcttgggtttagaggttgctcgcacttctgaaggtatttccctatctcaaaggaagtatgctttagaattgctcacttctgcagatatgttggactgtaaaccatcctccatacctatgactccgaatattagattatctaagaatgatggtctactcttggaggacaaagaaatgtatcgaagacttgttggcaagttgatgtatctgacatactcgccctgatacacatttgcggtgacaagttatgcag

SEQ ID NO: 5978 - DNA, 491 bp, Arabidopsis thaliana
ggaaggtatatatatctaacagtgaagaattttgactattcctctacactacaggaagccccttcagaccctttgataaatgttgacaaggaaaagacagatatactgatgtattgtactggaggtatacgttgtgatgtgtattcaacagttttgaggtagcactgtggcttctactccttcattctcttactaatatctgaaagaagtttcccaaataactttcttgtgagaagtcaaatttcttttcagacagcggggtttcaagaacctgtatacattgaagggtggagttcccattaccttaaagaagaaggcaccgccgaatgggttggaaatatgtttgtgtttgactctcgtctttctctcccaccagctgcctacaatgacaacgtcgtggataaagccgtaggtgataacgtcgtggatgaagccggaagaactccacaaacgcccgtggatacaagttttgcaagatgctatctttgtaa

SEQ ID NO: 5979 - DNA, 546 bp, Arabidopsis thaliana columbia
actctgttgtatacctttagacaatccccctttgtaaccgcggcatctcaataataaagttactttttggaatttagcaattgaaaaaagctgttctgttttgttttttcactttctcatgtccgaatattctttacctagaaatacatgaaagaagacaacaatctgaaaaatctagtaacctttcgtcagcttttacaacgctacattgaagacaagaacacattggttttttcatcacaaagaaagttgaagattcttgagtttttttcctcctgaattgtttgaaatggtgaatcctccacttcagtctccgaccaatccgcatttcttccagccactacttcccggtttcgagtgtcacctcgtacacactctctctgtctctctctgtttctgtctttctttcagagtcggttttgttttaaatgttttgaggctgaaaagttaaggtaagtttcaagttttttatatgacataggtacttgtggtttctgagcacattctccttatatgtatacaggaccataaacgttgtctggaatg

SEQ ID NO: 5980 - DNA, 518 bp, Arabidopsis thaliana
tatttagaatcatgagtgttccaaatgtatatgttacaaagatgggggttgtttgatctatctcaagaaaaaaacgaaacccagatctgcgtttttcttacagtaaaacaaacagacacaacagatcatcgtgttcggtcttcttcttcttggttttgaagatttagtaataatagtaaaataataatactcttacaatatcatcacagaagaaacacagaaccagctcaagctctctcaagctcatcaccatcttcttcttcttcttcgtttctttgtctttctatttctcccgcatagtaaaaattatatgagatcaacgaaacagaaaatttaaaaaaataataaaaaaggattttgttgtgtgttttcgattaaaatcaaaccgatcacggatctgtgattttgattttgattttaccaattcattagagacgtagatcggtacagtgaagatcatcagcgccattgaacaagtcaacacaatccaccggtggaaaattatgatcgaattgaaa

SEQ ID NO: 5981 - DNA, 441 bp, Arabidopsis thaliana
gttactgtttcaaccaatcttaagtggtttgtctggttgagaactagtctaaatatcgaataatttatctccatggtacatatatagaggtgaaatagttaaccatgtgtagcttgatatatctaggatctgattgtaggtaatgattcaattctttaaggtggtgttagaatttactttgactgtgtataattaggatccaatggtaaaaatactacattggttattttagtaatgagctgatggatctttattctgttttcggaaagtaacatgacacattgtttactttacagcttccatacatatgactatgcaaggcactttgtgagtgcgtgcactcgtattcttggacttgcaggaacacctgagggagttgaggctcaaggcaggctcactcgtgtcgctgctgtcatgccatttcattactttgaccattta

SEQ ID NO: 5982 - DNA, 481 bp, Arabidopsis thaliana columbia
gatgatataagaaatacaatattttctaaacttggaacatataaagagttcttctttcttcctctttctaaccaagtcaaacaagttaaataaaaatatatgaggatgttctttaaatttctcttaaatttctttttctattatttttttttcatactaagaaatttattctcttgctttcttctgatcatgttcagacattacaattttataataatggtaagcactatggaagtttaattacacttggggcctccataaacaataagatgtcctacatttctccaagaatcttgcatatatattgtatctcccactttataacaaccgtctgaatatctctctgtgtttttcacaaaattgtcggcattataattttcgtcccaagtcgtgatcaaacggacatatgagtctagtctgggggtcccttcggataatggctattacccatcggaggacttggggacgaagggctatggac

SEQ ID NO: 5983 - DNA, 505 bp, Arabidopsis thaliana columbia
ccactgaatatgagaatgaatgtaaaaaatgatctttacaaacataggtaccaaatccaaccaccaaactttagcattggaaatgccttcgccgcgcaaacgcgttttacgtataaagcgggcatccttcaacaataataccaggcgcggttggacaagaggccaaaggacaaccatcaagctcatttccccaccaatccaaactcacattctcaagtcccaaacacatataaagcaacacacccataaatgctaatccagcatccaatgctcctgacaaaacataattatacctctgccatagatttggcctgtacctaaacacaacaaatccggataagaatccagcaagaacccatgttgtgtagttcacggctgttgcgggcggcatcgagcttgtcgcgcttataagaaccggcatgtttataagcttgatccactcttgtctaggaaacatccttgaagctaaccatacaagaataggggctataggcccacaaggaag

SEQ ID NO: 5984 - DNA, 344 bp, Arabidopsis thaliana columbia
cagcttctcctgctgttcctaggaagaagcctgttggtgttaggcaaaggaaatgggggaaatgggctgctgagattagagatcctattaagaaaactaggacttggttgggtacttttgatactcttgaagaagctgctaaagcttatgatgctaagaagcttgagtgtgatgctattgttgctggaaatgtgtccactactaaacgtgatgtttcttcatctgagactagccaatgctctcgttcttcacctgttgttcctgttgagcaagatgacacttctgcatcagctctcacttgtgttcacaaccctggatgaacgtctcgaccggttgctccaact

SEQ ID NO: 5985 - DNA, 297 bp, Arabidopsis thaliana columbia
gtcgaagccaagtgcatccttgaggccgagatggtctgccattttgatccggatgtcgaacaactagtccgagtcatcgtaaccgggttttttggtccgttgctctgtaaacacaattgctggtctttgattcttaaggctttcttagtatagctccatggttcggagctattgcatggaccaagagtaagcatttttgggtcatcaagagatcgtactatgcagagtccggttaatggatgaaaaaccacgattgtaagcatcagttcgagggcccggtcctagtaaaccaaatca

SEQ ID NO: 5986 - DNA, 605 bp, Arabidopsis thaliana columbia
gatcgtcctaattttatcaggtctcattctcctcttagtctacctcgccaaccgtccacgctcaccatacttcgacatctcagcagcaaccctaaacaccgccaatctggacatgggatatgttctaaatggagatctcgcggttgtggtaaacttcacaaatccaagcaagaaaagcagtgtggacttcagctacgtgatgttcgagctctacttctacaacacactcatagcgactgaacacatcgagccattcattgtaccaaagggaatgtcaatgttcacaagcttccatctcgtcagcagtcaggtacaaattcagatgattcagagtcaggacttgcagctgcagctcggaactggtccagtgttgttgaatttgagaggaacgtttcacgctcgctcgaaccttgggtcgttgatgagatactcttattggttgcacacacagtgcagcatctctttaaatacccctcctgcagggaccatgcgagcaagaagatgcaatacaaaacgctagcgatttgcagcatttctgactgaatacattgcttcttttcttgatgcgtttgatgataatataggcaaatagatagcttttgtat

SEQ ID NO: 5987 - DNA, 336 bp, Arabidopsis thaliana columbia
tcgttcaaaactactttgtgagaagactgtagtactgcggtgaaagtagtatatacacacgtaataatagaagatacataaaaaccctaaatgaagctgggccagtagtggacttttgaatctagttgggcttttacagatgttacataccgacaagatcggatatgacatgtctaccagttttatcgaattgaagaaatggcaagatattcgtcatggcaccgaatgtcagatttcatgagaaagtatcgcaaaattcctcattctggcgttcaaaaccaaatggaacgactatctcaagcagaagtatgccatggaagagctacgaagcaacct

SEQ ID NO: 5988 - DNA, 485 bp, Arabidopsis thaliana columbia
  unsure (1)..(485): unsure at all n locations
nnnnnnnnnnnnnnnnnnnnnnctaaaggccgtcggctgataaaggttgttgcgatcgaacaattcatccagcaataatggataacgcgccactggctggcaatcatcggcgacgcggcacacagagaaatcaaatgtttaagcagtcgcgggaattcactgagcaattctaaataggtggtgcgggtaacaatccccaccagcaaggcggtaatgcgcgacagtgaacggcagcgtcttcacgcgcacagacatcacttagcagatgcggcatcagatggtcgagcacctgacgtcctcgcggcccgatggtgcgcttatccagctctttgcggaaatcggcaatcagcgttagaccgtgtttgcgatcatcctcgctaagatgcgccacacatggcgtgagtgtcatcttcctgcaacgcatcctgccacagctcacgccactgttccgacagcgactcttcctgagtttcactttcatcgtc

SEQ ID NO: 5989 - DNA, 529 bp, Arabidopsis thaliana
gtaacttcccgccaatccccgatcaagctcttgttagagtgataaaacaattgccttctgcgttaatggacaaggtatagatagattagagaccgttttacattaaactcattattaaaagttatgtgagcggtgtagttcgggttccaggatatgtatgatttcatggcagtagacagaccatcaactcctcttatcgatagaggaatagctttgcacaaaatgattaggcttataactatgggattaggcggtgaaggttacttaaattttatgggaaacgaattcggacatccaggtactaaatcgatttaagcttgtttcatttactttctgtgcaaaaattttgagtgtacaatttcttcatcatactcctgcaatattcagaatggattgagttcccagaggtgagcagcgtctatctgatggtagcgtgattcctggcaacaatgtcagttatgacaaatgccgccgcagatttgatcgtgtaagttcttacaatgtggctgagtacgacattactcaagat

SEQ ID NO: 5990 - DNA, 691 bp, Arabidopsis thaliana
acagtgatgtcgtcatggaaatgcctcctgactcctctctcaatcttgttgagatcagaatatctcatctctcttttctttgctgcctcctgcagcgcagctttcaccagtctcctcgctatcccctgcatcagcattctcacatttactctttagaaaaaatcatctatatatgtttagaaactgagagtgtctcatacgtttcttgggtggttctgaacgatttcaacagcctcttggttgctaagctgctcccaaagtccgtctgatgcaaatatcagaaactgatcgtctggttggagatcatgcacggttatcgacggttcccaactcaagataggtcttttcattggctcccgcaatcggtactttgtgtacaaaggttccttgttgaactccgatttcttaagatacacgtctcctatggatcgtgatacctgcaaacacacagacaactaagctttcaagatttgacaagtggccaacaataatagcttatccaactcagtgaaggaacatgacataataatattggctcagattttatagcataagaagatctctttgtagagagcggcacctgaataatgcccttaacacgccagacattgtgttttaagacgacaatatgggagtcatcagggtgtaaggagtgcatttcctgcctcacagactctatgctcacgttatg

SEQ ID NO: 5991 - DNA, 537 bp, Arabidopsis thaliana
  unsure (1)..(537): unsure at all n locations
attaatgtctttcagtctttgtttgactgtagatagttaaaccaactccgtttatttctccgttaatcacccctgcgtcacgtcaaatcattgacgtgttccgtttagtttactatgtaaaatttatcttaagactatctaggatgtttgtttgtttattatcatgtgatgtggtgataaatagcataatgaatatggtcaatgttctacgaattttgatatatcaaaggtaattttttgttgtgttgatccatctagtttagatcatgactgaccccgaaaagattagtacagtggtaaattacttactttatagaggaaacaactgcaagaaaagtggagtttgttttgcgttcttccaaaatagtgactgaaagaggaaaaacatatacgtactttaatgtatgataagactcagcacgaaaatagcanaatatttcaatggaaaaaccgaaattgtttgtattcttcattttcttcagggcttctaatggccccatttcagcatacanaaaaaggatatggtaatgggatgat

SEQ ID NO: 5992 - DNA, 1043 bp, Arabidopsis thaliana columbia
ttttagttggagacatgtacaaaacgtgggtgaaagcatagtatgcttgcattaattgtattgacaggtacttggaacaggggtaactcgtggagaacattgtttttaaattttgttttcgaattatgaatcataaagtttggttttattttgacttacaggtgatggcgaatgtagttctcgttttaggaggggactgggagtgttgagatgagggcagttgggatttcgttaatgcaaaaaactgtatgtgcaagtgcattgccattggagacgatatgacatagaacaagttgaaagctcagaagattttgagtccctagggacaaaagttgtaagccgaatgtcatattgggtgcctacagaattgtatatctttacttctgcaaggacgcctccggttttgatgcataacaacgcaggactgcgaactttcttaacgttgcgagcaacatatccgggtctaaatctgttggtggcccttgagcctgtgtgggagacagattgtataacacttggtgaaatattaataaggttagaggaaggaatgattaggcttgcagatggtacccctttgctcaacacagagggaaatgaggatgaagtaaccgaggaagcaacaaaaaaaaatattcatggaggtgaacaagatcgggggagaggcaatcaacaaatgcaacgtcaatcagagttcccaatgaccattctagacaatggcagtcttgggacgacgataaataacggtcgggaagtaaagtttactgttgctgcaacagaaaatgaaattttgagcaaccgaaatgctctgtcaagaacaatgcaggctggagtagatgaagaaggtggggggattgatctcaagtcactatatgatgtagaggttgtagcacatgttgaaatgttagaagcacaagctaaagagctacaagcaaggcgtatgagcaaaggcatgagagaatggcgtatgctcctaatgaagatggtgagtctgtggatagtggagaatgggagccatatggtacgaatgaggatgaagaggatga

SEQ ID NO: 5993 - DNA, 481 bp, Arabidopsis thaliana columbia
agaagataatccaataaatgaacgtatcaaagagttcttcaccaattagatccgagcacaacagtttgagtcattttcaacattcaacaatagatgaacaagtaaatcttaaacagaccagatataaaagttaccttctttgcaaaagctgcaatacttatggataccggacaacgagggtctttaaatattttcacaatatcattgattttcccactgcaaaggcccaaagtaaacgtagttaagaataaagaaaattaaccaaagtccatgaagaacgcttaagtaaggttacaccaaaaccatcttaaatgtatctaaatctttctaaccaaaggcttaagactgacatttccacaagttaaacaagatcaaggctatcggaataaaatgctaaaagaagctaggcatataccactagaggacaggaaaggcaaagctgcaatgaaatgtaacaaataatcttaaaaccctgtctggg

SEQ ID NO: 5994 - DNA, 891 bp, Arabidopsis thaliana columbia
tgtatctttccgttaagaccacctattcaatcattctctaagttacatgatttaagatttaagtaaaatcattaactctctgccctctcccacttcctccactaaaaaccatctttaatcataattaaacctcaaaaatcctttcataatcacagtattataaatagcagctcttaccaaatcctctaaaccatcacacaatacaacacaaaatcttcaaaagaaaacacaatggcttctaacacaagtttcctctttgtcaccgtcactcttctcctcgttctcaacgtctccagcagagcactcccgcccgtggcgattccaccaacatagcggctagactaaccggaggaggactgatgcagtgttgggatgcactctacgagctgaagtcatgtactaatgagatcgttctcttctttctcaacggtgagaccaaactcggctacggttgctgcaacgccgttgatgtcattaccactgattgttggccggcgatgcttacttctcttggctttacactggaggaaaccaatgtcctccgtggtttctgtcaatctccgaactccggcggttcttctccagctctttcccctgtcaaactttgataaatgttcctcgctgacgtaagaagacattagtaatggttataatatatagctttctatgaatgtatggtgagaaaatgtctgttcactgattttgagtttggaataaaagcatttgcgtttggtttatcattgcgtttatacaaggacagagatccactgagctggaatagcttaaaaccattatcagaacaaaataaaccattttttgttaagaatcagagcatagtaaacaacagaaacaacctaagagaggtaacttgtccaagaagatagctaatta

SEQ ID NO: 5995 - DNA, 537 bp, Arabidopsis thaliana
ctcacggcaaaaacaacattaaactatcaggaacacttggttatgttgctccagaatatctcctagatggtaaaatattaacatttccctctatattgatcgactttgactcgttgtcatatcactagagttatagcacatagtttgatagtcataatcatgtgaccccataacattaagtctctttcattacgtctaaaattgttgttctaaatcaaatcattttgtttgttgatgtattatttcaactaatcacacatagaaatcattatttgattagagatggtagttgttgggtcgctaaaccggtttattgagtttgtctcattgcaacatctttatgtccctcaggaaaattgacggataagagtgatgtttatgcgtttggtgtggttttacttgaactcttgttaggaagacggccggttgagaaattgagttcggttcagtgtcaatctcttgtcacttgggtaagtccggtttgtgttgacgttattgccacaatacatgaatcagatagcattggttaatgagtgt

SEQ ID NO: 5996 - DNA, 347 bp, Arabidopsis thaliana
tgacaaaggcaaagggatgtattttctgtttatcaaatcagaatccaagacaccaggtggtctccctgctcgtcctgttttaaccagttactacaaatcctctcacttcaaaaacagaccttatgatccttacaccaactacacaagtcccaaccaaaccatcctttgttctgactcttaccagagcatgtactctcaaatgctttgtggtttatgccaacacaaagaggttcttcgtgttggtgctgtttttgcctctggtttcattagagccatcaagtttcttgagaaacattggcctgagctagctcgtgacattagaaccggtactctcagttccgagataa

SEQ ID NO: 5997 - DNA, 578 bp, Arabidopsis thaliana
catgtgtcttcgagaatcgttgtttattgagatgtttgttcttctttcagagatgtctctgtacggagagaaagagtggtacttcttctcacctagagatcggaaatacccaaacggttcgcgtcctaaccgggcagcaggaaccggttattggaaagctaccggaagcagataaaccgattggtaaaccgaagacgttgggtatcaagaaagcactcgtcttctacgcagggaaagctccaaaagggattaagaccaattggataatgcatgagtatcgtctcgctaatgttgatagatcagcttctgttaacaaaaagaacaacctacgagtaagttctgtttcttattaacttatgtatcatcttttcgtgaatgatgatttagattattaactttgttgtggtgggttttgctgtacagcttgatgattgggttttatgtcgaatatacaacaagaaaggaaccatggagaagtatttccccgcggatgagaagctgaggacacgacaatggctgaacagtcatcatcaccttttgatacatcagactcgacttaccggacattgcaagaggat

SEQ ID NO: 5998 - DNA, 387 bp, Arabidopsis thaliana
tgtggattttaatggcaagtctgatgctgtctacacagatcttaatgggaagatcgacaatctaagctctcacttgaagaagctagatgtacaggtagctcaaactgcataatctatcaagcgacaagagggttttcttcatggtaatcctgatgctaacccaaggaagagctgcaatgccatcttcatcagagaaggagatgatgtttggaaggaattggacactaaagacgagttgaagctcgcagttgcagagatagtctcgatcgacaccctcctgtctcgatcgcaccatacgggactctctcctcagacacgactctctatgacggtcgtgatcgatacccctctcgtgtcgatcgacactggactcggactgcaccttgt

SEQ ID NO: 5999 - DNA, 404 bp, Arabidopsis thaliana
aatcttaggatatcgaatggttaagatctattacaaagttgccaattctggtcaaagggttactcacacgtgaagacggtaaagatccatgtctcgtagactcgtagtctaatatatagcaattactctttggaaataccaaggcatataaaaaaaaactttgtatgatgctgttggcagctcttaaggctgttgaagccggtgtagatggaatagtggtatccaaccacggggctcgccagctcgactattccccggctacgataactgttttagaagaggtaaaccaatcaatgcttgctataaaacatgcgtattcttcttgatgaacaaactggtcttcttatgaaactgcaggttgttcatgctgtgaaaggatggattccggttttgcttgatggagg

SEQ ID NO: 6000 - DNA, 872 bp, Arabidopsis thaliana columbia
agccggacaagatgttgctgctggtctcgtcagaatggatatccttccaagaatttatcaccttctggaggtgagatcactatctatgtgtaactcagcaagtaaaatcattctttttgtgtcgttgcttagttttctggtttttttttaatgttcatgatttcagacagaaccaacagcagcgcttgaggacagcataatctctgttactattgcgatagcaaggcattctccaaaatgcacaactgcaatcttgaagtatcccaaatttgtgcaaacaattgtgaaaagattccaattgaacaaaagaatggacgttctttcttctcagatcaactctgtccgcctcttaaaggtaatactggtccgctcatacaaaattatcttggggtcgttatattcattcgtctttgatgttttttttacagaacctgatgattcgagtttgttaagctatcaattctcagagctattgtaaccttcgttcttctttctctctttttaatttcactaaggtgttggcccggtatgatcaaagtacttgcatggaatttgtgaagaatgggactttcaatgcggtcacatggcatttgtttcagttcacctcatctcttgactcatgggtgaagctagggaagcagaactgcaagctttcatctaccttgatggttgaacagctccggttttggaaggtctgtatccatagtggctgttgcgtatctcgcttcccagagctattcccagctctgtgtctgtggttgagttgtccacattcgaaaagctcagggagaaaaatctcatcagcgagtttacttctgtgtcaaacgaggcctacctggtccttgaggcttttgcgagacacttctaatatg

SEQ ID NO: 6001 - DNA, 548 bp, Arabidopsis thaliana
ttttatttatttaaccctatatatgaatcagagcagcagggaaagagttcctttaagtggaagcataattattgatgaaatttttctctctaggttggtggaatctatgtcaggcgtttcttaaaagatccaaaatttcctctgagaaatccaaaacgattcttggaaggactgctggatcagtatttgtcagcaatggccgcaacacattacgaacaacatcctgttgaccctgagctccctctccttctctctgctgcattggtttctttgttgcgtgtgcatcctgcacttgcagatcacattggacatcttgggtatgtccaaaacttgtcgctgctgtggcatatgaggggaggcgggaaacaatgtcttctggcgaagtgaaggctgaagaaattggctctgatggagtgaatgagtctactgatccctcaagtctacctgggcaaaccctcaagaacgtgtgcgccttagttgtttacgtgtgcttcatcaacttgcagctagtacacatgtgctgaacaatggctgcactagtgctggaa

SEQ ID NO: 6002 - DNA, 1608 bp, Arabidopsis thaliana
atccaaacatagctcccaaaacaggacataatggcctggatgagacttgtgtctgcatagctcgtgtactcagagagtaggcatcaaatgggacaaggtgtgtcactgcgttcttcaccgcgttctgaagctcaacctcgtcggtcttgtcggaatctatgctcaagaccacatttttgcgacatatgaaactgaattgaggcgctttgttcttgaaaccagtcactctcaataaatcaccaactctgtatctgcaaagccctgcaacaaatacacaaaacattagaacagaccctgaaaagatttctaatcttttgactataaatgaatcaagaagttttgttgtcttaccggcgtaagtggtgacaacaagctcgtattcctgaccaagcttgacatcaactagatcaacaagctcttgttgctctttctcagtgagtgctttaggaaggttgatggagttagtaacaccgttgtttctatgaacaggcaagaactcgaaataagccatggatggtatgagcgtgtaagagacctcgcttggtttgcagagtggccttagattcacaccaaagtaacactcagaggaagcatacattgtgcagacaagaggcaagccattactgtagtagtccaaagttggaatgtattgagacattgtcccggtcacaatcacatccacatactttgtgttaggccacagcctagtaataatcccttgccaggacgacttcttgcactcaaattccacgaaatcagctagctttgggctcggtttaaggatcttggcgaccgcctcacgcactgaaggatcggtgatcagggaacttagagtcccggttctgatgtcacggaccaactcgatccagtgtttctcaagaaacttgatggctctgatgaatccagaggcgaagacagcgccgactctaagaacctcctggtgttgacataagccacaaagcatctgagagtacatgctctggtaagagtcagagcaaaggatggtctcgttagggcttgtgtagttggtgtaaggatcatagggtctttctttgaaatgggaagatttgtagtaactggttaagacaggacgagcagggaggcctcctggagtcttggattcggacttgatgacaagaaatacattcctttgccgttttcgagaccaggaacgaactggctcatcacaggcatcaagagactgtagaggagtgatctcctgtctagctcctcttcgattgttggcattagcttcctctccccaccagatgtcccagagctgccaaacagaacatatatataaaaccttgttagcctctttaagttttgagaaagttattatagtttcaaccttttgggtacccagaagaaaaataatcaactttctagagtactcatcgcccaaaaacaacttatggatcttcaaactatatgatcaaccaataactatgaaaaatatttttgaaagaaccaggtaagaaaaaaacagagcatcgagcaaaataacacaaacaaaaacagagtatccagaatgtttaccttgtgaggaactcagagatgggtttggaagagaggataggtgatttatcacgattagcgatcctgttg

SEQ ID NO: 6003 - DNA, 943 bp, Arabidopsis thaliana
tgtggttaatgattttcctgatatttttgttgaccaacagagttacctccattttgagcacaacatgaccataaagtttaactgatggaaggttctaatccagtaaatcagagaccctaccgttatgctatacatcagaagaatgagattgataagattgtggaagagatgctgtctagtggaacaattcaggtcagttcaagtccttacgcatcaccagtggttttagttaggaagaaggatggatcatggagactgtgtgtggactatcgtgagctgaatggtatgaccgtgaaagataggttccccattccattgattgaggatttaatggatgaattaggtggctcagtggtgtattctaaaattgatatgcgagctggctaccaccaagttcgaatggatccttcggacattcataagactgcttttaaaacccacagtggtcattacgagtatttggtgatgccatttggtctcactaatgcaccagccacgtttcagagtctcatgaactccattttcaaaccattcctgaggaagtttgtcttggttttctttgatgatattctgatttatagtagatctacagaggaacacaagaggcacttggaggctgtctttgctttaatgagagaacataaattatttgctaagatgagcaagtgtgcatttgctgttcctaaggtcgaatacctgggtcatttcataagtggagaaggaattgctactgatcctgccaagattagagcagttcaggaatggccgagtccagctaatcttaaacaacttagagggttcttgggattaacgggctattacaggaggtttgtgaagaattatggtgctattgcagggccattgcatgcattaaccaaaactgattcttttgtgtggtctgcggacgtcaagttgcttttcaactctgaaggatgcgatgtgt

SEQ ID NO: 6004 - DNA, 422 bp, Arabidopsis thaliana columbia
gaaaagaagctgggaagagatgaagtatacctggaaaaagaggtcccatagcttttcaaaaggcaatgtaccaggagttaagaacataaatgcaattttagaactcttttttataacacgaggggagctcaaaatttcactaataactacacgagctgcaatctcgtcatccgaatattccctcagtgatggtggaagccaatcagttagccccttgcaccctttagatgaaaacatataacatgccgctttgctgtgatgagggaacatgtaagcaccaattacaaacattgctatcagtgaaagcactgcaatgatccatataggcttccttgtaggagcacgatggcgagccccaggcaaagactgcatataattaaatttgcctagacgccaacccttaattgccttcatctcataaa

SEQ ID NO: 6005 - DNA, 578 bp, Arabidopsis thaliana columbia
cagtaagttggtatatatatcgaagaaaatggagaaatcttatacccgagttgcaagtatacgagccttgtcaggagttccaactccaacagctatcaatttaacaccagccgcatcaaatctcggtttagcctctttcaaagcagtagcaagttcccaactttcatataaaaaaaataattcattatcaaaaacgttttacaacaatccttgattttgcaacaattccaagtgtttatgaatgaatcaatttaccagcaaacgcatccgaaatgcctcaagagtacaacggcagcaattccctgtgtccaaaaaaaaacactattcaaacaataatatcccaaaataatgaaaagaattcgttcttcataagcatcctaacatacatctttctgatcccagagatcactgaattgcacgcgttggcctgaagcagtaaagatagagacatcgccgagtatctcaccgatatcttctctgtaatcagtgaaggactcagtggcagctctcgcggaaaccacacgaggcctactaatcggtgaacggaggaactgtaactggattttaatttggtgaca

SEQ ID NO: 6006 - DNA, 547 bp, Arabidopsis thaliana columbia
gatattcaaacgatgagattgattgatatccaagaaaccatcaaaaagatttgaaaatttgaatcaccttttgagttcttgatcattgttgacggttttaggaataggttcatatgtataagtgtcgaggttcatacgcatgacatttgtgtccagtaatttctctccaatattctttaaattctctaagttcaacgtctcggagtcatccataaagacttcatcttttttcaatgtatctgcctgagataaacttgcacatatcaataatctcatctagttaatgatagataacacattaaaatgttttaagtatagcttcttacgtcgattcttagatagttatcctcggactctagggcttgaaacagaactgaggtgtggtactgaaccatgtctcggcttgattcaaagataatgtctaatatcggagttgttttatgcttccagttgtacgcccaattttcgaatccccattttgcagcctctactgcactgtagtactcccccttttcgccgatcctgccctatagatacacgatatctt

SEQ ID NO: 6007 - DNA, 454 bp, Arabidopsis thaliana columbia
ggcatcaagacggtgactttggaaagaactttgaagagacttgcgggagaaatacagaggaagagaaaattcaatgggagaaagcgttgactgatgtcgcaaatctcgctgggtttgattctgtgacctggtatgcttctatacatcagtaatttgtgatttcatttatcgtgaatgagcgtagtttcttgtttgggtaaataatcatcgttttctccttgttagggatgacgaagcaaaaatgattgaagaaatagccaatgatgtttcgggtaaactgctttcaacttcatccacggattctgctgagaactctattggcattgaagatcatattgcaaatatgagtgtcttgttgcaattggaagctgaggaagtgagaatggttggtatatggggttcctcggggattggtaagactaccattgcaagagctctgtttaaccactttctc

SEQ ID NO: 6008 - DNA, 567 bp, Arabidopsis thaliana columbia
ccaacgaggctctttaggcatgaacttctggtttgcataaacatccatgtaatctccaaacacaaactttggatacttcttctcacttccttcctcttccgccaccgcggctggccctatcgccgccttgtactactgattgtagaaggaagctatagaccttctgtttccttcctccctcgccaacaccctgtgccacgcactcttgtacctgccaaccacattttggttaaaactttatactcaaaattgtatattttgtactagtgttgtcgtcgtgtcaccactgtttccggatcaagtcgagattagtgttttggttcgtaaaagatgagtgaaaaataccttccgttgctaagaacttcaatctgatcaccagtgttgataacaatggcattaggtagaggctgaacatcgatccactcgccgtctttcaagacctgaaggccatcatattcatcgtcttggaaaagcaaaacgacacctcctgcatcagtatgagctcgaaggccattgactagctcaggatgaggacaaggagggtaatggctgactttagtccaaaga

SEQ ID NO: 6009 - DNA, 567 bp, Arabidopsis thaliana columbia
ccaaacagtttgaagacccatcttctctttaatccactgatgtaccttgctactttctgattttctgtctctcttagaacattacgctcagaaaatcgaaggaactccaatatacacattcaatatacatcttatagagaatctgttcatagtcctccgacaataacctttccctcatgagctgtttcattcacctccatgttctcactgccccatttctttgtctttgtctttgaacaacaagtgtatcccaccacacagcagcaatactctctaatctgattgctaccatcttaacttgcttcttttcagggatacccataacctcaaagaacctatcaacgctgatttgccaatctagaaaatcctcaactccaatagtactatagaacaatggaatgtcaacctttacacggtaatcatgactattttgttgattcctttcctcaacttcttcctccacaaattcctcttcaacagaacttgaattttcattgataataacacggttaccactcttgggattcattttcccggtttctatgctgatttttgttacataattgg

SEQ ID NO: 6010 - DNA, 529 bp, Arabidopsis thaliana columbia
aaaacttcaacacacaaatcttgtcaagttgctaggatgctgcgtcgagaaggatgagaaaatgttgatttacgaatacatgcccaacaagagccttgactacttcctctttggtgagccttcattaaaaggctaagaatctatataacccatctgaaaaatgtctcaactctgtgtagatcccttgaggaaaattgttctggattggaagctgcggtttaggatcatggaagggataattcaagggcctttgtagcttcataagtactcgagattgaaagtaatacacagagacatcaaagccggcaacattttgctggacgaggatatgaaccccaaaatatctgattttggaatggctcggatatttggacccaagaaccaaagccaacacgaccagagttgctggcacattgtaagtgaagagtgactagaaacaaggagaagattctctgatcattttatagactttattgtgttgatattatttgtagtggctatatgtctctagagtacttcagagagggat

SEQ ID NO: 6011 - DNA, 532 bp, Arabidopsis thaliana columbia
caacactttccatcactaagtttggtttatataaatcacataaaccagaagtaattaatcagataaagaccgaaaaaaaaccaccatggcagattctgaacatgtacggccgctagctccggcgaccatacttccggtgagcgatgaatccgcctccaacatcaagaacacacaccgtagtagaaacagaatcaaatgctcaatctgcgtcactgcaacatctctaattctaaccacgatcgtgttgactttagttttcacggtgttcagagtcaaagacccgatcataaaaatgaacggcgtaatggtcaacggcctagattcagtcacggggactaatcaagtccaactgttggggacaaacatctcgatgatcgttgacgtatcggtcaagaatccgaatacggcgtcgtttaagtactccaacaccacgacggatatatactacaaaggaacgttggtgggtgaagcgcatgggctaccggggaaggcgagaccgcatcggacttcgaggatgacgtgacggttgata

SEQ ID NO: 6012 - DNA, 505 bp, Arabidopsis thaliana columbia
tatgtatcgtatcagtttctatttcatgcaaaatattcacaattcactgataattttacatactaaaaaatattaagaacacttgatatcataaatcctaagacgaacttcatcttttgttcttcacaaataaaataaaataacaaaagaaattaatgtttgttttttctgtcttttaaaaaaaaaaactcaaatcaatatgtttggttaggaaaaacaaaacacgcaaatagtcgttctaacacaacagtagatttatttcaacaaaagtcacctgaaaattggtgagatcagatcctgggcgtacggtcttaaagaggctgaggatcttgcggatgacattcgaagcagtgtgttcagaatctttttcatcttccaacgaaaaaggtttggccagcacaaggtgctttctcatttcttcttctgcctatacacaacaaaaataattgaatatataagtcaaaactaagcatctaatttcttgttgaacctaactcaatttata

SEQ ID NO: 6013 - DNA, 525 bp, Arabidopsis thaliana columbia
catctttgcatcagcatatatgttagaaaccataacgtagttccctggattatgaggttcaagaacaaacaactcttttgctgcaatctctcccactgaaacattcccatgaagcctgcaagagttgagcagtgatccccaaatggacgcacttggcttaaatggcattgtttccatcaccttcactgcttctttgatcttaccagctcgccccaagatgtcaaccaaacaagcataatgctccaaagccggtgaaactctgaactccgttttcatgcgttcaaacaaacttagaccatattccgtaagccctgtatcgctacacccagataacaaagcaacaaaggtaatcccatctggtgcaacgcctgactctatcatccattcaaacagatttatcacttcttcaatatttccgttgattgcataacagtttagcattatgttccatgaagccaaatccttagttaacatcacatcaaagactctccgagaatactcaacctctccacatttcccatacat

SEQ ID NO: 6014 - DNA, 559 bp, Arabidopsis thaliana columbia
tgaaatgtcggctattgaaaactgaaactgatttctacaataatgcaaacatcttcattctcagaatgtatgattaagagtttgtttttcttggaaatgttttcagggagttagcattgggaccatcaagacaaaggccaatgtatgctgtgtccagtttccatcagactccggacggtctctagcatttggttctgcagatcataaagtgtattactacgatcttcgaaaccccaagattcctctgtgcacaatgattggtcatagcaagacagtgagttatgtcaagtttgtagattcatccactcttgtgtcctcttctactgataacacactgaagctttgggacttgtcgatgtctgcttctgggattaatgaatccctcttcactcattcactggacacactaatttaaaggtaacattttaccctgaaatatgctttcaagactctcttcggtctccggtttctgagatgtaatgttcttgtgatgtgttgcagaactttgttggcttatcggtctctgatgggtatatagcacaggctcagagactaacga

SEQ ID NO: 6015 - DNA, 540 bp, Arabidopsis thaliana
gattgttacttagaatgcatgaacatgccaaaagaccagcttatgatatctatgaaatgatgaagttggacaaactatgaatatacgaggaaataatgtgatcaatgtgacaatctaagtaaaaactttgtcattttatatttcccatcatgaaacataacaatttcaaaatacaaaaaaaaaaactaaacaatctttgcttttttcaattatttgtcacatggtataataataaagcaattttacattcaacacatcatttataagaaaaaatcgactctttgaatttctaattgcagccttcttgacgtacacgtcagcaagtttaagaatggtgagaggccaaatatgatttttccgacctgatcaatagcaaatctgagctccgttaccaccaatcaatgccgtgaaacactgaaaaccgctggactcgagctcctccaccactttgtccaccaccgtccctgaaacgagtttgttttgcagagaggggttaatttaagaataaagacctgaaattgacaaaaaggatgattgaaa

SEQ ID NO: 6016 - DNA, 520 bp, Arabidopsis thaliana columbia
catttccaggaggattgtaaaaacaaatggtcaacaccgttgactctttcgtacacgtggcttgagcacacccgagctctttagagtttctccagacgacttgtttataaaccccgcacgtgtggttcgcagcacacgtgtctgacttataattgtagaaaggtttctccttcacccaagtctccacagcaagagacggtgtcacggctactaagcccttagcccaaagctggttcgcgccgtattttccagggtttagactcgcgaactcacacttcttttggttcctctggtaacgagccaaccgactcgcagcagcttccaacgtctggctccaaactagtggtggaacaccaaccatggctctggccttgttgtgcgcatcggtgaaagctttagctgctgcagagattgttggaggaggtggaggagaagtggaaacgatttgtttgggtttcagtttcgcgccggtgagatggctttgacggagatgacaagaagtgcacgaagatgatgtgat

SEQ ID NO: 6017 - DNA, 473 bp, Arabidopsis thaliana columbia
ttcaatttggcgaactcgcggtacacttcttcgatgagttgatcatcgtcccatcgatcgcgatactcgtcgccaccaaagaaaactttcttgatggcgacattgtataatcgctctctccaacgttctatggacgtgcaaccacactgttttgcgatccagttgaagtaatcactttgagagatcacaactgcatcctccggtttaaacgtcccgagcattggattccctcgaggatcggttagaaaatgtgtatatctcttaggaatccctaaatcttcaagcttagagtagaaagctacagcctcttccatcatcttatcctctgctggaagcttaactcgacccgacaaaaccgaagcaacccacttgctctggatttcaaacataaagaactggagcccctggattattagaacaaagatcaaaccaagtaatgagcccaacaacaaaaatcaaagtcgttatttgag

SEQ ID NO: 6018 - DNA, 553 bp, Arabidopsis thaliana
tgactacaatatagtatggtgagacattcataaactattttttcttttttaatactaccggttcatttatgaagctatgaaagtgtaagtgtgaggataaaataaattaatcaaaaaacattccaaaaacatatttattagatatgtagtactgtaggtgtgtaagtacaaaattatatacctgcttacactgaggagcgctgcagctaacgttcttgaaggatgtagacttagcaggggaaaaggccgtgttagaaggacagccaacgcagccggagcaaggaatccaagccacgtcactgctcgtgtccatggctaggagcagcggctgagcggagtaccgatcaaagccttgacaatgtatgtagtgctttgcaacatttgacgccctgaggcaatggggactacagatctcccggcgacgaggctgctcaggtactggagacgggcctggtcttgagccagcgtctggagcacacgcgcttcccatgagagtggggatgatgatttgaagggggagcaagggctgtctatgtggaagattcttagggta

SEQ ID NO: 6019 - DNA, 555 bp, Arabidopsis thaliana
gtggaaggccattaggacttactttcgagaagaaaacgggagatttgtacatatgtgatggttacttggggctcatgaaagttggaccagagggaggcttggacgatgttaattgttgatgaagccgaagtcgtaaagttatgtttgctaaccaaggggatatagacgaagaggaagatgtcttttacttcaatgatagtagtgacaagtatcatttcaggtattcaataggcttttttatacatgtacttaggaataatgatccgagcatttgcgacatagagttatatatacgacttcaatatttgtttgtttttgcaaaaatagcgtattaaattaaactttatgtgatgtgtgttggtcagggacgtatttttagtggctgtcagtggggagcggtcgggaagagtgatcagatacgataagaagacgaaagaagccaaagttatcatggacaatctagtttgtaacaaaggtttggctctaaacaaagaccggtcttttctaattacatgcgagtccggcacaagtcttgtcaccgatactggattaaag

SEQ ID NO: 6020 - DNA, 1347 bp, Arabidopsis thaliana
tcaaactcagaatcattcgcagattcactctcggaatcactcaacacataggtcattttcctcctattagctctttgaggcctcgatatcgcagaaacatctcctccagatttctcagacgatgagtttccagccacattctcgctgctctcctcttccttattatcagccaacctgctcatcactgaactactcttcttgttgaacggagatgatctcatcttcctcactttcttctccggggacacaccaattgccagaacctctgttgaagcaactgtctgcttccctcgtttcctcggagctgctggtggttttgcagctttagtcgccgccggtttccttcctcctttctttactggtgcaacctcaactaccacgtcatcatcatcgtcatccacagcaattgctttcgatgtttcagctgtttctgttgattaaaccacagaaaagacaagacataaacttcaggaaccagcaatacatacaagcagttgtgttagagcaatgtttctttgtcaattatgtgactgacttactgcttgaatccgcaggtgctgagccgaaattgtattgagcaagccgttgtgctagatccaacatttcatcctcctcaacctcctgcaaaacacaaacagaccacagttttaatcacttcgtttctataatcagaatacaaactttgaaaaaaactaaacaagttttacagattatacagtcaattaccttcgcagctgctggagccttcttctttgctccttgtctaccttttggcttcaccacttctgctacgttgttatcttatagaatcaatacaaaatttccaatgtatattagatccaacccagaaaacataacacaatgtaaacacttgaataagagactaacctgtgtccattgctgaataggaagcctctgttgtctcagattcactggctttctttgtggtcttctttggtgctggtttctttggtgcctgccttttaacctttactgctgctccagatttggccctgatttttttctgtgctgcctctatagcctgttggacttgagcatctttcagatcaagtttctgcaatatgaggaaaatgatgtatcaatgacaaattgtgatagtttgttatgtttaagcggtataaataagggatagtgtgaatccttacttctagttccttgtcaagagactctaggtcactgagccagagggatttcggtgtggttttcttcatgtctgcaactgcaataatcattttatctctgtctgctaataactcctcaactttctctatagtcacgaagctatagccattgccaataggtagtcatattccgagcagggtatat

SEQ ID NO: 6021 - DNA, 228 bp, Arabidopsis thaliana
agcaaatatataaattgtaaaagtcaaaatatcatgaaaatacgcactagatggtagtcaaatcaacacataggttaaccaatacgaacgccaacgatcacaattcgcgtctggccttcctgtagccagctttcatcaacattaaatgtgagcgagtaacaacccgtcggattctccgtgggaacaaacggcggattgaccgtaatgggataggtcacgttggtgtag

SEQ ID NO: 6022 - DNA, 531 bp, Arabidopsis thaliana columbia
taactggagctacagcatctggatgctcccaaagcagggtcaagattactggatagagatttacttagaaactttattgctactgctatgccgtttggttagtattttccctctttcatatatggtatattctgttacctggtagactttgtttcctgattgatgtgctatcaaaccctgaaatcttttgatcacttctgcaggtaccccattagacctcagcttgtctaatatatctgctatgaaagcgaatggtttttcctctgctgatcctcctccccaagaacttaagcaaccagcatggaagccatacctgtacaaaggaaagcaaaggctattgttcacaattcatgagaccgttagcgctgcaatgtacgaccgcgatgagattcctgataatgtatctgttgcgggacagataaactgtcgggcagaactagaagggctgcctgatgtgtcgtttctctagcagggctgagtacagccatatcgaagctatatctacaatccatgtaccaagttcagcacatg

SEQ ID NO: 6023 - DNA, 262 bp, Arabidopsis thaliana
caatgaataaattgactcggaaaatttagtgcctcaacagtgttcagcaagaaatcccattgcactgaattaaaagccttagatatgtcttagacgattctttatgatagtcttagacgatttccgttaccaacagtacattctccatcagcaatcattccttaacaaaaagttgattggttttgaaaaatgaatctcggcagtaaacactttagtctatttgcaaggatctttgaaattaccttgtaaaccacattgcaac

SEQ ID NO: 6024 - DNA, 1509 bp, Arabidopsis thaliana
tcctttgagtcacatgacaaacacgattcgacaaagaaaaggaagatacgaagaatcaccttggagcaagagatcggccatggaaggtagaggagctgtcgattcgagcgccttggttggcgtagaatccgagacggactgaagaatccggccagcgacttcccaccggaaaccatcgccgctggaatcggaaaataaatgccacgtcgacatttattcagttctagggtttccaagttttccgattcgtcgttatatgattcagccggagaactaaacctcgcgattcagaattgcctaccacgccaagagggaggagtcgggagtgcggaatttttatttttattgttttattttctttccccaaaccaaaatcatcaccaaaaatccaaaaagttaaaagttctgacaaaggcgggaaagttgaaaaagatttgggccgaaattatgagacgcgtggttttattttaactttgggcttggtttttacggacatagcgttccaagacaagtgtgatattgccacggccttttattgcggtaactaacggcacgaatgctaacccgaaatcgttccaaacaataattgcttacgtggacattttaaaacatctgttcaatgtgattggtgactgacttcaatgaaaattacattgcaacaatggtcaagtatcacagaaaattacattgcaacaatctccaccttcaaatctctaaacacgccagattctgagaactataatttacacgggggaagccgctgaggaggcagagggtgctacagaggggatcgcgggaacaccgatgaatgagaggaatccggaggcggcatgatcttgttcgtcgaggaagagatcatcgggagctctaaaggcgccatggacacagattgttgctattccgatcatgagagcggatatcaatacagatccgacgcttgtgaagaagatcactgcgatcgtggagaggattaggccaccgagagtttcgtattcggagaaagatcggccgaagaggataagaggacgatctgatggacggaagaggtagaggaagagccaggaagcggcgagacataggaggaggatgagagagaatgggtgggcgagaagagagaaaccaaggatcagagcgacaatgcaaacgtaattcaccctgaaataagaggaatttttccggaatcgcgtcccggcctcggagagagagtcaggctttgtgaaagcggatcgatcgaggagctctgaccacggacggctacgagatagaccaccacagaccgtctcggtcacaccgttgacaaatgcacggacgactggaggttgcgattccaccacagcggttacaatcggaggctgattggtggtgtctgttgcggtggtggaaattggaagaacagggggatttgttgcaccattcgattttgtcttttgggattttgagattggaaaattttaggagacgaatgatttagaggttgctgaagttgcggtagtgttatgtatatatagg

SEQ ID NO: 6025 - DNA, 599 bp, Arabidopsis thaliana columbia
ttaaaataaatcaaccacgtggcgtgcatgtgtgccatgatacataccaacaacggggacaaatagggcatagatgtttggggggttttgtgaaattgtgaccatataaatcattcaatattcaatgataataaattgcaataacgcaaaaaacacacaagtgggtagtgaataagaagtgtgtagggccacgtttcaatatttatctccttctataaaaaggactctcttcttctttgtatcctcattttcattaatccttcaatacatctctcaaaccctaagagaagaaaaatttgctttgtttttgccaaattcaatcgatatatcaaagatgaagatgggaggttcaaagagaagagtatcgagcaaaggacttggagctgttcttaaagaacaaagagctaagctatacatcattcgaagatgtgtcgtcatgcttctttgttggcacgattgatcctcaatctgtcttcagatttcatcctcatcaatctttatgtataaaaggctttcgtgtgttggagggagaagagtcgtgatgtttggagcttaaccggcatggcggatcgggtttgatctacgcgagattgtggatg

SEQ ID NO: 6026 - DNA, 1465 bp, Arabidopsis thaliana
tcgcagattagtcgttaactctgaatctacgactaatccgcgactaattacagtagtcgttataccatagtcgctaagtagagctgtcgtcatttagtcattgatttacgactaatttacgacagcataccatacaatacatattagtcgttgagtagtcgtacttatgtggcgactatttggcgacaatttcacgattaataacactgtacaaagcgtgtgaaacatattgtcgtccaatagtcgttaaattcttccgacaatgatacgactatgttacgattaaatttaatgaaccctaggtgtctttaaagtaatcgcaaaatagtcgtaacattttttacgactacttgccgactattatacgagtaaatgtaagatactaatgatatgttatacttagtcatataatagtcgtataaatttatacgactaatagacgtctgtttgacgattaggttatgagtacttttgtttgtcgtaaaatagtcggtaatattggtgactcttttacgactactttacgtttaattggcgacgcttttacgactatttggcgacttctggttttgtccgaataagaatttggtcatcgattgttgggtttcttgtttgttgtttagtgttattgtttgttgttgtttgttactcgaaatgctattaattatgaaaagataaacatacattgaaaattaagttcaaatacacatacaagtatcttgttcttaaacaaactactttattcaaataaacataagttcaagtatagtgtttggttcttaaatctatggagcagtaggtggagtatttgggatcagtggatgtggaagagtgagtggccatgaagtccaagaattgcggatcggtttggcagagatacttctcgactaaggacaagtgttcgagcttgtccttttgctcagctgtgactcgggctgactcagcttctcgggctgtaatctcagcatcccgcttctttttatacgcagcctgctcttcaattttccgttgagcttcttgcagccgttcttctaaatcttgaaaggatgttgagtctccggggagttggcggttggcactgcctagagtatctttcagacatccaagtccataaggattgcctcttgcatccctatcagtggactgcaagaaaaagagaggaagacaattagtgactgaatttaaaacaatggacaagactctgaattagactacaacatcttacctcgagaaagatggctgtatactcatctactgtgagttccggaggtcgtgaagtgccatcagagacagcagaagctgcagcctccagttcagacagctttgatctcacattccgttcataagtttgagcaatcatcttcgccttccgatcaacataagtgccatccgacttagtgtgtgtctggatgaacacctcacctagatggactggtcttccagtttctcttcctgcaaacacaga

SEQ ID NO: 6027 - DNA, 1230 bp, Arabidopsis thaliana
gtggtagaaggttgacaggtgtaagcagcgaatgttttttgtatttggaggtcttatgactgggttgttttttgtcttcttatcttaagtagtttcctaagtgttgggttttctctttattatgagtcggttagttttgttttatattaattaatttaaattttctcgaggtctttttagcaattatgtttttccttttcttttgttaattatcttcttataaggataggttttttattctcttttgtctttagtcgggtcttatgggtagactagtttgtgctatatatacgagttctgtcttaggtttataagtcgagtctcatctcatcttctcttgtgcttctcctttcctggtattatggctgatgagttgtgggatgaattacaacagttagagttaggaagagaggatcctcctttgtttatttcgtatgttgcttatgcaactaatgaatcacggaatagacttagcctgattgcaaggcctcttaatcctagagctcaaaatcttaatgttgtggttgctgccttgccaagggtttggggtctgacatctagagttcacgggagagctggatctcttgtctgtgctacgaagggaaccctggctttacaatagttggtttgtcacggctcatcgttgggaggtaaactcggcttttgaatacttgtctaacattgagttgtgggttcaaatgcgtgggattcctctcctctatgtttgtgaagccacagtgacagagatagctcttggtttagggcaaattatatcattggattttcatgatgctactacaacccaaatagcttttattagagtgagaatccgatttgagatcactgatcgtataaggttcttccaaagaattacctttgattctggtgagactgcgctgataaggtttcaatatgaaagactaaggcgaatttgcagtagctgtttcaggctgactcatcataggaattactgcccttatcgacaacctgagcctcgttctatcattcgtggtcctaccaacaatctcactaggtctagaagagaaggagtgtgtaccgggatgaatatcatcgttcttccctgaactcccaatcacagatgtctgagaacgcctttccagcacctattgaacctcctccaagagtggcagctcctcctttgaatcctgatgaatttagggctgcttattttccagaaggcagagcaggttcttaccaaatataggaaca

SEQ ID NO: 6028 - DNA, 1780 bp, Arabidopsis thaliana
ggacaactgaataacttatggcacaactacggctaatgcgcagtattttgtctgggcccgcattccacttttattaccataataactattgtgtgttcacactatgcgttcacactatgtgttcacactatgtatttcaatttcaattcaaagaatttttctcattaaattaccaaaattttctctctctttctttatgtccttcttctcctttcttctctcgaaaacttttcttctctccttctctcttttctgacgacgaacttccgccgacgaacaacacgacgaacctccgccgacgccgaatctttctcatatcccgccagatccaagttctctggtaagttttgggttggattgaaaagaaattagggttttgatttcctatacactattttcaatattcaaacacaatttacagaaataaccatttacctcagattcttcttcttcttcccttctttttcctcttctttagggttttcttccatcccctgagactgcattggtccacatcatcaccttcctgaaaattcatacacaaccataaaattaatatttcgcgttatctcagaccaatattataaacttttctcagaatccaattttctaatgcaaatcaatgtatgattgatcacgtataaatccatgcatgcaccagtcaaacacatcaatacatctagtggaagccatgagtagccacctattcaaagacactactttcatattcaaacacaatttacagaaataaccatttacctcagattattcttcttcttccccttctttttcctcttctttagggtttttttccatcccctgagactgcattggttcctcatcatcaacttcctgaaaattcatacacaaccataaaattaatatttcgctgtactacttgtactagttatctcagaacaacattatcaacttttctcagaattcaattttctaatgcaacccaatgtatgattaatcacgtatatccatgcaccaattacatagacctatactattaacttgtactcattgttttctagttgtccctaaacactatatcaatattcacacaaaattttcataaatttgtatatacctcagaaatattttcttcttccggttcgttaaggttttccggagactcttgttcacagttttcgtcttcaaatttgttttcctctgccacttcttcacggttcatatccgcttcacggatgatcgtgaccctctcgtcttcactttcactcgaactaggagtgactaaccttacacgacccatgattaccttgcaaaaccactcaacaatcaaggaaaccgttcaaatcaacacaacgaaaacactcaaaaatcaaaaaccgttccaatctacacttacaatttggaacgccggcggtttggaacgacgacggtttggaacagcaccggtcacggcggaattgcaacggcggttaaacggaattgcaaagtggatgtcgacaattttgattttgtaaaatgttacttaggttaaaaaaattcaagaaatcgtttggtgaagaagcagagatgaaaccggtgacggtgaactggtcggaaaaagaaagcgacgaaaattttcgagaatcgccggaacaaatcgccgtttaggttaatcggagaagaaagcgacaattttgatttttgaaaaaaattacttagattacgaactgacgatttgggggaaaacccgttacagtggagctatccgtctacatgtggttgcggcaagtagttcttctaaagtaacaaggttatttggtaa

SEQ ID NO: 6029 - DNA, 1219 bp, Arabidopsis thaliana
tgttgataccctctgtggaactgctgcgtaggtgataagtgtgtattttgcatgttttgagcatccatttgtcatcattttagcatcatatcatcactgttttataccatttcacatcatttgtcatcactttgcatgtttaggatagttttgcatgcatgttgcatatttgcgttgattttaggtgatttggagctgttgacgagctatctggaagaagcggacctgatcatgacaaaccactcgaccaagaggtcgagtaggagcttcaagatctcaagagaccactcgacccccaggttgagcagaggacattgatatgtctataatttgcatgttttcagtgtccattcatcatcgttttgagtccagtttcatttcattcatcactgttttatatcatttctcatcattcttgcatactttgcatgattaggatagctttgcatacatattgcatttctgagttgttttcaggtgatttggagctgtttgcgagcaaattagaagaaacaaggcagaacaaggagacatactcgaccaccaggtcgtgtgcatccagcgccatactcgaccccctggtcgagtgactttggagccattcttcccatctactcgacccttaggtcgagtatcctcagctcaggccactcgatgatgccactcaaccccctggtcgagtaccacttcgccacaccacctgaccacactcggccgttcactctaccatgttaatcgaccccctggtcgagtatcatcactcatcaccaacaccatcactcgaccggacactcgatcacgtcttcaaggtctactcaaatccgtagtcaacgagacaagctgggcacaaggaagagaagaggagaagacgaagtgtttggaagcggcctggacctccatcggatcacgaagcgcatctcggcccattatcattctatgggccgggcgattaggttattggcccgtctactatcattttatttcgttttgtataaatagatgtcttagggttctgtcttgggacatctagttgacattgagtttttgcttcagttttatttttctgtttgactactgtgcgccgtttttgcttctacaacctataattagagatttttccaagttattcagattccgcatttgattttatctgtcatcttgtttctctactctttatctctttacttatgcaatattatcatttatctgcgtttatgtc

SEQ ID NO: 6030 - DNA, 1855 bp, Arabidopsis thaliana
aagagtttgacatggagatagtagataagaaaggcattgaaaatggcgcacgggacaatctgtcaaagatgagaattgaagaaccacttccgatagacgattcaatgccagaagaacagctcatggttgtagagttcttcggaacagctctgagtccccgctttcaaacctcacctccagcttgttcttgattgtttgcttgagggcaagcaaagactaagtttgggggagttgataagtgtgtattttgcatgttttgagcatccatttgtcatcactttagcatcatatcatcactgttttataccatttcacatcatttgtcatcactttgcatgtttaggatagttttgcatgcatgttgcatatttgcgttgatttcaggtgatttggagctgttgacgagctatctggaagaagcggacctgatcatgacaaaccactcgacccagaggtcgagtaggagcttcaagatctcaagagaccactcgaccaccaggcgagtaaaggacatcaccactgcacttcaccactcgacctcagggtcgagtgccctcatctccatcaccagaccatcactcgatcacttcactcgaccatgaggtcgagtgtcttcacctccatcatcagaccaccactcgacctcgtcactcaacctggaagtcgagtatcttcttacaccactcgactgcatactcgatgacaagcttcagagccttcttcattatgcactcaaccagacactcgagcacaaggcagaacagaggactccagctattcactcgaccacatgggtcgagtacagttcttaacccgtcccaatacttcgttgttttgagtattagggtttcgggatatttggctataagtagcatgtacttcacattttcgataagaagttttttatctagttttattccgcagactttgtgttctagaccttttgtaatccgatttctttttatctattcagtattcagcttttgttcttgattttcgtttactgttgttcattctgttatcatcctgctgttacactgctgttatcatgtcttcaacctgttcaacgtttatgctttctgttatgatgtctgagtagtgaataggtttctgaggatgggttagagtagtatagaattctcagtatgctaggtgattgagtattggttgatagatcccttctggattagttgttcttaatgcatattgctttctgatcaactggaatttgagcctagacatttccgcgcctaaaaggtgttcgatgaaatgtctgaaccactaattccagagattcgtgatcctgtaccaaggtattggttgcagggagcgttttggctttaacttgttgattcgtaatgcctgttaggttagctctcgtcaatggtgattgagtctgagactaggttaacttgagagtgtctgttgcggtggcacttagaaacctattatcatttaatgcacctgttcaaccttgttgatgaaatgcttcccgccatcactgatgaaatgcgaattcctggagtttgcaatggttgacgatttccacaagttcaggtttgagcactctacagacaggagagctaacatccttctccctagccctgaggttacacggataatagagggagataacattgattttaggcctgaggttggacgcctctactatgagaacgctccgccattggatgaggatgaatttcttgaagaagctgcttcggatgggatggatgaagatagggcagtggagttcgacactagcatgtatcactttggtgaacatgtactccagcgaggcagacaagagcttgactaaactcataagaatacagtaaattgcagagtggtcaag

SEQ ID NO: 6031 - DNA, 1621 bp, Arabidopsis thaliana
  unsure (1)..(1621): unsure at all n locations
tcttgccgtatcttggccttgtcatttcaaccgttgatctctgtcgatctctggttctccatatcggttccatatcccaatagttattatcatcaaaaacttaattcattcttgattcatttttaggtgggattaaggtgaaagtatgtggagttgtgcaatatgttaatctatttggtacagcaattggatatacaattgcatcagctataagtttggtgtaagttaaaactttgctttcacaaaactctttttattttaattgttcacatttgtccaaaaaaagttagatgcgtgttttattttgctattcaatattgtccatacaagtcattaatgtttggctcaataatgcagtgttttagtcaatgtagtcttgttttgtgccattaaagattcgaaagaacggctctattattgtttgacttgttaactaattttcttgaataaaaaatttacagagcaatccaaaggacaagttgccaacagatgaatggaccaaatgatccttgtcatgttaatggaaatgttacatgattgcgtttggtattgtacaaatcatattctctcagattcctgattttgatcagttatggtggctttccattgtcgctgcggtcatgtcttttgcttattctgccattggacttggccttggtgtctctaaagtggtagagaacaaagaaattaaaggtagtctcactggagtcactgttgggacagtgacactgagtgggacagtgacatcgtcgcagaaaatatggagaacatttcagtctcttggcaacattgcgtttgcgtactcttactcgatgattctcatcgaaattcaggtatttttgttacgcgagtttttttttttttgaaaataatgttaagttagattcaaaagaaaaataacgttgttacaactagtgcatcgtttggtttatttgttaagcgagtttgtgtgataagagtttgtttaaaggatgttttaatcaactagacgatttgatgatccaggacacggtgaaatcaccgcctgccgaagtaaacacgatgagaaaagcgacttttgtaagtgtggcagtgactacagtcttctacatgctatgtggctgtgtagggtatgcagcatttggggataacgcacccggaaatctcctcgctcatggagggtttagaaacccatattggttgcttgacattgctaatctcgctatagtgatccatctagtcggtgcttaccaagtctattgccaacccctctttgccttcgtcgagaaggaagcctctaggaggtttccagagagcgaattcgtcacaaaagagatcaagatccaactcttcccggggaagccctttaacttgaatctcttcaggctcgtatggaggacgttcttcgtgatgacaacaacgttgatctcaatgttaatgcctttctttaacgatgtagtcggtctcttgggggccattggtttttggcctttaacggtttatttccagtggaaatgtacattgcacagaagaatgttccgagatggggcacaaagtgggtttgtctacaagtcttgagtgtgacatgtctttttgtgtccgtagccgcggccgcgggantctgttattggcattgttagtg

SEQ ID NO: 6032 - DNA, 537 bp, Arabidopsis thaliana columbia
ctggttgttgcatcgcatgctgcatcccgttgttggtcatacccattggtctaatccccatgtgtccttgcatagcttgctgatgtatctgctgctgctgttgcggatcctgaaactggagtgggctaccaaactgtaaaggaccccttggagcgaaaatccctgcaggggatgcttgtgggtgttgcatgaagtagctaggtggttgcatcccagaatgcggtgttgccatctaacagaaatcatacccaacagtaagcaaacccccaaacaacattaaatttctgtgatagatcgcaattgagttttatcatcacaaacaacctgggcagcgacacgtgtagatggtgaaggtcctggcgtaggtggtgggggttgagcatcagcaattgcagcaagatacatcaagttcttctggagaagagcttggtacctgaaaatataacagagcaaaagatagaataactatataaacctcaccattaataatagtaattctaagcttccattactatctaagagacataagaagatgga

SEQ ID NO: 6033 - DNA, 441 bp, Arabidopsis thaliana columbia
cccagaaaacatgatcaatttatatgaccagaaagatcctaagcagaagcaaaagtattataacaaagtgtggaggaggaaagccgatgatgacgatatgattataattttacatgtagaggccttcagggacgccttctttcttcttgaacataaccttctcctttgctttcttgaaatcaggatgtgtcacctgaacaaatccaatttaaacacattagcgtcagtggctagtaattgcccaagtggtgtgtgtgtgtgtgtttgtatgtgcttgaactaaatggttaagagtctctaccttcatacgacgctccctgagagctagtagaccagcctcagtgcatatagcctttatatcagctcctgagaactcgtctttcgtcatcacagactcttcgaggttttcatcttccgaaagagtcacttcgatgtgtgtat

SEQ ID NO: 6034 - DNA, 455 bp, Arabidopsis thaliana columbia
ttcttcgatggttcgttagatttatctctacttgcatcatttagttgaaaggctcttcttttaatatatgtgggaaaaaaattgggttgttttacaggtatagcaaagcaaatagcaggttttggttatggggtttatgctatagaccatcctggttttggtttatcagatggtttacatggtcacattccaagttttgatgacttagcagacaatgctattgaacagttcaccaaaatgaaaggtatatctaaattgtacctgttattgctttttggtgttgaatcttgcttttgggttttatttaagtggtttgattcctagggagatcggaattgagaaatttgccccggtttttgctgggacagtcaatgggaggagcagttgccttaaaaattcatcttagagaacctcaagcttgggatggtcttatccttgtcgctccaatgtgtaag

SEQ ID NO: 6035 - DNA, 610 bp, Arabidopsis thaliana columbia
ggtcgactcatccctgatttttgtttagagtagatttccttggagggggtttgttttgacgcagtttcgttgcaaatgaaggaagatttagtgcccgagtcgaacagttcggtttggcaatctccggttaagcggttggctgtagacggcgagtgtggtgaggctggtgataggagtaggactagctgtaagagaattaaaacgactcaagtcaatggttttattgtttacactagaactaggaagactaaattcaccaagcttcatgaacaagaagatgaaaatgctggattgtcgaatcatctcgaggagtcgaaaccaacgagtggtgttacaagtggcttcggtggtgatatgtgtcgcagcagctcggtaggtgaaactaacgttagtgggagctcttgtgttaagaatacacttgttgagagctccccgggaaagtcgttgtgatagagcggttagttactggcggcttagctgaaagtccggcagttgagactgacagtagctcattagtggatgttgtaattgacgacatcaattttgtggaattgttacatgaagcgattcctgttgaaattctgctgaaggaagcatggattttgaggtg

SEQ ID NO: 6036 - DNA, 303 bp, Arabidopsis thaliana columbia
ctcctccgatttggtcatatcaggagaatcagaaaatctgcggtttcatcttgagaagagtgtgttcacacgttcaggagatgttaatgttgccactcttttaaactgtcaaatattcatatagagtgagagagaccaaattcagattcagtgtccactttcttagattgaattgattattataccttatgttggttgtatttggtgtgtatagcgataagagtgcttccactggtgttgagctgcaactcctccattgcaagtatcgtgttttttagagcggatgtttcatatcttgtatag

SEQ ID NO: 6037 - DNA, 563 bp, Arabidopsis thaliana columbia
tttttttttcacaaaaccctttagagaaaaggataaacttgtataatttggtttaaggttttgtgttggtttgtctatttatttcccccaataacatgtaatatacagatttgaactcggataatgactatgtgacatcactaatgcaaattacaaaaccacaaaattttgcgaaattatcaaatagtatatttagttacatttatatatattgcgagttagaattatataatttttataaggcctcctctaataaaaacagaggaattattgcaggaccaggctgttcttccataggaggaggagctttcacagagttgggcccattttaccccaccggagatgctcgtggcctccgcagaaatcccaaatcttggaacaaaggtttctcttcctaactaatagtatattttgtactgacttatgttaagtgtccttaactatgacaaagtttgtcttgttaacttaattattgtgatgtacctcaaatctattgtttgtggatcacatgctggagtaggatggtcttattctacacaacttctgattacacactggcgatg

SEQ ID NO: 6038 - DNA, 558 bp, Arabidopsis thaliana
atgctttcaggtagggtctctatattgtttctgcttaagcatagacaccgcaacgatcgtaaggagctaaatttatctggcaatttgtcaatattgcagttcgtgagatagaggtctgataaaaaagagttgcccgagaaaggtaaaactaccaaccctggtggaatcgtcgataacaggtcgacagaacgaacaaattttgaggttactcaaacaactcatttcaggtgtttgtttgatagacgttccatccataagcaaaatctctaagcattccatcttctctttgatgggcggaagactctccagcgctgaacaaccagagagaaccagttcttggagagatttcagcttgtaaagatcgttgggaagatacttcaatttctcacaattcttgagattcagcaaaataaggctgtgaagactctcgatgtgttcacaactcgttcgattgctgtccttccaaatgaagggattcaatactttctgatataatatgaaagtccttaagttttaagcaaccactgaggatcagagtcttaagagattttattttga

SEQ ID NO: 6039 - DNA, 428 bp, Arabidopsis thaliana
cgccattgtagccatgaaagtattgtcgatgcaacattctacgccaccaactccgttccatttcttctgcggcggctgacattctacacattgcttccgttccaagtaagaaattttatttttgtttcggatttggttttagcctctgtaattgtgcaaattagacttcaccaatataaaaaccggtcacaattgattttcttaatggtcttgagtagacataacaattgaagcgaaaagagattgaacaagactcttgtcttattgatctgtggtatcgagaaaagggtaatcagtgtaaccagcaacaggatcagaactgtagaaacttggtctgtcttacttattcagcggacgattgagctcaaaccttttaggcaaatcaggattagctaagaacaatcttccgtacgctacaagatctgttc

SEQ ID NO: 6040 - DNA, 511 bp, Arabidopsis thaliana
agactcggaactgaagacaaatggtatacttgatacatacatgtttactgtagcacaggtctactcttatcaccaagacaaagactaagcagaatcgaactaattttcaatttcttactgaggtcttttcaatgaagctattcaaatcgagaaacgaagacccttttttctccaccgccggctttggccatcacagcctcttctctgccatattctctgcttattacgaggtaaactcttctatgaagctgtttagatcgttgaaagaagaccctccttccacggcagctttagccatctctgccaacttctttgccctctcccgcctctcatccgcctcttccccaaccaacacctccctcaccgctttaaccactttctctctgctaatgaaatctcccgtagttcttacattctttttcgctcccacgctcactcctgttctgagcacttgcgtaaccaatttctcattgtagaattgcccgctgctacaggccatgtcaccattggt

SEQ ID NO: 6041 - DNA, 1203 bp, Arabidopsis thaliana
ctctctatggtctatgaattgggctcagctttatgtggagagctagacgagcagatggcagcccgtgatgagttgttatccaaattaaagcagcacctcatcaccgccaacaaccgcatgaagcaacaagccgattctaagtgtcgcgacgtctgctttcaggttggcgattgggttctgcttcgtatccaaccttaccgtcagaaaactctgttctgccgcagttcacagaagctctcgcatcgtttttatggccctttccaagtcgcagcgaaacatggtaatgtggcctatcgtctcactcttcctgaaggtacacgaatccatccagtttttcacgtgtcgttactcaaaccttgggttggtgaaggtgagccggatataggacaactaccacccttgcgtaacaatggcgaattgaagttgcaaccaacgacagtcttggaggtacgatggaggactcatgggacaaagcgggttgctgatctcctagttcaatgggaggaactaaacattgaagatgctactttggaagagtaagatcagattgaggccagttttcctgagtttatcttgaaccttgaggacaaggttcgtcttcaagggaagggtattgatggggtcgtcactagtgaagatgaagtcgttgagaggaggaagtcaacacacgggagaaaaccaaacccgaagtacaacgactaagtcttttgttttttttatttattaattggttgaataagtactggtcttctctgttcctggtttgtaggatcagagtatgacatgttctcttttccactttgcattttgttatttgcttcctgttttgtaggaacgtgtagttccaatttgcttccatataaatcaatgaaaaacccaaaaagaggtagtcattactacccaaaccaattatcttatgttctagcaatctctagctttgaagagggaccgcattaaatggtatcagagtacagttcttttttttcttttcacaaaaacagagtcattacgctccgacgatccaaacgtaaagggaagcaggtcgtgtctccggtgataaccgtagagccgatggcgaccaacaaggaccggttagagcagttggaaacgagtcagggcatgatgcaagataagatgcagagaatgacggtggctatggttgatctcaagggagaaaacgaggaccgccataggaggttggag

SEQ ID NO: 6042 - DNA, 1244 bp, Arabidopsis thaliana
ccatccttgattcaaacaaggatggaactgctgcggatcatgagacttcgaggcagtcccgtgaagagaaagggaaaggggtggccagtcaatccaagaagagatcggccactgaagccggcctaacggatggagctcccgtgccaaagactttttgtctgtctaggggtgaagctcttaatcccgaccaatttacattcaagtatactggtgataaatttctcgtaagagatcgtgaggctgccagtcatctctggcgtaacttgatgcttcctggggcaagagagttccccaaccctgacgatctggtcctgaaggaggagtatcagaagtttgccagatggtctttaaaggtatgtgtcgattacacaagtattctatttttttattctctatgttttgttctgactgcaatctttatttcatcagaccgccgctttggccaatgatctaatcgcttcatccgatcgcaaactgaggttgaagctcgcagacagggacaccttcgacaacttgaagaaatgtgcggaccaagcaaagatcatctatgcaagggatatgaaggagatggccgctttgaaggatgccgatgagacccacaagacagagatcaactcgctgaatgacgaggtcaccagacttaatggtcgcgaggctgatcttttgaaagagattggtgaagttcaggtcgcacttgtcgcggcaaaagagcacgaggagagagaatgtatcaggcttcagaccgaccgagctgcgaaggtctcccatactactaggaaggctcaaaaccgtctcgacaagatgaaggcctatctcaccgagcaggaagagatcgttaagcctaaggtggacgctctgaaccaagcccaaggcgtagaggaagtggttggcatcttgataggaagaggtgcaaagattgcagcggccgagctagagggcctaaaggtcttaacccaaaaggtgaacgatgaggtcaatgccttgaatgtcattgagttcggagagggcgatctgaacatgtctccagatcaacttggttttcaaggcaatcttctcaagttgctcccgtggccgatcagcatggttccatcgtcgacctcttcaaccgaagtgatattcgccatctcagcgttgaggaaggcgaacagaatccaacgacctgatgatgtcgttttgtacttgtaattattttaaagacaatttgatcgtggacccaactttcgaggcgatttaaatattgtatc

SEQ ID NO: 6043 - DNA, 549 bp, Arabidopsis thaliana
aaccttcctattttgtggatttgatctaagttttgtcttttcggcatttacagattgacccacgccatcgttatggccacaacttgcacttctattatgatgtctggtcagcaagcatgagcgcacaaccattcttctactggtgagtcccgtaactatcgttatctttttctgttgtatgaatctgttctgaactttgtttccacctatttgaaactgaaggttggacattggcgatggaaaagatgtgaatcttgaacaccacccaagaagtgttctgcaaaaacagtgcattaaatatctaggaccagtaagtcttttttcggtttcacctgctaaaaaattagttcagggtacttatcttctttttgctcatacacgtttgtgttattcaacctgcagctggagagagaagcatacgaagtgatagtagaagatggaaagctaatgaataaacaaagcatgactctgatcaattcaacagaggattccaagtcaatttttgtacttagcacaactagaaccttatacgtagggcagaagaagaaa

SEQ ID NO: 6044 - DNA, 648 bp, Arabidopsis thaliana
cctagtaataaatgttgggtttagttagagagtgtttcgaaaaacagggtaagaattgtcgagttcgagtctttccaggatttgttgagttttccataggtaagatgagtgaccttccaccatatccgttacatctacctacaaatgtgatgatgattactctgattgtttctatcattttcacttcctacgaattgaagatgagagtaaatgagatgacttacatcttcaatccccggtatacagaccggttggattccagctaatccttgggacaacagactgcagaatttaataaggaaaaaagagtttggatttgcaggtgaaaggggggatcgaagaacacaattcaacataccttgcacgaaatgcaactccgagggtccagtcatttgtggcgtaaacattaatgaatcttccagccaccatctggtaacccataaaaaaactcgtataagatgatacagaacaccaaaagacggatctgtttcctagactgtgacaccaactcttgttaatggtagggactctcatcaagaaggtttattacctttcttacgtctcgccaattctcattcttgattgaaattggtgctcaagaagacaactctttcacaatttcactaccgtgaaaatgtgtaaagcaag

SEQ ID NO: 6045 - DNA, 996 bp, Arabidopsis thaliana
tccaccaccaccatactaccctcctactcctaaggtagtctacaagtctcccccaccaccatacgtttacagttctccaccaccaccatactactccccttctcctaaagtatactacaagtctcctccatcaccataccacgcaccatcccctaaggttctatacaaatctccaccacaccctcatgtatgtgtctgtccaccacctcctccatgttattctccatctccaaaggttgtgtacaagtcctccccaccaccgtacgtttacagttctccaccaccaccatatcactctccttctcctaaggtacactacaagtctcccccaccaccgtatgtctacagttctccaccaccaccatattactctccttcccctaaggtacactacaagtctcccccaccaccgtatgtctatagttctccaccaccaccatactactctccttctcctaaggtagtctacaagtctcccccaccaccgtatgtttacagttctccaccacctccatactattctccttctcctaaggtagtctacaagtctcccccaccaccgtatgtctacagttctccaccaccaccatactactctccttctcctaaggtagtctacaagtctcccccaccaccatacgtttacagttctccaccaccaccatattattctccttctcctaaggtagtctacaagtctcctccaccaccgtatgtctacagttctccaccaccaccatactactctccttctcctaaggtagtctacaagtctcccccaccaccgtacgtctacagctcaccaccaccaccatactactctccttctcctaaagtagtttacaagtctcccccaccaccgtacgtctacagctcaccaccaccaccatactactcaccttcccctaaggtagactacaaatctccccaccaccgtacgtctacagctcaccaccaccaccatactactcaccttcccctaaagtagactacaaa

SEQ ID NO: 6046 - DNA, 514 bp, Arabidopsis thaliana
tgatatgtttgaaagtctcacgatcggttcgtccttcgagcccgtgtcgtttaagatactccacatcagcattacgtgaaaggatctcttcaagaactcgtctctgaacatcatctgcgttcgtggtcacgtcttcgatgaattggagtttgttcttgttcttctcagcgaggctctcatcagaaacctccaaagctgcgatctttggtgcctcaggcatcgtttaggttttgtgtttaaaattcgaaatgagagaaattaagaaagaaagcttaaagaagagtgaaaatggtgaaagaagcttgatctggttttgttgaagctttaagggtgtgaggaaaaatggaagaggaagagttcatatatatagagggaaagaggaagagggtgaagaagatatcaaagggtataacggtcatttcacagtatgttgaaatcaggatttaagtggacggcttactattcgtgtttatttgatttactttataatgtcgtttatcttaatttagttcgt

SEQ ID NO: 6047 - DNA, 1552 bp, Arabidopsis thaliana
attggcatatttttgtagttgcttcgacaagctaccttttgttgccattatctgttgcgtgtttcatgttgggtatttgggttggggtaaactaatgtcagttgcagggaatcccgagctcactgagtaatcttagattactcatgattcaacttgtcttgtaggaaacccgtagtgggtaatagaaggcgtggtggacaataggaaacccggagtagttttgtgccttttgtaaaacaagtgtgtttctattatgtaccatgcttttggcagtaggccctggccataaaacttataaatgtttggtaacatgttgtgtaatatttatacttatgaaataaatcgggttttttgtacaaattaacgagtaatgactgataatgacttagtccgagtcggcacaacacttaaatatcgaaagggttggcaaacttaaacgatgttttaagtgtgagagttgtcgtcaatacgccggccaagggttgagattggttcccgaacctcggttggatgttgatgatcaatctcaatgtggcattttcggggcgcccgagacttgtatggtcatagagcgtctcaagggcgttacaggcagccccgcggcgatcctcaaaaggcccaagagaggtcaaggaaaccgcgaggcagatgatgacgagccagaagctgctcgggggagaatcttcacgattttgggcgattcggctttttgtcaggacacaacagcctcaatcaaagcttatcagaggaagaccgacccaatccataacttgacccgaccgttcaacggacaagatgatgaagacactttccaagagagcgatactaacggcttggatcggccgctcaatgatcccttggtcataacactgactatcggtgatttcaacgtcgagcgaattttaatcgatatagggagtacgctggacatcattttctgaccaccccgcgagaaatgaagatcgatatgaccctaatcgtaccgactccacgacctgtgcttggttactctggtgagaccactatgaccctcggcaccatcaaattaccagtccgagccaaaaaggtaacaaaaattgtcaatttctctattacggattagccaaccgtttacaatgcaattatcagcatgccatggttaaatcaattccaagccgtcacctcgacttaccatctccggatggaatttcccacaagcaactacgtgaagaccatctgggggaatcagaaaaatgcctgaatttgcctcatggcagcgcacaaactcagaaaccccatcaccgaatcaacagccgaggggaatcacgaaaaggctaagctgggtcgagctgaagaaaaagcaatctccgagcagttatagcaattaaagatcaaggaggctcggaaatcaacaaagcctgaggtgtgtttgtctcgatgatcgaggaggcctagtaaacaacatagcaattaaagatcgaggaggcccagtaatctctatttgtctcgaagacgaaaaccccgagcagtgcgtggaaattggtggagacttaggcgaagaactaacagctga

SEQ ID NO: 6048 - DNA, 1159 bp, Arabidopsis thaliana columbia
tagggagatgcaacaggtaaggaaaaagaagctaaggacgattttggttcaggaatcagcgaggagtgtcgatcgacacactcttggtgtcgatcgacaccagttttggcccagcaaaaaccctagacgctttcgagtttacagaagctcaagtttgccccagaagacttccctatttgcattattagtccctggacgtttttagggtctatatatattgtttttagacctaagtttcttttatcaagtcttttattaagcttttgcaaaaccctattgtgagagacataagctattcatccattgttcttgagagattcattccagtttttaatacagtgaagagatcccttctttccccttctctatttactgtgtttatgctttcacacttaatcatgttgtttgcttcatccaatatgtttgagtagtctgcttgttaggaatagggtttctcattagggagtcatatggtttagtagattgccgtagaattcttcatctttaattatgcctaatgctagatctagagtaattaactagatcttgaatccagacaatagatatgcccgccataggtatctgtaattggatctattatttgatgagtctagtttataggtgtgtaataagaatcgacgtatctattaagatgaacaattgaactcgttaagaatgcatatttaggttgatagtttctcggcttttccggttattattagctataaatataaggagtttcgcggcacgcctaccggttattccataattagagtttgagtttaagaatggttcgataacaacctagctttcattagatctactaaccaatagtttcctgagattaccatgttcctagctctttattaaatcgtttacaacacaatcaatctactgtctttttactttgttctctttcattcttactactaccctgctagcttaatctcgatatttaactcattgtttgaacaagagaactccgtgaattcgatcataaaatactgcaattgatctcttatttgagagagtagttctaggtaatttgaacaatatcaatcgtcttctagatttactcgatcacgacattatctaccttctgcccactaggaaatctcgggattaccctttctttgctggcttcgttaattactattgg

SEQ ID NO: 6049 - DNA, 586 bp, Arabidopsis thaliana
tagtaacgcgccgccagtgtgctctaaagcgggcgcagtctcaaacataacatgctacacctcactagccgtctgggacattcctgatgggtggaaatggacatgttacatcatgtctggtgctgggtacggacttagcggtctgtgcatggcatgggcgcacgagatctgcagcggtgacaacgaagagcgcgctctagttgtgggctctatgaacgagatggcgtatgtgtttcaagcatggctgcctcaggtcgtttggcagcagattgatgctccccaatatagaaaggggttcattacggggacggtgatgagtgtcctcctgataattttcacgctctcaatacgcagcttgcagacgagggagaatcgaaagacgaggaggtatgttgcatacccttgctaaatgaaacgatgagatgggactaggctaattatgtgatataggggtggcgcagtcgagtctgaggggagcgttgggagtcagacggaagagagcgtcaatgtggttgttgataccaggggaagtgatgcccagcaatagcagttagggcttgaaaataggaatgctgatcccattatg

SEQ ID NO: 6050 - DNA, 1119 bp, Arabidopsis thaliana columbia
tcaatatcatgtatgaacaaggagtcaatatctatgaatactaaccgtttaaagaggtaaaaggaagagtagtgagattagctcaagccttagtggttgtgttggaaaccacaatatcctcaagtttgttggtttcctatctggattttccaatagtcggattgaatcgaacctacaacattaatcaaccagacaataatctaaagaatagagatcataattcctaacaaaattttgactcaataaaacgactcaaaataaataaaataagaataagactgaaaaagaaaaacgtagttagtaactgcttcccccagacttaaacgtcacggtccccagtagcattcaaatctagagtaagcgagaaaaataaaagaaaaaacgtaaaataaaaaaaataagaagaaaaccataacagtgagttgcctcacactaagcgcttatttagagtcaatagcttgactttcttggagtttgcggatcaggtggatcagatggaggaaataaatacttcctagtagaacctcgaatcatccaacgtggcgtataagcagtcagtgtttgcggtctaccaaggaagtgagcaatgtcagaagggcaaaacaaaggtatgggttgtcgactccttttaccttcacaatcatcaaaagaaaaaacaagccctcgacgagaaactcgtggcttggtgaaccgtaaaacagtttctagatatttcaaagtcttattgatgatatctggaggtttaggaggaggagatgagtaccattgccgtttcagaggtggatcaaggagtaatggtgttgtgggtgacgtgactatagtgcttggagtttcagcagggaactcaacccgaaaaccagctctaacaacgaaatctggctcggcctgtatggggtatctatcgacacatgtggtggtgtcgatcaacaccattactgcagatcgattctcagcaattagatcgtgacttgctttctatagttgcgagcttgtaccatgaaccagatctatctcaacgcagtgtctatgaaatgctctgatacagagaggtgcatgaccatctatggtgggtgcttcttcagcctgtccatgtcaagagtcataaccatatcacactca

SEQ ID NO: 6051 - DNA, 1550 bp, Arabidopsis thaliana
gctgaacatgttgagtcatacaccttattggatttagggttatagtaacaatctatgtaaaatctgcaccgtattaatatgaactcgttgctcgagttataaaagcccaaccaaacaaagattacacatcacaccagaactgactttaaaatgagttgaccaccctaagtacaatgaagattatgatccatcaaattcaacattttcagttgcctaaaagaggtagatccttagtggaaaggcaatacaaattgctactcatatgtaatatgcaagaaatgagtaagttcttttaagggtttgattattttattttctttcttttttatttctttgaaatggaatgatgataatgcaactttcaaaatatataagacttcttttaggtcacaaaatttgatgttagtatttaggtcacaaaatcggcaccatccacgcaatttgtgtcaagtcgattatgaaatgaatcaaaaccgtgcctaaccagaatgtcctgaatcgaaatccaaaatgcaaataccttacttagacaacaaaacattgatgtatcaatatatctaaaacaacaatagctattgaaagggggggggggggtggtggtggtggtatttatgtaaggtacgagccctctccatgtcagatccaaaatagcgccaaactcaaaaaaacaatcccgaaactatagatatcagtcttttcattaaagttatccaatttaacttcaatttcgggtgctttatagacggttatttctggttcactatagctaccaactttttgggcatcttccaccattttttttttttttttttttagttcataaatttccattcaactttaaaacatacaatggcaaaagcccaaataaaggccacatgcccaacacaggagaaaacaaaccttttcctgcaacaaacaaaaggggagacgaaacctgcaacactagaaaaccaaaacaaacagccctgaactagaacaacgaaaaccaagttcctagcaaggacaaagcgttaggttgatgagccgtgctgcgagacaaaggatccagacgagcgcgaatgatgagctggatgtccttcaagatagactcagtagaacgagagacgccggagtggagacgttggtttctttctctccaaattgcataaacacaagagtgaaaggccagcctgataatgagacaaatatttttttcccttgagggagataagagccagttaagacagtccattaattgggcaggaggattaaggttggttgaggctgtaaaaaacctccacacgacaccactaaactggcactcaaagaagagatgtgctctcgaatcgtcatgagcattgcaaagaagacactcagcagggatcgagagaccccaattctgaagcctatcccttgtgtgcaatctattccacgccacaacccaacaaatgaaggcgtgcttaggaacatggttcttaaaccagaccgccttatgccaggggacggtgtgagattgcggatgcagagcagaccaagttcttggagcggagaatctgtttgatggtgcatga

SEQ ID NO: 6052 - DNA, 581 bp, Arabidopsis thaliana columbia
  unsure (1)..(581): unsure at all n locations
nnnnnnnnnnnnnnnnnnnnctaaagaccaccaataatattacccagatttttgttcaaagctccgtgacggtattgatcggcatgggcgagtttttcgctatcctggtcgctggtatcgacctctcggttggcgcgattctggcgctttccggtatggtgaccgccaaactgatgttggcaggtgttgacccgtttctcgcagcgatgattggcggtgtactggttggcggcgcactgggggcgatcaacggctgcctggtcaactggacggggctacacccgttcatcatcacccttggcaccaacgcgattttccgtgggatcacgctggtgatctccgatgccaactcggtatacggcttctcatttgacttcgtgaacttctttgccgccagcgtaattgggatacctgtccccgttatcttctcactaattgtcgcgctcatcctttggtttctgacaacgcgtatgcgcntcgggcgcaacatctacgcactgggcggcaacaaaaattcggcgttctattccgggattgacgtgaaatccacatcctggtggtgtttatcactcaggtgtttg

SEQ ID NO: 6053 - DNA, 580 bp, Arabidopsis thaliana columbia
aattacaatattttatatgccaggttaatgaattacgtaaaagataacatagaaatgaatattatcttgatgattaaactaaggctaggtagcaaactagctcagactttatacaaagttaataacaataatgattgtatatatgctaaaaataatatttgtatatatgatttatgtgtaaaacgaaaatgatacctttcatcaagtctatcaggaaagggtttagtatcagcaggactccattttaggcaagtaataagcagacataccaagaagaaacaagattcacaaaagaaagccacgagccaaacgttgtcgtattcgctcgtatgtcggattcggtgcaatagaagagagaagaaaaggcctagaaccgtgagatatacagctcttagaaaatagttcgtgtatgagatcctttcacaaagaggaggaagagataagcttgaatccgccatgggaggagctttcttgcagtttttggatatgttttcgaacttcacatcgatgaatgcttcatgcttgtatataaatacgcatgtgggaaactcctaattaatgtgctaagagttaatgatga

SEQ ID NO: 6054 - DNA, 444 bp, Arabidopsis thaliana columbia
ttaacatattgcttgagagctacggcaaaattttgttttctcttggaaattgttttatacctcaaaaccgactgatttttcctcaacatccaaaccaaggtattggagagctcttgttgcactatcaacaacagtaactgaacaaccaaaacagagctttttactcagataacttgcccgaattcagagactgatttttcaaaatatgagtaataattacctttgcaagaagatactctgagcaaacgctcgatgaatttacgatcaacgtgactgtcgtcgacggcaagaacatgaagaggatccggtgatccaaactttgaagaatggttgagaatctccatcttcctcggtagcataacttcagccattgatcaacgaatgttggaggatttggaagaaaaaggaagagaaagatatgatgtgaaccatggtggcagtggt

SEQ ID NO: 6055 - DNA, 549 bp, Arabidopsis thaliana columbia
ctcaaacagagtccatccctgagattgcaaaaccacaacaaacaagttcaaatactcatacaaatcaaatcaaacatagtactcaaataatattgtaaacagtgaagacgaataactcaaaaatatctaagtcacaatctttgtgatggaaaacaaaggagcatcagggaaagtcactcaagcaacatcaaagccacaatctttgtgatggaaacaagagagcaatagcactaatcactccaaaaaacatcaaagtcataatctttgtgatggaaacaagtgagcaatagcactaatcactcaagcaacatcaaagtcacaatctttatgattgaaacaataatgcaatagcactaattactgaagcaacatcaaattcaatacttacatgccaataatcatgatcgatggtaagcaatttggtaatagcgtaagaaccagcagctaaaacaatcgtagcgttaatggttcgatcgatcatcttctccatttcttcgttctctcttctcttttcatctcctaaatcagctcccgaagaagaagaagaag

SEQ ID NO: 6056 - DNA, 595 bp, Arabidopsis thaliana columbia
tggtaaaaactacagactaacctttgcgacagcaatctaccgagctgtatgggcaactcagatctgtagtcaggatcagttgctacttctagagcatcttctgtcatgccacgtgactccaaaaagtgtgccacgctgacaaaacgaacaggattttgaagtcgagaatcagaaaagtaggaatgcgtgaatttaggaaaacaatttaaaccattatgtgaccttggatacatgtttactaacaccataatccagctgtaaccataatgcgagggaaagcacattctcatacctattatggtgctccttaggaattgaaggtaagacttcattagcctgttccaaatctccacgcatcacaagagtcttgtactcaatcaaacttaaaagtaaagtgtatccaataacactgtaatcataaagtggacacagaagtcagtaagttacaaaacattgttagcaatcataacagtaaaacatctgcttacttgaactctttggcaatcaaataaaccctgctttgattagcgagataacccacaagtacatagggcggtccagatggatcattgtagttacgggtaatataagagga

SEQ ID NO: 6057 - DNA, 547 bp, Arabidopsis thaliana columbia
tactgaacaacactagctttgatatttctttcttccatctttctaaacaaatccaaagccaaagcagagttccctgacttacacagtctattcaaaaccggtccataagtaacctcatcaggttgaaaaccatactcaaccatcctatcaatcagaaccagagcttcagacactctaccctttagacaaagtccattgatcagagtgctaacggttacaagatccggtctttgcttcatttccaccatccgatcaactaacgcaaccgcttcagaaactctaccctcgaggcaaaacccgttaaccaaagtcgaaaacgtgattgtatcaggctcatacccaagcttccaagctctcccaagaacagaaaatgcgaaaagaagtttcttttttctacaatagcaattgatcataatggtcatagtatacatgtcatgctcaatcccattcaactccaattcccttgcagaaacctaacactaaatcatactgtttcgttctagcaacagcactacacaatctattgaaatcgattggagtaggtaag

SEQ ID NO: 6058 - DNA, 603 bp, Arabidopsis thaliana columbia
ccgacaagagtttgttgctgaaagcgttcacagacgctagttacgttgatgacaagagtgaatcgtacgaactcctagaacttttaggagattcgatcctaaatatgggtataatctatgattttattaagctctaccctaaagaagcacctggtccgttgaccaagctccgagccgtcaacgtagataccgagaaattggcacgggtcgctgtaaatcaccaactctatagctatctccgtcataagaaacccttgcttgaggagcaagtaagttacattcttaaaaaccctactcaattatcatctttgaaatccctagtatttaaccgtgtcaaatcttataaatttttatttattaattacttcgatcgatgtcttattgcaatttggttcattattaaaatccatggaaaataaactttgtcaacctttttttcccattctctatatcactttcatccacaatttgtctcaatgaatgtgttagtttattccatacccatgggcctaattagaaatttccaacaataatctttaataaaaacgtttgtattggttgtgtgaatatgtgaacaatatattatatgagatctagatttgt

SEQ ID NO: 6059 - DNA, 1127 bp, Arabidopsis thaliana columbia
ggattcattttacattttaaacattcatgactcagcaaagtaatttgctaattaaagtataaaataaaccaatattcgcattttgaacgagtcaaagttcttgcttccgcactaatccagcattagcaaattttcattataatatagatttttttgtatcattaacgatattggttttaattgtactaaaagtaaacgagataaggtttaatttgtccacttgtactaaactaatcattcagatagtactaattatatatttttaaatatattaatttccatttaaaaacataaagtaaatcatacacgaatatttttgtaatcttttgacttattaacagaaaaaaatcagcatcttaattttgcataccaaatattatccatccaattgaattgatataactaatcaagatttttttccctttttccacatatttctaaaacatcttaaaacatttaaagaaacaaaatcaaaatataaatggataaggttgagatatggtgtgatagtgaccaccgaactttcggtacaacgacatacatcggattaaacggagacagtaacccgaaacgtccggcaaaagtccaaacttaaaccaatgaaaactctccacgtcagcaagaccgtgtctataccgtcaaagtcgccgttagcgtgcctaggactattctatatttaggaacatgtgtttccagactcataaatacgtataaatattcgtattcaatacgtaatcgtatttttatacgatattgtcgttataaatgtaaatgagaatttattccatttttctcgttcagtgttgttttgcatttcaccttcttttgtatatctctcttcctatatcattaacctgcgctggttaaagctcttcacctacgcacatcgccggcgatttatgatcatctgagtctttcgggtatattcacaggctagagaaagagatcttaatcggaaaagtttatatggaggttatggttggttcgtcgtttggaatcggcatggcggcgtacgttagagatcatcgcggtgtttcggcgcaggataaggctgttcaaacggctctgttcttggctgatgaatcaggcagtggtggacacagatcgggattggattaggatgagta

SEQ ID NO: 6060 - DNA, 678 bp, Arabidopsis thaliana columbia
  unsure (1)..(678): unsure at all n locations
cgttgaagaggtagccacatcacatacccacatgacaatgctatgttgtgagctgtcgagggcttgtctaccggtaatgagctcgagaagcaggacaccataagcatatacgtctgttttctcgtctactatcccatgcatgaaaaactctggcggaaggtaactgatcgatgaacacataagagattatgtaagatagatatatataaaacacatgatatttgtgaatcagtgtgtatgatctttaacaaagagagagattccaaacccgaatgttccttcaacttttgatacagtatggtgagtccattggtctggtagccatttcgctagcccgaaatccgatatctatagtcaacatttgttcgaaaaaaatcaataaattacttcaaaataaatcttttttcataataataacttcaaaagacaataaactagggtatgaagatcttaggtttttcttagtaataattacctgagcctcaaagttctgagtgagaagaatgttagaagctttaatgtctttatgaatgattcttctctgacaaccttcatggagatagtagagtcctctgctgtcccatcgcactttgtactcatggccaattcagttctcttcgcgctacaaaatggtcaaggatanttgttggttttgatcaaacatagttgagatgcatg

SEQ ID NO: 6061 - DNA, 1026 bp, Arabidopsis thaliana
aagggacatgaacgtgaaaacagatttatctccgatatcatccttcaaaaaccaaacaagattatagatgattagtattatgacattttggtactttcataaatagcaaagacctctatgaaagcttgtacatggcttatcttcagagaggaacaatgtaccttaataggctgagtaaactttcttccagcaaatactagaaagagagccatccatgttcctagcaacaccagttttacctcatcattcatcagaccactctgcaaattcaatttaccaatttaagtcaggccaatttaacaaataccaagatcccccaagttaaggaaatttgaagctttctctttagagaaacgacgcagcagatttgatctcaggagtctaggcagctaaagcaggatatcttaatcaaacaaggtactttaccaaatgcccaagaagaactgaaggtatgatgaatgtaagaaggccagcttctagctttccataacaaagacctgcagacagaaattacatatcaagaacattggcacggttaaagatatgaagccttatgcagaagcaagatatttaccttctttgaaaacgagtcctgtgagagatgcgaataggggaccaacaaaccaaacagcggatggatgatcaacgacataatgaaccaagttatcaccagctggtctagcaagggctgcgtaagtagcgaaagaaccaacaaaaccaagtgcccataaagcttgaagagtcctcttaatctccgtaacatatatatgtattagaaacagagatagccccaaaccactagcaccaacaaagtaaaacagatcatggttttgcttgattgtttcacttaaccaagagtctcctggtaaaaaggcagcagaagaagcagctacaaaagatgcagcagcagttactagtcctgatctgtacaaaataacctgaagagaaaaaggtactcatcaacaacttgagctacctctaaactacatgactatgagaatatgaacaaattggcctaaaactatc

SEQ ID NO: 6062 - DNA, 622 bp, Arabidopsis thaliana
attttgctaaatcggcgcttaaacaagcgattgggttgcttccggagaatgctttggttggatttgtgtcgtttggtactcaggctcatgtacatgaattgggattctctgagatgtctaaagtttttgtttttaaaggagataaagagatttcgaaagatcagattttggatcagttggggcttggtggttcttctaggagaggaggttctaaaggacctcaaaatggcttcccgagttctggtttgaatagattcttgttgcctgcttccgagtgcgaattcacactcaactcggtgagtgactttgcttttgattgtcaagtcggaaaattttcatctgattcttctatctttgtgtgaatgatgtttggtatgtagcttttggatgagctacaaagtgatcagtggcctgttaagccaggtcatcggtcccaacgatgtacaggcgtggcattgagtgtagctgcaggattgcttggagcttgcttgcctggaactggggctagaattgtagctttgatcggaggtccatgtacggaaggccctggaacggtaagtatatgttgatgattgttggcattgtgagctttgatcacaccatgtgtatgaagcatatttgt

SEQ ID NO: 6063 - DNA, 575 bp, Arabidopsis thaliana columbia
ctttccttctacctcaagacaaaaaagacgtaagtataaggactcatggacgaacatttatttttatcatgatgtacggtgattggttgattaattggcaaataaatgtttttaaaacttactttttggtcttttgaattttattgaagagtgggtttttataggcggttttaagccaatagatagatggatatataactttttatgaagtatgttgtggtttaatctctcaaactgagagatgatttccttgttttattttagttagctttatcagccaagttgagattctcagccaaagactacagtgaccatatggcactcgttcgtgcctttgaagggtggaaagatgctgaaagagaaggatcggcttatgagttttgttggaggaatttcctgtcagctcagacgcttcaggcgatacattctctgaggaagcagttcaactatattttgaaagaagctggcttagttcatgatgatttagctctcaacaacaagctaagtcacaaccagtctctggttcgtgctgtcatttgctctggcctattccctggaatagcatctgttgtggt

SEQ ID NO: 6064 - DNA, 522 bp, Arabidopsis thaliana columbia
  unsure (1)..(522): unsure at all n locations
agtgtgctctaaagtcacgccgcagcgtaaaactcgatggcttgcgtgtcattcccgacttgcccgctggcgatggcggaacagagcgtttcctgccgtcttttatcgacaacatcgataatttaatggcgaaacatggtgtcagcgatgagcatatcgtgatgcgtgtaacaggctgcccgaacggttgtggtcgcgcgatgctggcggaagtgggcctggtgggtaaagcgccgggtcgctacaacctgcatcttggcggcaaccgcattgggacacgtatcccacggatgtataaagaaaacatcaccgagccggaaatcctggcgtcgcttgatgaactgatagggcgctgggcgaaagagcgcgaacggntgaaggcttcggcgactttacggtgcgtgcgggcatcattcgcccggtgctcgatccggcgcgtgatttgtgggattaacatcagcccggtcttgtaggcctgataagaacgcgtgagcnngcatcaggcaaggcaaacagtgagga

SEQ ID NO: 6065 - DNA, 696 bp, Arabidopsis thaliana
ctcgatacgtgcatgattgaggaagaattgggatatgccaaatcggctcttaagcaggcgatcgggttgcttccggagaatgctttggttgggtttgtgtcgtttggtactcaggctcatgtgcatgaattggggttctctgagatgtctaaagtttttgtctttaaaggcaataaagaagttaccaaggatcaaattttggatcagttggggcttgggtcttcttcgaggagagctcctacttctgggttttctaaaggagcgcaaaacggattccagagttccggtgttgacagattcctgctgcccgcttcggagtgtgaatacacactggacttggtgggtaatggttttggtttggatagatttacgtctatgtttgttttaatttaactcgtgtttgttgtcaattttcaatcggattcttctgcttctaaatgattcgttatttgtaacatggatttgaacactggtgtggctgatttttggtatgcagcttttggatgagctccaatcagaccagtggcctgttcagccaggtcatcgtccccaacgatgcacaggggttgcattgagtgtagctgcaggattgcttggagcttgcttacctggaactggtgctagaattgtagctttggttggaggtcatgtacagagggcctggaacggttagtggttattgattcctcggttgat

SEQ ID NO: 6066 - DNA, 469 bp, Arabidopsis thaliana
gcatccttctcaattctaaatgaacccacaacttcatgccagtcaccatcatcaacctcaacttttcctccattaacccaattaccatcaacactgagtgctatatttacgtcctgtggactggtacgtcctcctgagccaattttaatccaagcggagacctggtatgttacaaacagcttcactttatcagttatcgtctgagcaggacccatccatgttccacttcgatttgtcgcaagcacatatcttccagatagatatccttgtgtttttctaagtgagtctctcgccaggggaggtaatatcctaggagagccgtctccaacttttaaatggcagtctccaagagggaaccaaccttcgattgttccatcacttaggtggctattcgaaacaatgttcatccaaaagcatgactctgtagaaaaatggaaacaacatataatacattacacacaaagagaag

SEQ ID NO: 6067 - DNA, 601 bp, Arabidopsis thaliana
atagaaatggctgaaaatcagtcaatattaagaggccaaagaagagggaagttgttagaaactttcatcgcccactcccgtagaggactgagtgagtaataaacatagagttgttggaggaggaagacgaaaatgatagtgaagggatcacgagtggtgctggggaaagcgccattggagacagaactccaatccctggagaattgggccaaaactcgggtaaagctaggtttccatttaagtattgcaccacttgttccatggccggtcttgaatctggagcaaggtttgcacatagcaaacccgagtttcagaaccttctcgacttcctgggatgagaattctgtcaaccttggatctctagcatcaatcaaagaagaccttttccagcattcactaacccatttgatcagaaaacgttttgcttcaggtaagccgggttccacaggtctcctcccacaagttacttcaagcaagaaaacaccaaacgcgtacacatcagttccagtagaagccccattgttgtaactcaggtccatgtaccaacagtcccactgcagctgttgtcttggatcaccctctgcatatacctggcatccaa

SEQ ID NO: 6068 - DNA, 600 bp, Arabidopsis thaliana columbia
tttacgtactttggtcgaaaaaacgctctcatgtgccccaacctccacaaccaccattttttttggttttcaaaacatttgttgggcctttatgtttgcttgccgatatatcaatcgaacccataattgttgggttttcagaattttattaactttgaaaaccaaaaaaccatttctttcaagtacaccggatttaaaattgggctttggtagtttattaggcccattaaatattgtttattatatatatatccacaaatcttcccagaaagcaaactgtagaagacacattgaatgtataatattttttgtctgaaacatcttcaagctcatggtacttcttctttctatctaagcgccgccaaccgcttctccagttcatcgattccagaactgcacagaaacatagaggtttggtttcgatacagatatgttctagttgtgtttagtggataccatacctgccaacatcctctgctttcttccaccaatttcccttttggagcagatgatactgcagatggataaatcagagacaagcgaatatgaacacggagaatacgtgattatacggaaacaatgacaagaatcgatggttat

SEQ ID NO: 6069 - DNA, 481 bp, Arabidopsis thaliana
tgtctttgtcctttgatttgatatttctggataaatttgctttcttttttgttgaaacagatcaccaaataagaaaactcttgtggttctattgaattgggtttccactatctttattgtagaggtaactttattttgtgtttgttggtattgagttctgtacatccatcaggattttcgttgttgtctgagctttcttctattttttttcttatgcagatggagtcttcaagtccccaccatagtcacattgttgaggttaatgttggaaaatctgatgaagagagaataattgtggcgactaaagtctgtggagaagcaccatgtgggttttcagattctcagaatgcttccggggatgctcacgaacgctctgcttctatgcggaacgtttgtatcgccgtcgtgctgtgtctagtgttcatgagtgttgaagttgttggtgggattaaagccaatagtttagctatattaaccgatg

SEQ ID NO: 6070 - DNA, 535 bp, Arabidopsis thaliana
caaaaagaattgttgagaattatatcataagttttgtcctaagcgtcttatctacaaagacccaaacattaaattattagactcaactcatatctgtgacttgtgtcatatgtggctactaactgtcaagttatcacaaacctttctccaccatggcatcaaaaccatccggttcaaagccaatttcataaaatgcctaggttcaccagacggttcctgcctcctcttagatcatcatcctgaaaggcgctttttgcccgagtctcagacgcgcaaaaccgagtattctggcattgcaagatcagcaaacagctcgatcatgggattcaaattgaattgacaagcaaacctcttcttcctgttttgcttttttactctcctcttcttcctcaagttcccgtggtgcagtttcttcattggtgcgctctaagagatcctcataagctctcatcgattcagcagtgaatctctccatagcttcaaaaatccgttgcaaactaccttgtaaactatcgctgctagtatcgctttggta

SEQ ID NO: 6071 - DNA, 1082 bp, Arabidopsis thaliana
gtaactggagatgatggtatagtcgtcctagaaggggtttctgcaagtgggttaaatattgaatctgacgacggtctagtgacaacaggtgaagcctacgaagtgtataaagggttttctacattgcataatgctgagaatgagttgctcgatactgatgcggatcctgtattcgatgatttagccaatgttcgagtcgatgtgacagaagttgaattgagtacgtcaggtcatccgttgtatgtgggaagtgtttttaaaaacaagcaagtcatacagcagaccatgcgacttgttgcaatcaaaaagtgcttccgctacaaacaaactcggtcatgccctaaaagattagagatgttctgcgtagatcgcaattgttcgtggcatttgactgcacatgtcatacccaattccaaatgtttcaaaatcacagggtatgatccatccatgtttgcaagatcgacactcgaaaggattatcgtaaacatgcaacttacaagcttttaggcgaggttatgaagaatagatatagttcttcgcaagggggtcctagagctgtagatttgcctcgattggtcttaaatgaccttaacgttcggatctcatattcttcagcatggagagctagagaggttgcagtaaactctataaggggtgatgatatggctagttacaggtttttacctacatatctgtatcttttacaattagcaaatcccggtacaatctgtcatctccactccactcctgaagataaaggtcgccagcgcttcaaatatgtattcgtttctctctcggcgtctataaaaggttggaaatatatgaggaaagtcgttgttgtagacggaacgcagctagtcggtcgttacaaaggatgcctccttatagcatgtgcacaagatgggaacttccaaatttttccattagcttttggggttgttgacggcgagaccgatgcttcatggatttggttctttgagaaattatcagagattgttccagatactgacgatttgatgattgtctcggacaagcattcttccatatataaaggcgttagtgtggtgtactacgaaagccaa

SEQ ID NO: 6072 - DNA, 1134 bp, Arabidopsis thaliana
gtgatattttctacatgtatgtgttctgtaggccttggtcttaccacaatggtgggtcatggccaacacttctctggcaagtaagtatgagcttttaatcagacgacacatatatctgtcttccattaattcacatatgtatttaaatttttgttagttcacactagcatgcatcaagatgggtagaccagagttagcagagaaagcagtaaccttggcagagaagaggctccaagctgatcgatggccagagtactacgatacaagagacgggaagttcattggaaaacagtccaggctttaccagacatggacaattgctggtttcttaacttcaaaacagctattgcagaatcctgaaatagcatcatccttgttctgggaagaagatcttgagcttctagagtcttgcgtctgcgttctcaccaaatcaggccggaagaaatgttcacgagccgcagcaaagtctcagattcttatataaattggttttgtccagaaaacagacataggataacaacttcctgttgcaacaaatgtgttatacaggttaaccaaattaatagtgcaacaacatctgtatatatatactatatagtagttcttttctacaaattatgtcatatctctgacttacttccctaaccagatgaaacataactaaaaatcaaatttattattattactaacttgaaaaccaagcaagagtgagtacttagtgctgcacttaatctccctaatgggcatggctaatgataatccaacgagaaataagtttagcaggattcttaaaccatgtcatcagtttcaacagaaatctgcaattaaaacttaaataaactcctcttagagctttgttttcagcgagttggagaaagcttactctcatgagtatttcctcgaacactttgcaagcagattctgccaccattttttttcttaccaaacaactaaaaaggtatttgaaaccataatatactcgtcttcgagatcttcttgtatgcatgaaccgcttcctccgcttcagcaggaaactgaatagcattccacaaaactgaatcccatacaggaattttgacaaacactttgcgagcgtataaaaagttcttattttctcaaaatagtgggttaatg

SEQ ID NO: 6073 - DNA, 1478 bp, Arabidopsis thaliana
cattctgtcaccaatcgttggtatgtagttccagcattattcaaaccaaagggcattactttatagtagtaggtgcctcggtcagtaataaaagctgttttttcttggccgtctcgacgcataagtatttggttgtacccgtagaatgcgtccatgaaggacaatttttcgtgttctacagtggcttcgaccagtcggtcgatatgcggaagtgggaactatctttaggacatgctttattcaggtccctaaagtcgatgcatactctccacttcccatttttctatttaacgacgactgggttggcgagcgagttagggtattttacttcccttattgatccgattttgagcaatcggtcgacctcttcgttcacagctttaggcctttcgggacctagcttgcgacgtttctactttataggccgataggtcggatcgacgttgtgttcgtgtgaggttacctcgaggcttattccttggaggtttgcgcttgaccaggcgaagctatctttgttttccttgagaaaggttatgagatcttctcgtaccgttagatcgaggtcgtgacctattccaacgcatcgtttaggatctgattcgtctatgcagacctgcgttatcagcgattttcgagttccacgttgagacgggtccaatgatctgactgttttcatttccgcgagttcgtcctctatcattagtaccacgggatcagcttttttgatatcctcgtagctacccatgtagcattttcgggagctgcgttggctgccgtacacgactgctatccccttgtaagaagggaatttaatgcattggtggtaggtcgatgggacggctttcatgacgtgtagccatggtcttcccaatatcgcgttgaaaggagctttcttatcgaccacgagaaagtttgtgagttgtctcactcctcgtgcgatggtggggagttggattgttcctatggaaaaggtcgtatctccagcgaacccggtaagtggagttttcctgccttgcaacttggagtcgaggtgccccgttcttttgaaggcgtcgtaaaagagtacgtcaactgagcttcccgtatcgaccattatacaggagagttcgtagttgcctacatcgattcggataacgagagcgtcatcgtgaggtttatcgaggtcagtgatttcactttcccaaaatgtgatcccatcatcgggcttttgccttttgtgcaggaatctgctttcttttgatgagttttgatcgagttgatcggtcgttgcagagctgagatcttcccatgatgaaatcgatgcgtttcggggagaggtgcttggttacgtttctgcagaaatttgggaggcgtaatgggaacctcatgtttttcttttgcgcggcgggaggaggtgtagtgactgacttttctgtcatgcttcctagattgagtccgcaaagactagatcccgtttctttccgggcaggtgggggaga

SEQ ID NO: 6074 - DNA, 553 bp, Arabidopsis thaliana
tgcttcatgaatgtgttgatgctatgatctctatagcaagagttgctcagtatggccttgaagacattcttgatgagctcattgcttccttttgtaaattcacaacgttgttaaacccttacactacacctgaagagactttgtttgcatttagtcacgatatgaaaccgcgaatggctactctcgcggttttcacgctcgctaacacatttggtgattctatcagaggagggtggaggaacattgtggattgcctcttgaaacttaggaagcttcagcttcttccacagtctgttattgagtttgagataaatgaagaaaatggcggatcagaatccgacatgaacaatgtttcgagccaggacacaaaatttaaccgacgacaaggttctagtctaatgggtcggttttccacttcttggcattagacaacgtggaagaatctgtagctcttggaatgagtgagtttgaacaaaaccttaaagtcataaaacaatgcaggatcggtcaaatattcagcaaaagctcagtgttgccggatgttgcggtgttg

SEQ ID NO: 6075 - DNA, 544 bp, Arabidopsis thaliana
tgagttggtaatatagatatatatttgctttgatatggttggactacaatttggtagttgtacttggtagatcaccaacatttcgaaggacaaatcacgattaagatatagacatgcatgagcatgactcatagaatcccaaaaaatggtgatttggatgtaacagagaaagagagacaaagaaagtttaaataattgaaaaaagaagaagaagtgaacaaacatacatgacaacaaaagagacagaagaagagcatatagatatgcattttttaagtaaacatctctcagaagaattttaaaaggctaattaattggaataataacaaaaataggattgaaatgagttttacttggtgtacaacacatcttcccatgggtgacgatacagtggctgcttcaatctcttctgatcaaacgtgtgcccgatcaaaccgatggagcgagcaagaacaaacagaccgttgagataaccgatctgaacaatctcgtcaatctcttgtttagtgaacatccacttccagctagaaggtctagaagagag

SEQ ID NO: 6076 - DNA, 1452 bp, Arabidopsis thaliana
cgactctagagcgtcaaaaatgttagtgttcatagaacttgactccttgttcatatatgataatgagactgatatacctagattttcactgcttttagctatgatttaggtatagttttaagagtcattttgttatttgtagagtcttttctactatttttcaggtctttacatgtttgggatgcatttggagattatggagcattctggagcaaaacagacaacttaagctgcggcacaagttcggagacggaaattgacgtaggtgtcgatcgacacaacccctggtgtcgagtgacaccaatacctgacgacaattcaattgcgtaacttattgatgttttgaagatttccaaattcggcccagaactttcccttatttccaaagaaggcccagatgtttttaggacttatatattgatttctctggtcattggttagacctaattcttattatctcttttaaacttgggagcaaaaccctgtggagactccctttagagaagattcttctaatctattttctcctcttaatttcatcattgatttcttattcaatcatgttatgttcttctatgatcatgcttgagtagttctcttgttgggtttagggattctcattagggatttggatgaattagtagatcaaaaaccctgttaggataaaatatttagaattcttcatctttgattattcttaatgctagttctagttagttctagagtaaatagctagaacttgattttaggttattagggatgcccaccataggtatctaatactgaaactattttagatgagcctagtatttagatgcgtgctagtgtccattacttaggtgaacttatcaaacctgattataatgcttgtttagttctagggatttacaagagagttgggatcaatactattaagcatagtgagtagcacggcacaccaccggttactttatattagtgatttgtgttctagaatggtttgataatatcccttatttactgctagatctactattatgatatttcttgagaatttccctaaacccgacgtcttaatcatctgaatcgacaatctcttttatttcttgtcttgtcttttacttttattacattctctaataagctttattcgaaactgttaatctattgtgtgatccgaaaactttgtggaattcgatccctaagtgctataccaacctctttatttgagagagtagtcattagggtaatttgactcatatcagcccttatctggttggttcaaaggtaattgtgcatacagatcattcagcactcaagtaccttatgcagaaaaaggatgctaagccaagattactacgatggattcttcttcttcaagagtttgacatcgaagtacgggataggaaagggattgagaatggagttgttgatcattgcaaggacaagttgaagatgacgtctacaatgatt

SEQ ID NO: 6077 - DNA, 1739 bp, Arabidopsis thaliana
ggcagacaaagcccaccgctggtgtgaagtcactagatcttgtaaatctgagaagttgggaagactacaaagctgcatttttgggacagtatttcacgcagtcaaggatatctattctaaggaataagatcagtagcttccaacagggagtcacagagtcattccatgaagcttgggagaggtttaaggattactacagggagtgtcctcatcatgggtttccacgggctacattgatcagcactttctatcggggagttaacaaggcctacaagatggcattagacactgctaggaatggggactaaatgaccaagactgaaattgaggctacagagctaattgagaactttgcagctagcaacaacaaccacaatgttgactatgacaggtctaatagaggtggaggaggagagtcgaaacagtttgctgagctgtcagctaaggttgagcaacttctgaggagagaccaaaaagttgtcaatttttgtgaggattccagcaaaggtatggtgcatcaagagtacagcgagatggttctgaagatctagaagcagagatgaactttgtgaatgggtatggaaactatcagaatagagggttcagccagaactacaagaaccatcccaacctttcttacaggagtactaatgttgaaaatcctcaggatcaggtgtatccaactaaggtaggctcacaaggtcagaaatttcagcccaacggatttcagaataaagggaactataaatgacaattccaatctccagcaggtaccggtcatgcgtcttcatctggagataatgagatgaaattgatgatgcagcagattcttggaggtcagaagaagaatgctgctgacatcaatctaaaggtgggtagcatgtacaatgatctcaatgtaaagttcgcaacactatcctcacatgtcaagactctggagaatcaggtctctcaggttgtttctgcctctatgcgaccagctggtgctcattctggaaaagtcgaacccaagggaaaagaacaatgttatgctattatgatctaggaagagcctagagagattgatgtcgccaaacaggtggaaactaatgctgttgtggttgagacgcttgtggaggacaagattgtagaagatgatgaacctttatctgaggagccgccaccttatgtccctaagctaccatttccaggccgtgagagacagattcagagcagaaagagtttgcacgttttgatgagatcatgaaactgttgtatgttagactccctttcttacagtttgttcttcatgttccaagctacagaagttacttgaaggatattttgtccaacaagaggagcattgaggtaggggttaaactgatttccaaaggagaagagtacgctcaactagtggagtctcagagacaacagaagaaagctcagctcactaatgtagtagaaatgttagcagggaaagagatggtcagcacttgtagtgccatccctccagctactattcccgagaaactcggtgatcgagagagttttgttttaccttgccggattggaaagtctgtgtttgagagatgtctttgtgatttgggagctgagttaatttgatgcctctttctgtgtcaaattgcgtaggcatcaccaatttcaagccgtcaaggatctctttgattctagcagatcgctctgtgcgatttccaatgggtttggcggagaatgtgcatgctaagttggaaatttctata

SEQ ID NO: 6078 - DNA, 469 bp, Arabidopsis thaliana
gtctggaaattcagaagctgaatggtagagccacgacaaacctccataaacgaaagatcagcagcagaggagaaaccgaagaagacacggtcacagagtctacgttcgctaggaaacaggattcttagagcaacgttagcagctttgatccacctatctatctcatcttctaactcctgccacggcatcttatgaacttcttcaatactcagcttctgtaaccctaaccttgacatactttcttccagaaactctctcctacaagaactataaacatgagaacacgccttaccaaatccagcgccaagcattcgcttagccatctcgtgtagatcgttaattgtcgccgaagggagagcatcaatgataagatcgtagtcagtgagtggctgtgcacctgggatctgaatatcatcaccgttgttgaagtctctgtcatcatcttcttcttcctcagaatcgaaacgat

SEQ ID NO: 6079 - DNA, 1334 bp, Arabidopsis thaliana
tgtttttcttatgcggggcggggggaggtgtggtgactgaccttcctgtcctgccacccagatcgagttctacaaagactaggtctatgcgttctctcctagcgggtgggggagagtcacctccctccggtgttcgttctcgtttcttttgtttaggagtttgctcctcttcctgttcgtcgggaggaggggtttcaactttggggtttgaaccttttttagttttacccccaactgcgattaattttttaacggcgcgacactcctcgatggaatgtcctctttttttgtggtacttgcaatatttttcgaggtcgagttctggactctcgtcctcagctgcctcttctattgcgaataaggtattctgcccttgcgtttggttttcctttttgaagggttttttaattgcaagggaagcgttgtgcgtcttagattccttgaatcttaaggccagcacggcgagctcctcttcggctttggcgaagtggagagctttgtgaagggcatcgtctaaagagaccgattgcctaacagtgagttcctcacggaacctacaggagaaccacagaccgttacgaagggctgctatggctacctcctcgtttaggttcgcaatttttgatttgattgctttgaatttttcgacgtaagatcgtagggattcgttctgatgttgagtgagaatccagaggtcggcttcagacgtcctgtgttagataagtatcaaatactgttttaagaaagcggatgtaagctggtcgaaggtatcaatggagttcccttcgaggttagcaaaccattcgagggcgtgacctacgaggttttctgcgaagaaacggcaatgacctgcttcgttttcttcgtctgtcaggtacgctcgtgttatagcgaaacggaaggatctcaggtgagcctttgggtcgctcgttccgtcgtactccgggaaacggagtctcccgacgtctcggaggcgaaatcgagcgatcctatccgtgaacggggtgcgcctggtttcttcgatcacgcgatctatgtcggaagcatcactcactgctagatgcattcgcgaatgcatttgagtcatgttcgcatttgtttgagctgcgtaattgcggaatgtttccatatctacgaagttacgcggaccgaccggtgcttggggatcagttagactgttaagaaggtcacttcctggtatccggggaatggatggcggattagcgatagaggttcattgcgttaagttcccgggaacacgggaactggacgcggttgcttggtttctcgtccacgtgtacctaggaggcgaatagcccagcggtagtaacggt

SEQ ID NO: 6080 - DNA, 622 bp, Arabidopsis thaliana
acataaacgcttctagattgtaatgttggtcttattgtaatgttaaattattatatttatacttttatggcgttactattaaataatttactagctagccgtaccgtttatgtggttttactttagttttacgacaacttttttttagtcttttaaattatgataaaattagtagagaagtgtaagaccacacttctaaattttttgctttaccataccctgccgacacataccaaagaaatactcacgacgacgatcttacctcttcaagcggcgcattcccacttctttcaccaattccgttgatcgtcacttcgacttgtcttgctcccgcacatataccctatacatatcattgttttatatttataatcttgtcacctcgataatttaaatttgttcggaatttttgttgattaatctaactcagacaaagggagagcaattacgtacggatattgtgttggcggtacgaacaccaaggtcgttatgacaatgaatggcgaagacaatatcatcagcccctggagtgttttctatgacataggccacgagttctccgaattcttgcggcatgttgatccgaccgtgtcgcaaaccccaccgtggttgcaccgctttt

SEQ ID NO: 6081 - DNA, 928 bp, Arabidopsis thaliana columbia
cttcagcatattcaactaaacctttagggcctccaccaagagtaccatcaggtaattcccgaattattatctatgaatgtaattgactttttctctggggatgaaaatttgtagcaatctcccatcacagttaaaatcataaatagatgcacagtattgttctcaaagtcaatcgccttccttatgtctaacaggtaaaccaggccgtgttgtggaatcatctgtaacttatgaaaatgacagaaacctcaaagagtcgtcctatgatgcaaggacatcatattacagaagcacagtactccctccacagaccgtatctcctaactgttacttccttccaaacaccatgaatcaagagaagcgcagtggtacagaagctgcatctcagccaaaaccgcagtttgtccccacccaatgcaactctgccaaaccagctgagctgaacccaaacccttatgtccaatcacaacacaaggtgggtattgatgctaagctgttgcatgcacaatcccaatatggtcctgctggagccgccgcggttgcagtagcagcacaccggaacattggagctgttgggtatggcatgtcttagaatttagcacattggcgctgttggctattgccagaaactcctcttgttatagtcgttatgtaatgtaagtattattcgatcaggcctgatttgaacacatttgagattgtaataaaaatggttcagttttaaccccaccaaacgtctcaacgaaatccaaatgtgctctcggaaactgctccggtaagcctggatcatccaggtgacatcttatgggaagagactaattgtggtctttcaagatcaggacgttgtttttcactatgtcaaaaagaagaaaggataacaacaaaaaaaagttgatgttagtacaaattgacctcttggctaataaaa

SEQ ID NO: 6082 - DNA, 1354 bp, Arabidopsis thaliana
gcagagtcgatcccctcattcaatcggtaggagcgaagggcaaattcattgactactcaacagacaactagtaacgagggcactgagtttctccggtgaatcaaaatgcttacaaggctatctcatcatcatcccctatacatatgcaataatcctaaatgaaacactctagactcgattctaaatgtaatgcaattacatgaacactctttttttttgtgaaatcattttctgaaatttttcaaatttttttggtttttctatcccttagatgaatgcagactcaaaaatatatacaatgcaacacacacttcctgagccctcccccaaacttaaatcacacagtccactgtgcgaataaacttggaagagagtactcaggacaaatccaatcacagaaacaaaatgaaaaaaaaaacaaatcacaacaaatgatataatacaatggtgaagtgaggcgcttacctcggtcgaagaatgaacgtagttgttcgtcaatggctgcctgtgattgctctcaggccatagacgaaccaccttgttctgtatcagctccagcaggtgggtacttgacctcatcacctctgttgcggccagcaccgctttgaggatactcgacctctctccttctgctgcggccagcaccgcggtcgagtgaatgaggcgtgatctgctgctagatcgagtgagtgtagccttccttcttctcttgtgctaccgggactcgaatgacgaatgcctagccgggacatgtgagactctctgctcgctaagctcagacctgtgcgcaggctcatcaaatctcctcgatggcatctccagaggaggctgtccctgtggaatagcagtggtggaggaggaacaactcaacttatctgtcagaagcttgatagccttgaaacacttggcgagcagcttgtcctgcttcttgcaccacctctgcaatttactgttgttcttataagcttcagtcaagctcttgctctgcctcgctggaggtacatgttcaccaaagtgatacatgctagtgtcgaactccactgctctatcttcatccatcccatccgaagcagcttcttctaaaagatcatcctcatccaatggcagagcgttctcatagtagaggcgtccaacctcaggctaaaaatcaatgttatctccctctattatctgtgtaacctcagggctagggagaaggatgctagctctcctctctgtagagtgctcaaacctgaacctgtggaagtcgtcaaccattgcaaactccaggaattcgcagtgacgtaggtgctcgatatccattgctcgcggctcgagtccagcagaaatgattgggactccacaagctatcaga

SEQ ID NO: 6083 - DNA, 1325 bp, Arabidopsis thaliana
tctatcaatgcttcttcttcttcttcttcttcttatcctcttcatcagactcatcgctgccatcacctacaaaaatatgtaaccaaacatgtaagaactattgtgaaagcatcactacacaaaagttcaccaaaactactcacttagagactcaatagttggaggtactgggtcacggcttccactgtgaataaccaaggccttgctctgagtatcccttggttgataagacggtggcacaaaatcagtagctgaaccaggacgcatatcttcataacgggctttgataagtgtgtattttgcatgttttgagcatccatttgtcatcattttagcatcatatcatcactgttttataccatttcacatcatttgtcatcactttgcatgtttaggatagttttgcatgcatgttgcgtatttgtgttgttttcaggtgatttggagccgtcgacgagctaactggaagaagcggacctgatcatgacaaaccactcgacccagaggtcgagtaggagcttcaggatctcaagagaccactcgaccctcaggtcgagtagaagacaccaccacttgatcacatcactcgacccccaggtcgagtgacattcatctccatcttctgaccaccactcgatcacatcactcgacccccaggccgagtgacttcatccccatcttctgaccaccactcgttcacatcactcgaccaccaggttgagtgacttcatcccattgctagaccactactcgacctcttcactctacctggaagtcgagatcaccatcaccaccactcgactgcatagttactacctggcaacagactgtgcagtcgagtatcgatgttatactttctatctgttactcgacctatcactcaaataccatagttattgaaaataaaacttcaagttcttcatggatggttccatgttcatgtagttacttacaaataccatagttattgtgtttatgcctatgattttcactttggtggagatagattctatagaagaggggagaatagtattcaatatttttgagatatgctataattttggagaaatcacaaatcaaaatttataattatattcagggagattttacaagattatataaagaccttacaagattttgaaaaactaatcatagaaattatacaaaactctttagtaatcatttaaaatctttgatttatctactttctatattttttaaaagtcattaaaagtctttcaaaatcacaaaccaataacaccccctaattgtcgaattttttgtcaaaagtcaaattgaagagagatgttagaaataaattagaa

SEQ ID NO: 6084 - DNA, 1346 bp, Arabidopsis thaliana
ctctagaggattatgtttgatatattttcagttttcaccatggaagcataatctcaagaatatgcctccaataaaattcgtttgtacatgaattccttaagtatggcagaatactacgtataccccacataatagtttaatctaatttaaattagtgtaaattttccaccaatcaatttattaattacttaaaacaacaaaagtagtgaaaaacaattaaaaacacatatctccctcaaaatacccatagtaggctacaactgtagatttcttgtttcacaagacacaagaaaaaaaaacctaacttagaaatcattagaaggaagtggttcatgtccattactaccgataaagatagtatcataaacaatagctgcaatggctgcaccgataaaaggaccaacccaatagacccaatgattcgtccaaatccagctaaccacggccggaccaaatgaaaccgcggggttcatcgatgcaccgtcgaaagcaccaccaaccagaatgttagctccaacgattaacccaatcgccaaaggcgcaatgattccaatatcacctttcttgggatccacggcagtagcgtaaaccgtgtaaactaacccaaacgtcatcacaatctcgaaaacgactgcgttccagggcgtcactccatatgatagcgaaaacgcagccgtttccatcccgccagtgcttaccttgagcaacaagcaagctacgactgctccgagtaattgagcgatccaataaagaatagctctcaacaacgttatgtttccaccaataaaagccccaaatgtaaccgccgggttcacatgaccacctgaaacgttagctccaacggaaaccgcaacgaacaacgcaaacgcatgagacaaagacgcggccacaagaccggcaggtgtggctggaccatctccagttagttttccataagccattccagagccttgacccgcgaaaacgaatataaccatcgagaaaaactccgcgaaagctgctctaatcgcatcgggacgactagcttcccccggcgttccaatcgcaattctgttgataggcatcgttacaaaaaaatttgctttcttgcttcctcttcattttgtttttcatcagtaaaagtttaaatagttaaagcgttagtgccaagtgtgtgtatgagaatcgttcaagagactgagattagtgttttacggtgggccctaggttataagaaatcgaacggtgattataaattcatatttaattaataacttacttaccaattaattaaatcttaatcagtttttctcgctttctataaatactattatgggtagcaattgaagaacacgcgctttactgtt

SEQ ID NO: 6085 - DNA, 831 bp, Arabidopsis thaliana
caacctggtaccctattggatcatctctttctctaaggctttcaattcccttcgatgggtgaagagagctgctgaaccgtcaatatcgatgtcagactagccgtgtagctcgagttgatgattagtacaacgaatagccatatgatcagaaccaaccgtccaagtgtactaactgtgttctctcctgtcaaaaccaagggaaagagtcatatcagtcaaaagccaaacaataaccagtggcacagtaagttttctttcgacatactatgcgcgaaaaacatggtcgagaagctaaacctgcagatatcaaacaaacaataaatggatcagccaaaagataacaagcagttgtctctaagctacttctctgaaatatatagtaaactgaccagagaattgtgacacattgtctcttaggtgggcctctgaattcatcgttagtcctatgttccaagatccaaacaacaatgccaacaaagagaaagcaacaacccgtgacagcccacataagacggttgaaaggtcgaagaaaagcccaggctcctgaattcagttttttaaaaggtgcaactacaactagtcctgatgctgcatatggttgtgtgaaatctacaatctttgtccggtttgttacaatggcaacatcacctactaccccatcaaaattctgcagtaaatccatttttacagtaagtagaaatggtaaaagtaacttctatgaaaaagaatgtaataagcactcacaccagttgttatcatctcaaccatatgcgtgtagctcggattctcctttccatttccataaggaataaacttgacaggaactgcgta

SEQ ID NO: 6086 - DNA, 530 bp, Arabidopsis thaliana columbia
aagtacttctgcgttgatagtaaacatttctttctctcttaaattaatcctgctacaggcgacccagcaacaggtaagtgatctgctttgcgtatcaaaagcgggcgagattctatactcaatcgccttatacatcaatcaaaactaccattaaccgcgtaattcgtgcgccagacgaaaacgaccttcgtaatcgaacactttttcacgcacctgccagtactggcctttcatgcgggcgacgacaaaatccgggtgtcgcaataaggcttgctgggcgaggatatcggcggcggtgatccagcgcagaagatgcccggtgtgcgcgtatgcgggcggataaaaagctgctcgaaggcggtaccgtgggcaggtgtttgcagacggaaacgctcactcacatccgcgccgtcttcatcgtaataggtgatttcaaccattcgcctttctcgtcgtgcccatgttgcaaagacatgccgctacagcgtaataccagcgcgtctttcagtcgtagcgccgcttttaacata

SEQ ID NO: 6087 - DNA, 605 bp, Arabidopsis thaliana columbia
tatctatctctgtcgtggaagtcatagtgaaataaacaaagatgttccgattgtgttcccggggactgatcaggtaagctgaaacaatgataaacttcgttgatggagtcaccgtttttgcttatgagacgacacaataaactaataagcctttttctccccgtgattaacctggtaggggaaatcacaaagcaagctttaaatcttgaggatgcagaaaattgactatcactctccggacgaatagtcaagacatttcctttagcttggtgattgaacgtttcgggcacttctcttcctggtaaaattctcaaactgcgaaagaatgattgttggataagatctcttcgtgtttcttggttcagtttgaagcaattggtgaaatttaggtccacaaatgaatttaagcttgaaacgcaagcaacactctcgagtgattcgcagtcacatgcatttaacacctgatcgaaagaggaagctgtggcagcgattttaggtttctcagcccctatatgaaggaacttagccatgaagactttgatcaatctggaatctctcaataccgtacacttaggctagatcgttagccagagggagaatgtaat

SEQ ID NO: 6088 - DNA, 605 bp, Arabidopsis thaliana columbia
gggtaccgagcttgacgcaaatgcaatggctttgtcgctgcatcacggtgagagggtgatattggaccaggttgggggatttgcagatggtgtagcagttaaagaagttggtgaagagacttttcgtataagcagaaatctaatggatggtgttgttcttgtcactcgtgatgctatttgtgcatcaataaaggtatggtactatccttgatacgttatcccttgtcagacggtgtttggcatatgcatactgaattgtagataatcagatacttgtctctacaggatatgtttgaggagaaacggaacatattggaaccagcaggggctcttgcactcgctggagctgaggcatactgtaaatattatggcctaaaggacgtgaatgtcgtagccataaccagtggcgctaacatgaactttgacaagctaaggattgtgacagaactcgccaatgtcggtaggcaacaggaagctgttcttgctactctcatgccggaaaaacctggaagctttaagcaattttgtgagctggtgtgtgtttggtattatagcatatagtagttaacacattacagagtgtatgtaagcaaaacattaatggg

SEQ ID NO: 6089 - DNA, 627 bp, Arabidopsis thaliana columbia
aaaggtttcgatttgacggcggatttccggttgaaatactgtaaagacggcgacggtccgcggacgatgacagattggttgtgcttgaccaaactcaaaacagagaattgcatattcctggtttcggtgtttttcaaaatgtctccgccgatataaactgcgacaaaggagaacgaactcgattccgttccgacattcttgacttcaacaaggttcctcagttttacagtttcttgatatccttaaacttctaaatcacatatagatatttacattacatgtgtgtttttgttgttgttgttttggatcattcagatgtcggagtattttaaccagaggtcgtcggtgaccggaaaaataccgtcgggaaatttcaacgcgacgttcgggtttcaaagcgggtcatgggcgacagacgccgcaaacgttaaatctttaggtcttgacgcttctgttgtaacgctatttaatctccacatacacaatcctaatcgtttgcggctcactgaccgcgtccgaaacgcagtccttcatcttgggaccacaattattggctaggtcagtagtacgatttttttttttagtatatatgtcattgactaagtgatagatatatagttacattat

SEQ ID NO: 6090 - DNA, 545 bp, Arabidopsis thaliana columbia
atgctgcaaatagtagagactaacgtttccggtggtctgcaatcgcagctaagtagtattatgttgtcacactgcaaccttggaaaaatccctggttttctttggtatcagcaggaattgcgggtcatcgatctctccaacaatatattatccggagtgttccccacttggctgctggaaaataacacagagcttcaggccctgttgttacagaacaactcattcaaaacacttacacttccaagaaccatgcgcaggctgcagattttggatctttcggtgaataatttcaacaatcaactccctaaggatgtcggtttgatacttgcgagcttgagacatttgaatctctcaaacaatgagtttctagggaacatgccctcctctatggccaggatggaaaatattgaatttatggacctatcttacaacaacttctcagggaaattgccaaggaatcttttcacaggttgctactcattgagttggcttaagctctcgcacaacagattcagtggcccgattattcggaaatcgagtgatga

SEQ ID NO: 6091 - DNA, 536 bp, Arabidopsis thaliana columbia
  unsure (1)..(536): unsure at all n locations
gaggnnnnnnnnnnnnnnnnnnnnnctaaagaactggaccagctatgaaaaactgcgcacggtcatcgagaagaaaatgttctccaataccgaggagctgttgccggttatctcgtttaacgccaaaacgtcaaccgacgagcagaagaaacacgacgactttgtcgaccgtatgatggaaaaaggctacacccgtaaacaggtgcgtttactgtgcgaatggtatttgcgcgtacgtaaatcgtcttaacaaccctggcccggtacacatgttaccgggctacaacgacagcgaaccgtgggcctgagaagcggcaacacaggcgtacatacagttggcaaatgtagtaccggggggcatatgacctggtttattgaccggcgtctgaacggcaaaaacaaaagcatggtgaatcgccagcgttttttacgccgttataaagcgcaaattaaacagtcgatctccgaggccattaataagcgttcggtgactgacgtcgacagcggcgaatccgtatccattccacggaagatat

SEQ ID NO: 6092 - DNA, 554 bp, Arabidopsis thaliana columbia
ctgaccaacgcccaagctatcaacaacatccacgccactaaaatcagaattcggattagaactaccactagctacactttccttactcacaacaacaccattcacagcctctacatatctctgcccaatatcaactccatcaccatactccaatattccgaaagaatcatccacctcagacgaagaagcatcaaacaaaaaaactctcaacttccctgacccatcagaagatctctctaccaacttctcaaactcctccatcatattatcaatatcttcactagatgaaacagaaaccaaagcatcaagatcctcatcaggaagctgatacttaacaacaacagggtgaccataaacctgaatcatcttttgctcaaattcatcaaatctcacattctttttaacactaacgatccttgtttgaccaccaacgtaacgtaacatgccatcacttggtctagggattatctttccattgtagctacataaaaacttcaccttttccaattcttcatcatccatatcacttcttttattgctaaatttggattgtt

SEQ ID NO: 6093 - DNA, 549 bp, Arabidopsis thaliana columbia
cctaatttgacgtcatataggcataattccacgttacgatatcgattatacattataagacaatagctctcatatatatcgaaatattcagctcaaagccatccaactaataataggcggcgaggcccaagtaaaagtcacgagacggccgacgacggatagccaagttgttgggttcccaatactcacgcatagtttctccagttgggtagacgattagctcacggaccgtcattggctggaccacgtcagggtcggctccatatagaagatgagccatttcctcctgagccttctctgtgttgtgacgtccatcgaagaagaagtaagatctttggtactcacatagcttcgagtgcacgtttccctttccgcaaccatatgcattgtgtgtccaacaccgcaacacgaagtattcgttacgaagaatcctgtacaaatattttatgatacatttgtattaaataaacagtttgaaaagagatatgtacgtatcactcgaatttagttaatggaacagttagttttttttcttactgtagttaagac

SEQ ID NO: 6094 - DNA, 554 bp, Arabidopsis thaliana columbia
ccgatgctccggagacattaacccaggagcaggtaagtaatatattcgtcctgtttgttgaaagattcaatcgaaatcgcatttttgcttagtggcgctatgtgttttgtttcaggcgaactggaagaggaagcactgtggaaaatacagagagagaataagaataggtttgtcttcactctcatcacatctctttagctctgttatcattattatgggtttagttcttagtggttcgctttgaatgcctttgaaggacttaaaaaagtttaaagctttgttaattaggagtttatcaaggaagataaactattctctctttgattttgtatatctgattactttgaacttagtaaactatgcaagggttgttagctatgtgtaatccttggttcaaagtggtggtttttgtcgattcttcactccaacattaaccttatttgttgccattatgttctattgtttgatcctaaggtttgtttgtggacttgttgatctatgagcttccttagaaggtctctaagtttggaatgtgtggttttttttaatgagat

SEQ ID NO: 6095 - DNA, 480 bp, Arabidopsis thaliana columbia
  unsure (1)..(480): unsure at all n locations
nnnnnnnnnnnnnnnnnnnnctaaagccggctcgcactgggggaggcgagccgactgaggaagtagatgcaaatggcaatgtcacactaaacttttttgccaattatcgagcgttaccagcggtgttcggccaggtgtggcgaaacggatgcantatttatgatcaattataattaatattatattaattcgtataatttggcgtagtcgataagctctacaattgaatgcaaacctagcttgccataaatattagatttatgcgcactaactgttttattgctaagtaataacttatcggcaatttctttattagataatccgctaaccagataacgtaatatcgtcacttcacgattagatagcacagtgaccgttgaactattcgtactacatttattgctttttatatagttaagcgtttcgctgggaaaaaacgtgtatccggagaggatcatctgaacggcatgaaaaatatca

SEQ ID NO: 6096 - DNA, 1359 bp, Arabidopsis thaliana
tccctaagagaaaagaagttaccagccaaataggggttgaagtagcgcccgaggttagtcataatggctcctggatgaagcgaatttgctgttatattgactccatcttcctattttattcataccagatttgaatcaatataaccatggaaacatagattttgatttgatagatctcttgtttttctagttaccttcagttgctttgtaagctcgttggcgtgcaacacattgcagagtttagattgtccataagctcgcatactactgtaactgcaacggagaccaaaccaaggaagaatgttagattttgatagaagaattactatttggttcaccattagtaccttgacttgtcattgatcttatcaaaacgaactccttctggatacgagaaccgatgagcttctgatgataggttaacaattcttccttctcgtttgctttcacgtgatgtgctcttcattgtatctagcagaagtttagtcaacagaaaatgacctgaaataaagtggatcacaaattccatgccactgactaaaaactaatgatgatgttaacttaagtatataactttagaacaaagccacataatgttggtttacttctcctactcacctaaatgattggttgcgaattgcagctcgatgttgtccttagagagcataaaaggacatgccataatcccggcattgttgcttacaagattaagacaattcaaaacattaaccatcaataaatcaaaaccgctatatacagtattcaatagcttacatcaagaggttgagtggaagaccagtagatttgtactcagacgcaaatttcctgacagattgcattgagctgagatctaactccatgacatcgagtttagctccagggacttgcttgacaatatcttccttaactttagcaccagagtcagtgttcctcaccgccataaccacatgcacaccacgcagtgaaagaacacgcgctgtctctactcctataccacttgatgctcctgaaaatatgaacacaaagacaagaaaacttaaggaaccaaacatgtccagaaaactcaatgcaggctagactactttttaaagttgtatcaaccaatgatcagttaagctcttccaagccttttcaaaccctgataggctattaggctgactcagggtttgcccaatcgatgctacactcaaatatgtatgtgcaagtctttagtgtcacctaacagggttctatcaattcaaggactccattgttcttgtttcaggccctaatgtaatatgatcaaaatatagaaacgatttctacaagcaaatctgtattttttcttcccttggccaggaattgtatagagttgtgata

SEQ ID NO: 6097 - DNA, 458 bp, Arabidopsis thaliana columbia
agccccgagtccctgcgatatttaccggaactcgttgttctccaagtcctttcttactcgcttttatcggatgagaggccaaagctctcactccgatatcacaaccgttgatctcatcgacgtctctgatgcatccgttcacaacgattcctgcccatccgttgttctgagcttgaacaacggggttacctccgagtattgcacatcgttgactccctccaccatccaccacaagaactctaccgtttcctaatgacaaccaaaacatttagagaatcttagatgatcttgaataattaataagaggctggaactactactgcgaggtttctcaaacggaaaacccttgaacactcctacttaaagaacttagaatcgttctctctcccaaaatttaaccctttgcatcctaaacattaaaaatttgctaagtgacataagactgatcttgatacatg

SEQ ID NO: 6098 - DNA, 571 bp, Arabidopsis thaliana columbia
catgtttgaagttagtgtttaagaattaatacaaatgttgcgtcatcatctctcgctgtcttgtcaaatctgtaactgcatatttatttataaatctctcttctctttactcattctcttctctctcactttctcaaacaatctctctctctggcatttggatttggaagtgctttttgtatatatatccaacaaaggaatcagatcggagatgtcggatgtttccggtgacggagatttatcggcgacggttactgaacatgaagtaactccacaaccgccggtttcttcggcgacgtatccgtcattaacggtgtcggcgtcttacaaagagagcagcggaggtaaaagctcgtcgaagaggagaccaataaggccgagtttcgacgctgcggctgataatgagtttattactttgcttcatggctcggatccagtgaaagtggagcttaatcgactagagaatgaagttagaggtctgataatgctgttcgatttttttattttttgtcgattcggtttctgattattggttgttggggggatgtagataaggatcgggagttaggag

SEQ ID NO: 6099 - DNA, 528 bp, Arabidopsis thaliana columbia
ttccccaactcactgcgtttaatatcccatgaatctgcataattgtccccaatttaatctatcggttgaaagaaactagttatgtagaaatcatgagtgtgatgttatatagaaacttacatttctgttcttgatcttggcatttacctcgtcgcctccagagattgtgccaccgctgttgtcaccttttaaatcaagagagctcatagaagcgagattcgccgagtcgaaagcgtgcctcccaatcattccaccaggacctaattcaggaccaacttgccaaacctgattaacctttccctttgccaccaaatcagccggaaccttaaccctagcaaagattctcaaacttcctccatctctcgccgcctcctcggctttcatatccaaacatcaaacgccagcttcgacggaatcagcgagctataggagctaatgtttagcgtcttcaccacggcaacaccattacctggatccttgtaagcgacaagggtttgagatccgaccataccggtagcctttggatta

SEQ ID NO: 6100 - DNA, 580 bp, Arabidopsis thaliana columbia
ggaatcaaacatatattagtagtatttaaccgtttatcgaaaactccagtttgaaaaaaatagtttacaagaaataacaaatccgtttttatggtatcccatgctttttgaaaaaataaagctgtcataccatctggacctggtgacttctccgggtgcattaaaaataatgccgcatgcacctcattctcagaagctgtccccgtaagaaaatcatttgtttgatctgttattaatgtttgaacctctgacaaggaatcctcaaaatcatgaggattagtcaaagtgaacaaattctcaaaataagataccgctatgtgctgaatctctttatcctctacagaccactttccattctcatcatgtaacccggttatccgattcctagcatgtctctgtttcgtcagagcatggaaatatttcgagttgttgtccctaaagtcatccaaagactccgacttttctggtaccaatattgtcctcatctcaataagcctctttcaaccgtaatgttagatctgtaatctcttcccgtgtttttgaatcatccctttgagcagcacttaattcagttttaata

SEQ ID NO: 6101 - DNA, 1044 bp, Arabidopsis thaliana
gacaagaacatcctgcaaaaaatcaacccacaaattaaaaatatatataaggatgatcatatagttaattttctgcataattaacaatctaattatacaaaaaaggatgaaaagagtgcttactcccaaggaacatctccaaccatcatccagtcaccttccttatctgcgtacgttagcacgtgactcttctcattgcacatgtcttcttcttcagcccctatatatttccattttttcaattcccatcagttttcatcatttttacaatttacccattacacagtacttacacactgcgcaatatataaactctacctacggaataataactctgacatataacgttatccagattttttttttgacaaacaaacaaacaacctatgaaatagtgatgggcgattattacggcgatattaaccttcaaacaaaagaatagtaatgagcggaagtattttttcattccgtaaaaaaaaaaaaaaaatcaaaacggacttataagaaagaaaaaaatatcgttagaaatttgctacctctaagacatataaatcattctgatatgacattatgtatacatagaaacttacagagaatggatgcgttgaacatgaaatcaagggttctgatcaagtcgcggtagccattaagagacattagatcgatctttcttccaattggaactccttccatgttcactttcacgtaaaagctccctacactgttacactcattctcttcttcctcctccacagccgccacatattccgcatcctctaccgccggagctgcaacggagtacccatagccaccgttgaaatattgagtccctgaggatgtcccgaagctgagtccgagtctcaggtccgtgcttaggtttcgagtacttgacgaagcaccgaatgggttgctcttgctgctactctctattgaagaagacgatgaacttctccctcttcccatatctctagctctctctctctctctctatcctttttataataattttaggttaagacaaatgagtaatgagccgccatgctt

SEQ ID NO: 6102 - DNA, 519 bp, Arabidopsis thaliana
tgaaaatgcattagtttccctttttattattatgctttcccatacgcagccattctgctaggaggaagcttcttctctgcttgacgccttcttctcttggcctttctcgatagtttagcctcagcctcagcctcagcctcagcctcagcctcagcctcagcctcagcctctttcggtgttggtttggtctcaacaacatcattcttcttcctcttcttgcttttcttctcatcgtgtttaccctcccacaactccctgatcttacgtttctgctccttgaccttatgcctattcacctcccaatccttttccacataaggagccattttcttcaatggcacatattggttcagctctgcgtcatctaaggtaagtatctctcctgtatccagttcaaatctgtttggttgtactttcgcatacttaaaccttgttctcaattctccaattgtatcctcataatctagcttgtagtagcctccatcaaagcttctttcgtcttttgtacaagagacgttt

SEQ ID NO: 6103 - DNA, 259 bp, Arabidopsis thaliana
tagatactctggagatgatttgcatcccaaggagaaacgtcgcactcctgcttggtaagtttccttattttaacagcaagaaaacaagaacttcttctgctatatgaatctttcatctgacatatgcgtattctacaaataggtgtgataggatagcgggaattggtgaaggactgcatcagtgatctcaagtaagaggagagtcatggaagtccgatcagagaccggtctacggcatgtgctgtgcagaggatgagtc

SEQ ID NO: 6104 - DNA, 519 bp, Arabidopsis thaliana
  unsure (1)..(519): unsure at all n locations
tagaggatcacgatccccggttcaattaactataatgtttaagccaaacttctcatgtttgatcacaggatcatccaaatgggcgtacggatctaccaaatcagtgggacaatcagctgaattgtgttcctacatgtttgttgtccagtctcgaaacgttccgttggagtgagatgcatggattgctgcagaaccagatggatgtagctaaatatatcttgaaaaatgctcgctgcttaaagtctgcgacaatcttttttccgacaacatatgctcaagaaacaagagatgagatgatcgaggagttgtcactttcttttcaaggtccagaaacatgccaagtcttcttccattgaggatgtgaatcataaggattcaaactttcatttccatagnacactaccctcctttattacaatggttttttatttgcagccgtaacttgatctaaacttaaggtttatgtctttgtttttggtttctttttgtatactttactttgagcatctgtttttgttg

SEQ ID NO: 6105 - DNA, 513 bp, Arabidopsis thaliana
catctaaaactcacaagatataagtaataatatagtcgaattttaccagatgggccatcttgggaccaatccctggaagagacagcaggtcgtccatattgcttggaatgtctccgtcatatttcactagacaaattctagctattttcttcatataggtagccttccttgtataaaatccaacctgaaagtaaaggcaaactgttaaaccaagattttactaagaataaggcctttttatgagaaaatggcataaaattagcacatcaaggggctcatgttagaggcaatgacgtgaagaagtaagacggcacttggataacataccggatagatcaattcttttatggttgattcatcagctttgtcaaccgcttcgggagtaagaaggccgttttgatgaagacgatgtattgccgctgcatgttgaaagcgtctgaatagtaagtaccatgtacatcatggacttgtaaatgcagatgatttgagtgtaactatgaaagtgaataagtg

SEQ ID NO: 6106 - DNA, 533 bp, Arabidopsis thaliana columbia
tcaataaattaaagtatctttgtttttctttattctagtctggtttatgtttaaccatcatcattgtacattagttaaacaatgtgtacctttttagaggggtaaaattaccaaacaaatatctataaatgaccctatttgcaatagtaaaatatctataaatgacactatttgcaatagtaaaatttgacttttctgactgatacaaaaataaaattaaatgacagacagatgcagcttctgtgttgcatgaagcgatgggttacatcaaattcttacaagatcagattcaagtcctttgctctccttatctaatcaaccattctctcgtaagtagaagtctctctctttctctcttaattattttttattaatgaaatgatacttctgacatgtcggcgacgtttattaggacggtggagttgtcaccggagatgtaatggcggcgatgaaagcgaaagacttgagaagcagaggattatgtctagtacctgtctcatccaccgtacacgtggaaaatccaacggtgctga

SEQ ID NO: 6107 - DNA, 534 bp, Arabidopsis thaliana
gccagcaaaaaattctgacccggaaaaaaagaatcatgggattgtatctcaatgtgtccgtctctgtctcacggagtctcgaattgtttcccttcgaaggtctgtccataattccagtttttcggggagacattgtaagatgtcacggttgacctgtcactagaagttacttcaaatgagagagcttggttcctgagatcagcattaatatgccaattttgtccccaattacgacccataggtaaccacccggttctcgaccctttgatcttcacagcagctatatcaccggaccctgcaacattggtgatcaaaaccgaaatgaaaatgcctccaccatcgactgtaaaccgcatgctcccttcctttctacagttgatcctgttttggtaaaagccaacaaaaatggttgtaagtcataactcataacttaagtgatatgcaactaactatttataggctcagctccaaaacacttcacaaactaataaaggatctaatgatccattgtatcatgaacctaaatagtagttt

SEQ ID NO: 6108 - DNA, 500 bp, Arabidopsis thaliana columbia
cggaaagtaaaaccattgcaaattcacaaactacatcaaactatggacgaccatttgtgtatgacgttgctatttagtctccggaatccactaaaccaatggacatgatacaaataagttcccctttgagctatgaatggaccttactgcagtatcttgttttaagcacgatcagattatagaggtttatatataacataccacactttcgggaacaccgggaggcggcaaggacatgttccttggaggaggaccccgcaaatgtgatctcttatcgaatcgccactctcctattttgccatatgtcagctccccctgtatttaacagtcagcaaaacttagtagtgactaaaaagagaacctaatgaccttaagtaaaaacaaatgaccacaagatgtgaaatctgttcctaatttatcagccaaaaattaaaattaaacaatcgtgtcaaacagaaaatcaccttcatgttgtagtcgcatccataagtgtaatgaat

SEQ ID NO: 6109 - DNA, 610 bp, Arabidopsis thaliana
  unsure (1)..(610): unsure at all n locations
aacatgggttttttatggagaacgagatctaacgagaagaagataactccggttttgagttggccggaatcagaaccggagtcagagataacaattccaccggagtttcaatgtccaatctcgatcgatctaatgaaagatccagtaataatctcaacaggcattacttacgaccgcgtaacatcgaaacatggatcaattcaggcaacaaaacatgtccagtcacgaacactgtcttaaccacgttcgatcaaatcccaaaccacacgattcgtaagatgattcaaggatggtgcgtggagaaaggatcgccgttgattcaacgtattccgacgccacgtgtccctttaatgccatgtgaggtctacgagattagtagaaaattatcgtctgcgtacgcggcgtggggattacgagaaatgtggggtgattattgagaagattaagaagttaggggatgagagtgagaaaaatcgaaagtgtgttaatgaaaacagcgtcggatgggttctttgtgattgttcgacaagttctcgggagatgagaaattaacgtttatgttgaatgagattttgtctttgctgacgtggatgtntcgattggtttagag

SEQ ID NO: 6110 - DNA, 512 bp, Arabidopsis thaliana
ctcttatggtattttaaaagtcaatatataactaaatgtgttgtattattataggatccaaattcagggaattggtggttaaaatttggtgatgaatttgtcggatattggccttccatattgttcaaccatctaaaagatggtgcgacagaaattcagtggggaggtgaaataataaattttaaagatggtgcactacacaccacgacgagaatggggagtggacattttgcagagtctggatatcaaaaagcaagttatttcaaggatgttgagataattgatgaacgtgatattcatagtagtcctaaagaaggttattcttatatgacgcaagagagttgttataacatcaggtctggctatgctaaagtatggggagtttatttttattatggtggcccaggtcgaaatctgaattgtaaataatcatatttatataaatggtaaaatctaagcaaacttttaaataaaaatatatgtgattacgcaaataaattttcggcttattg

SEQ ID NO: 6111 - DNA, 505 bp, Arabidopsis thaliana
ttctgtaatctcctcatcttgaatttgccgcttttctttttttcttccttttcttcttcttctttgaacattaggagaaagcgctcaatgtacataaaatagatgtctccaataagctgttcttcttctgttgcagcttcgcgggcatcctgtatgaaaatacaaatttcataaactagataaaaacatgaaatagaaaatactatatagtttgggttctaaaacatatattggtatattgaattttaccttggacattatgcattccttatgaaacacttccttgcactgtttacaagaatatctcttacccaagcatcctgacctacagagcgcacactttcccgcatcataattttcctcttctaggacagtatgttgatgcagttgggacttcacaatgcctggaaacccaaggcattctacatgggctctgaagttacaatcaatacaaccatagagcgacacaccacaaggtctaccacacacactacatgcttgatga

SEQ ID NO: 6112 - DNA, 478 bp, Arabidopsis thaliana
tagactctagagggctcggatttaggccaaccgcgtgcgcatagaacacgacctgaggggagtaatggatagaaggaaggaaccttttagcactagcgaagtcaagtgcttgatgatgcagctgttggatggtttgaaatacctccacacaaattggattatccacagggatctgaagccatctaatcttctgatgaacaattgtggggagttaaaaatatgtgattttgggatggcgcgccagtatgggagccctatcaagccttacacccagatggttattacccagtggtacaggccacctgaacttcttctaggagcaaaagagtactctacagcagttgatatgtggtcagtgggttgcattatggctgaactgttgtctcaaaagcctttgttcccgggtaagagtgagcttgaccaacttcagaagatctttgcggtccttggaacaccaaacgaagcaatatggcctggg

SEQ ID NO: 6113 - DNA, 1328 bp, Arabidopsis thaliana
caaccattggagatggtctaagagaatgcttcaaaatcctaaacaaatttgaaatgaagctaaatcccgagaagtgctctttcggggtcccatcaggagaattcctcgggtatctagtaaccaaaagaggcatccacgccaatcctaagcaaatgacatcactaaaaacggcacgagaggtccaacggctgactagcgtattcgcgccccgtaatagattcatatcaaggtccaacgataaatgcgtcctgttctatcagctcctctggaaggataagaagtttgactgaatgaggattgcgaacaagccttcaagcaatttaaaacataactgctcgacccacctgtactcgcaaaactcaaagagggagaaccgatgtacctgtacactgcagtctcccgatctgcgaaaaagtggaagatccgtcttaccacgtccacccccgttacccataggggaatgtacaagcagaagccgccaacaatgttatacttagcaacatcaagaaaagactcgattctaaaaaatcgatgtggtctgacgtactccacggagttctatgggcttaccgaactatacctcgcaaatcaacgcaagaaatcccgttctctctcgcctatggtttggaagcagttatcactgtcgaaaccatagtgccaagggtgagaagaaccgccagtcctactaactcggacctgaacacgcaaatgttgcaggacaacatggacttcatcgataaacgcagagatcaggcgatgatacaagttcaaaactatcagcaagctgccgcctgctattacaactccaatatcaaaatttggagattcgtcgtgggagagctcgttttacgaaaagtgttcagcaacacgagggagctaaacgccagaaagctaagaaccaactgggaaggtccctatcgaatcaccgcggtggtacatgacggcatctataagctcgaaaaagttatcaattgagtacctcagttacggccttggaatgccatgcatctcaagaaataccacgaataggtactcaaaaacaatcgaactacgataaagcttgatctcctggcagggtacgtaggcagctccccccaagagcgcaaccaatacctcaatcgaactacgtcatggcttgatcccctaatcgggtacataggcagttcccccgcagaacgcatccagcacctcgactcttccagttaaagcagatcccttcgacaaagataatggacatcatgcctccatcacggaacgttagctggctcacctgacaattcaaccatcaatcaacaccaagcaggtcccctcttatcaactacattgtg

SEQ ID NO: 6114 - DNA, 562 bp, Arabidopsis thaliana
cttgacgccagtgtgctctaaagcgtcgattggtcgggtggggttttgctacgaagcggagatccgcgacgatcacaatcgcccgctcccggctggtgagatcggtgaaatctgcattaaaggcatacctgggaaaaccatcttcaaagagtactttctcaacccacaagccactgcgaaagtgctggaagccgatggctggctgcataccggcgataccggataccgcgacgaagaggactttttttatttcgtcgatcgccgctgcaatatgattaaacgtggcggcgagaatgtctcctgcgtggagctggaaaatattatcgccgcgcacccgaaaattcaggacatcgtggttgtgggtattaaagattcgattcgcgatgaagccatcaaagcatttgtggtgctgaatgaaggtgaaacattgagcgaagaggaatttttccgcttctgcgaacaaaatatggcgaaatttaaagtgccctcttatctggagatcagaaaagatctgccacgtaattgctcggggaaaataattagaaagaatctgaaataaatg

SEQ ID NO: 6115 - DNA, 1225 bp, Arabidopsis thaliana
tctacagaagacctggagatcgagtgtatagcctggtggagtacaaaattttgaaagttttatgttgcatctggagacccggaattcaagtacatcagtcgagtatacgtgatgtttaaaatccaaaattttttaaaacatcactgtactcgaccaacaggagctacagagacttgcacggatttcctgcagtttatagtagattttctacaagttttctcagtcaacagagtgtggaccacgcgctgaggataagctggagagagaatctaaaactcaacctcagccactctttttgaaacttcactcgacttcacagaatccactcgacctatcatcacttcacctcaacaccgacactccaatttctctacaccacgaatcgccgtccaaagatctactcgatccagaccacttcactcgattccgtcccaatactcgaccaattcatccacatcaaccgccgtctcttataaaagaagttactcgacttagattccctgtctcgtagctcactcgacctccgagaatcactcgaccatccctgcgcttgccgcaatcgagtactcctcctctttcaccgtcgaagtctcagagtctactcgattacgacaacggaactcgaccacaagcactcgttcgacctcgagaattcactcgacccctgcaacagtaactcgacttcttgttcttgaattcaacaaagcctattgacatttgagctttgagttctaaatttctacaggggaatcatgagcaattacagtggcagttcttctgttgatcccgactacaacatggatgaaacagagtcatcatcttcaaggccagagagagaacagagagaatatgatagcttcagaagaaaagctgagatagcccgagggaagaacaaacccgatgtattgcctggtgaggaatatattaggctctgcaagctgaatgagttctgtagcacgaggtatccttgctcgaccacacttgcacaactcggattgttggaagatgttcagcacctgtaccagagttgtcatctgcacactctgatggcttatccgtatgtagcatatgaagatgagacaattcaattcctctccacgctgctagtggagctctaccaaggtatgacctctgatgagttggattgtgaaggattgggattcttgcgattctctgtgtatggtcatgagtataggttatcaatcaagcgtttagaagggatggt

SEQ ID NO: 6116 - DNA, 550 bp, Arabidopsis thaliana
  unsure (1)..(550): unsure at all n locations
cttgcttttacgtaggtaatatacggtgacacagattcaatcatgattcacagcggactagatgatattgaagaggtgaaagccattaaatcaaaagtcatccaagaggtaggttggatactagatttatctctatatagctttccttggggaaagtgcttctctaagaagattataaaaaatttatacaagaaaaatcagacatttgattttgggccttcccctttcaatttttaggtcaataagaagtatagatgtctaaaaattgactgtgatggcatatacaagagaatgcttcttcttcgaaaaaagaagtatgctgctgtcaagttgcagtttaaggatgggaagccttgcgaggtaattgtttttttgtaaacatttttgcataccctttcttgcagaaaattatgggtactagatgcattctcaatgcaggacattgaaagaaaaggtgtggatatggttcgtcgagattggagcttactctcgaaggaaataggagatttatgcctgagtanaatcttgtatggagggtatgttttgaaac

SEQ ID NO: 6117 - DNA, 1471 bp, Arabidopsis thaliana
caacaagggctataacaactacaagcccaacccaaacctttcctacagaagcactaatgtagctaacccccaagatcaagtgtatccaccacaacagaactagtctaagccttttgttcagtacaaccaaggttatgtccctaaacaacagtttaatggaggctaccaacagcagaatccaccaccagggttcactcaacaaccacaacaagccccagcaactcaagatcctgaaattaagcaactcattcaaaagatcattcaaggacaagctactagagttatggcttttgacaagaagatagctaaattacacaagaagatcgattgttcttacaacgatccaaaagtcatgtttgaagctcaaacattcaaaaatcaagtatgtggagagtcaatttgcatcaatctctgctctgaagcatcctcagcaaattccaaggaaagcagtccagaatcctaaggactatgctactgcaaatgctatcaccatccaccaagaagatgagtctccaccaagtcatcagactcccaatactgaggatagtatgattcaagaagggggggattcaactcaaattgctgcacctgccacccagcaattcatctggaatatagagcacacacctttgctgaatactcaacattctggaaaaagttcaaaattgaaaaactcaagaaggaccataatcaagagatgattagcagtgcctccacccaagaaacatacaagaagaaggtcatccaagaaaagcttgatgatcccggttcattcacttctacatgctctctaggaccattgacattcaataggtgtctttgtcatttgggagcatctgttagccttctgcctctctctacagctaaaaggctagggatcatggaatacaagttctgcaacctagctttactcttagctgacggttctgttgcacatcctcatggtctaatagtaaatctgtctgtcaagattggaaatgttgagatacctacagattttgtggtattggacgtagatgaagaaggcaaggatcccctgatcctaggcagaccattcttagcttcagctggagcagtcatagatgtaaggaatggaaaaaataatctgaaccttgaaaaaggcatcaagatgaagtttgacttcagagaagcttcagggaaatcaacaacaggaggtcaaaattttgggattcaggacatggatgttgatgaagaaacagaagctgaaacctcaccaagagttaactatacttctcaacttagcaagctgaagaggacttttgaccacaagaagagagcaattgaaaggctagctcagactgaagatcctacagaagatgactggtatgagatgagaaaaaaatttaaatggcaaagcagattcatagaaggattattttcaagggtgatgaagctgaaagatcaactatggatgtttgaaaaacgagttaaaaattttcaaatggtattg

SEQ ID NO: 6118 - DNA, 477 bp, Arabidopsis thaliana
ctttctcttttttctgacgagacaggctcttgctctatgactcaggctggagcacagtggcacaagcacagctcactgcagccttgacctcccggggtcaagcaatcttcccaggttcaagcgatcctcccacctcagcctcctgagtagctgggattacaggcaggcgccaccatgcccagctaaatttttgtattttttttagagatggggtttcctaggctggtctccaactcctaagctcaagcaatctacgcacgtcagctttccaaagtgctaggattacaagcatgagcctccgcacccagtccttaattcttatttctacttaattagcatagactataagctccatagaacaaggacaatgcttaaagctggtgcacagttatctatcttcccccacattgaacagcccagaaaaggcctctgccagtgtgcagttagctcaagcggattggtggctccacccgactt

SEQ ID NO: 6119 - DNA, 993 bp, Arabidopsis thaliana
caactcgactcataatttgataatgaccaatataacgtactgccagtttcatttcttatcattcttgcatactttgcatgattaggatagctttgcatacatattgcatttctgagttgttttcaggtgatttggagctgtttgcgagcaaattggaagaagcgagccagaaccagaggacatactcgacccccaggccgagtacatccagaacaatactcgaccccctggtcgagtgactttggagccattctacccatctactcgacccccaggtcgagtaactacagctcaggccacttgatgacattactcgaccccctggtagcgtatcactttgccacaccacctgaccacactcggccgttcactccaccacgttactcgaccccctggtcgagtatcatcactcatcacgaacaccatcactcgaccaagcactcgatcacatcttcggagtctactcaaatccgcactcaaccagacaagatgaacacaaggaagagaagaggagaagatgaagtgtttggaagcggcctggacctccatcggatcacgaagcccatctcggcccattatcactctatgggtcgggcgattaggttattggcccgtctactatcattttatttcgtttggtataaatagatgttttagggttctgtcccgggacatctagtcgacattgcgtttttgcttcagttttattttcagttttactctgctacgccgcttttgcttctgcaacctgtagttcgcgatttttccaagttattgagattccgcgtttgatttcattagtcatcttgtttctctactctttatctctttacttatgcaatattatcgtttacctgcgtttatgtctttgagcatgctgtctgagtagtgacttagaattcttagggatgggatagagtagttgtggaatccgtagtctgtagaatggttaagttttagaattgattgaaccctttaggactagttgcgttt

SEQ ID NO: 6120 - DNA, 1830 bp, Arabidopsis thaliana
gggtaccgagctcgaattaaaacccttttaaaatcctttgtaaatattttaaaacccttttaaattcccttgtaaatctatttcccgccaaaaaaaacttttgcgggaaaaaaagttttgaaaaaaaaaatttgtcggaaaatttattttggaatattttaagagaaaaatattaatatttcattgtgttaacctaaaacaattttcaaataggggtacaatggtcattaaaaattgatagagggtagaaatgaaaatggcaaataggaaatggtagaatggaaaaagagtagtgtgaaaagggcattctcagcaattattcttcattaaaaccctccctgaaatcatctctagtattttgatgtcatttaagtttagataatcattttggaaaataaaagaaaaaatagaaatgatatttgttaattttcatcaatttaaaacaatttttaagttatttacatctaattactacaagaaaacaagtcatttgcgagggacaaaaccgtagctaatccctcgcaaatcgctattagcgaggaaattgcgacgaacaacacttcctcgcaaaacgcgcgtcgcaaatcagaaacagtcgcaattccctcgcaaaatttgcgacggaataattgtcttgctaaactctcgcaatttgcaagggatattaaatatcacaaattcactgcaaatgagttgtcacgctaattcctcgcaaaagttgcgagggatttgcaatgaatatttctatagcaaacctgcgagggagttgcaagttccagcgatcgtagtagcaaatccctcgcaatgtttgcgatggacttgctaggtttttgcaacgttcttaattattagattaacgtgattactgttctgtttagcttaatttaatcttaatttttggttaatcttaggttaatctaatcttaatgtttggtattagcattgaattagaaacttaattgatagcctaaacacatattattaatactgaaactttggtgtcaaataaaataagaaagcttacaaaataaatataacaaattttaggtttagatgagagaaataaaatagagtgttgcaagttttttagaaagcaagagatggagaggaccagtgttgtttgcctcagtctcaactgcctcctctgctctaattggttcagcttcaacagcaacagttcctgtggcatttggcatcccagctgcctcctcctcaacgatcctagcagctgtagttcatgtggcatttggcatctcaggtggctggttggagccgagaggttctatcctagaagatccagctcgaaagatggcagcaaagtctggatctttctccgcaaggtagtcaaagtacacatggaagctactaatcttctccgctcggtttgcaataagagcttcagcggcagccagcttttgagagagatcacccggatcttctcgaggaactgaaggaccaatgtgagctcatgcggcttctagctgcaatgaaccagccccatatatcctccctttcttctttggagccacctaagagaaactcaaaaccaaaaacaaaaaccaagtcactatttcctaatgcaacctaaactgagacaaacaaatcaagacaataacgaatccaattacatatgaaaccatcgacactaagcttagtaacaatgccaagaaaaatacaaccacaacaaacaaaaaccaattcatgacaaaacacaaacaaaggcagaaaaaaactgacaaacacaaagccaagtcactatagtaagtgtgttgacaaaacccacaaacaaggcaaaaaattactaacatcatcaaagccaagtcacatagc

SEQ ID NO: 6121 - DNA, 1466 bp, Arabidopsis thaliana
cctaattggtgtgggctgaagagaatgtgcagaatcctctgtctgtgaaaccagagggtgtcgatcgacatgggtagtggtgtcgatcgacaccgttcctctgcaactctcattggtgacctaacaggttggagtgttgtgtatggctctgtggtgggattctgattagtctgaggaggtgtgtctgtgctggaagcaatgcaactgataggtttagtaagctctgaaccatccatgccaaactccatctccgaatcacaaaccttaagagagattctccctctcttcacatcaaacctagcaccagttgtagctagaaatgctcttccaaggataagaggatctttgggttccttctaatagtccaggaccacaaaatcagtagggataacagtattaccaaccttaacaggaacatcttcaaggattccttcagggattcgcttggaacaatccgcgaagagaagagtgatgcgagtaggtctgtagtgagtcatgcctagtctctcagcaacagacttaagcatgaggttgatgctggatcccagatcacacaaagagcgggtgaacctgcttgtggagatagagcaatcaagaacaaagctacccggatctggaaccttctcagtgggctgtccaggagtaatggtgcggatgtactcagctatgtctactctttgtgccttctccttcttggccttaggcggcatgattgcactgatgtctctggtaagaagcttagcttcatccgagctaattctattgtcaacaagtcgcttgacatacctattgaatgaaacatagatgtctcagaagcatccttaggaagagtatggaggatcttctccattatggttgtgcacttaccagcatgaatctcctgcttagaacgacgcctccttggatacgagacaagaggagtatagacagactcgggctgcataggtacctgcacctcacaaggtgtagtccggatccaatgtcgatcgacactggatgggtatcgatcgacaccgtcgtattgagtcgtctctgagaaaagggtccgtatggtgtcgatcaacactggaggttgtcggtcgacaccatctatgcaacttcgagctccaactcgtcttaagtgtccaattcctcccacacatcatctctttctctgatgaagatggcattgcagctcttccttgggttagcatcaggattaccaggaagaaagccctcttgtctcttgatagattgtgcagtttgagctacctatacatctagcttcttcaagtgagagctcagattatggatcttcccattaatatctgtatagacaacatcaaacttcccaataaactccataacaagctttgtttggctctccagaatctgctcaagcatcgattccattcttgtctctgctgaaggtggagggggggggggggcttggtaagttgaattaccatagttcctctgaaagttgc

SEQ ID NO: 6122 - DNA, 1384 bp, Arabidopsis thaliana
cacatgctcgaccaactgattccaccaacaactcgaagaagcctccaacttgccttgaaagctcatgctcgaccaaacaactcaaggcaaacactcagacgtcagatgattggttagaactcaaggagagatctaaatggcaggacaaagccatacaagagctaacacatattgtgaaagagctgaaagatcaaatcaaggagctcaatggaaaagccaaccaagtaccactcaacatcaaggacacccctgacgatggagccactattctggtcagcaaaaaaggaatttgaattcacatcggaatggtctagaggaaaagactatcttgataaaaaagaagcttactgtcaggacatagccactgagtacccaattgcagacctgttaggaaaccctaatgagtatgatgatcactctactcaaggaggagaggagacctcatttcctctctacaacccaccctaagcgtaatgagtatgaagtcaagcttagagacttaaaacaagctcacttgggaggaaatcccatgtctatctttgtacatatctttattttccttgttgtttttgatgcatttggttagtgtcttcaggagataagtataaagagctcagtgaagtggattctggctctgcgaggaaagcagtatactcgaccacagagcaatgaaaaatactcgaccatattttagcttatccacgcaaggagatcactcgactgtggtgctggccgcagcagaagaggggaggtcgagtaaactcatggcggtgctggccgccacagaggcaatgaggtcgagtaccacatgctagagctgatatagaacagggcgactctttaatgccttgggagcaatcacaggcacccattgacgaccaactccgttcattcttcgactgaggtaagcgcctcacttcaccattgtattatatcatctcttgtgatttgttctttattttgtttctgtgattggatttgtcctaagtactctcttccaagtttagtcacacagtggattgtgtgttttaagtttgggggagggctcaggaagtgtgtgttgcattgtttatactcttgagtctgcattcatcaaggcataggaaaaaaaaaaaaattgaaaaattcaagaaaatgatttcacaaaaatagagtgttcatgtagttgcatttcatttaggatcgagtctagagtgtttcatttaggattgttgcatatgcataggggataatgatgagatagccttgtaagcattttggttcaccggataaactcagtgccctcgttgctagttgtctgttgcgtagtcaatgaaattgaagtaaaactgaaccatgcctagattgctctactcgaccacactgtcatgatctgataccattc

SEQ ID NO: 6123 - DNA, 988 bp, Arabidopsis thaliana columbia
taatgaatctaaagagaaacaaaagtaagcaatagacgattggatggttgtgaaacaagatattaaaagcgtcaggcttagggtattctcaggaaatagatgatagtatatctagaaataggtaggttgttatcgaaccattcttgagctcaaactatgattttagagtaaccggtggtgttccgcgaaactctctatacttagagttaagataaccggagaagccgagaaatcctatactaaagtatgcattattatcaagtttgattagttcacctagtatctaaaccagagcccttctatgagcctacatgttctttcttaaatgcctaggctcatctatgatagttcaaataacaagtacctatggtggacatacctattatctaatatcaagttccagttagctactctagaactatcattaagaccagtcaagatgaagaatcctacagataacctagcaagggggcaatctactaaatcatcttaatccctaatgagaagccctaaacctaacaagtggattactcaaacatgatcaaagaaacacaaatcatagtctgaataagaaatcaatgatgaaaataaccaaaggaaaagagtaagaaagatcttctgtaaagggagtctccatagagttttgctcccaaagtacaaaagagaaacaggagattagtctctccaagcttaggtctaaacaatgacctaaaaactatatatatgtcttaaaaacgtgatgggccttcattaaacataagagaaagttctgggccaaatttagaaatcttcaaaatatcaataagttgcgtcttgaaattgccgtcaggtgttggtgtcgctcgacaccaggggtggtgttgttcgacacctatgcggattttgatctgcgaactaaatctaaggtctcataatttcctaatgaaactaacctatataaacagcacttacctgtagaggtgcaccactccttgttgagcattatata

SEQ ID NO: 6124 - DNA, 557 bp, Arabidopsis thaliana columbia
agacaaaaccacgattagacaatccaaaattagaaactgaaagcattacatttgcaagatgcttccaaagcaagagagctaagatttgcatctaccataagaagacgagcagacttatgttgtattcaaaccgctggatccactcaggtgttaaaaaattttcctgctcgaggaaacaatgtaaatgtaaattctcccaactaagtacaacaacgacatccttcaaacccaatttatctttaggattgaaacataatcactgagaaaacttacaacggcatccacgccagcaacaccagcggcaacttctccattagtgtcatatacaagggacacaatgggagtactaatgtcttcacgtctcaagattcctgccattaccaaccaagaaaattgcataaaatttatgtctcatagataagtaaaaggacaaacttttgtcaactgaattctgcatcaattgctttactacatatttagaggcagattctaacctttcatagagagcttcactctttcaataaaacattggctgtgtcacataaaaaggacaaact

SEQ ID NO: 6125 - DNA, 783 bp, Arabidopsis thaliana
gctctcgtcaatggtgattgagtctgggacaggtttaacttgagggtctctgttgcggtggacttagatttggttatcgaacttgtcgtctaggaataatttattgagcatgtcaatcacctgtaaactgaggaaacaaaactactcaattaccccatcctcgggaattttgcatccaattgatttctttgttaactctgctattgtttactgcatcttgttacttgttacttagtttttgtatttttctcctgttactcgaccttatactcgatcacccagttgtctggcaacagactgtgcagtggagtatctctgttacattttctgtctattacttcacctgtcactcgaccacacccagtgcttggcaacaagctgtgttggtctagtgtttttactgttctgcttaaatttctgttttctaaatgttcacttagaactactagaacacacccaaacctattattggttggcttgactctgtgaactctgattgcatcttgattattagcatcacacccatttggattgacaacctaaaatactacaacgacatgattggtgttttaggataattgactaaaaacctattatcaatgtgctacattcagaaccaaggagggttcaacaagggctacaacaactacaagcccaacccaaacctctcctacagaaacactaatgtaggtaactaaaatctacaaggagagaactaagcttttccatgacaagaggatcatcaccaaggatttcgaagttgttgattagatgctgctattc

SEQ ID NO: 6126 - DNA, 957 bp, Arabidopsis thaliana
cttgtacatcaacagcgagccgatctcgttcagattgtgtcgctaagctatcgagatgaagaagatatcgatttcgaggatggtaagtagcgtagagaagtcgaaggattcgtcgcgtgtcaccagaagatccggaaattaggtaagcgattgaaggaggagctgtatcggcggcgaattttggaggaagaaggaaagagtctcgggtcgggtcgtagatcatcgggtcgtccggtgtaggaagatgaagagtactgggaagaggaagagagagagaggaggaaacatagagagagaaacgcggtggtgaggattatgtaaagagtgactctcggttgctccggtgtgtgctgcattttctcacggcggcgcgtgaaacttcgacggctagagaagaaagctaactgtagtatgtaatggtcacagtacgcatcgaactctgaagatagaatctttttttcttatatagtttaattaattatgtagcttattacttaatggtaacgactaacgacgatattattactaaataatttgattctataatttccattacatcataacactgaatagatgattttattacacattttacaaatttgtaataatcaagttcttgagcggcttcttcgccattcttggtcaaaattttaatatatgagagaagagcaattgcagcatattttcactgaaatggtcaaattccaaatatttcaaaaaatacgtctcaacatatgtaactaaagcaagacaatatatcttgcaacgactcaagtactaataaacttatgtacaagacaacagaagagcaagcatgaatgatattgggttgttctctattgatgaatggatcaaaagttttgtgtaaaaaaataggaaagatctaagctaatggaaacgtagcttaccaaaatgttctcgtactgaatgtgaatggccaactaagcagcgacaaaa

SEQ ID NO: 6127 - DNA, 421 bp, Arabidopsis thaliana columbia
tagaggatccccatcgcattatcatatcaaaatctgaaactgcagacttttctctttgcttgtatttttttctgtaatgactgtcgtcgcaatatgaattgcaggtgtgcagttgggaactgttacagtttgcgtaaggatcatgatactgctctcaaaatgtttcagagagctatccaactgaatgaaagattcacatatgcacataccctttgtggccacgagtacaattcttttcgatgcatcttttgcgcataatcggcatatgcatgtacgttaataacataccggtctcaccttggctgcacaggtttgccgcattggaagaattcgaggatgcagagagatgctacctggaagctctgggcatagatacgagacactataatgcatggtacggtcttggaatgacctatcttcg

SEQ ID NO: 6128 - DNA, 456 bp, Arabidopsis thaliana columbia
tcgctccaggcttcactttctgggtccacagcgatgtcacaataggcatgcagggccaggggcaagcagcagcaagggagtctaaggccggtcctacaagtacaaggaagcgctctgttgctttgtcaagcttgtaggttatagtaaggctcactagtgcagcgagaggcaagggaagtgtagccgcagagattccatctgcaaagacagacgtgtgtaaactatgagagttttttcagcataatcattgtattcgtttcttccagcatgttcttttcacactttctccgcagtttcagttttatagatatcacaattgtttacaaatctaagcgagacccgtccagggacatgttatccgggactgccatgactgcatctaaggttctggtctttgatgacaaaacccctggacacctgagaatatccattatccttagagacgaaaagcattac

SEQ ID NO: 6129 - DNA, 401 bp, Arabidopsis thaliana columbia
aagagagttagatcttccatgagattgggaaaggaacaatgatgagcattacattgcctagattgtctctattcatactggcaagtgcttttctacacggcaaatattcttggttctctcatgtaataatcaccaggatcatcatgttggtatcgattttatattttgtgtgttgcaggggaaatgaatgaaatgcaatggtcttagacatggagttccccaaggcagagattctaatattgaacttctcttcagacaagtatgttcttccgccttttatcagtaagatgagccggcttaaggtcctagtgattatcaacaacggcatgtctcccgcggttctccatgacttgtcaatatgtgctcatttgtcgaaactaagaagtctctggctagagagg

SEQ ID NO: 6130 - DNA, 541 bp, Arabidopsis thaliana columbia
tctaattttgtcaaacggatattgccaaccatctttattttgtctaattgattcagtatttataaacgagattcctcctaatagagctacatcagttacaattagctagcctagttgccaatgatctcaattattggcacaggtggattctcattacattataaatcaaacgcatttataaaacacaaactaaaatattcactaggaaaacagaacaagaatgcagtaaactaggatcatttttcttttgtgtctttcattcctaagacaatataattaattaaatcaaggatcccaaaacacaaaaatgccagaaaaaaataaaaccatattaattagctacaaagaattaaaaccaccgcctttcatcatttgtctaaactctttgtagttaaccctaccatcaccatcaacatccactttctttatcatcttcttacaatcgtccaaggtcttaccttgtttgagcccaaggaagacaaaaccgccttcaattcatccaccgttataaacccatctccattctgatcaaacacattga

SEQ ID NO: 6131 - DNA, 546 bp, Arabidopsis thaliana columbia
gtggacttttgaattcgggcgtctccgttttgctgtttagcaggcctcatcagagagtcgctgcgacctcatcagagatttcaccgttatggtaaacttcctgcacgtcgtcgcaatcttccagcatatcgatcagacgcatcagtttcggtgcggtttctgcatccatatcagctttggtagacgggatcatggaaacttccgcgctgtctgctttcagacctgccgcttccagagcgtcgcgcactttacccatttcttcccatgcagtgtagacatcaatcgcgccgtcatcataggtcacaacgtcttcagcacctgcttccagtgctgcttccatgatggtgtcttcatcgcctttctcgaaggagatcacgccttttttgctgaacagataggcaacggaaccatcagtaccgaggttacgccacatttgctaaatgcatgacgcacttcagcaacggtacggttgcggttgtcagacagacattcaatcatgattgccgtgcgccagacctgtaccttcgtagatgatggtttcatgtt

SEQ ID NO: 6132 - DNA, 659 bp, Arabidopsis thaliana
tgaaatcaaactgcagtgaccctgcagttgtgatgtcatcctcttctgcaaaatatttaagaattcaaatccatcaaaagtttaagcaacggacacatagattttggaatctttaccatcatttgcacctggtgtatcataagtcttctttgctctctttgatgcatggaagctaaaaacagctacacaaataagaactgagatagcgactggcacaacaattgctatgattatcactgtagaatttttgccttttcctgcataagtcttagattagacatgaactaaaaccaaactaactattaggtaaataaataaaacagagctctaaccaggcggaaaggaaggagttgaaaccagtggcagtggaggagccgaaaccggcggaggaagaacagttccctctatagtttccttgtaaaaggggtaaacctcgtaccttgagttacaacttgggacaagaaatcttcctccaactttgttgaaatataattctttgatggattgttgaagacacattacacaatcttcactagtcagatcaggaatgcactgaaccgatgcataaagcgactgagacgaactgaaatccgacttcttaaccgcgaatttcttgcttgtactattagcggcttcctctgcagactttttcatcagag

SEQ ID NO: 6133 - DNA, 423 bp, Arabidopsis thaliana columbia
tggtccgtccgggtttaacactaaaaagaacaaaacaaggaagagaccctcgaagaacacaaggaaattcaagctcctaactcccttgccagatggggtagatatagggttaaaagttggtctggaagtcggaaaaaaagaaaaaaggaaagcagtaaatgaaggaacaagctctgctaaaacaaaaaagcttaattcatcagaggtgatcccaaaggggggattgcccaacgcccaattagcatcatcagctggaattgccaaggactggtacggtctcaagatttggtgattcctcgtctcaaagaaatgcgtcaaaaacatgtcccagagatgttgttcttgatggagtctatgaatagtaggaatgtattagttgatatgcaagtttggttaggctatgagcgcggttttacagtagag

SEQ ID NO: 6134 - DNA, 601 bp, Arabidopsis thaliana columbia
atccccaccacaattgcgaaaatggagcaacataaaattgatcaaaatcaactaaaatccgatcaaaactttagaaatttacgcggtgggtaagctggagatggcggatttatggattcttcttgggcgattagtttgtagagcggagactggagaagtgagagagagggatgaatcaacaacgcctaaccaaggattcgtcaatgcttttcttgtagagaagaagtataatggaacagatagtttcttcttagagaaagaatcgatttgtgagatgatcggattcgtcaaagcaaagttgcaagaagagtgagccgccattttcgcgagtgtgtctggataacgggaaaaatgaaagaacgtcaaattgggaaaggagaagaaagtcctggagaatgacgattgtcgaaacgatatcgtattcgttttataaatcttaaaactttcttatatgggcttaaaagatgtgaataaacccaacacaaaataagtttagttttgggcttattgcttatcattaaacgggcctatcaacgagtgaaagagtcaaaaacaaattttatctcaagacaaaaagatcacatagtcaaaaagaaagtga

SEQ ID NO: 6135 - DNA, 551 bp, Arabidopsis thaliana columbia
gaggatcacccatctattcatcagctaaacttttgagtttcattagtgtctacatcagattagtttactgtttctcttgttctcacatgaatatgtttttgaatacaagatctaatcatggagctagccttagtgtaactatgttctatagattccattttttcaattaacacaaatacttgtaagttgtaactatgaatgagttaaaatctgtcgtgtaccgtgctttgagtagtcctgttgtaagtgctttccaaatttttgagctgaaatcacaagcaaagaagagatggttgcgagtttgaacacagttttgacagagcatacaagtctgtgttgctcctccttgccatttgatgatacgacctcccgttaaaagtccaaattttggtgttggtgttccacgaggctgtgtatacagttgttctaatatgattccaagtatcctttgtggagaactttggtctaaacacatcgttttcctcgcgccataaagcagtcatctttctcacttcgtgtttttgccattgtaggtgtagagcttcttttat

SEQ ID NO: 6136 - DNA, 620 bp, Arabidopsis thaliana columbia
ccgccagtgtgctctaaaggatcagagtgcttaaaggaaccgtgattatgatcggtaataaatactttacttgcaataagcgtatcccgacctatcgtaacgctctcaattgaggcgatatgaacatagtcgttaacttgcacattatcggaaaaaaaaatcacgccacgtccaaatgcatccagcctgagaccgactccacttgtgaaattttcaccaaaattaatgctaccatcattgcgaatatagcagggaaatcgaataattctacagttccggtaaaatacacgagtcaataagacatctctaacaagccgaataaaaccacagagaccatatcgtttagcgagttttaagatcatcgatcacctcttcaagaacatccctgaagtaacttcctgttcgaattttctgagaaataatttttgtattctcactaatttgcttataagtttctattgtcatggagtcaacaatctcttgcatttctttgattgatccactgcatatcctattctattatctacaatgaaatccgcaagggcggctttacccatataaatactggaagtccattgaaagataaagagatgtcttatgagggttataaactttaaata

SEQ ID NO: 6137 - DNA, 589 bp, Arabidopsis thaliana columbia
  unsure (1)..(589): unsure at all n locations
nnnnnnnnnnnnnnnnnnnnnnctaaagccttcagtctgctctgtatttaagcgtttatttcacattagtttttagcaagccggtagagcgccttgctcgcagaatatctactacggaaatatatggagactgttgttgccacgaaaatcctctgtgatcgatacgtaccagtttcgtacttttccaccagaaaattgactgcatcggccagagtgataccagcatcgatatgttccttaataacagtttcatcactgaacggcgtgtcgttcagtgtcaggccatagtgttgttccagcaggcgtgtcagtagcatttgccagacagccactggcgacaggcagggcttcgcgcctgcgaaattgtagcaggtagagtgttcatgcttgctctcgtgaaattagttagcgttgagtggggtaaacagcgatgtatacgtagccgcaactaccaagagtatcggcttcgcaggtaaaaccgttgtggtacagggtgacgcattgggcatggcggggattcagttcccagtggtcagcatcgactctatctggctgataaaatgtggaaatacccatccagcttaggaca

SEQ ID NO: 6138 - DNA, 369 bp, Arabidopsis thaliana
gaggatcgagcatcctatatgaaagataatcaagccctggattccacaatgcagaataaccggtttcagaaaaaaatgtgtaatacaagctatcgatcatgaaaagctaagaaaccgaaattgtccatctcttaccaataagtttgatgtctgtattctcaaccaaccatttagccccatcggtcatgaacccagcaaagcttgaatcaaactctttcttagacataagccgcctaatatatatatcaaacacagagtgagtaagcttatgctctctagttgtttttaccaagattaaggtaataacacacactctcaatactgagactcttacttgtcggtgttggatgttctaaagagcacacgacg

SEQ ID NO: 6139 - DNA, 534 bp, Arabidopsis thaliana columbia
ctccattttgccgacttcccttgcctacattgttccattatgcactcaatgacaagggtttaccccttagacctgtaagttcttttcttaccttctgttgtctgttcttgtatgctagtattacaaagttgcaggctttctaatgatagtttttgatagttaatgcttgtaattcttgaatgtttgatgaacattttgactcttacatagtgaatcaatctagaagtgaccagatttgatccctcggtatatgactgattgcttgatgaacttcaggatcaaaacatttgcacatattacagtcgatacggcatctgcaaattcggtccagcttgtagatttgaccattccgtccagcctccatattcgacagaaagctcccaggccattgtagaacctcctcaggtcagtgcaaatgggaatgaaagtgacggttggaattgacaaccaaacattcaggagctgacataatttatacattttgtatctctctatcatgggtttgaaatttctttacttaggttatttatacta

SEQ ID NO: 6140 - DNA, 487 bp, Arabidopsis thaliana
tcaggtgttttattttatctttacttatcctataaatctctagggtttcttctatccaattcatttctcacctcataaatttttttttgttatctctttctctaagaatcaccgaaatggggtcaattcgtggtgaccttcagccgctttttgtcatgccaccacctcccctcgatgaagattgtgatgatatcttcaattctgacgaatcttcatgggggctgttgagcttgtcctgcttcggtatcattatgggattgtggttctttggttggtttctcaacttcagttccaatttaaagtttttgtcttttttgattatatgagaatctgacttatttcgtggattgaatcagcgtcggtttgtctgatttttggtgtttacggtagtgaaactgtctggcttggacctaactcgtccattcttgttaaaccaagttccatctttgtcaaaagcattaatgttgtctcttgtttttattttttt

SEQ ID NO: 6141 - DNA, 588 bp, Arabidopsis thaliana
aacgacgagaataccaaacagtgtgtttgcggatgaaaacccctctgggaagatttcctagttggaaagtttctagcaaaagctccgttcgttggaggaatacatgcgttagtgaacaaatatggacattaggagacaaaactgtgaagattgacgttattgtcatgaacaatacaacagtaagatttcgtatcaaggatgaccgtatgcgatcacgtgttctcagaagaggtatgtggaatttgcgtggtgttccggtggtgctgtcaaaatggactcccattgctgacatggaacaagaagaggtgaaaactatacccctttgggtgatagtgaaaaacgtaccaccaaagtatttctcttggaaagttttaaaggctataacaagtccattgggagtgccacagaaactccatccagatacagaagcatgcaagtcatttgaagaggcaaaagtgttagtggaagtggatttaacaaacaaactaccaaagttgttttcgtttaaatcagaaacatgtggggacacaattgtggagttcgtttatccttggctacctccgagatgtacggattgtaacaagtggg

SEQ ID NO: 6142 - DNA, 536 bp, Arabidopsis thaliana
tgctagtaggaaaaaagaattgtatcgataaatcgaactttgaagaagagattgcgaaatgctgaaataacaaaatctttgcaaagagttttactcccaaacagaatcaaaagctctctatccgacaaaaaagaatgaaacaaacattcatctcttcaagcttctatgactgggtactcgaaaactacatctttccctgtaagtttcctgtacacacccaccattgtctccagcttgtactcagtgtcgttctttagcttactatccaaaaatacctgcccaaagttaaaaaggaatgagacatgttataaaacagttttaagcacggggcaaagattaatgaatttgtaaacgtttttaccttcatgatcttggtgccatcaagacggtatctggttctctttcctacaatctcagcagggtaagcgacatcctcgagcatggcttcatggacagaagtaagagttctgttgcgtggtctctgaacagctgagcctttctttggtgggcgcatgattcttctggtagcaacaaag

SEQ ID NO: 6143 - DNA, 506 bp, Arabidopsis thaliana
ggctatatcacgcatgcagcgtatgcttccgctgaaattggtcttcccaccagcctattcaattattgcgtttgttctgtggaggccttttgtttcaaatagtaactctaactccagcgtccatgaagacactcaccgcctttatcagtctttgacaatggccttccatgatgttattaagcatcttcctttccgagacgtgtgcttcagagacacccagggactttatgaactgatagttgctgattccacagatgctgaatttgcgtcggtgtttgaatcgcatggattggatatgcacttgaaatctgtggcctttgctcctcttcgagcgcgtcttttcttaaattccctaattgattgtaaggtgccatcctctggttattcccatgaaggagttagtgaagcaaaaaaccgacatcagggaaatggaacaaagcttgtggacaagcttgtatctgtattagattgcctgcagcctgcaaaatttcactggcagtgggttg

SEQ ID NO: 6144 - DNA, 509 bp, Arabidopsis thaliana columbia
ttgaattgttttgatggccactctgttactagctattcttcactgccttaatcttcttgaaaatcttggacgatgattgaagaacatcccacacatcatcttcttgaaaatcttgtttcccgataatgttgtcacttctcaccctcatttttctgtttagtctactgtcttcatcaccgttttccgagacatatcgagccgcttcaagttcggaatttcttataattttggttcaagttcggaattgattttttatgtcataccgaaccaaactttgttacttctaaaccgaacctaaccgactcacttattccaaaattatatccaactttttagagaattgaagtaaactaattggattaggtttttaaggacaagtgatcggcaagcataaagatttttggaattaaaaattttgattttagaaaataaggatatatattttttttaaaatagggattttagaaaatagggctataaaaaataggcttgaaaattccgaaagaact

SEQ ID NO: 6145 - DNA, 1747 bp, Arabidopsis thaliana
attggcgtcaaaacgcacccacaaatagtgctcctctcacattcttcttaatgtttgtcaacgcccacttcctatatccacacaggtggatcaatagaggcattactggtggtgtgttgttgagatcgcctctcaagacattctttccctttgtacggcggagaatccctgtgagcgcggaatctatcatctccatgtccgtgttagacacggtgcctgtagactcccaggagtaaaagacgttggcaactgatcgctcaaagtagcggatcataggactctggattttgttgctcttggaccgcgccgagtttagcgatagattgttccctatagtggcccacaaatccttaagctcctctctgtcaaatctgggtttggttcccttttcactagggaaaccaaacagttcttccaacttcttgatcgaaagctgataccgctgttcatccactgagaacgtcaagaagcctaaccccatggtttccagctcaaagtctgtgagtccctcatacatctccacttgcagcgtggaaagaaactcgattgtctcctccttataggcagcgtaaaggtaagacatgagtgtctccagatgacacttctcgaacagatgctgcacgtcctccagtaaccccagttgggttaaagtctcatagcacggatacctcattccccagaagtcattcatctcaaagagtctgatatattcctccattgtaacctcgtcgggtttgttcagcagcttcgtctccttgcgccatgactctggctcatagtcagtttagatatcctcatcaatcagctcatatctactcgacatcgccctctttcctctggcgatttcagctcttctctgattacgtcgaactgcggacgttcaaattcatccctgaagctctcgtaagcatgttgcctctcggtctaacggaccaggactcagcttcatccacattgtaatcatggtccatagaggattctccactatagtaactcatgatgaaacctgaaaacagacgaaactcaaagataaacgttaatacgttagtaacaacaaaaccaaaaaaacacaaaccacacaaaccaaaaaaaggtcgagtaaaccggtcgagtttaccaaaaccggttttgatttattttttttcgttttgtggattgttgatcgagtggtttcggacggccgagtgaagggatggagcttgagaggtgaaaacgacaaggctatgaaggagctgtggtcgagtgaatcaaacggcgaggttgaggtgcttccttggagaaagaacaggaggtcgagtagttgttgatggtgtgtagacgtgatcgagtgacaaagagatggagagatggtgtggcttgacgaagccgagtgactgtgaaaggcaagagaggtgcggtcgggtgaagttgagctcgcggaagagaagaaaacggcgatgttgttgagtgatggctggacttgagagaagagatgaggcttggacggagaggtcgagtgaatgtaatggagggctcgagttgtgtgtattggatagagagcaggcggtgagaagcggcgaggttgagtgacacggcgaggtcgagtatatgaagggaaaagatgatggggtctagtggtgatggattgatgatgatggcgttgaagtcgagtggtgcggagaagaagagcttgatggtgataacttccggcgttgaagtcgagtgcttgtgaggaggagatggggtttggagtcgagtgtttggggga

SEQ ID NO: 6146 - DNA, 365 bp, Arabidopsis thaliana columbia
tctctccacagcaaagtccacagtctccagaatcgacgaaacccaacttctcagttcatcaacatccgatcttatattcttcatcgcttcattgttaacttgcactctactctccatcgtcaaaaccaatcctctctgtctcttcacagctttctcgtactttttccacatctggctaaaccattttcctgttatctcaatcggtgcggttcgatccagaggcaaccgcacacaccactggcggtgcgttcattgtggttgcaaccacagataagacaagaacagagacatacgcagtagcgaaaaacacgttagacaccgtcctcaatgtttttacattcctctgcttcttatcaagctttctt

SEQ ID NO: 6147 - DNA, 590 bp, Arabidopsis thaliana columbia
actacctctcgcgttaaattacttgctatagtcagtcatcctttagctgcaggtttcttattggtattagtaaactcacccagcttgattttttactctctctattacagatcttgaaaggaaacactcagaaactgctgaaggagcagacaaagtgagaattggtactggctcgagtggcaactactatgagaaagagagtataatcaaaacagtgcagacacctatcacttccatctcaccaattgtgcggtcacctggtgctgcaaaacctccacagctaagcggattaaagcgtccagcttccatttggagagacacaagatctcgtcaatctcctggaggacatgatcctcatgatgattttctagatactcccattgagaatgtcaaaagggtcgctggggaagaaaaacatgttcatgatgttgctaagaaagatgattcagacgacgagacacaggacatgaatcctaaaccgagtccatcacgacagcgaattcaaattgcagaaacgagtaaaaagagtttcaagcatgtggagtcagtgaggaaaaaagccgagagggagaatttgataggatagaatg

SEQ ID NO: 6148 - DNA, 529 bp, Arabidopsis thaliana
tgtccgctccaagtagtcttggatactctgagcaagagccaagaacataggctcatctttcaacctctcaacataatcattggtgtgaggatcaatgcactgcaaactcttgaaaaactctgtctcaatcttctctaagaatgcaaccaaatttcccgagacccgaatggttccatcgtatgccgctggctttgaagtttccttctcatcaggttcaacggtatcatccacaacaatgttatagtacttgacaagaatgtcaagtatggtaagcatgttaaccacacatttcttccagacatcgataggcatgtatccgctgagaccaccagaattcacattaaactctgctgaaataacactaaacaagatttcaaccttctgtgcaggagtcttggcgatctttgtcaagtccatatgcttctgcgcatgagtctcgccgggtttgagtttaaggctagaacttcttcttttgctccaacgagcagccctaatttctttgaacttcttgttgaccatgttccaagtt

SEQ ID NO: 6149 - DNA, 612 bp, Arabidopsis thaliana
ggtgtgtttgaatcacaaacctcggttagtggaaggaaccttcgtcatgccaagaaaagtaaaagcatcctcatccttttaatttgttaatccgatttgttaatttacttctgcttttcattttatgtttacgtcaatgtgtgaatatagactcatgtacatatttatgatatgtatgatatattgatatatagcttggtatggtgaggattatgacgtaacgtcggaactaggaacatttgtactcttacatgaattttggtcctgtctataagctagagatgtttaatttatagatttcggttatgtttcagaactttttcatctttggttttaatttaaaatcaaattgtatcattagtgttcttatataatatttgtattattggatcagtgtatcaagtttgtgtatagataagtatatataagtggtgtgacactaactcttgttttttgtttggttggaacagaatgtgaagtgaactttgagtatatggactacaaggtcttgacaaagaggtgcaaaggtccagcgtttccagcaaagaatgttgctctgcttttaaagaattgcatgtcttacgtgagcagatcacgacatgaatagtgatt

SEQ ID NO: 6150 - DNA, 1611 bp, Arabidopsis thaliana
gtatatccatataaaatatagttcttgaatgactctaacttatcactttaaattacgatttaagaatactctttttttataaaaaaaaaaaagaaattggaaaatgttataattcacaacaaatgcagacttgtgaatcgaatgtttagatagtttcttttatagacattatgcttgatattttgtaatattatgatcttttatagacatctccaaaaattatattgtttgactaaacatcctccagaaatcatgttgtatgactaaacaatgatgtgagagtcgaaactcacacaatcgaaattgtatttagggtttcttcaaagaacggatctttgtgagattctcaaagaacaacagaattgttgattactacggacggtgttcttgattttattattgagataaagatgatttgatcgtacaagtgtttagaaatatagaaaataagtgttttgttttcaaagtcagagcgtttttgatagcctgaggttgagagcgtttttttgtgtgtcccctttgtttgtcctttgcggcgctttatataggggtttggcaaaccgcctctcgcgatattctcggaagatttcaagatctttttcaattttcttttcagttacaaactgtgtgtttttcttgttgttttcttgatccaggtacatctctgctgtatgggaactcgatcaacaggcaatcagaacctccttttgaatgacaacatcgaccgcatagctcgcgaactcagagaaaggagaaacacagtcaaccttgtacctcagcaaccactcgatatggctgacgaacagaatcaacaaaatggcccttccaacattggtgctggagatgcaccacgtgatcaacgtcagaggaaaggaattgcacctcctgctatccataacaacaacttcgagattaagagtggtctcatctcgatgattcaggggaacaaattccatggtctaccaatggaggatccactcgaccaccttgatgaattcgataggctcttcaacctaacaaagatcaatggtgtcagtgaagacggattcaagctccgtttgttcccattctccttgggcgacaaagcacacatctgggagaaaaatatgccccatgactcaatcaccacctgggatgattgcaagaaggcttttctatcaaacttcttcttcaatgccagaactgcaagactcagaaatgagatttctggtttctcacagaagactggtgaaaacttctgtgaagcatgggagcgtttcaagggttacaccaaccaatgccctcatcatggctttactaaagcctctctgctcagcactctttacagaggagtcctacgcatcagaatgcttctatataccgccagcaatgggaatttccagaacaaggatgttgaagaaggctgggaattggttgagaaccttgctcaatcaaatggcaattacaacgaagactgtgataggaccgttagaggaaccgttgactctgatgacaaacacatgaaggagatcaaagtgctgaatgacaagctggacatgattcttcttagccagcagaagaatgtgcacttcattgttgatgacgagcagtttcaagtcaagatgagggggt

SEQ ID NO: 6151 - DNA, 568 bp, Arabidopsis thaliana columbia
gtgtgctctaaagaaggcttatttttgactgcgcactcgacatttcaccgtgaaactccgccatttgttggcgcacattgatctgggtaacgccaaatcaccacattcaaaaaactgccgatgatcaatcctccgacggttgccaggacgggcatcgcgtggggtattgctgaaaaacatcacaaagcatggttaaaggttgtttgttgtaacttgctggatgcggcgtaaaacgccttatccgtcctacgggtgtctgccagcgcaaataatcgcggctttccccgtctgtaggcccgataagcaggcgcatcgggcaaatgtgttaacccggtgcgccttatttcatgccggatgcggcgcgacgccattatccggcctacgggcttactcggcagacatcttatgctcggtaacctgattaatggtttccggtccctgttccggtttcggcagatcgagtgacgcgagcgtgttgtaagccgactggctcacacctgcctcgaagctcatctcgctcgcccccggcagcatggtaacattcgcgcccggattccatttcttaaag

SEQ ID NO: 6152 - DNA, 1094 bp, Arabidopsis thaliana
catataggagcctcaaatcgtccgtctgttggatggagaagcatcatagctgccaaacctcttcttgtctcgggacttcggaggaccataggttcgggaatgctgacccgtgtatgagaagatccatggattcccaccatccttgtgcggtccgcgacgagcattcttaacataagagatcccctactctatgtaaatgtttaatcgaccaaaacacaaaatttgtggaaactagaccgtctccaagcattgatcgaccccgttgatatttcacctcatttcagagattcgtccaaacggtatctacttgagtgatggttatagctggtcttatactaaatccggtaattgtactgttaagtcaggatattgggccgcacgtgacatgtctcgtcctacttgtgaccccccttttcagggaccaggtgtttcagcacttcaagcacaagtatggaagcttaaaactacgcggaaacttatgcatttcgcgtggcaatgtatctctggttgtttagccacttgtcaaagattgacatatcgtcacaagggtacatataaaggttgcccccgatgcagattaaacagaagagactatcaaccatctccagtttcattgtccaccctcgagacagatttgagcattatcgcatattcctacctcacagaatatttttcctagaaagtcccttttctataatttcgatttcttttttggcgtggcgggaatttggaatcggagaagaagtgttggaactctttccatggatactttggtatatctgaaaaagtagaaatcgcttctagaactttagaaaacctcttgttgaaactttaactttggctcttcaagaggcagatgtttggaaacaagcaactctagcagaagatgcacccatacgctcaattcctcccctaagttcttctcaaatcccgctaacccagctccctgaatgtcaacttgatgctacttggcatgttggatgagctcttgttggacaagacttactcctccatcttggcatcaagagtactcatcgaagcttatcaccgtttcatgcagaatttgactttttgctaagggcaatagatgcatg

SEQ ID NO: 6153 - DNA, 933 bp, Arabidopsis thaliana
gtcgtttgctttacctcatttgtactcaacaatttcgagataagaataaaagaaaattttgatactcaatatcatgtttcgcaaaacaatcgtttccactacgatttaaaactcattcgtaatcttacgatacccaaagcccaacatccgaatgttggcggatccactttgtgatctcgcttccaaaaagtcgacagtgaactttacctataaaaacacatcacttcgacttcatcggagctcacctactacaaccatatctaactccttccttcgctatcaacacataacaaactaaataaggaagaaacgaaggtttcattcgcgatctggcgataccacaagcccagctcccaaaatctgccaggtcccttgtgtgacctcacttcaacaggttcccgagataaaccactcaaacttactcaagtttgaacctacgaagaatataccatatcacatccgaaataacttggacttaaaacaagtccaattattattcggaacatgaacaaaacaaggtgatcatacaccaaaatcgacgaagtatcaacacacgaataaaagacaaaatgtacttgttaaaagggataaaagccttcctaggcatcaaagtacttaactgaacaaaggataaaagccttcctaggcaccaagttcaaaaagaaacaaacaaaaggatgaaagccttcccaggcactaagtccgaaacaaaaaacacaaaagcctaacaggaggagcgtaagtgatcactctttcagttccccggccggcgtggcaaagacagtaccagaaccctccgcgagacctctaggaaatgcatctttgttgctcccgaactcatccaagccgattggcgttccttgcttgtcgacgtccatcggacgtaccaccgacatgtccaaaaccggcgggatatcaacttgcttagagtga

SEQ ID NO: 6154 - DNA, 1562 bp, Arabidopsis thaliana
aactgttaaggatcagctccatcaccgagacaaagtaccccgactggctcgcaaatcccgtcgtggtaaaaagaaaaacggcaaatggagagtctgtgtagacttcactgatctgaacaaagcctgcccaaaggacactttcccattgccgcacatcgatcgcctcgtgtaatcaacctctggaaacaagttgctgtcattcatggacgcattcgctggctacaaccaaatcatgatgaaccctgaggatcaagaggaaaccgctttctacacagaacgcttcgtcaacaagatctgcgaaaattatcacgcacgcttcgtcaaccctgatgccattcggactcaagaatgccggggcaacttatcaacgcttcgtcaaccagatcttcgcattacaaattgggaaaacgatggaagtatatatcgacgacatgttggtaaaatccatggaagaggtagaacacataccccatttgcgcgagagtttccagcagcttaacctctatatgtcgatccggtgaatttctcggatatctagtcacgcatcgcggcatcgaggcgaatccaaagcagatcgaggcgttgttaggaatggcatcgccacaatacaagcgagacgtgcaaggccttaaccggttcatctcacgatccaccgacaagtgcttggccttttacgatgtggaacaagaaattcgaatggactacctgaaacgaagaggctttccaggaactcaagaaatacctggcaaccccaccgatcctcgcaaaacctgtaatcagggaaccactctacttatattttgctgtatcggacactatagtcaacggagtgttagttcgagaagacagaggcgaacagaaaccgattttacgtctcgcaaaaattcaccagtgcagaatctcgctacccgcaaatggaaaaactcgctttagcagtcgtaatgtcggctcggaaacagcgaccctattttcaatcccattccatcgtataatgggatccatgccgtccgcgctgtcctacacagtccaagccaatcgggatgcctggctaaatcggcaatcgagctcagcgagtatgacatcgagtattggaacaaaacatgtgcaaaatcccaggtcctagcagattttatcgtcgaattacccacaaaggaggcccgggagaatccgctcgatacaacttggctattgcacgtaaacggctcttcatcaaagcaaggtttgggcgtgggcatccgtcttacctcgccaacgggagaggttctcgagcaatcattcagattaaacttcaaggctaccaacaacgtggctgaatacgaagcgctcgtagccggactcaatctagttcggcggctagagatagagagaatccgagcttttgtgactctcagctcgtcgcaaatcaattcaacggagaatacacggctcgggacgaaagagttgaagcatatctggctcatgtacaaaatctggcgacgatttcgacaaattcgagttaacgaggatccctcgaggagaacatacatcggtcgacggtttagctgcatctgcctcaacatctg

SEQ ID NO: 6155 - DNA, 654 bp, Arabidopsis thaliana columbia
tttcatctcggaagcatcatcctcactgtggtccgagggattcccaattccgtgacgtctactagggaacaccgtgaaaacagcaccggagataactccgatcaccggaggcaaaaccatgagaaagatcttcccagcggagcaaagccaggatagaaacaattcacggtgtttgcatccaacaaggaaataacactgaacacgataagagagaagaaagcgtgaacgaaatctccaactctaagccttttcgaagacaaatccactgaagatgaatctggccaaagacccttcacggtggcaactccataatgaacgtaaccgtctcttgttcggtaactatcggtgaagcaagtgaagcaacaagagaaggcacaaataacgatgagaactccggttaagtatttgttgatgaggaggcaatgtccattgttggttaggacagggtttaaaaattggaacaagaagacggttccggtcgggaggagcttgatgaggtctctacgcctgaatatgtccggtctcttatggctttgaatgttttcgacatttctttgttcttcttttgtaaattatatgtttagttgtcgttatagtgtccttgaatgtgaatcataaaagtgttgtttgtcgagtgtttataggatgagagag

SEQ ID NO: 6156 - DNA, 1369 bp, Arabidopsis thaliana
tcaatatctttatgttcatcccatcatgcaacttccaatcgaagaagtaaagtaagttcaagagtcccaattcgacggcagcaatccccattggcatcccgggacatatccttcgaccggacccaaatggtaagagctcgtaatgttgtcccctataatcaacaaagctatccataaacctctcagggtcaaactctttcgggtttgtccagagtttgggatctcttccgatagccgaaacattgaccaagatccgcctcttgggaggaatatcatacccttgaactttgatgtgagccattgtgtctcttggaagtataagaggagctgccgggtgtaacctgaatgtgtctttgattaccatcttcaagtaaggaactttatcgatatcttcctcggtgagtctcgccttattgctgccaagttgttctcggatctcgccttgaactttctttataagtttcgggtttttaacgagctccgtcattgcccatatcatggtgagggcccctgtgtctatccctgcaagaaatatattctaacaacccacaagaaaagtaagttaaagatttcgatccaattacaattttaatgtgtttaaataactcttgattaccgcgagaaaccccttaatatgatctattatgagctctaaggaactatcttttccttctttatgaatcgcatccaacattgaatcgatgatgtcttcgtgctcttttgatcttcctggatttaaatgatcatctatgacatgttgaaacagagcatcgagcttgtaaaaaacatcgttgagtctcttgtgttgtccggaaaaccaatcaacaagccatccaagtccggcaacagggaagaaatcagaacaagtgaaacttgctagggcagtctcagcttcgaacacgagctcttcgatcttttctttatcgataaaattgctctcatgaaaattctgtcctaaggcaactctgaaaaagatactagcggttagccagaaaagtgatttgctcaaatcgaccggagagcgattaaccgcggattccgacagttgcttgaccagaaagttacattcttcctctcggatatgcctaaaggactgaacctttttcaaacagaaaagctcacgcagggcaaacttacgccgcgccttccactcgttaccgtatggcgtaaaacagacatctttaaaatcccgcgagagtaaccttgtcccgacaagtttaggcctgctgcaacagtctaggtcatgagttctaagcacttcttcagcggcttctctcgatgagaccacagttatagggacaaacccaaagtgaagaagcatcacaggtccgtatctttcggcgagatgttgaagtgacctgtgaggcaa

SEQ ID NO: 6157 - DNA, 786 bp, Arabidopsis thaliana
ctaatctctgcaacaccaaaagcgatattaaagcatcttcgattacacgaatcacaaaatttctcagtaatacatatattagttgaagagagagcgtagaagtaataaagcctacctcatctttgagcatgtgaagcaaagtagtttttccggcattgtcgaggcctaaaaacaagattttcgcctcttttttgcacaaccctaacgaggccaagattccatagaaccaatcgaataaaaacatgacgtcttcttcctgatatcggattataatccacacaacaaccaaaaaaatcaccagaacagaatcgggagacagagagagatgaagaacagaacagaaaaccaaaatcaaagtttcgtttcgttgatgaagatatagttgtatgttgtaacattagtgtatatatatgcaaacaaaaaaagaaattaaaaaacacgtgggtaatggggactggtaaattgatgcggagccttgtgattggtagtcatcatcgtcattcgatcaatatgaaccgtcggatcctagaacttgtcgttgcgatgttttttattacgttaaactttttaagattaaaggcttaataccacgtggcaaaaccttaatggccaggacccaggagagtttatttcctccacaagttattattatgagccgtctgaggaaagctacccacatttaattcaaacacataggatacatttttcttattgttcaacagacatgatcaaagtgtatatacaatggagtatttaactttgaaacaggaataacataacatgtaa

SEQ ID NO: 6158 - DNA, 1878 bp, Arabidopsis thaliana
caatttcctcctcagcagtttttatgtcaaagttcagaagttttaccgcccacattgctttgtactcgagctcaacaggtagatgacatgattttccatagagaagattgaaaggagttgtaccaatgggggtcttgaaggctgtcctgtaagcccataatgcatcatctagctttgcagatcagtctttccttgtaatcccaacagtcttttccagaattgtttttatctccttattggagatctcaacctgcccgcttgtctatggatgatagggagtggcgaccttgtgctttactccatgcttcttcaagaggttttcaaaaaccttgttgatgaaatgcttcccgccatcactgattactaccctgggaactccaaatcttgggaagattatggtcttgaatagcttcagcacaacttttgcatcgttggtaggactagcaatagcttcgacccactttgatacgtagtctacgacgaccagtatatatttattaccgtatgaagatgggaatggacccataaaatcaatcccccatacatcaaagatctcaacttccaagattggattctgaggcatctcatttcttctgctgatgttaccttttctctggcatgaatcacactttgaaacaaacttctgagcgtccttaaacattgttggccaccaaaagcctgcttgaagaatcttggacactgtcttgaacgtcgcgaagtgaccaccatatgctaagccatggcaatgcaataggataccttccacttcatcttctgagacacatctcctgtaaatcttacctttacagagagtgtaaagataaggctcatcccagtagtaatggtgtatgtctctgaaaaacttcttcctttcataacttgtcaggttgggaggttctactccgcatgccaagtaattgacgtgatcaacataccatggagattctccttcaaaagcattcagttggtgggactctttcccagtgtagctccttccgaagaactctacaaccatgagctgctcttctggcattgaatcgtctatcggaaggggttcttcaattctcatccttgacagatggtccgctgcaccattttcaatgcctttcttatctactatctccatgtcaaactcttgcaataaaagtatccatcttaacagtcttggtttagtatccttcttggcatacagatgcctcaaagctgcatggtctgtatagacaaatacctttgatccaaccaaatagcttctgaacttctcaaatgcgaatacaacagctagaagctccttctcagttgttgcatatcttccctgtgcgtcatccaacgttcggctggcgtaatatatgacatgaagcttcttgtctattttctggcctaaaacagctcctactgcgtaatctaatgcatcacacatgatctcaaatggatagtcccaattaggcgctcgaacaaccggagcagataccaaagcatccttgatggtttggaaggatatcttgcagaagtctttaaaaaatcttctgtagaacccagcatgaccaaggaaacttctgatgtccttcaccgtttttggtggctgcaactgcatcatcacttcaacttttcctttgtcaacctctatacccttctctgatatcttgtgacccagcactatgccttcattcaccatgaaatgacacttttcccaattgagaacaagattcgtctcttcgcacctggtcaataccctgccaagattcaacaaacatgaggagaaagaggggtcatagaccgaaaaattgtccatgaaaacctccaccatctcctcgattaagtctgaaagtatagaggtcatacacctctgaaatgttgtaggagcattgcataaaccaaatg

SEQ ID NO: 6159 - DNA, 487 bp, Arabidopsis thaliana
taaagagaactgacggtattactcagcatcgatttcaactgcgtctgaatcgtccgcagcgtggagtcgccgagcagtgcaccattgctagaactctggctatcagctcccgcatctacggcggtgtatttggtcaggctgctgaaggtatctattagcgagttgtaggcattcacccagtctttaatcgccgtttgcgctttggaggtgtcctgagtgatggttagcgtctggttgcccgtggtgacatcgttcaggttcagggtgatgttttccagcgcgtgcgctgatggtgttgctgctgttctcgatggcgacgttgttgactgtcagctgcgcattctgggcggcaaccgagacctccataccggtgcagctggcactggcgtcatagcccataaaactttgtagcgcatcatcatggcgtgacgagagtgtcatcgcagtatcaaggctggtgtcatgtgatgtgactgtcagactgata

SEQ ID NO: 6160 - DNA, 586 bp, Arabidopsis thaliana columbia
gtcgtgtgtttaatcatcacatgcaggtataacttattctcactgaaatttactccaacctctgtgttagatatggttaagtctgattgtacatatctttctttttctttctgtctgctttctgactcagcttttggagctcggcaattattttgctggtgatcgcgatgatcattattgatctcctggtaattcactctcattgctactcatgagaaaaccgataactgttttcgtacactcaagttactaatgttgtaccctatgaacacttgacttgaaaaatgctagggagttatggcagtctttcatatccagctaaacgcactatcggttgtaaatctaatcatgtccgtgggcatagcggttgagttttgcgtacacataacacacgctttctcggttagtcccctctctgtctgtactagcattatacacaagcaatttgctattgtcactctgactgtacgaaatgctcagataagcactggggacagaaaccatcggatgaaagaggcgttgggtgggatgggagcttcagttttcaggtattttgtcagtcttgaacacgactaatgaacttaaa

SEQ ID NO: 6161 - DNA, 1551 bp, Arabidopsis thaliana
tggagttcctagggtagtaatcagtgatggtaggaagcatttcatcaacaaagtctttgagaacctcctgaagaagcatggagtaaagcacaaagtcgccaccccttatcatccacagacaagcgggcaggttgagatctctaacagggagataaaaacaattctggaaaaaaactgttggaattacaaggaaagactggtctgcaaagcttgatgatgcactgtgggcttacaggacaactttcaagacacccattggtacaactccttttaatctcctctatggagaatcatgtcacctacctgttgagctcgagtacaaagctatatgggcggtaaaactcctgaactttgacataaaaaccgctgaggaaaagcggttgatccaactcagtgaccttgatgaaatccgtttagaagcttatgagggctctaaaatctacaaggagagaattaagcttttccatgacaagaagatcatcactaaggattttcaggtctttccaggaaagcttaaatccagatggtctggccccttctttgtcattgaggtccgtccttatggagcagtcactctacctggtaagagtggagatttcacagtaaacggttaaaggctcaagaagtacttagcagatcaaatccttccagaggtgacgtcggttcacctcaaggaacttcttgatgattaaaggagtaaaggagtcaagctattgactttaaacaaactcacttggggggaaattctatgactatctctgtaaataaacttttattttcttgttatttttgatttgttttagttgtgtttttggttttcaggaacaaaggaacgatgtggagatagagtaaaaattcaaaacttttactctacagaagaccaggaaatcgagtgtatagcatggtggagtgcaaaattttgaaatttttttgttgcatctggagaccctgaattcgagtacataagtcgagtatatgtgatgtttaaaacccaaaaaaatttaaatcatcattatactcgaccaacaggagctacaaagacttgcagggattttgtcaagtttacagtagatttccttctgttttcccagtcaacagagtgtggaccacacgctgaagataagatggagagagaatctcaaactcaatttccaccactccttttgaaattttactcgaccaacctctattcaattttccatcactcgaccgcaagaaacaattctctgaaacctaagccgcactcgacctcgctgaaaccaatcgaccgtcgttggagagaattactcagccgccgcagtcgacttccaagtttcactcgaccaccggttttgtttcaccgtgaatcactcgactctacgccaccgacactccaatttttctacttcaccacaaatcgccgcctctcactcgaccacttcacttcaccgtcaaagtctcgggaactactcggtaacaactacagtactcgaccgtcgacttgtggtttcgtccttgccaattccggctcaccgaagaagtactcgacctctggagccaaccactcgaccg

SEQ ID NO: 6162 - DNA, 625 bp, Arabidopsis thaliana columbia
ggtatgaatgagcatccaaatgtctagtactactaagaaaggccacaacatacctttccatgtgccatagcaatgtcaatatctggaaatgcttcttcaagaaaatccatcacttcttctagtcctgataaaggagaataaagtggtaaatcgataatggaaaaatgtaaaggctaacattgagaaaaaatattccatggtcaaaaggtttttctgattctactagtctctgagttacgaccaagagcaaaggtagtcatattaagagataacgtagagaacgacaaatcttttaatgcattctacctttaatccgaggcaagacataaaaaacttggccaccacgatccagctcattttttattgcttcaatcaccttttccttacggaatgacgaaagatgggtttttattggaatcctctccggaggcggtgtggagattaaactaaaacaaagaggaaacaaaggctcattagtctcatcaaattctatcagtgagcatataatctgaaacacatcatgtcgcaacctagcatcccggaatccagtcaaagctaagtacagtgtccttggtatgggtgttgcggacaatgtaagcacatccacggatgttttgaaagatgc

SEQ ID NO: 6163 - DNA, 515 bp, Arabidopsis thaliana columbia
aactgtaaccaagcatcctcttagtttttagaaaacttccaaccaaaattttaactaatctgccaaaagcttaaaagaggagaaggcttttatagtaacacctctcctgtgaattgcacggtggtaaacttgttgtcaatcccagatgttccttcaaaaacctgaaagccatagatggattaatcattgagggcattgatctctatagcatgtgcattcatcacctagattcaacaaactagtgttatgcagaattaacatttacaataatatgaaagatcataaacctggacaacagctttctccccatcaacctccaagacctgaccacgtctcgttgatccatctcctaagcgaatattaacaatctcctggtactttggaccctgatataataaacatttcaacaaatctatacagtgagtttcctgacaaatgtaaaacaagaactctactattcaatgtcaaaaagcttctcattttctataccttcactttgtcaaggatgaccaaag

SEQ ID NO: 6164 - DNA, 612 bp, Arabidopsis thaliana columbia
tcccctttaggatttcatttctatagcataatgcattctctggaaacttatgccagctttaaggtataatttatgctcataatttcctctgcaaataatatccaggaatcatatacaagggtatccatccattcgcattttccgcaaaggcagtgatcttaagtaagagaaagtttaattgttcatattatgcatgaccatcatttactcattctcctaaatttattttccccacttttctttcctctgcttaattttcttgataatagggatgacaatgcacaccacgaccatgaatcctactatggagatcgtgatacggaaagcttagtgaaggtagctgttggtctaagtttcttttcaattttttttccgtgccccttagaaaagttagactagagtcgctgtttgcatctcatttgtagcttgtttctgaaaatgttaccttctcctatagatggtggtgagtctggttgaaccaattcatctagagccccataatctagcattggaggacaaatcagacaattcatcgagaactctaaaaaaggcacgttctacaggaggatgtcgagttgaaggatacatgcgtgtgaagaaggtatgattggg

SEQ ID NO: 6165 - DNA, 584 bp, Arabidopsis thaliana columbia
gattctaattcttgtgataccgaaaacattggtggcgagagagagatggtgaaggagacggtgacggtggcgaaaacgtgctcacactgtggccataatggcataacgcacggacttgtctcaacggcgttaataaggcaagtgttaaactgttcggcgttaatatatcgtctgatccgattaggccgcctgaggtaacggcgttaaggaagagtcttagtttgggaaaccttgatgctcttctcgctaacgatgaaagtaacggtagcggtgatcctatcgccgccgttgatgataccggttatcattccgatggtcagattcattccaagaagggtaaaactgctcatgagaagaaaaagggtacgtaatcttctaatctcatcaatttgataatctaaattcaatgaaattaataagaataaatcaaattcagggaagccatggacggaagaagaacatcgtaatttcttaatcggtttaaacaaactcggaaaaggagattggagacgcattcaaagagtttcgtgtcgacaagaacaccaacacaagtcgcaagtcatgctcagaaatattttaattag

SEQ ID NO: 6166 - DNA, 634 bp, Arabidopsis thaliana columbia
ttagctggatcaggaaaataaaaactacctgtatcctggaaaacatttttttccaaaaaacctttaggtgtctggacttcagtctctagagaaaagcttgtagaattgtgctttatcatatcaacgagggcatgtaacaagagctttaaaaaaccagactgatcaagtgtctccgtgatcagctgcttcttttcctttgcagcacataagagcagcgctgtgctcccaactctcacttctaagctggatgcattcactattctatcagccagaaccaacattgacttgggtcttgaaactataagttcactgagcagaaactgttgatcagagcaaagcctggacaaaacttctattgccttatcttgcacaagagtatggccttcggcaaggcattgcacaagagtctccaggcttgatggcacttcggcaagggcaatccatggagggtaagagaaattcccccactcttagtctttgccaagagcgcaactacttctaatatgttgaaagcatctgcgctatccacatcaattgattttagagaatcaacgagtgaaagtatagcaaaacggcactgagcacttccctttagcacatcacaacctggaaagttctttaagtactgatgaag

SEQ ID NO: 6167 - DNA, 299 bp, Arabidopsis thaliana columbia
atttcatgcctaatggaagcttagacatgtacttgttcgacgaaaaccctgaagttatcttgacttggaagcaaagattcaaaatcataaaaggggttgcttccggtttactctacctacacgaaggatgggaacaaacggttattcaccgctatattaaagctgcaaacgttgtgttggacaccgtaatgaacaggacgagtaggagatttcggtcttgctaagttatatgagcatggatcggatccgggggctacaagagtggttggcacatttagatacttagcaccagaactcac

SEQ ID NO: 6168 - DNA, 579 bp, Arabidopsis thaliana columbia
aatcaatgttgcttatcttaccaaatccttgacaaaaatatcaagagcagagtatggtgtgtaatcattatccagcatgtgcggaacacgattttcaaacatcctgcaagatgaaaaataggagccattaaaggctaataaacgcgtttctcattaaattgtaaaagtaaatatcaacaaacaagagcacagggtttcattaagacaaggctttatgcataagatagttaacatttttcagagcatcagagtgattcacttttcatcagaaatgttaagacgttgatgctcagaaatgtaacacagaattttccaaagataaaagaaaaaaaaacatattccataaaaatctacgtaatgcttaccaagatgttccaccgctgttggaaataacattgaatagctttcgagtattcagacctaaccgagctccaaatgccattgcctcggcagctgatgcgatatgaactcccgcaagcaattgattgaccatttttacacactattgaacatcaaataaacaagttacaaagaaagtgaatgtgtccatgtcagtaaataaaggatcgtgatggtaat

SEQ ID NO: 6169 - DNA, 652 bp, Arabidopsis thaliana columbia
tgatgatagttattaatgacactattttgattttatgttgaacaatgcagatagcagcaatttgccaggaagctggtatgcatgcggtgcgaaagaacagatatgtgatactacctaaggatttcgagaagggctaccgcgcaaatgttaagaagccagacacggactttgagttttacaagtgaagagaaagcagaagtggaaccagattatggctgttgttaaaattccagtgtgttttgagaattattaaggacatggaatcaaatttgcagttaaattaagaactaagttgcatctcctaatttctgtaactcgagttcacatttgtttttagtctatcagctttttacagtttaatgtataagaaaaactggggatggtgtccttagaattgccagagcatggtaataattatgtctcctctgattaaaaagacaacaaaaatagtgatgatattaggagcacgctgcactgctcaatgttcatagaaaacttcagacttcaataatgcctaaatgtgttggatcttgttttggagttggtgatagatgatgaaatgaccagtattactattacatagtaccgcaaatcaagaatgatgcaaatcaagagaaaacagtagcaagagtggttggacaggtaagactat

SEQ ID NO: 6170 - DNA, 561 bp, Arabidopsis thaliana
tcttacattgaatattaggaatacaaactttacacaatggaaatccgtaaagtgattaatgtggcagctaagcagcactccaattctatcttcagaacttgaaacataaaaaatgcgtatgttgctaacatgaagatttgcagatagtcattgtgaagtcaatataagccatactaagaaatgacaagataagttccaaaaaagtaaaactgataaatggttccaacttattcctcttctgttcccctacctatggaattttaacaatcaattcaaacaagcatgtaacgattgtatccccatccccagtcacttcctaaagcgcaaatgcaactttaggagattatgggttaaagcaaaaaagaaagttagcagagcttaccattccagaaccaatcaggtactgaatagtcttttcaatctgcctcatgtctacccgaccagacagataaagatacttgttaaggagatcccatgtctattccctcagcagtccaagcctggtccatatagccaaggagtaggactagctcctgtctcatcctaacaccatccaatgtg

SEQ ID NO: 6171 - DNA, 384 bp, Arabidopsis thaliana
atattgaagaagaacggtgtgaacagtgaaggtgtttgctttgataccaatgcaagaaccgcgttggcctttgtgactttgaagaaagatggtgagagagagtttatgttttacaggaaccctagtgcggacatgctcttgaaagaatctgaactcaacaaggatcttatcaagaaagctaagattttccactatggttccattagcttgatctctgagccatgtagaacagctcacatggctgcgatgaaaaccgctaaagatgcgggagtcttactctcttatgacccgaacgttcggttgcctctattggctgctactgaagctgctatagaaggcatctaaagtatttggaatgaggctgatattatcaaggtatgtatg

SEQ ID NO: 6172 - DNA, 569 bp, Arabidopsis thaliana
taatcatcttggtagcgtatttttaatcaagttagtgtaaactaagagttgcgaactgtctaatggtgctcaatgaatggaggatacatcccttgtagaatgttctttcttcgatgagacatatatgtttttttccttatagctccggaaagttagagtgaatgtttgagagacaccattatagtggcacacaactgatgctgtctgtatcctcccttgctgttgcatttaacgatactacctttgtaattcctttacccagggatggattgatgtcatacaaacaatttatccaggagttggaagatgatatattgccatctgaagctgaacgcaggtatgatcatttctgctacttagtcttgttacttaagcaatttaataataaagctgcgggtgtaatgcttttttcctgatgcagatatcaagaatacaagtcagagtatatcacaacacaaaaacgtgccttttttacacccacaaagaggaagactggtgattcactatcttttttcacttttatatcttctgggatatctgcaagctagcctaatacatgtgtactatgt

SEQ ID NO: 6173 - DNA, 396 bp, Arabidopsis thaliana
gtccatggcactgtcagagaacctggtactgaatcttcttccttttactctcttcctctgtaaattttccgcatttattactctgatgtctcgttgacttgtgtgtgcgtgcgaagtagaaagtctgttcccaaagtttgatttttttcttaatctactttctaggtgtttagattcgctagtttctgttctctcgacggataaaagccttagcttttgatttttgtttgttgttcccaaatcattttagtttgcttctcttcttttagtgtagttgttgttgttctgatgaagagtttcgcatggttcttgttatagataatgaaaagtatgctcatttgaagaagctcgagaaagctggtgacaaactcaagctcttcaaggctgatttgttgg

SEQ ID NO: 6174 - DNA, 545 bp, Arabidopsis thaliana
tatcttgcgtttcagtaatggatgatgagcatctttggaggatacatttatgtccttggatctgctgaggattcatctgattttgttgccagtagcggaacaagttgggtctccaaatttggtttaaatccatcactgttcactgtgctaaacaatacacgaagaacaaaacagcatgaatgagcttcaaaacataactccacttgatggcagatgcattagcctaaaacttcactagacaagctcatgaaagaaatttaccgatcaagatgaatggccaaagtgggtacccttagtaatggccttttcactttgacaagcctatgaacaaacgagccatcactggctctcacaattgctcgccccgcaacacttaagtctcgatcaaaccatgtgtgccacaaaccacctccataagtctgaacattcaccatgagatagccagacttggatgaagcagacttcggtttaagtttaagacacgggctatcggtgtgagcagctatggcatgaaaaccattaccaggcacatacctacaaaatga

SEQ ID NO: 6175 - DNA, 567 bp, Arabidopsis thaliana columbia
tttcctcgctacctggtgtttctccttccattgttgagtctctaaccttgtggcctcgagatctgtttctgcaatcacaagctgctctttcatttgactaaaatccggagccagctatttcaaacccaatgccaaataaagccattgcttgtggagtatgaaggtatatagatgaactaggtgctgctcttgagggaggacatgaaagctgagtgggttgttgtgaaaggccttacaaggacgtagtatgtcaaatttgttgataagatccttattgggcttggcccatagacaaaagtaattttgagccgaaaagaggaatctttccactctaaaccctatgcgtgactcatctccgtctctcacagtaataatcaagtcagagccggcgacgttgccgtttccgccgttggaggtaagccttatctctctttctcatctccttctccgatttccaactctcagataatagattggcggttcatggatcccattgtttgatttcggaactgtgttagcagctaataacctagactatcaaatctgatacattggaatttatatttg

SEQ ID NO: 6176 - DNA, 868 bp, Arabidopsis thaliana
cagataatttctatcatatttttcaaatattgtaaccttgtttttatttctttttgccaaggttactctagattaggtattgcttttgtaatacttccacttcatttttaatgatatttacaagtttagcaaaaaaaaaaaccccaacattttcttaacatttagatattctacgaaatgattccatataaaattgtatgggtttcttaaatttgtctttcacctcaagcatagaccttgtttcttctagcatgttctccagttgttcaacattggttaacagggttacaatctcgtggtgaggtgaacttgcgtcgctgacttgttcatgatgttgtggcattggttcattcccgacctcttggaattactgaacctctgcaaatggaattttataaagagtcacattagacatcataatcattgttcatatgatgttattagttgattccaacatgataatgcaggcttataacaagaaataagtatgtaacatctgaaaaaataatgcaactttggtacaatccgcaacaaaaataataatcagaatatctacctttttcaagagcatcttgcaaggccaagaaaccgtcgatggcttctgttaatgaatccagttcctcggagtaacgattcgtcgtgtttatcgactctcctccttctcctctgattatcatttctctaaatccataccagctgaaaaaccaatccctgccacaaacctagaattataaccactactccctagtatatcaaatcatagaaatcaatctctcgtagatcagtgatcacatctccaaattggaacaaattttcacaaccaaattcttcggataatcaaaaacttaacatgttcactattcgcgaa

SEQ ID NO: 6177 - DNA, 1233 bp, Arabidopsis thaliana
cagcttccgttgatatcagaaattagatcctgattagagtcctgacttgacatagcttcctctaatctttgcctatttgcttcaatcactttttgactgttttgatgcttatttcttgtccagctgatgatctctgtccggcatctatccagcttcgccttaacatcttcttcatcattgagattccaggcttcaagaatgagattagagatctcttcattagttttcaatcgacggtcatatctgaagacccctttcttcttcttctttgtgagatcaaagtgcgtgagaaggagacgatgatctgagccctcaaaccgcaagtacacacaccgactggcagggtaagattctgcccacactccattagacatggctctatctacccgacaatggacaatatggtcatgtctcttgcctctccatgaaaagaagttaccagagtggcgaaggtcaaagagatcgcactctgccataaaggaccggatgtctacaaagattccttcatgtctctctggaccaccttgcttttcagaagagtctatgatgtcattgaagtctcctgtaaggtaccaggcaccttctctgctagtccccaaggcggtaagttgattccagatttcctttctttttgttctatcaggctctccataaagaaaggttgcaaagaaagattttccttctgcctttattttggagtctatgaagttctgactagttgacaggattgtgacttctaggttttgcttccataaaagggcaagacctccaccccctgggaaatgaggggaactaagcagtgggaagggtagttcatccagctgagagatttgagagtagcagcatctggatttttggtctccattagaaagaggaggtctggtgagattttggagtgcatctcacgcagcgctggcctgttgtggggttcccaagtccacaacagttccagctcaacacttttaaggaagctgagctgatggattgtgaaaatccatctttgccttcgaccttgcaggaatcaggttaatccttggtgcatcttgtcctggggggttagaaggttcaccacattggagaattagttgttgtttggctttagactttctgccacgctcagttccaggctgcttttgggtggtagatctctctggtgtattctttcttttgggagaattctggatcaggcttttgttgcgtttactggattttgctcccaagagtgggacaggg

SEQ ID NO: 6178 - DNA, 394 bp, Arabidopsis thaliana
cttgttgatttaaacatttctcggtcactaaccacaaaacaaagactgatttttttcttttcgtttccatctccatttcgatcactccttagattctatacatgtttgtttccaacttcctagtaacccacataccattctttgatcgattatttcagataaataacatatatatacacaaacctaagagttgataagtaaatcatactttgagatagggttttatcatggttgctccggttggatcagagatgagatgattgatgagaccttttctcaaattgtttggtgaaatgacgaacatgtataaagcaaagagaacgagatcttccgatgttaatgttgatcctagaaacccttgccacattctgagtaagtgaaagaagaatcaatt

SEQ ID NO: 6179 - DNA, 479 bp, Arabidopsis thaliana
ttgatcactttaaaatacaagagtgaagacaccagcgtcttttggtcttggatattgatcggacccattggactcaaaggagtagtaagagaaagccagggatcattccaaagcgaggtatgctctccatttcccacaatttttccaagattggttctaagcagatctctcccacaacagatgctccgccagccatgggaagaagacgaagaaacagtgcagttgaggaagctagacgtatgacagtatttccctagaaggacccggctgagaagacactccggcttggtaaggattctccaacttaccttagctagcaaagcatcgttaaacttagtgatatctcgtaaaccaagaccaccatctttaagtgatttataaagttttttccaggaaatccaagacatctttctcttctccgggtttgagtcccccaaaatctggtaagggctgattgaatacgtttacaaaggttgctg

SEQ ID NO: 6180 - DNA, 633 bp, Arabidopsis thaliana
ttaaattttatgttgtacaaaggtcattttgattttgaccaaggtcaaaattacagtttattaatatgttggtgactccttgcaacacaatgcataatattgaagcattttttatcttgagcatggtcgcatacctaatgtgcataacatagctcaaagcctcaaactcacatatttagtgggacgtctcttggttgatatctcgctggtgcgttttccactttaacaaaacttcaccaaatgacttgctggacaatccatcgtcacccaagactctaacaactccttctttcaactccttcactttatttcctatggcttttccctcttcaccttccatcagtgccttcaccactctcaccacttcttccctccgtacaatcccatcttcacccgcatggattcttagagccgctccaacatcctccacgagtagcaatgtattcatcttattctccgcgaataaaggccacgctatgagtggtacaccgtttacaatgcttactaaggtcgaattccatccacagtgtgttaaaaacccgcatgtggatggatgagccaggatttgaacctgtggagcccatgatggaaccaccaaacctttctctttggttcggtctaagaacccaattg

SEQ ID NO: 6181 - DNA, 504 bp, Arabidopsis thaliana
agatccatcaaaaacccggtttaggattggtttactcaactgaattttccttttaggttaaaatagtaatttcatccattatgaaaaaaggcaagaattataccgactctcacaattaggtctctctataaatacacaccttttgatatctctccatcatcgaaaaccttgtaaacaaaaatcgccaccacaaaaagaaaaaagaaggaaacgatgtcgaagatggttatgttgctgagctccgatggtgaatctttccaggtcgaagaagcagtcgcggtccagtcacagacgatagcacatatgattgaagacgattgcgtcgccaatggagtccctatcgcaaacgttacaggagtcatcctctcgaaggtgatcgagtattgcaagaaacacgtcgtttctgattcaccaaccgaagagagcaaagacgaactcaagaagtgggacgctgagttcatgaaggccctggaacagtcgtcgactctctttgatgttatgctg

SEQ ID NO: 6182 - DNA, 1560 bp, Arabidopsis thaliana
gtttcttggttatagccaagaaaaggatgaaagggattgtcagtcaagcaaagaagagtggtgaacaaccaacatggattcgtgatacactttggaaacaaatgtgggtgcattggaacactgaagatgctcagctgaaaagtgagacaacttcaaactgtagaaactcagatcgtggaggtcttggagtgcacaaacacttagccggtcagaaatcttttgtgcaagttcatcaagaaatggtaagagttttctttccatccaaacagttcacttaacagctttctataattacctccacataggcttgtctaagcttgtctttgtctatttgattttctttggcaagaggaacgtttgaagcgtcatgtatcatatggggaagtgtttatgcaaacacatacaagggttgatggatcttttgtagatcagaaatctcagcatgttggtgaggcttatgtgaagatactggaagagaggatgtctgaaatggatgaggatggtcctcaagtgtctgataattcctcgcaacattcaactcatcgtacgctcatcattgatgaaaagaataagatttttcttaaggtaattcatttccgtttttattttgcttacaatctgcttgtctttgtttgcttggaatatgattgattatgagcaatggatacttagagtaattatgattgtctttggtgattgtatttgtcttcttgtttcagtgtactcatatagatgacaaagggaacccttttggccttggatcgcttctagagacactgaacaaaagaaaaaggaaagagagttatgcaagctcttctacttcaactgttgcgcaacttcaagagcagctgcagctcaagatatctgaacaagaggagcaaaatgcaaaacttgatgaggagcatcgccaatctcaatctcggatagccagcttggagaagctcgtcctcttcatgaaagaaaaaagatcctgagttggctgcttatttgtcaactgattctactcaacatgaaccagacacacatccaaccaccacaactccatccacacttccaaccaccgcagccaccgcaccagccatcacagttgcaggcaccacacccttactctccacttcagctactatttctaacacttcttctaaccattaaacatgatcttttgttgttttggttgaaacttgtttaggatgatgtatgactatgattttctgaatagaattagtttatggatgatttgtatttgtcttctctctgtctttcaatgttatcaggatgattattggtttttgaatcgttattaatcaggttttacattccaaacaaagaccaatttgtgactaaaccaaaacaatacatgggactattttgtgaccaaacgaattatataactgtgaccactttgtgaccaaacttattcaaaatatgtgacaataatgtgaccgacccattacaaaacagtgaccaatttgtgactaaatcaaatcgaacaaaattattaaatagtcgcaaactcgttgctaaaacgatgctaatttgcgattacgttacatggcgtcg

SEQ ID NO: 6183 - DNA, 484 bp, Arabidopsis thaliana
gatccccgagcttccgaatcaaattttgagtgctgctgttttgttaatagtgatgagtttttgtccggatcagataatggaagtattgcactttggtccattttgaaaaagaaaccagtgtttatcgttaacaatgctcaccacgtgatagctgatcatgattctgttaaccataactgtacaccagcatgttcttgggtcagttcagttgctgtctgtagaggtagcgagcttgctgcatcgggagctggtaatggttgtgtgcgtttatggggtgttgaaagtggatctagtgctatacaacctttatacgagcttccagttgtaagtttgttttcctaggtcggctcttattgctatttgtgtgttgcatctgttactgacatccaatgcttatgacctttttgcagcctgggtttgtgaactctttagcttttgcaaaatctggtcggtttctgatcgctggtgttggacaggtaacatt

SEQ ID NO: 6184 - DNA, 419 bp, Arabidopsis thaliana
attatatagagattgctcaggtaatactacaaaagattcacagattcagggcttgcagtaacaaagagtgtaaggattgtgtatttatcggttgcttgcgttgttgtttgttatattagggtaggttaggccctggaagactgcaccattgcatgagactaataggtgcagcagagcgtggaatggagctaatggctcaaagagctctgagtagaaaaacttttgggaagttcattgcgcacactggttctttcgtctctgatcttgcaaaggtaaacgacactgcttttatctcccaattgcttcttatgttcttcttatatgagtggttgtctgatacagttacgggtagagctagaaggaacctgattgttggttctagaagctgctgatcattttggataaatttggaaccaaaa

SEQ ID NO: 6185 - DNA, 1287 bp, Arabidopsis thaliana
cacggtcgacctataatagtcgtaaaacattatacgactattatatgactacgagaattatttccttacattgatagaattagtcgtccaatcgtcggaaacaattatacgactattatacgaccacgtgtttcacacgcttcgtacaggacaattaatcgtgctatggtcgttaaatagtcgccaatacgatacgactatacaacgaccattgtttactgattgtgttattgtcgtaatatagtcgtcgatcaacgactaattcacgactatctcattcagcgactatgtaataatgactaacgtcgttagtcgctgattagtcgtattatcattttttacgactactatgcaactgccgtgtaagtcgtttatcacctgttttcttgtagtgatataagcgagaacttaaacgttcttcacgtcatgatcccgcgaccgaatatgtcattggcatctgacgggctgaaatgagcttcccagtgatcgagtatgtcattgatcaaactggacttcaagggctccgtcttgcgatcgagtgagatgcagtgaagtcgagattgaatggtccagcgaccctgtgatcgagtgcgatcgagtggatgttatgatgtggtgatcgagtggtttcttcggcttctcttctcttctttgttctcagcttgtctggttgagtgcagaacgagcagataggcttcctggtggtcgagtggtgatcgagtggttctgatggggtgattcctccggcttcgcgattgagtgaaactgagctgcttgcttctccggggttgcgatagagtgatttgccctggcagggctccgaggctgcgatagagtacttttttctgaaggcgtcattgggcattctgacttcatgttctgtttttcctctgtttgaactccaaaagcatccaaagtacctgaaaacaaccaaagatgccattcacatgcaatcctaatgcaaaatcgtcctaagtatgtaaaacacactaaaacgactcctaatgagatgatttgtggatgaaacattgacaaagtggtgaagaatgaatgcctaaatcatgcaaattatagacatatcagtgtctttcagacatccaagtccataaggattgcctattgaatccctatctatagattgcaaaaatagagaggaagacaattagtgactgaatgcatcaatggactctaagattctgaattagactacaacatcttacctcgagaaagatggttgtatactcatctactgtgagatcccgaggtcgtgaagtgccatcagagaca

SEQ ID NO: 6186 - DNA, 1674 bp, Arabidopsis thaliana
tggaaatccaaacaaaattatttgttattcaatcattgattttaaaattctaactaaaatcatgtgttattgattcgatgatttataaatactagttaaaatcctttgttattcgcatagtcaattaattttgagatttgagaacccaaattatgttttaaatgtaattgaatggatttgaaagagaaaaatagaaggattcaaatccatgggtaaatacatgttatttaaaaatccatatatcttgatttcataattaatagagattttcaaattctatatagatttacaaatcaataaaccaataacaccccctaaaatttgaaggcttttaattattttctatttctggttatctggaaacagttttgtatgaaaaagaaaacttttcctaataaaattcattactgttaatatagctaggctaagtcttgggatactagaacggaaactgaagacaaggtcctttggagaggaaaatctgatgttttcaggactactttctctactagagatacttggcatcatactcgttctacgtcagctagggttccatggcataaggtgatttggttcagtcatgccaccccgaaatactctttctgctcctggcttgcagcacatggtagactcccaacaggcgatcgtatgatcaattgggcaaatggcattgcaacagactgcattttttgccaagggactctagaaacacgggaccacctcttctttacttgcagtttcacttctgcaatttgggtagatttagcgagaggaattttcaaaacgcagtacacttcacactggcaatcgataattgaagccattacaaactctcagcatcaccgtgtggaatggtttctccgccgctatgttttccaagccacaatctacattgtgtggagggagcggaatggtaggcgtcacggcgagcctccgaacacagcatctcaactcgttggttggatagataaacaaattagaaatcagctgtcctctatctgtttcaagggggacaagcgttatgatggaagtctccaagtttggtttcagtcaagaagttaatctcttagctctgtttctttcttttgttcaaaactattctcagctctaattctcaaaaccaatctgcacttgttgtaaaaacgtttttctttggaatataatttaacattatttttaaaaaaaaaaacaaaatggctgatcaacgtttttatcatgtttaatttggccgacctcagaattcacgtatggaatgagcactttttgaaagttcacgtataaaacaacatttttcccgatctttatgatatcatttttattgatatgtttctttttttctttttgttaaaggatttgttcttattttgtgacaataatatataataagagttcttgattatgatcaaagtaaactttttttgtagaacccatgacataacatacatgatacaaccaattattcccactttgaggttcctttcactaatattcaactaatattagattattattttattagcttctatacttttaaaaagtttacaataaaaaagtgaacataatctttaaaacagttatttatcgtgaattattttgaaaatagcatttattaacacacattttctcttaaatatctttaatttcgtatttatttcatcaaaataacaatattta

SEQ ID NO: 6187 - DNA, 1004 bp, Arabidopsis thaliana
actcgtaattttctcgccaaaaaacgaaaacccgtgattttcccgccaaaaacgtaaacccgtgattttcccgccaaaaacgtaaatccgtgattttctcgccaaaaacgtaaatccgtgattttcccgccaaaaacgtatacccgagattttcctgccaaaaacttaaacccgtaattttcccgccagaaacgtaaatccgtaattttcccgcaaaaaacgtaaatccatgattttatcgtcaaaaacgtaaatccataaaaagtgtaatacgtaaatatcctaagtttgatgataatgaattaataatgataattatttattatgttttgtaataataattaattaaattattacttaaatgggttaacccatttaacaactcaacccatcaaattaaatgagttatgggttgacccaactcattttgttaaatgggttggatcaacccataactcatttaaccctaaactcatttgattatgagttgagttgagttgggttacccattttgacacccctatatataggttttcatttttttttaggcatatcctatagaggttatgtatagttagggtataattgtaattagtattaccctaatctctcgtgtatatatattgtaatcacaacctctaatgataattaagcttcacactctatatggtatcagagcattacgactctcagacctaaacttttttttttaacgccgcctcttcttcatacactcttcttcaagtctgtttcatttttcacgatgacttccacaccgtcgggatccacagaaacaattgctttctctgaaacaccaacccttctcaatgtcaacatggcaaacatcacaaaactcactcccacgaattacatcatgtggaaccgtcagttcacgctttgcttgatggatacgaccttgctggctacatcgacggatccgtaccgcaccatctgaaatgatcacactgctggtgttctgcggctaacccgcctacaagttttgg

SEQ ID NO: 6188 - DNA, 519 bp, Arabidopsis thaliana
gtgtcaattggtctgttcttggccatttctttaattatctcctgaacaatatatctgtcctgaaagcctgcatcacttggagtaagttccacatgattggtgcttgataatgtagtgagctccagatcaatagttctactcccagcctgcgtaatgtatcacaatgttgtcatgtataaaagaagaatccgcctaggaggaccacccactaaagaaattgacagcaaacacaattcacatctctgtgtttcacaagtaggatgatacaatcttaaccacatttactgatccaacaaggacacaagacgactatggatatcaagcagcgagaacttcaaaattaaagcaatgcaactcacatcaactttccatgccctgttctccactttcacctgaagtcaagtaaatcaagcagtttctcagttgccacatacaaaagaaagtagcaataagaagataaacatcaatctaagagaaaataaagagtatgtgctagtgagaatagcttcctaatgttgc

SEQ ID NO: 6189 - DNA, 1419 bp, Arabidopsis thaliana
gtatgaaagagaagagctgaaagacttgtggatcaccattggcagctctgtagcaatcagatacgcagccctgtcatcaggtacttccagcgttctgtagccaacgtactctactcccgagagattacagggactgtcactaactctgatatggagatgatcgcaatggccctcaagggaactcttcgccaaactaagaatggtatgcccctccagggtgaaatcaatgacacacccctagctgtacttcttctgatccatttgtgtggatacaagagttgggctgtcaccaataaccgcaagagagcacgaggcgctctgtgcataggtggcgttgtgacaccgattctgatagcttgtggagtcccactcatttctgctggactcgagccgcgagcaatggatatcgagcacctacgtcactgcgaattcctggagtttgcaatggttgacgatctccacaggttcaggtttgagcactctatagacaggagagctaacatccttctccctagccctgaggtcacacggataatagagggagataacattgattttaggcctgagattggacgcctctactatgagaacgttccgccattggatgaggatgatcttcttgaagaagctgcctcgaatgggatggatgaagataggggagtgaagttcgacactagcatgtatcactttgctgaacatgtacctccagcgaggcagagcaagagcttgactgaagctcataagaacaacagtaaattgcagaagtggtgcaagaagcaggacaagctgatcgccaagtgtttcaagcttctaacagataagctgagttgttcctcctccaccactgctattccacagggacaacctcctctggagatgccatcgaggagatttaatgagcttgcgcacaagccttagcttagcgagcagagagtctgacatgtccaggctaggcattcgtcattcgagtcccgggagcacaagagaagaaggaaggctacactcactagacctagcagcagatcacgcctcattcactcaaggagatcactcgaccgcggcgctggccgcagcagaaggaaagaggtcgagtatcctcagagcggtattggccgccacagagctgatgaggtcgagtacccacctgctggagctgataaagataaggtggatcgtctatagcctgggagcaatcagaggcagcaattgacgagcaactacgttcattctttgactgaggtaagcgcctcacttcaccattgtattatatcatctgttgtgatttgtttctttattttttgtttttgtgattggatttgtcctgagtactctcttccaagtttagtcacacagtggactgtgtgatttaagtttgggggagggctcaggaagtgtgtgttgcattgtgtatatttttga

SEQ ID NO: 6190 - DNA, 494 bp, Arabidopsis thaliana columbia
ggatttaaccgaaatcaaacttaacaaaatggacaatgttcaacctgaaaggccaaagtttctaattcgtatatttggacaatgtatcgaattgtgatagtgataaataaattgaccagtgtcctctaagtttctaattcgtatgtattttatcactaattttttttttcctaaaacagaagtatgtagtaagtttaaactttagtttccttttgttcctttacaatcacaaaactattcataaagactaataaaaataccatagcttccaaaataattacatcaatatatttactttctatttttgggacaagatatcaaataccaatattatttacttatcaatataaattaaatcatcacaaacgtgttaaacagaagaacccgaagaatgaactgacgaaccactccctgatccaccagacccaaaatacaaatccgaaagataatcccaatatcctcagggtcaaatccgacattctccaataacctga

SEQ ID NO: 6191 - DNA, 1684 bp, Arabidopsis thaliana
  unsure (1)..(1684): unsure at all n locations
tctaccatgttccaatggtgaataaactttaagggattgcatgtgcgaactcggaacctatgtaagcataatgcgactctatgtggcaagaaggttggaattaattcagtacagaccttgtgacctgactttaatccttgcggataggtcttcacgaaaacccttcggcatgttgaaagaatctcctgttcttggttaatggagtggaagtgcctacagacttcgtggtgctggatatggaagaagagcataagatcccctaatctcgtactttacgcgactgcgctactgatcgcagcgaaagaagagaggtcgagtatcctcagagcggtgctggccgccacagagctgatgaggtcgagtacccacctgctcgagctgatacagaacagggcggctcgtctatggcctgggagcaatcacaggcagccattgacgaccaactgataacactagattttaacctttttaagcccttgcttttcatgcatttagtttagtttcatgtcttttttcatgcattcttagtctcttttccttcttttgcacattttgcattgcattgcctagcatacttgcatttggagtgttttgcaggtgaattaggtacttttggactcaacttggaggtttctaagacaagggatggacaaactcgagttcgggggacctaaggaaggatttgaagtttactcggcctatgtactcggctggaggccgagtggagcacacgtgaaaaacaaggagcctactcgaccaaggcactcggctaaaggccgagtggtgcacttaaggaagaagagaagccacttgaccaagccactcggccaagagccgagctatgtgaccaagaccaagccactcggcttttctactcggcctagggcggcngctcctgccgcgactttcctattttgtcttattcccaattagggcaacctaggattgtgtataaatagatctcttatgtttttacccaaaatatctttgttttgtctgcaggatattagggttcttagatttcttttgcattttctggttgttgtgttgagaatttggatttgatttcttctgcaaacttgtttatcttattgagatctatcatttgctaagtttataatgatttctgagttttatgaattttctgggttttgttctatgatgttcctttttttgttttgaatttaatgttaaaatatattcaaagaaaaataaacgtttatacatggtaatgcaaaatttttaggaacatatcataaaacttagacaataaatctcgactctatgatgttatctcgatgagaacaacatttggattcctctcacatatttttccaccttcccttgccttagtgtgctcaagcggtttctaatgttggtatcaatcaacttgactatttttttcggtgttgagaatgctccatgccttctatcatttctctccctccatatggaatgtatcgtgttctgaaacacaaacctaaggatgaatctcttggtgttgtcatgatcattgttggttagttccttcatcacttctagccacttttccgagaacttgtgtaatagaatacctcgaaccagtttctcccatattttcctagagagaggacattggaaaaaagatgttctcgcgtctccatagggtgcttgcagaaaacacaactcgtatccgcatttagtt

SEQ ID NO: 6192 - DNA, 529 bp, Arabidopsis thaliana columbia
tattgctgctatagttttctcgagtcaaacggaccaacgtagaataacttcacagatgcatttatatgccttacctttctgccaccaaggactgtatatctttgatagcttcatcagctatctgatgggaacagaaacaaatgaaaaacgaaacaaatgaatcaaggaaaatcaaagtgaagttgttacagataagatgaatcagtcagaaagtagtatttttgaaaatcaaaacaaaatgaatgcccatagcagaaaatacacaattaaagagatagtcccacatgtaaaccatctgtccgcatgtatgttataagaccagctgatttaccatcggacagttggacaccctcatataatttttgagcgagctgcaaagtacttattattagaaatatgaattcaaggataaagtgaatgaaaatgaaaaaggttttagctctcaacctttcatggtatgtgctgttgaaaaatgtaatttgttagcagcatcctgctgaagggttgatgttatgtacggagttggcgg

SEQ ID NO: 6193 - DNA, 936 bp, Arabidopsis thaliana columbia
tacatatgtccgaagagtatgataaagcctttctccaagtgtgtcaatgatatagtaagcttctttttcaactttgaggacaaagaagtgatcgttccaactcactatgtaaacgtgcggtggcgaatcatcatcatagctatcaccattcgccgagctttcctccagactaataatttcagcccaaatactatcgaaagacattgcgccttgtagaaactcgaatctaccctcgttgatcatcccatcaggatggaaaaacccaacaaaggattttccggggataacggttagaggccgtatctttgcttgtagcacggtatcaagatcgaaatgcttgtcagggaatttctgcatatacgtttcgttttcgcagaggtttctccattctaaagaaccttctctgatcaaactatcgaactgagacttgattggcatgagattaccattcttctgaaaccaatccgcaatgaccgctacaagagcagtgcatgcactctcaccagctgctcgctcgcttctctggtcaatagaagcaagaaagacacttgtctggagcttcatgtgtccatctcggcttatcacttctttctcctcccaacttccaatcgcaaaactgtcttctccaaactccgagaacgaagttcgtggattagcagatgaatcttcatcaatcttgctctgcatataaaacacattcaaaaactgagaaaaactgtaactaactaaactgaataatgatgctacttataagaccttaccccaaatggaggatgagcttcatctgagctaagttgcctccgatcaaaatcaatgtcatctccaccttcttctccattatccttctttaacaaaggctctcctttggatttcggagacctaaagctcaacttcctctttctccatggcaatatgctacgccgtggaagcagtgat

SEQ ID NO: 6194 - DNA, 554 bp, Arabidopsis thaliana columbia
tgactggtatagaatacttgggtggatgggaaatggtgtgtactcctcccttgtaatattcttcctcaacattggaatcatttatgagcaagctttcagagtcagtggccaaactgctgacatggatgctgttggtactaccatgtttacctgcattatttgggctgtgaatgtgcaaatcgcattgacggtgagtcacttcacttggatccaacacgtcttgatctggggaagcattggtttatggtatctgtttgttgcgctctacgggatgatgcctccaagtctttcaggcaacatctatagaattctagtagagatacttgctcctgcacccatttattggatagccacatttttggtcacagtgactacagttctcccttactttgcccacatatcattccaaaggttcttacatccgttggatcatcacatcattcaagagataaaatactacaagagagatgtggaggatagaagaatgtggacacgagagcgtacaaaagcacgggagaagactaagattggattccagctagagttgacgcgaa

SEQ ID NO: 6195 - DNA, 597 bp, Arabidopsis thaliana columbia
gttttgacatacctgaaccattaatctggttttgataacatcaagaggagtggtcaaaactccagtgacagcaccagcaaaagcaccaatcatcgcattctctggatcatttagatctcttcttgcctgttctaaacaaatggatatcacactgtcatttgcctgcaaaatcggatgttctgttacttatcattgtagcaacaaaaacttacagccaacttgtatccaattcgtaattgctcataaacacaaaactggagcgcgtcaaaaggcaaatctcgcaataagaaggatccataaccctgcatgtttaggaacatattacattacatggagcttttgttgtctgttcatcttaacctcaaggtgtgcctgctacaaataaaatagtaaaacactaaaaccataaatcaagaagtaacaggtataccgcatacatgcctccaaagccctccttggctataataaggcgaacagcgtcaggggccgaaacaaattgaccagtctgcatccgcctgttcacaacctgttgaagtttcattagcctcacaagtttatagccacacacaagaataaacaaagaaacaagaaggaaga

SEQ ID NO: 6196 - DNA, 543 bp, Arabidopsis thaliana columbia
ggaacaattacagtaaagtcatcaaaacaaagcaaagtgcttgacaattttacttacagctaataatcatcaactacgttggcttaaaataaaataaggaaaaccttctttcctcgttctgctcttgcgctatgacaatctcactcgaattacaggaccaagcagaaaaaagatgaccggtgttgcatggacagttgtgcctcagtcttcaacctcagtgttgaatataaaacttgggaatgctgtcgtcacatcccttcaaattcaaatacagatatggttgatgataaagtaaaggaaatcctaaatggaagggctaatctaaaaaagagagaggatttggtactttaggtaaggaagagtcatattcttcaacaagctaggatgtttatgcacatagacattccattcatccttactaattttaccgtctttgtcagaatctgcatcagcaaatgtctagcaaaaacaaagtagagaaagaaaagaagcatgtgctaactaaatttacaagatattatacacacgctaagagagatggga

SEQ ID NO: 6197 - DNA, 481 bp, Arabidopsis thaliana columbia
ccagtgtgctctaaagttgtcacgctggctctggcctatgacgtggacgcaattgcggaaccgtggcggattgataaagagtggatcaaacgtctgccggataactccgcaccgtacacttccaccattgttttcctggtacgtaagggaaatccgaagcagatccatgactggaacgatctgattaaaccgggtgtttcggtgatcacgcctaatccgaaaagctctggtggcgcgcgctggaactacctggcagcctggggctacgcgctgcatcacaacaacaacgatcaggcaaaagcacaggattttgttcgggcactgtataaaaacgtcgaagttctggattctggcgcgcgtggctccactaacacttttgtcgagcgcggaattggcgatgtactgattgcctgggaaaacgaagctctgctggcagcgaatgaactggggaaagataattcgaaatcgtcacgccgagtga

SEQ ID NO: 6198 - DNA, 596 bp, Arabidopsis thaliana columbia
tcccctaactctactctactgtgaaactctttagaaaaaccaaatcttttgtcaagccctacttcctcttcctcctcacgctgcggtacctccgtcgttagctgcgtcaccccagataaagcagcttcctttttccctttcctccgccgtagcgccgcccgtatgtgtttcgccggagacggagggtgaaacgcacggcgtaattgacggagaggcgtgctagtcaaactcttgctctctcctcctccgccgacgtcgcggctcttattgcggcggtggcgagcagggctcggtcgtgtaaaaggggaagaaaggagaggcctttgcggcggaaggagtaggaattggtgatttaccgggatggtcaggggcaaaatcgtcaatttgaggatagtcattaccgggagcgaaagggttaggtctgccggaggaagtggagggtttggaagtacagcctcccataatctccggcgaaaaaaaggagcttactttatgaggaaaatcacagtaatgccatcgaagtcttggcttttagagaagcaagagagagcgagagagatcacatgagaaagagagcgcgagagagagagagagag

SEQ ID NO: 6199 - DNA, 551 bp, Arabidopsis thaliana columbia
ccagtgtagactcaaagatggcaatagataatatcatcatgtgaatacctcgttatggtcatgcaataaaataggcgtattggtcattggagagaacccaaaagttggaattcccaaagtgcgaataaagcgtgaatctgtagttgaagccaaaatttcaggctttgcgagttttcctcccattgcttcaacagcttgcttgaagatagaccaccaaggattagaatcatttactggagtcattataggtcgccctaaatgatctcttaactttcctttctcttgtatctgttgcaagaaaaaaaaacatctggatgtgactaaaacgaaaactcttgcaacaggtgatcactagcaatggtgttatatcaagggattttcagtctatcaaaccatgcttcttcattcatccaactatctaaggtcatatttcacaaaaccaggctcgaacagcttctctataaccctaatagacagattaatggcagtagaataacaagaactataatgaacattataatcaaaacagaaacggaatctaatgtggacta

SEQ ID NO: 6200 - DNA, 573 bp, Arabidopsis thaliana columbia
cgaactaattgcagcttctaaaatactactaaatctagtgtccatgagaattgatgagcttccgatcccaaaaatgataaatgggtaagcatcaagaaccaattagaaaacaaaagggagaaaaatttcacctttctccttcatgattctcaagaacgaagacataacggtggagattggtttgagctccaccgaagcttttcctcgtctctcagcattcacaatcgtcctcaacgcatcgttcaaaatcctcctccccatttctccggtcaaaaaatcccgacgatactacacaaatcggagaaatctagaaaacaataagggtttttcttcactctatgacacgtttgttattttccagaattcataagggtagtttagtcgtttacaattttaacacgtgcgggattttaaccacacgtacctccaaatttctataactccttctctccttcgtcttcttcctttccttcaatttcccaaatcaagaaacaccatggacgagttacaccagagctctggatcaaaattctgagtcgaatcaacgattccgaatccctagcacgatgtaga

SEQ ID NO: 6201 - DNA, 661 bp, Arabidopsis thaliana columbia
gtctccttgagttagcccattagcgcacgagaagtttccccagcctagtctgatgtaaaacacaccacttgagatgtttttggcaagtttcattgtccatcttctcccttgctcatccactacatcgatctcacatgttttttggtgcccaccaaacaacaacgtaaaatttctagaaagatcctgcaaaaacatttatccagaagtcacatcactcaacaaatattataatcttgaatgttacatcaaagctaaaatggagtttaagtagtcaccaaacggtcatgaaggaggctataacgagtgacacgtgctgtgatgaaacctgagtggtctgatgaagaatctgcttcttgtcttttatccgtcttctccgatatgttctctgaatcacaacaatcttcactaacataccggttacactaaaaaaaaaaaaacagattgtgtaatacttcatgaaacaccttacctatattatcctcgccctcatcatcatcatcatcatcatcttcgtcgtcttgtccataatcatcatcatcaacatcgtcaacatcaatataagtatcttccgtaataacttggctagaagatgcgttacgtatgtcgccggaaacagatggggacacacagctacatgaaagacctcgctccatgatgtttg

SEQ ID NO: 6202 - DNA, 514 bp, Arabidopsis thaliana
aataatagtattacattattcagaatgtggcggataagtgttgtgaatggcttacccgcagaagaaacaaagcaataaagtgaaagaattcacatattatagtgtgtaatctacggggatgtagaaggagaagccactcgatcggcttctatcatcgactttatgtagtactctcccgctttgtacgacgacctcaccattggtcctgatgctacgtatctgaatccctgtttacaagattccatattagcctactttcccattgcaattctcagctaataaaacttgaaaacaaggaagagaccattaccatttccatgccaagaaggcgatacctctcgaaggcatctggtgtcacgtactcagctactggcatgtggcgtttagatggtcgcatatattggccaaatgtcataacgtcaacccctgctgctctcaccttctccattgtcttaacacttgatcaggggtctctcacatccagcattacagaagtctttgttaaggtgctgca

SEQ ID NO: 6203 - DNA, 461 bp, Arabidopsis thaliana columbia
  unsure (1)..(461): unsure at all n locations
nnnnnnnnnnnnnnnnnnnnctaaagagttgcatcaaggcggcaagtgagcgaatcccgatgagcttactcaggtaagtgattcgggggagcgaaccagccaaggcagaggcggcttgaaggatgaagtgtatataaagaatgtcgccagaaataaacgggcatacggcccggggatctctgcgccctgacgttcacaaactgcatatatctgatagacgtgaaacaggagtcataatgaattttcatcatctggcttactggcaggataaagcgttaagtctcgccattgaaaaccgcttatttattaacggtgaatatactgctgcggcggaaaatgaaacctttgaaaccgttgatccggtcacccaggcaccgctggcgaaaattgcccgcggcaagagcgtcgatatcgaccgtgcgatgacgcagacgcggcgtatttgaacgcggcgactggtc

SEQ ID NO: 6204 - DNA, 607 bp, Arabidopsis thaliana columbia
  unsure (1)..(607): unsure at all n locations
tagctattaaaggcaactccggttttcttaatttccctgaattatccggtttgcttcctcgtccggttagctgctctcctaaggatatacaagctgcagctaccaaagccgccgaagcaaccacgtggcacaaaccggttatcgataagaaattagctgatgagctaagccactctgagttgttgtctaccgctcagtcttcgacttctagtagtttcgtgttttcttcggacacgtcggagattctagtacggacaaggaaagcaacgaagagacggtgtttgatttgccggaccttttcacggacgggcttatgaacccaaacgatgcgttttgtttatgcaacggcacctttacgtggcagctttacggagaggaggatgtagggttcaggtttgaagagccgtttaattggcaaaatgactaaaccgccctccacttgcttactgtaattactaacatataattttcttgataaagaacatatatttccattacggtattaactaatcttttctatccttttctcttttcttgtttctacactgagtatattgcactatgtgaaaaattgactcgtnttgaatattacttttcaaattgaagt

SEQ ID NO: 6205 - DNA, 606 bp, Arabidopsis thaliana columbia
gaggccattgatgctgagaagaacaaaggaaacaagggacaaagaaggaaggttagtttttttctttgttttagtcccctttttctcttttcttttgcttgtcttatgcttaactttccactaccttttctgcaaattctcagtctaattcttgaacttcctccaaccgacgtccaagtcattgaatgtgaacaatctgaagcagaacgtgacttctatacagccttgttcaagagatccaaagtaagtgttatcaacttatagttataggcttcaagctcaataaagtctgttataagattgattatgatctgttgtaatggttcttgatgctttggtaaatgcataacattctcctttattttggaacaggtccaatttgaccagtttgtggcacaaggaaaagttcttcacaactatgcaaacatcctcgagctcctcctccgtctacgccaatgttgtaacacccttttctagttatgaggtacaaagcaaaaaatcattcaataaactcttttattccattgaaatggattcttatacctggaaataaattgcagccgagcagattcacaacagtacgctgacttagatagcttgcaagga

SEQ ID NO: 6206 - DNA, 524 bp, Arabidopsis thaliana columbia
catacagtaaagtaacagctttcaattattgcatataaattatattcaaaatttagggccaaagtttggaattatacttactttctttctaattttaagtataagttatggatatatatgaccaaaaaagttaatatatatctagagagagagctgaatgcaacttagttccctatcacacacttcaataacccacaaagataaaaaaaaaaaaatgggcatagagcttcagaatcaccagagccaccatgaagaagccagtcctgcagaagagcccatgtcacggtggctgataaatacgccggaaccaccaagcatgtggcaagagcttattgggtacataagaacaaatgtcttggccaagaagaaacataagaggaacaagacgaagaactcatcatcaaaccttgtttactcttgtcttaaatcggctttccctatacttagttggggaagacaatacaaactcaacttgttcaagaaagatttgatggcaggtctcactctcgctagtctttgcgggt

SEQ ID NO: 6207 - DNA, 580 bp, Arabidopsis thaliana columbia
tgatgactcgatcccagatcgtaaagcggcggaacgtctgttctccatctctcaagtttcgatcggagaccttcgatgttactatcatcgtctaagctccattcactaagaatcgaactctctgtttcgtaagcttgtgatctctctttcgccattttctgcgctacttctgatggcgacggacctaattcggattctgttaaaaccggtcttcctgctaaattagatctcatcggagtaccaaattgcataggcgatttcatcggtgtagccttgtagttagatctaatcggagttgatccgacgatgttggatcgtaacggagtcgatccgaggatgttagatcttctcggagttgatccgacgccggtggatctcattggacttgatgaaaccatgttagatctgatcggagtagacgcgacgatgtttgatctcaacggcgttccgtgtcttgacaaatatggtgaagcgcggctgcttgtacggtcatagtctctcggcggtcttggtttctcgatcattggtgttgatcttctcggagttttgcgtgaacgatcgtttgacgaaaaggtgattg

SEQ ID NO: 6208 - DNA, 595 bp, Arabidopsis thaliana columbia
caaaactatcgaaagttggagactttatcttaaacacacaaatgcaaagagaatagaggaacaattctaagtgcactagtaatgaaggggaagaagagagtacctgtacatgtatatatcttctcccatacccaacttcttgctacagccgtagcagaagctcaagaagtctttgggaggtaacacatcaacaggtgttgtcaagtcgagaggagcaacagcaaaaatgctctctttctcgttcttgcaacaacggttcttcaactcctcgcgctctacggactccataacctgatccccgtaaaaatgggtggttttggggttaggaccatgtgaaataacacaagtgtagtcctctgagatctccatgtcactttcagtacccccattaagtgatcctgggtcttgcttggtcacctgacaagcattgttgttcacactgaagttctcagcaccggaacagtaagcagcatcgacggagccagattttcgaagctcaagcacatcaatcacatcatgtccaatctcaaaaacagcatttggtatacatccttgggcatcaaagctttggtaaagggttgagagagtagatgag

SEQ ID NO: 6209 - DNA, 969 bp, Arabidopsis thaliana columbia
gtcgactctgatcccccggcctaccccaccaccatcccctccccatgtctcatcctccactggaagtgacggaaaagtagatggactatctgcaacaaccggagaactacccaagtgtttgcccggaaaccataaggaaggttgccaaactgaaaaagaaccaagaattattacatattgaagattcctataatcaactatagacaccgatataaggtatacttgcagaccttattgtgctcaatgaaagctttcataagagcgtcataagcctgcagccacaatcaaatatcaccaccgaacaaaaaatagaaccaaaaatgtaaaaaggtagactttttatcaccaaactgaccgcatcaaatggccggcttatctgttgcagcagctcaaccaaggagtggcacagaagttgctgtttcccaggtggataaaaacctgttcttgaagcaacaaccgtgaacggcttcccacttgaaactttaatctgtatttgacaacaatggcttagcacaatttcttaaatccaaagtatagcttcaaatgagaggagctcttacatcgatttgaaacaaatcatctaatcctttatcctctttggatggacgaacagaccttctgatgtctgaaaattattttgtcggaatcaataagcaggatcaacctcaaaattcgattaacaagcgaataaggaaactcacattgaatcggaggagtaaggtaggagaatgagaaaaattcgtaaaactgtccgagacgagtcggtgggcacatgtcaatgtcactcttggccgctccttccgccgactgatcctcacatgcgccgacggatttcttctctgattccttaggtttagggctgagaccggcatttgaatcaccggcatctttttcggtcggagaatctccatccgtcgagcctgactccttcttttcagaatccttaggaagcgtacgagacaccggggg

SEQ ID NO: 6210 - DNA, 462 bp, Arabidopsis thaliana
cgtatttagagagaggagaaagtgaagctgtgttattctttgataaaagtacctcttcatgttcaactgtctgcgcaagaggaagaatgacttggttacttgggaaccccccagctctagcacaaggaacagcaaaaggacttgctctgagcgatgcagcagcataagcatccacgccataatcagcccattcagatcggtgttctctaaggaatcgaaccagcacagcgggtggaacgttcttcaaacaaaaaaaaaaagatgcaagttagttagaaacagacagaaacagaatattagtttttttattatcaaatccttaagacatgtacctgaagcaacatagatgccttggcagaaagcacgccactaccaaagcttggaaggaatgaattaccgtactgagacccaccaaacttcccaggggacaagtttatcattacagtaacatcctctgcacca

SEQ ID NO: 6211 - DNA, 602 bp, Arabidopsis thaliana
ataaaagattaggaacgaaacgtccttgatttctactaatctgacaacaataatacatcaaattgtcggtaagacataaaatgagcaattatttcacttcaattatcacaagctgaaggcacaccagggtaaaccagaaacataaaccaaaagaaaaccgatgatctcgaaccaaaccaaacctgttttcttaattctggaaagtccagtcccaaatctcgtgacgctcgacaccacgacccatcgaaccagcaaaaccggtatacattacctcgtgtatgaccttggaaagatcgaattttgcttcaatcaatggccggttcggtttcttcaaatgcgctaaaccaatcgtaacagagactactttataattgttgttgtactcaatccaagccttgtatctatctccactacttagcttcaaatccttaaataaccaaccgcttcttgtcataacccaataaccggatttcacagaaaccaccgaatcaaccgaattaatatcgattccgacatggttatcgttcatcgtcgcaagagatttgtcttgaaagacatcgaactcaacggcaaagaggtggttattaggattaccgttattg

SEQ ID NO: 6212 - DNA, 575 bp, Arabidopsis thaliana
taccttgctcgtcacttgttgtctctctgttttgtaatttgataacttataaatcttcattatataattgcataaagagatgagaaacaaattaatattaaaataagatgaaagcaagaagactaattcataggtctggttaacttgatttgaataaaacttggagcataagaacacataggacctggtgtgcatagagagtcaccgagacccactgttttgagactacttcacagaacttggtacataagagcacacaagacggcaaagtggttgatatagaggttcacggagatccgctcttctgaaataaccattctctccaacgatgtaagctatgtggacagtggatttgagcccctctgtctcctctttattaaaaaacactacgactttctcttcatcataaatcaagtatccctcagtcagaaaaaatcttggtgtgttatcacttttaagaacttgctccacgagacttcatcgggctcaatcttgttcgtacccaaatatcgatctcagatttgccacccgccaccgctttactacaccgcaagcttctctctcttacacatata

SEQ ID NO: 6213 - DNA, 496 bp, Arabidopsis thaliana
tgctctcctgatttctttcttatcaacaaattcagactcggaaagtaaatcgattatacattatcattccttttggacaaaaatggagatacaagttaaaattgtgatatttgaaacgtttcttgatgagttgttatggttttaaatctcccggcaacagattcaagatacctgactgctccttaaccttgtttagaagaagcatcagaagtggaactcttgagagtgttcattgtgatcccaccattatcagctttttctgtcaaacccaaacaaatttcaatccatgatcgctggaataaacaacattactcatcaccacatcagttgttctctcagtctcacctttgctcgtgtcacagcaacgttgatcctatgccaatctccgagcagtgaagcagcagagctcctctggtttctctcgcgatctcacaacagataccactatgcagtctttatctcttctctacaaaatgtgagctcatcaaacgttggt

SEQ ID NO: 6214 - DNA, 1379 bp, Arabidopsis thaliana
tgttgtgttacagaacctcaagtttcctgatagcccgcttgtaagcttccaggcaaaagacttgatcaggggacttcttgttaaggaaccagagaacaggctcgggtcagagaaaggttctgtagagatcaaaagacatcctttttttgaaggattgaattgggctctgatccggtgtgcaatcccgcctgagctaccggatttctatgagtatggtggtggaccagaggcagcggcggattcgcctggaggcagtaataataggtatcttgaatgtaaagccataggcgatcatcttgagttcgagttgttttaagcaagacatagatattctctggtataagcattcagagtaatcgttgttgtaagttattatatctaagttaaatctaaatgtcttatatgtaaatttagcgttctctgagacataatctgatatagtattctcaaaaatatatatgctccttcgtatctcaatttttaaatatatgatcaaacattacaatcttagtagacactaatctacaaaaccaaaagattacaaacacttttcttcaatgaaagacttgagttgagattcccatctgatgaagaacacttgacgtcgaagaagctgacctcaaagcctcagctaatggtccacccatattgtggtggttccctacattgctccaccaattcaattgctccctctcattgttgttgtttctcaggttctcttcttctttttcttcttcattgcttgttgaaagttttagagaaacatctgaggaagcgttactattaccgggcacggagattgagatatgacaagtggatgagctcattggactggaggtagagcccaatgatgattcgcctagcccgcctaaacccgcctaatgaccgtttaatccgcttaatgtccgcatagtccgccaaatctaccctaccgcctaataaaaccgattttaagaaagtcgaagcggtacatgaacgcctagacgaccgcctattccgctttcctgaacattgtttagacctaaacttttacaaacacaattattctaatttttatctttttgctctgaaattccctgagactttggagagttcatcagagatttcaaaccctgtagagagaagatattttcttaactctattcttcttttaatttctttacgcaatcttcttcaaacatgttttttatgtttctatgattatgtctgagtaatctacttgttgggtttaggatttcgcattagagatttagatggtatagtggatcgataacatgttaggattatctttagagttcttcagtttgattattcttaatgctagttctagagtagctaactagaacttgatcttaggctaataggcaagatcatagatg

SEQ ID NO: 6215 - DNA, 476 bp, Arabidopsis thaliana
ttccttttggtccacgcattttctatttgtggcaatccctttcacaacctgatttcccactttggatcatttgtctgaagactctcttgaatcgttaccacttgtttcttgtgcatgctctgttttttagaattaatgataaaactattccatagtcttgagttttcagcttgttgattcttttgcttttggttttctgcagaaacatgggtgcaggtggaagaatgccggttcctacttcttccaagaaatcggaaaccgacaccacaaagcgtgtgccgtgcgagaaaccgcctttctcggtgggagatctgaagaaagcaatcccgccgcattgtttcaaacgctcaatccctcgctctttctcctaccttatcagtgacatcattatagcctcatgcttctactacgtcgccaccaattacttctctctcctccctcagcctctctcttacttggcttggcactctattggg

SEQ ID NO: 6216 - DNA, 545 bp, Arabidopsis thaliana
cgcaaggtgaatagaataaacttcagcaatcagattaatccgaatcaattccgttggtgttacagttattctacactctctatagatcccaacctctttcttttaaatatttatatacatctctctttttttgtgaatttttttactagattccaaagtaaatgagtagcgaatacgacaactctcgttattagacagagatatataataatcgcgtaataattatttcctatttaaatatgataaactcatgtgtgtgcatatttactttttatttacttatgggatactcaccaatatttatttgatacgaaccataaccttcactaagttttctttctctagcctccctcatctttctctctctgtcggcgatgcagaggatatcgttagactcatcagcttcgaagctccatagctatggaggacgaaaggacgatacctacgatattgatgacttgaaaccagcttcctcttctccttcttcgtcgtcatccgcagtagattacgacgatcacgagctcaaagactttaagccgcgacgg

SEQ ID NO: 6217 - DNA, 510 bp, Arabidopsis thaliana
tttgtagtgaacacggtagttgatgaatcaccgtctaagaggttgatcactgtcaatgagatgacccattctatgatcctagggcggtaagagattatgtgatgaaacctgtagagtgaatgtgtgtttgattgttcacgaaaggaatcagttttcgaatgtatataacttaacctttcatgctttttgtaaaagatttttcacttaagtaaatagagaaaattactatagatgagcttccaatttggttgaccaatgatttactatagagtttgcatttccagttgttctccagcagaattgtctaatcttgtgaggagcttatctgcagagccaaatgagctcataattttgggtttccattggttagatactatcatatcctcatagtataaaagtagaattagtcaatgccttaaatctaaataagggagccatgattgaatttgcacgtattaaaagtgaagaagaactcaagtcacaggagaaaagtgtgacactcaaccaaac

SEQ ID NO: 6218 - DNA, 499 bp, Arabidopsis thaliana
tacatggactgatctattcccgagccttgactatgcgatcatctcttcaggggaatggttcttgaaaactgcggtataccacgagaatgctaatcccgttggatgccatggctgcccggagagttcgaacatgacggatttaggattcgactatgcttacaatacgtcgttgcgccatgttatggacttcatagcgaaatctaaaactaaaggcatgatctttttccggacttcgatacctgatcattttgaagatggggaatggcataacggtgggacttgtaagaaaacagaaccggtgggtgaagaggcagtcgagatgaaagttctgaacaagatattgagagatgttgagattaatcaattcgagagagtggttacggagatgggtcaggagagtgagaatctaaagcttctggattttgctggcatgttgctgactcgacccgatggtcatccgggtccatatagagagtttaggccgtttgataaagataag

SEQ ID NO: 6219 - DNA, 1610 bp, Arabidopsis thaliana
ggatttatgttacttatgtatttacgatggttgatcttgtttttatggtatttatggtatttaggatgatgttcaaaacaaaaggtacacgtagtttatagtgaggtacaactcaattccaaaagaggtacaactaacaaatcaaaacaagtacaaatgagttcaaaacaagtacaagtgagttcaaaaaagaggtacaagtagtttatagagaggtacaactcaattccgaaagaggtacaagtagtttatagagaggtacaactcaattccgaaagaggtacaaattacttcaaaacaagttaaaaaggtacaaatgactctagaaataggaattcaacatagtttcaaactttaacatacttgttgcaacataaaaaggaaatacaatcacaaagtcaattaaatcattttacttctttccaagtgcatccataagccttgtgatctctgcatctttcttgtccaagcggtctttgaggtcctcaatttcagcacggatttggttaatctggagacgattactatcacctccaaatttgaatgcgttttgaatcaattccctgtgctcgccaaatcgtttgtcgatgcaaaagcactgctcgtgaactgcaagatcccaacccttgtctacgtgataattatcatcttgaccactcatcagacatttgagaaatgtcttcttttaatcgccaataagacgctctacaaggtcaagctgtttaccacaaaaacagatttggggaacaccaaaatcaccatcgtacttggaaggatcatcggatcgttcctctgatgaagaaggtgacgaataactaagtggcattatttgctacatagccaaacacatgaaaatcaaaaggggataaattccaaaatataaccctaacatccaaaccctagatctttaagaaaatctaaaatccaacccctagatatcaaattatcataaacggcaactctaattcgtttgcaaaccataattcaatggaattgggggaaaatcaaaactctaatttattttctatccaacccgaaacttaccaatgaacttggatccggcggctgatgcgaaagattcggcgtcggcggaggttcgtcgtgttgttcgtcggcggaggttcgttgtgttgttcgtcggcggaggttcgtcgtcagagaagagagaaggagagaagaaaacttttcgagagaaaaaaggagaagaaggaaataaagaaagagagagaaaattttgtaatttaatgagatgagaaagattttttgaattgaaattaaaatacatagtgtgaatacacagtgtgaacgcatagtgtgaacacacaatagttattatggtaataaaagtgaaatgcgggcccagacaaaatactacgcattagccatagttgtggcataagttattcagttgtcccgtactcaatttatttgtactttgttgaagttttagtatttagagttggacttcattaagggaattaacttttagttggaaagatgatataatatgtttaataataagatatcatgttttagttatataattttccaaatatatgcgttttgccatgtttaatgcaagatggtcaacatgatacaatgaataacat

SEQ ID NO: 6220 - DNA, 1070 bp, Arabidopsis thaliana
tgaacaacttagtaaacgcaacgaaaaacaaaatactgaatagattaagagaaatccgtattacaaaatgtcaagaacacagtgtctgcggaattaaaacttagtaaacgaaaatgaaaaatgcattctacttatagcgaaatattctgaaaccctaatactcaaaacgacacaatattgggacggattaagaacggcactcgacccaggtggtcgagtgattggtcaagcgataagttggagtcttcttctcttccttctccttgagtgtctggttgagtgcggaatggagaagactctgaagctggcagtcgagtatgaagtcgagtgatggagatggcggcactcggcttggtggtagagtgatcggtcgagtgtgtgatgatggtgagactcggccgtgcaatcgagtgagtgatcgagtgaaggtgatggaagtactcgacctgggggtcgagtggtgtgatcgagtgatggtcgggtggtggagatgatgatactcgaccatggggtcgagtggtggtgtgaagtgataaggccttctactcgaccaggaggtcgagtggtttgttaaaatcgcggagccatctactcgaccatggggtcgagtgtattgatatgatcaggtccgcttcttccaattagctcgccaacagctccaaatcacctgaaaacaacacaaatatgcaacaaacatgcaaaactatcctaaacatgcaaagtgatgacaaatgatgagaaatggtataaaacagtggtgatatgatgctacagtgatgacaaatggatgctcaaaacatgtaaaatgcacacttattactcgtgctcctcaggactctaagaatacacaaggatgtcatcaataaagatgatctctaacttaggatgtcatcaataaagatgatcataaactcatccagaaactcctcgaacatgttgttcatcaaactcatgaacgctgtaggttcattactcaaccgaaaggcatcaccacaaactcaaaatgtccatatctcgtcctgaaagcagtcttgcaaacatctgctccgctatcaggatgtggtgataga

SEQ ID NO: 6221 - DNA, 1707 bp, Arabidopsis thaliana
tgagttggatttgtatttgaatgaggctgtcgagactccacatcttctaaagggaatagaatatgatgtgttagattggtggaagctcaatagtgggaagtttccagttctatcgctaatagctaaggatatattcgctatgcaagtattgtcggtggcatcagaatctgcatttagcactagtggtagagtgttagatccatttagaagctgcttaacacattacatgatagaagtcttgatgtgcacaaagcaatggttaaagtctgagatcagtatcaatgaaaaaggagtgtcaaccattcatgaattgcttgcagataaagtggaggaagatgagcttatgagaggtaatctattccctttaaagtctctttaaattctggtttaccaattatagcttacaagtttgcttatagtccgtgtttcttaaattgttcatgtgatgtagagtttaaacctgaattccacatccatggttttgagtaggccgagttatcgtttcagccttcaggagacaaaaatgcaaaacaaagtcatcacctcatgtcctcatcaactatcgtttagactttaaacttctacttctatgtttttcattttcggattgttgttttgcttttcaagtactcttgtttgagatttgagaacttctatttgtcatatttgtgttcttgtttgtgggttgccaattaggcttggatttggatgctaattttgtttctcctcatttgttacacatgattagaatatcggtttttcgggtttatgggtaacttttacccaataatacctgaaccgaagaaaacccggtttttttggggtatttaccggttcttatattgattacccaaactgatccgaacccgggtgtacccgaaccggaccgaacccaaaaatttcagtttaccctattgggtaataatttcattacccattcaacccaaacccgaacgggttttacccgaacccgaacgggttacccatatgcccaggcctagcttcaacgatgcatcctcacaccaaagccatctttatttgaggttcaaacttgttatgttgcttttacaccacgtcaagtttgcgggagagtattagatgcccacaaacaagcccaacgattagcctcattagaagcccattatcgtatgtcattaggattgtctagtatcttagaatcatatatatatatatgctactatgagaatcaatgtaagcaactttgagagttggaaacaactctccttcttcaccattttatgaaatcaaatctaaagtgttatagttcttggtgaaaacctaatgtttcttcatttctattttaacatttcaataaagctcatcgagctattgtattttctaatatctgatttctatgtcaataagctcatttgagcataaattttgaaatgtcaacattgtatcagagccaccgttggcccaactagagaattcccacaaaaatagttttctaccttgtggcccatacaagtggcatgtcttgttgtattactgagatattgggcttgacctgtttcccgttggacaaattcccacccacatctcgaaaaggtccattagaatgtccacatcccttgggattaagatctttgggaattaaggatgtgacaatccttaactcttgagctaggttttggattaagttatgcacattcctaatatggtacaaagcataagtttaggaat

SEQ ID NO: 6222 - DNA, 1564 bp, Arabidopsis thaliana columbia
tgcaccaagaaagagatgcatacatattttaataaatacttagtgaggcgatcctcccatctacgagctatacacacaaccagatcaaaaattacataattatgaatcaaacaacccaatgaacattaactcacttacacaaccatcccaagaaataaatatggatctataaaaatcctgcctagatatcacaacaaacaactacataaatccaatcgcttagataagctcatggtcacgcactcaactctgataatgaatgattttggacaaggaacaaaattatacaaccaacgatgactgatatgtcaataatttgcatgttttctgcattcattcatcgtcgtgttgagtctagtttcatagcattcatcactatttcatatcatttttcatcattcttgcatactttgcaagattaggatagctttgcatacatattgcatttcagagttgtttttacgtgatgtggagctgttggcgagcaaattggaagaagcgagccggaatcagaagccacatacttgaccccgtggtcgagtacatgcatcacaatactcgacccctaggtcgagtaacatataagtcgttcttacaatatactcgaccccatggtcgagtaaccacagtctagcccactcgatgacaccactcgaccacctggtcgagtaacactttttcacaccacctgaccaccactcgatcaccacacttgaccccctggtcgagtgtcatcagtcaccacccagtatcatcactcgaccaagcactcaatcgcatcttcaaagtcttctcaaatccgcactcaaccagacaagctgagcataaggaagagaagaggagaagaagaagtgtttggatgcggtccagagctttactcgatcgcaaggcccaacttggcccgttatcactctatggaccggtcgattgtgttcccggccgatcttctatcattttaattctttttgtataaagaggtctttgagggtttcttgagacatccagtttacatccagttttttgcttaagtctaatcaacatgaattctatccgaagcattcccgcacccagaaggtgttcgatggaatgcttgatcctctagttcctgagatattcgtctctatcccaatggattggccgtttagagcgtttattgactttatcagtctgttcttattgcctgcatagttagatttcgttaatgggaatgagtctaggctagctttgcttgaggatttctatcacgggagtgaattaatctcttgttgaacctgttgtctaggatagcttgattggcttgttaaccattcgaataggctaggataccactctattcgattaccccatccttaggaatttctcgtctatctgatttctctgttttatcgttatcgcttaatcgttctcattgcatgtttcttagtttttgcaattactcgaccaacttactcgaccatacccagtgtctggcaacagactgtgcagtcgagtacagttgtctcgtttcctatctgttactcgaccagtatactcgaccacacctagtgtctggcaacagactgtg

SEQ ID NO: 6223 - DNA, 2016 bp, Arabidopsis thaliana columbia
actcttgtctcaaagtagttgtctgaactggtggggcactatcccttgtctttggagtgattccttgggatcaccactaccaatgtttcttggttatcaacattcggtgggtctggacatcaactggtctgttctgttgatccatagcagctgttctttgttgatcacatgctgcctttgctttggtttcttgtaactcacgagctattctgtcaattctgtctttgaataatagtaggtgtgcagaacctttggatcgagtttgcatgcacaaagattagtacctgtaccacaaaacaagcagacgaaatgatgagttagtaacttgataaatgtaaaagaacttgatcttaaaagtttctgatatcttgaatgtaacaatacaacaatgaattggcaacatcgccaaattgataagcaggtttttgatgcctacttatgtgcttcatgtgtgtgattcagttcaattcccctaatacacacacatgtcgatgcagctatagggggtgtcaatccagtccactgttattgctagcaattaagatgtgcacagaaacaactaagtcaagccatattataatgatgtgggtttctagtaataatcctaggtcaggattcaaacaactaaaaataagaacttaaaagccctactcgatcattgggtcgagtagaaccaataggcagaactaaaatgcaatcaacaggggatacaaataggagatacaaataacaggtaaataaaagtgcaatcaacaggggatacaaataaatctaatagaagtcctaaggatggattcattgataagggcaactctatggttcattagatggctaatgggtgaaaggtagatacccttgacgatagattcaaaaaccgggtcaatccactgtcgtgacagagacccccataactctaccacttcctaatctcaactgtcgttgatgaaacatagcaagtagggtttatgaaacaatctaccaaagccaataagcagacaagccaatgtcttggtcgagtctacaaatctctagaattcgtagatcaaacatccattttaacgtcttttggacgcaggacgtctatgatcgaatctccatattagccagcgaaaaccgcataggagccaagcaaatctataagggttctaacctaatcttaaccacttaactaacctagagattaccctaatctaatccatcatcaagaaccctaatcattactcaagcaacattctcaagaacacaaacccagaaattactgaaatcatacaaaaatgtagatctaaacaagctaaacaactttacttaaacaactaaatgcaaaaacaaaatagataagagtaattaagttttgaagattcataaacacaaagaaaaactaaaggataaaagatggatcctttggacaaatcccaaagtgatctatttatagtaaaatgttgaaactctagattcgttagaagacaagagacttgaggcggtttgggcgaatgctcgatcttagggatcgagtaaagagggtgctgcaaagtctgcgcctttgtgtctatgctccgagtgatcaattggtcgagtagatgattcttcctctcatatccgtatgcttagatgtctagtttagtggggaatgaggaggatccaaagacgctttgatagctcaacaagtcttgtaaagttggtcacccttggtcgagtaaatgggtcgagtagaggatctgctgcttcatcttaggctgccttgatcgagtaagagggttgagtgaattgcagcctctttgtagctgcctggatcgagtaaagaggtcgagtgaaatgatgcctcttctatagctgcttggatcgagtgaatggatcgagtagagtactttctatctccttctacacctgaaaacacaccaaaacatgcaatgcctatgcaagatgatcctagatgcctaagtatgcgaaataagctaaaatagtgcaaaatgatatgctacaattgagcaaatgcacagctaaatgatgataaacata

SEQ ID NO: 6224 - DNA, 1047 bp, Arabidopsis thaliana
agcgcttcaaaggttatcagacgcaatgtcctcatcatggtttctccaaagcttcgcttctcagcactctctacagaggtgtcctcccaaagatcaggatgcttctagataccgcttctaacgggaacttcctcaataaagatgttgaagacggatgggagctggtagagaacttggctcagtcggatggcaactataatgaagattatgacagaagcatccgcaccagctctgattctgatgagaagcaccgcagggaaatgaaagccatgaatgacaaactggacaagctactccttgtgcaacagaagcacattcattttctgggtgatgatgagacgttccaagttcaggatggggagactctgcagtcagaagaggtcagctatgtgcagaaccaaggaggttacaacaaaggtttcaacaacttcaagcagaaccatcccgaacgttgcaaacccgcaggaccaagtctacccttcacagcagcagaatcaacccaagacctttgttccatacaaccaaggtcaagggtatgttcctaagcagcagtatcagggcaactatcagcagcaacttccaccacctgggttcacacagcagcaacaacaaccagcttcaacaactccagattcagacttgaagaacatgttacagcagattctccaaggacaagctgcaggagcaatggatctcgccaaaaagatggcagaaatccacaacaaggttgaatgtactttcaacatctaaatatcaaacttgaggcacttacctctaaggtaagatacatggaaggacaaacagcgtcaacttctgctccaaaagtaacaagacttccaggaaagtccatatagaatccgaaggaatacgccaccgctcacgctatcaccatctgtcatgatcgagagctgcctactcgacatgtctccacatcaatcaccgaggacaatgatgttcagaacggggaggcttctactcagattgaaatttcagtggttggactcgaccattcagcaggatcccgttccaacctagacgagaaagcaa

SEQ ID NO: 6225 - DNA, 503 bp, Arabidopsis thaliana columbia
tgtgagctgaatattcttgacatctctacattgccttcttttctagctaactgttgttttaacaacatacctccattacgtctgaagaacttcctcattcggattagtttcctccgcttctgtacgaacttgtacaacccgaagattccgaaggcgaaaagcaacagtgctgaacctataagaacacctgcaccaccaaaaaaccaaacagtaaataacagaacgttttgcaagacgctcaagatagtaataaaatccagttcaattttaccttgaatcacccgcttgagctgctctggtttcttgggctggcagtcaaaccaaccgggcagattcacacagctttgatctttacactggttgcgtcctatatctagtttacattcatccacgtctgcaaatttgtttcataattagcgacaatcttatatcaggccacaagatatgataacgttcagaagaacaccaatatcttacctacacaaccaccctggaaggaacgg

SEQ ID NO: 6226 - DNA, 540 bp, Arabidopsis thaliana columbia
atcctcagtattctatctctacaacgggttcaagcatacgcgttctccaagatttattcaggtttgtgcaagctacagagcatattcgtagtttattggttgtttacttttaaatgatttcttagttgcacgagcggtacttaacatgtatcatcattcaggaaagatccgtacctagctggagtgccggtagctattataaagtcctggtaccaaaggcgaggctatgtcaattctatggctgacctcattgagaaggagcttcaaactttctctgatcctaaggaggtatagttatatccccccccccctctgttttttcctcttcattgcacatttctagtctgaacactggttaaattggtccattgttttgtgatttaggttatgatattcttcagtgcccatggtgttccggtcagctacgtagagaatgctggagatccgtaccagaagcagatggaagagtgtattgacttgataatggaagagctaaaagccagaggggttcttaacgaccataaattggcataccaggtt

SEQ ID NO: 6227 - DNA, 518 bp, Arabidopsis thaliana columbia
tcaacccatacgatagaatggcgaaactaataaatataagataacattttgagtacaagcaaacataatcctacctcagtgggctcaaaccaaacatctggattgaggctgtctccaactcggtagtattgctggatatttgaatcattacaattaaataagaattcatgctagagacatatatgataaggaagaagaaaatatcctacttttggagtagcaatcacttgagagcgaagactggacgaccgctcgtcaagcatggcatcagaaaatccagtacctagtagcccaaaccgtataaccaaggtttaagaaacttgaaaaactgaacacacatacataatatgaaataccaaggtgtattcatgtattcgactgaccaattttacaaatgctctggaactcttccttatcaacatcatagcaagcgagtaaaaatgcaccatagacacctagaaggaaatcataaggctttgttaagagcatagagaatgaagaatgtatcatccaatgta

SEQ ID NO: 6228 - DNA, 666 bp, Arabidopsis thaliana
agactctacacgcttagaaccctaataacgaatttcaattactcaatttaccattcgcatttcgcaataaccaaactgagccagtcacaaggagtaaaccgaaccggattatttatttataaaatgaaagaaaggaaaccaattaacaacagcagtagtagtctgacgtaaaccaaaaagcaggcagatcaacaactaaaagaaactcaaattaccaaaacaaacaggaaattgcaaactaagtttttttaccatatgcatacaaagaccataaaaggttctgataatcaccggtttcatctctcagtatttaatccggccatctccttccgttatgacatcgttgaaagtgccaccactcgggatcatcggcaacacatgttcttggtgcggacaaatcacatccaacaggtaaggtcctggtgtatccagcattgtctgaatagcttctcggagatctgctttctttgtcaccctcgccgctggaatcccgcaagctgctgcaaacagcaacatgttcgggaatatctcgtcctcctgagccggatcccgagaaatgtgtgagctcggttagctttgtagaaccgatcttcccattgcataaccatgccaagatgctggttgtttataaaagtaccctcactggaagattctctcacgaatagt

SEQ ID NO: 6229 - DNA, 895 bp, Arabidopsis thaliana
aactgtaccatgacatcaacgttttgccccatcaacttctatccctttttctgatattttgtgccccaagacgattccttctctaaccatgaagtgacatttttcccagttcagcactaggtttgtatcttcgcatctcttgagtaccctgcacaaattgagcaaacaggaggagaaagaagagccatacacagaaaaatcatccatgaatacctcgaccatctcctctatcaaatcggagaaaatagaagtcatgcagcgctgaaaagtggtgggtgcattacaaagcccaaaaggcattcgtttgtaagcaaaagtcccatagggacacgtgaatgtagttttttcttgatcatatgggtggatagggatttgaaaaaatccgctatagccatctagaaaacagtaataggggtgattggctaatctttctagcatttggtcaatgaaaggtaaggggaaatgatctttcctagtggctgcattaagcttcctatagtcaatacacatcctatgtcctgttatggtcctagtgggtatcagttcatcttttgaatttttaataactgtcacacctccctttttaggaacacaatgaactggagatacccaggtgctatcagatattggatagattacacccgcatctaatagtttaagtatctccttctttactacttctttcaagtttggatttaatctcctctgaggttcaatgctagaataggattcattttctagatggattctatgagtgcaaaaagtgggtgaaatcccttgatgtcatctagtgaataacctatggctttcctatactttttcaattcaattacaagcaaatttactgtgtcagtatctagttcatcattccggtacacaggataggtggaattga

SEQ ID NO: 6230 - DNA, 643 bp, Arabidopsis thaliana columbia
gatcgatctccttcaaaatttcaacttcaaattccctctctgagatttcaaaatccgccatggacaaaacacaattgatcttgttaggactaccgattttcctgctttgttccgatctcttcaatctcttcacgcctccaccgccgaaatctcagcaccaatcaccaccgtctatctcagaaaccctagatttccccgcacaggtgaagtcgaattcattcctacataacatctcgcacaccacttgtgttctaatcgtttgtctttttagcagaagtcaactggtgttggatatggaaacaccgtagagatcaacttctgcatctcctgctcgtacaagtacttttccgatttctttctaagtcaatggctttaagctttatcatcatttagatttgattcattagtctttgtattgtaggggaactgctgtatcaatgaagaagatgttagagagtgtttttcctggattagatgtagttcttgctaattaccctgcaccagcaccaaaacgtattcttgctaaggttgtgccagttgctcaggtgggtgttattggtctcattatgggaggtgaacagatattcccatgattggaattggcagctcctgcttggtacactctttgagacgaatagatcgg

SEQ ID NO: 6231 - DNA, 803 bp, Arabidopsis thaliana
agtttattcctcccgatcccaaccaaccccaccaaccagataagacacttaggaactgagacgttcgaattttacccaatttcttcagtttcttaagcattgagtctttcttctgagctcagcagcgactgcatcgatgaactcctctgtgttcaggtacgtgtccctcgaaagcctgaaaacatccgacagtaaattaagtgatcttgatgagaacaaggacgtaaatagaaagtgttgaattgattactttgagccgtgaatgatgagtgcaagatctttggtcattttccctgactccactgtcccaacacaagcggcttccagcttctcagtgaaatccaagagttttgcgttgtcatctaacttagccctgtttcaaagacattagcttagacaatcctcttccttctaatgaaacattattaagcatgttttctttttgttacctgtgtgcaagtccacgagtccaagcaaaaatagaggctatgctgtttgtgctggtctcaccacctttctgatgaaccctgaagtgacgggtgacagttccatgggccgcttcagcttcaatcgtctttccatctgggcagacctaatgaaaatacacaacaattgtaaaagcggaaacttagaatcatgtaacagcctaacaaagagattatgtgacaatatagctaagaacttgtgagaattataccagaacagatgtcatcaatccaagtgacccgaatcctaaaacacattataagaaacaattagttaacaagtaatatgtaagatagacataagcgctgaaggacata

SEQ ID NO: 6232 - DNA, 585 bp, Arabidopsis thaliana columbia
gctatggagctcttgaaaagtttcagacagaaaagggatgagatccggatcgatcacgagaacgcagtaaaggaagtgaacgcactgagaagactggttaaaggagagaccggagagtcttctgggtcggaaatgcttgactactcttttatggaaatcaatgaggctactaacgaatttgatccatcttggaaacttggagaaggcaaatacggaagtgtctataaagggaatcttcaacatcttcaagttgctgtaaagatgttaccctcatatggatccttgaatcactttgagtttgagcgtcgggtaaaggatcttatgtatatggaaaaataaaattgaatatagacatgtatacatgctcgagtttgttaacgaacaggttatgtgttttggatttcaggtggagattttaagcagggtaaggcatccaaatctggtaacactgatgggtgcttgtccagagtctcggtctctcatttatcaatatattcctaacggaagcctcgaagactgcttttcatctgaaaacaacgttcctgctctttcatgggaactcggataaggattgctctgagatat

SEQ ID NO: 6233 - DNA, 293 bp, Arabidopsis thaliana columbia
aatttgaaacaagctggcgaaagtgatgttaagattgagcgatcagtgagagataactccgccctcatgtctattcttgatcgacggccggtaagtacttcctatattttgtgtatgctagtatatttctcctcttgggcataaactgctatcggaagttgtctcttaacttcattttggttattcttgtacctgaaatctttgggtacaggttattcaaatcacacacttgagtcagctatagcaaacctaaatctgtatactgattcatagatgttgtggttttcggtttt

SEQ ID NO: 6234 - DNA, 541 bp, Arabidopsis thaliana columbia
  unsure (1)..(541): unsure at all n locations
gccagtgtgctctaaagctgctaagtctgcgctcctgggccntggttggcagtagcgtgatggcgatctggacgattcgccatcctaatatgctggtccgctgggccagacgcggttttggcgtatggagcgcctggcgtctggttaaaacgaccctcaagcagcaacagcttcgcggttaacttccctctggccggagcattccggccttatccctcaaattttttgaagatttttgacagttttccttgctaacaatcatcattcaccacgtttatgattctctccatcgacagcaacgacgctaataccgcgccattgcacaaaaaaacaatcagcagcctgagtggcgcagtggagagtatgatgaaaaaattagaagatgttggtgtactggtagcgcgcattttaatgccgattctgtttattaccgctggctggggaaaaattactggctacgcgggtacccaacaatatatggaagcaatgggcgtcccgggttttatgctgccactggtgattctgcttgagtttggtggtg

SEQ ID NO: 6235 - DNA, 579 bp, Arabidopsis thaliana columbia
gcttaaaccctaaaatctcaaatcactaaaattgcagcttcaacactaagaaacataaaagcattaaacaagctcgaaaatggacaaatgaaaggagatcttaataaagacacatgaatgttaaaaaaaaatctagctaaaggcaaggaaatcgaatttgtttgaggagaaacataggaagcgaagaatataccattctcacgtaaggattgtcaccgagacaagactcacagatgattgggaaatcagaacgttcccatccatcagcctcgtgatctctcagtattctatgcgccatttcctaattctcttccttcctcaatgatttctggatttcttcttcagtctcgaacacgaagattaccttgaagagcagatttgctctcgtttcgattttttcgggaatctttaatattacagctgctgttgggccgaatgtttgtttggcccaatttaaacccatgaaataagaaagcttaaagtgatggtggtgtactgaaataaacaatacggactcacacagatgataattcatcgtcacacacaggcgggaacaaaaatacctaaaatcgctaaatg

SEQ ID NO: 6236 - DNA, 469 bp, Arabidopsis thaliana columbia
tcccgatcacggacccggtaaggatgcagcaatttactgctggtacttaccttactttataccgtcgtcaatatcccttactgcgcattgggtggtgtaatcaccaatgacccgactcagcgtatctcgctgcaatcctggcgttttgtgctggcgaccgcgggaggcatgctttctactgttctgatgatgccactggttaatttaattggcggtgataatacaccactcggtttccagggcggtatcgcggtcctttccgtggtggcattcatgatgccggcattttgtatcttcagcactaaagaacgcgttgaagcaccacctacaacaacgtctatgcggcaagatttacgtgatatctggcaaaacgaccagtggcggattgtcggtttactaaccattttcaatatcctggcggtgtgcgtacgcggtggggcgatgatgtattacgtcacatggattttgg

SEQ ID NO: 6237 - DNA, 566 bp, Arabidopsis thaliana columbia
tttggcagataaaattgactgcgtactgaatatccgggcgtgtaatagtgaggtattgcagtttgccggggagacttctgaaataggttggttcttcaaatggttctgagttgagattggtcaattgttgcggtagtggagttggcatcggattgcagtcactcatacctgcatggtgtagaatctctgatgcataggctgtctgatgtagaaagagaccatcagagtaatcttcaatttgaattcccaagaagtatcgaggaggaccaagatctttcattgaaaatctgttgttaagagctttgagaaggtcttcaaggagtgattgatcactaccagtcagaaggatgtcatcaacgtatagtagcaagtagagtgtttcccatcttgaagacacacaaacaaagacgggtctgatttactgcaaacaaagccaaagtcaagaagaaaattactgaaagtatcaaaccatgcccgcggacgttgttttaaaccgtagagggctttggtgaggcgacaaacatgattaggcttctgagagtcacaaaactcgttggttgatcatg

SEQ ID NO: 6238 - DNA, 562 bp, Arabidopsis thaliana columbia
ccgaaatgataaccatcctcaacggccaccgtctccgccgccacctccatcggctggggaagtacattattatccaccggaagtgaggaagatgcaagtaggaagacctcccggcggagatagaattagggttacgaagagaccaccgaatggagattattcacctagggttatcaatagcaaaactggaggaggagagacgacgatggagaagaagactcatcatccttacaatcttgttgagccaatgcagtatctcttcgttcggattgtgaaggcgcgtggcttaccacctaacgagagcgcgtatgttaaggtacggacgtcgaaccatttcgtcaggtctaaaccggccgttaaccggccggcgaatcggttgattcccggagtggaatcaggtttttgctcttggtcataaccggtctgattccgctgtaactggtgcgactcttgagatctctgcttgggatgcttcgtcggagagttttctcggaggagtttgttttgatctctctgaggttccggttcgtgaccgccggatagtcgcttgtcctcagtggta

SEQ ID NO: 6239 - DNA, 528 bp, Arabidopsis thaliana columbia
ctttcattagttggaagatcaaaaggacaaggaaaagctgaagacaaatgttacaaggcattcacaactctcgtaagtaaagttgtatcaccttccaagataacgaggtagtgaaactaatcaaacctgaactagaacaaaaaggttctgcagaaaatataaacctaccttctcttctggagccaggcttgctgttgtgcttgctgacgagacaggttccggtagtaatactggaactggagaaataaattaagattttgcgttaagatagttcggacttctgatgatgagaattgaacaagagtgcagaagaaaccacaccttttgctgttccatagataaatcatccatgcatttaatcaaaaactccatattgttctcaaggaaaggagtggttgatgagtgtagacgatcataatcgccctagaaaggcgaaaatacagaagtatcaagagtcaaaatctgcaatgctgacagcaagcaaggatcactatccagatagtagtattgtccctgtgagacaggtgt

SEQ ID NO: 6240 - DNA, 532 bp, Arabidopsis thaliana columbia
gaggatccctgaaataaataaacatcctgccatcgtgatatgagacagcttactttactttgtgatttggcagaaaataagatgaaccaaagtaaatcaaaagaaacataatatggaccgcaagtcagctaacaagaaactggtgctgccaaggaattcagccagaaaaactcacattgcccttctcaaagtctcctccctgaatcatgaaatctctgatgacacgatggaatgtagaacccttgtagccaaatcccttttcacctgtgcatagagcacgaaagttctccacagtttggggaacatcatcaccatacaatccaataacaatcctcccagctaacttccccactggattgccaacacttatatcgaaatacaccttgtgtgttattttcgattgcggttcagtaaccacctggaatacaaaatccacatcatattatgattccatagcttttagtaaagctaatggaaaaaaaaaactaagagtaagctggataaacaaccaattccatcaaatgacatcagt

SEQ ID NO: 6241 - DNA, 580 bp, Arabidopsis thaliana columbia
  unsure (1)..(580): unsure at all n locations
gttttttttgtaaacagtctagttgggatgtcaatgtgacatcgttttgacgcttagttattgaaacgacgtcgtttaaaattttaggataatttatttttgaaaataaatctgaaagcagagtgatatgttcgttcttattgccgatgaaatctctaatatgctccctgagtaatacctttgatgcacaaacgcgggaaatgaccttcattgtcccaacaccaaaacccaaatccatcaggaagctgagtgaatcagaaaatggtgtcaaagctttctcttttccgagccaattcacttccttttccagtcatctcttcctactctgctcgttttatccttaaaccctatcccaaacctaaaacccttatcttctgtgtcttctccagtaatctctcctccaccacctttccgtatggcccgtctcttctgaaaggaaagaagcctgtgctagatgatattagattagcttcaattggtcgagacagagatgcccatcgaggcaaaattggagagtttgatgaatcaatntgagaagatgttcttttgaatgaagatgaatttactagggtttttgaga

SEQ ID NO: 6242 - DNA, 546 bp, Arabidopsis thaliana columbia
gccgataaaaaagtatcatcgtcataacagtatccaccaccgattaaaaagtatcctccgccagaaaagtatccacccccgatcaagaagtatcctccgccagaacagtatccaccgccgatcaagaagtatcctccgccaattaagaagtatcctccgccagaagagtatccaccaccgatcaagacttatcctcatccccctgtgaagtatccaccgcctccgtacaagacttaccctcatccgccgatcaaaacttatcctcctccgaaagaatgtcctcctccgcctgaacattacccttggcctccgaaaaagaaatatcctccaccggttgagtatccgtcgccgccatataagaaatatcctccggctgatccatagtaactcaaaaccaaacaaggacgtgtttgtctataagtatatgtctagttaaaaaactgttctgttctttctgttatgttctttctttttcttatgactttctgttatgatgcatcagatagagaataaactgttctgtcttgaatttgttacataggagag

SEQ ID NO: 6243 - DNA, 634 bp, Arabidopsis thaliana columbia
cccaaacaaaaagcacaagcacttagcagagcaaatgaagaagacgaagcacactgagaattcaccggccagagatcaccaataagtgttgtagtttccggttacttcgaataaccttcaatggagcttccgttactctcgtatgctagctccgcgtcgttttcacggacaggcttatgctcttcttcttcttcctcctcaactagtatctatgagtttccggagagaagacggagtttaaaattgagattcaatggtggagaaaggtcacgaagcgttatagcttccgctgaacggagcagtgaagggattgagaagacaacagacaccgtcggtggcggaggaggaggaggagcaggcagatttgctggtacatccatggaggttactacacttgatcgtggttttgctaactccaccaccgttgattttccgatctgggacaaaatcggcgccgtcgttagacttacttatggaatcggtgagtagatttacattaaatgtcttctgtttcactcctctgatatgtgaaacttgaaatttacctttgtggtgcattagtatttttgtgtggatgatagttcaatgtgtgattgaacattaggaatatatggacaatggctgtacaggaaga

SEQ ID NO: 6244 - DNA, 603 bp, Arabidopsis thaliana columbia
  unsure (1)..(603): unsure at all n locations
nnnnnnnnnnnnnnnnnnnnnctaaagccggtcaccagaatcatctttttatcggggtcgataaacgggtaatttgccgccagttctgaacgcagcttgtcgctgctcatcacctggtcacgcacccataacagtgcatcaatgactgtattaccggtaatgaagattcggctatccgcaacgttttcacgcagcaagttttgccgggaagtttcggttggagagaagtgatacatcgccagatgcccggtcaatgtacggttagcctcttccggccacggcgaatagagatcgcccgtgcgcagaccagcctcaacgtgaccaacaggaatacgctgataaaacgccgccagcgtggttgccagcgtcgtcgtcgtatcgccgtgaaccagcacgacgtctggtttgaactcggcaagaataggttttagcccttccagaatccgacaggttatctctgtcaggccctgtcctggctgcattatgttgagatcgtagtcaggtacaatggaaaagagtttcagcacctgatcgagcatctctcgatgctgcgcagtgacgcaaactttagcctcaaaaaaaggatcttttgccaacgcatgc

SEQ ID NO: 6245 - DNA, 493 bp, Arabidopsis thaliana columbia
caccaacatcatccttatcgtcatcatcatggttagggaggagacataataatgatgggaagatggctgtgaaggtggctttcatgttcatgacaggtggaagactcccattggctggcttgtgggaaaagttctttgaaggacatgaagggttttattccatatatgttcatactaatccatcttttcaagattctttccccgaaacttccgtcttctattcaagaagaatcccaagtcaggtgataataacagctttagtttgttaattatatctttctcttttcttaaataaacctatttaggtacccctatatatgatcagtatacgactaatcagaaattatatcagtagttttccaaaaacacatcactatacttttccaaacatagctcttcgatttgacatgttggtttttcacatggcacgtgcattgataatgattcgacaattgcataatggtccattaaggcatgaacccatttgatatta

SEQ ID NO: 6246 - DNA, 543 bp, Arabidopsis thaliana
agacagtagcaagcacacggtgtttgagatcgcagagtctttgagaaaattcgggtggatcataccggcttacactatgcctgcagatgcacagcacattgctgtctcagagttgtgataagagaagactttagccgaggccttgcagatagactcatcacacatatcattcaggtgctgaaagagattgaagggcttcctagcaggattgcacatcttgctgcggctgcacgtgttagtggtgatgatgaagaagttaaagtgaagactgccaagatgtccttggaggatatcactaagtattggaaacgccttgtggaacacaagagaaatattgtctgctaagcgcaagtcttattctttgcacttatatggtaataaggttttgatttagaccatttggcggtaataaggttttaattttttcttgatattttatttatattgatggtatacaaaatatatttcagaaagagtggcttgtcattagtactagtagttgtaggattgtcactctcgtaaacgaaaaattagctgcaaaat

SEQ ID NO: 6247 - DNA, 546 bp, Arabidopsis thaliana columbia
cctgacaagatgaaaagcagacaattaccttaagtgctgctcttcggaaaggcgatgcacgaatataagacttcaccaatttgtagatagagaaatccagaagtaaaccaggattttcatctcgaagccatggatgagctgcaaaattattaatcatactcatgttttcatttcaccaatcaatgtcactagttttaacaatagtggttataaacttacctaaagcttgagcagctgtcattcttttcctatggtctttattcaaaagccttttcacaaagtctttggcaataggagatattgaaggccacggcaaatcgtcgaaattcgggttcgctctaagcacacaacgaaaaattgcagactcggttcttccgtaaaaaggtctacttccacagagtaatatgtaagatatgacaccaatgctccatatatctgcttcggtgctataggatctgtgaagtacttcaggtgcaacatagtatgcacttcctaccacatcgttgagacgctgatctagttaaagccaacataaaaaaaaaaaaa

SEQ ID NO: 6248 - DNA, 617 bp, Arabidopsis thaliana columbia
ctgctgttttctttgtcgcgctttatatgattgctcttggaactggcggtataaagccgtgtgtttcgtcctttggagctgatcagtttgatgagaatgatgagaatgagaagatcaagaaaagttctttcttcaactggttttacttctccattaatgttggagctctcattgctgcaactgttctcgtctggatacaaatgaatgttggttggggatggggtttcggtgttccaacagtcgcgatggttatcgcggtttgctttttcttcttcggaagccgtttttacagacttcagagacctggagggagtccacttactaggatctttcaggttatagtagcggcttttcggaagataagtgttaaggttccagaggacaagtctctgctctttgaaactgcagatgatgagagtaacatcaaaggtagccggaaacttgtgcacacagataacttaaagtaagaaactaaagtttgaatctttatcctaacttcaaaaatactctgttttcaaatctaaagttttgaaacatctcaggttttttgacaaggcagcggttgagagtcatctgatagcatcaagacggggaagcaaccatggagactatgtctg

SEQ ID NO: 6249 - DNA, 512 bp, Arabidopsis thaliana columbia
aaagaaaaaaaaaaatcaataacccacctggaattatcatttctaactgtttttgcattgccaaatgcttccaagagaggatttgactgcagaacaagaatacttaaattagaatagataactcgcaaataaagaaagtcaaacatgatcacccctaaatatttatctgcaaacaaataccaggggaggaaaacaaaggcatctatccagttctttttttctcattgaacaagatagaagacacaaattttataaccaaaatcttacttcaaggacttgcagctcaacacttctatcatcgtcagtagcacgtcccccaacaaatgtaagatactgcatgattagtttggttgtctcagtttttccagctccactttcaccgctaacaagtattgactgacttcgactgtcgtcaatcattgctatgggttataaagaataactatggttaatagattaaaatgactggctagtagattttgaaaatcagaaacattagagaaaaaagagtg

SEQ ID NO: 6250 - DNA, 520 bp, Arabidopsis thaliana
cccgtcagcacagcatgtagtgcctcatacagttgcccatggcactatatgttgtgttgtatctctggactgtgatgcgccgcgcaggggcggaaaacagcgatatgatgattttctcagcgttgtacacttccggaaagtcgtttattcaaataaagtcggatccatacgaaacgggaatgcggtaattacgctttgtttttataagtcagattttaatttttattggttaacataacgaaaggtaaaatacataaggcttactaaaagccagataacagtatgcgtatttgcgcgctgatttttgcggtataagaatatatactgatatgtatacccgaagtatgtcaaaaagaggtgtgctatgaagcagcgtattacagtgacagttgacagcgacagtgatcagttgctcaaggcatatgatgtcaatatctccggtctggtaagcacaaccatgcagaatgaagcccgtcgtctgcgtgccgaacgctggaaagcggaaaatcaggaagggatg

SEQ ID NO: 6251 - DNA, 554 bp, Arabidopsis thaliana columbia
cagtctctaacatgagagacaatctaaagcatattaggtggtggtgtagacctgcaagtaacgaagaggcagatctccacgggatttagcagcagggaaggaggaggcttccttgaaattggtgaggaaagccagacggccatgcctcgtgcagcccagccacgtcccgccgccaacaaggtctcttcctcccaccgtctctccgtcttcccaccaacgcagcgcctctgtcgcccttgacaatttacacaaaagattagtacaatctcatcaaaggaaacgattacagaggggattgaatcacctgttgtgatcttcatctctgttgagaaatagaagaaaagggtacagcggatcgaattgccacagaaatactgctatgcacattctcttctcctccgacgaaccaacgaaccaaccatctctctgctctaatcaaagtcgtcgtctctttttttttttttttctccgtcttctacttaaagaaactgcgtgtagtttttcttccacgaaacggcagcacgtgcaggttttacaaactctcgattgattga

SEQ ID NO: 6252 - DNA, 1717 bp, Arabidopsis thaliana
tcaaaatttctctatcagaatagaaagcagagagagataagcatcaataaaaatagtcaaggatcaagcatatatagatccaaagatacaacataacaactccctgagtctctcagtacaggagctaaaacattacgtactaaatcgatcatttactacatattaagactaattttcaacgacccttaagacaatagctactaaatcgattattaagactaaatttcaacgacccttaagacattttaaaaggggtaaacagagacatattagggctgctccatacgcctctccagctcttccctcgccttacgagccacatttttcagccgcttttccagttcaagcagctcctccttactcaaggttttaagatctgccttcagagcttctagactttccagaaactccttcaacccatttggtttcttcgatccttttccagatgcattcaagctaacataataaatactatgttaaaaagaggttacaaaagaaagcacatcagaaaatttctagggttcaaaaaaggattacctcgctgccgccatcgtcaccttgttgggaactagggttcttcactcttctggtcaataacgtgtgagacgaagaagcctatttcgatatatatatttgtttgttattgggccacttagcctttcttatcttgggctatttataataaacacatatgacaacaaaagtccaaacttctttttttttttgtcactcaaactgaaatttgattgataaacttgatgtggaaccagggaattacacgatgcccaaacaagagaagcaaagccgacgaacgaaattaaagttctcagagataaagccggagaaaacgaagatatctccggaagcatagccctatgaaagggaaacaaaagaaactaaaacacaaagcagcaaaaattggaccctaaagcgtaagagaacgaacccaaatacataaacagagacaacaagactaaaaaccaaagaaaacaatagctacaagcggcaaataagacctcctcctcagaagcacttgcgaagagacttacttcggctgcccacggccacccccgaaaaaaaatctgccacctcctatcatgaagagagccaatctctcgaaaccagaagcaagaacttcataacccggcaagccaaaccacaagaagaaacttgaaaacgcttccggatgcgacgacgacgactgaggcgaccaattgcgtctagatagaagccttcaaaaagctaacagaaaagatctgaagcaagtacaaggagtgaagcctaacctctcgagaaccttcatcgagaacaagcacgacgaaagaaggaggaagctatcaaacacagaaaccaacaccaaggaggagaaccaactgccaacaaagaagactaccacaacagaaacagaaagaaaagggacatccagttgggaaccaatggctgaagcaaggagaccaagaggcggaaggaaaggcatggtctgggcacaaactcaacgagaacccaccaccacacaaacaatggcatagaaacaaagctaaccacttgaacggctacaagatcacctgatctgtccgctccaaccgaatccataatctcaaagttcggttgactttctattaatcctcaataatattgactttctattttcctttatttttttacatctattttgtttcatttttaagaaaaatgtttattttccccatttttatgg

SEQ ID NO: 6253 - DNA, 1737 bp, Arabidopsis thaliana
tttgttttagttgtgtttgtggttctgaggaatagaggaataacgtgaaagtagagtaaaaattcaaaactttaactctacagacggcctagagatcgagtacattggtcgagtatgagtgatgtttaacacctaaaaaaaaaattaaatcatcatttcactcgaccaacagaagctatagagtcttagagagagtttatcaagtttacagaagattgcgggatttcctgagattttcctagtgaagatagagtaatgattcagaacaaagagacagatgagggactcactcctgcggccatgtctcccacgctccctacaaggtgataacaaaatccatccccttcttctctccatcactcgtcttcaacgccatcatcatccaaccaccaccactcgaccccatcaccttctctctcttcatatactcgacctcctcttctcattcttgcaaccaaagaacacaacaatccgccatctctcttcctcacaactctcactcgaccacaactcagttctcgaagcttacaccaccgcttgctctctcacttactcggcttcatcgctctcatcaccatctctccacatactcgaccacgcgagatcactcgacctcgccgcttcacaccgcctctccatcgtcacctcctgctccctctctacaaggaaacaaactcgagctcgccatttctttcactcgacctctatcaccaagctaccttcaccacttctagctcttaaccactcgaccatcttcaccatcaaccaatcaaatcgttttctcctccattaaagcttcaaatactcgaccgctgaacacttatcaccttcaagctcctcatctctccatcgtttccaacgccgctgctctcatccccacgaaagctcgtcatcacttctcattgatcaccgtttcactcgattcagcaaccaaactcgacctcgcctctcttgcctctcacaatcacttgatctctcatcaccatcttcatcacctcctttactcgaccaccgtgagtctcgctccaccatcgtcattttcaagctcactcgattgccgaatcaaagagaaggagagtgaagctctaccaccgccactcgaccgcgtttccctctgcacattcaagactcgacaaaggtgctacaatctccacaccggatcttgttcaccatacactcgaccaacaactctcaatcgaaaaaaaaaaaacttttttttttccaaaccaacggtttcattcgaccggtttactcgaccggtacactggtttagattgtgtttttggttttgctgttactaaagtactaacgtttatcattgagtttcgtttgtcttcaggtttcatcatgagtaactatagtgagaatcctctatggatcctgattataatgtggatgaagctgagtcctggtccactagaccagagagaggaacatgtttacgagagtttcagcgatgaatttgaacgctccacagctcgacgtaatcagagaagagctgaaatcgctagaggaaagagagcgatgtcgagtatatatgagctgattgatgaggatatcgaaactgagtatgagccagagtcatggcgcaaggagacgaagctgttgaacaaattcgacgaggttacagtgtaggagtatatcagattctttgagatgaacgacttctggggaacgaggtatctggagacactcatgtcttacccttacgttgcctataaggaggagacaatcgag

SEQ ID NO: 6254 - DNA, 1961 bp, Arabidopsis thaliana
aatgatcccccaatgtatttcatcaaactgagaatccgttaatattgtttctgtgttggcagtgttgctgttacttgttagtagttactgttctcatttctcaataagtgatcaaaccgaaactaaaacagtactgaaccgacggtttaatttggctagaaaaattcaaacaattatgatgttgtgccttaatgtgacaacatagataaaaagaagctcttacaaacaaactgactaagtcttcctcggagtcaaaatcataagcatattccatgctcataccaataaagtaatgaaaatgacaaagagacttattaatcgttataaagatccttgttctgtttcactcatcatgaattcgaaatttcgatataacaaaccaaaaggaaagaagcaaaaaaaaaaaaaaaaagctctggattcggaatctcagataaaaaaaccaacgatgccgataaaggtattgtcgtcgcttgatgtagctcgaacacaatggtaccatttcaaagcgatcatagtagcgggaatgggtctattcaccgacgcatacgatcttttctgcatagcaccggtcatgaaaatgattagtcatgtttattacaacggtgactcaatcaacacagccgttctttcaacttcttacgccatcgctttactcggcacagccacgggtcaactagtcttcggttacctcggtgaccgagtcggtcgtcgccgagtctacggactttgtttgattattatgatccttagctcctttggttgtggcttttccgtgtgcaccactcggtcggtcttgtgttatggttagcctcggttttttccggttctttcttggtttaggtatcggtggtgattacccgctctcggctaccattatgtcggagtttgctaataagaggacacgtggcgcgtttatcgctgcggtgttttcgatgcaagggttggggattttggttagctctgccgtgaccatggctgtttgcgtggcgtttaagagaagtggcggtggtttggaggtggatgcggcggctccgacggaagctgacttggcctggagacttatacttatgatcggtgctcttcctgctgcattgacgttctattggcgaatgttgatgcctgaaaccgcaagtccgtccactcttttcatccgtttgtctttttatatattttacctatgacaaatcagaaaggacgtaatgcacaaagaatggtcttgaaaaccttgaaatcactatttgtcccacattaaaaatcttgaaatcaactagatttgataatatcgttttatagaaacataattgcattatttgttctgtttatgtgaacgtttctctagtttaagaacatatagtacctcatttcaacccataaaatgaacattaaactatttttttcaagcaatgatataactgttccgatctctcacacacggacacgcacacacatactattggattccttaaaagaagtattactagttttgacatattttaatagctaggttttataaatatatgtatcaaatattgaaagggttacaaattagtagtttgcttcaatggagtcattgactttataagggatagataccataattctgtggtatatactcttgtccttacgtattcaacattagcaatccaaagtctacaccaatcatgtatttactctcttttttatccatacaaaatttcatttatttattctttcatctaatatttatacatacctcaggtatcagatcctatcagctccagctaatcaaccaagttttattttttgatcacaacagatttaaattatcctcacacgtactcttccacttattacagcatacactaacagaaagtcaaaagcaacaaaaaaatcgatttcctaacacttatgttttagggtaaattgtacacagtagccattgacccacttttaatttcagattgtgacaaagtgggatg

SEQ ID NO: 6255 - DNA, 1024 bp, Arabidopsis thaliana columbia
gaaattgaccgagctaagagccgtatcgaggagcttgaaaaagtttgcacgctcaatagtggggaaggtgaagcttcagcatctaagaaacttgtggattcgatgaaaatggaagcggaacatcccggaagaatgagaacaaactccagacgctgttggaggataaatgcattgaaatcgaccgagctaagagccgaattgaaggacttgaaagagactgcttgaagcttaaatatgcggaaagtgaggctgcaacggtcaaagaactagtgagttcgatgaaaatggaagtggaaagcgcacgaagcaacgaaaagaaactccagctgtcgttgcaggaaaagaccatcgaaattgacagagctaagggacaaatcgaggctctggagaggcaaaagatggaactttctgaaacgctggagacaagagcgaaacaaaatgaagaagaggttactaaatggcagagaatcatcaacgctgagaagtcaaaaaacattcgagagaatttgatggagaaagaagactcttttatggtttgggatgaagcaacaccgatgcagcgagtaaagcgtttgaaggtagaagcagcagtaacctgttcgggttcagattttgctcaagagacggaagaagattcagtttcacaagagagcaggaaagttaggacaatgactccgagaagatgcacaagctcagaagctggagcaacgtcttcttccacgggcacggggcattcgaaatacacaatgaagaagctgagaactgagatactagaacatgggtttggggctgagttggtcgggttaaagaatccaagaaagagagatttggttcagctctatgaacgcaccgttttgcgaaagtgaagttgtaataacacataaaacaaggtcaagtttctcgttcttggaactttctgtgaattttgctgcttcgaaatgaaaatggtattgcagaagataaaagcttagttttttcactgatgcggttattaaggtttttaatgtcgaacccgcgtttggca

SEQ ID NO: 6256 - DNA, 1740 bp, Arabidopsis thaliana
ctaaccgatgttgtatcaccggtaagcacaacaaaacttaaatcattaaaatggtttgatggatatatatatatgagattgaatcaaaattatatatttagtttataagatcaaatttgttgttaggtaacaaaagaacgactaatggacaagggaagtcatggtggttgaagtatcgaagtggcggtttcaagtcgatatcaagacctttgttgatcgaaatcatcttctccgaaaactgaagaggtgacactaatcaacacacaatccgctatccgaatcaaaaccgctataggacgtggcggttacatcaaagacattttcgctaggagatttacgatgaagacgatgaaatacgttttctggatgaccggttcgtataagctgcatcccgtaggcgggtttgatcccaaggcgttgccggagattagcaatatccattaccgtgacatgaccgcagaaaacgttacaatttcggcaaagctagaaaggatcaagaatggtccatttacgggtttatgcatgtcgagtgtgactatagctttgtcgccggacccgaagaagctgcagtggaactgacggatgtctccggagttactagtagggttacaccggagccgtgcagtttgttaccggataagagaactacaatggactcagactgtgattttcccacggataagattcctattgagagtcgctagaaggaggtgaaatttgagatttctcttactacaagaataaagaaccatcaaaccaagcagcaatgaccaacaatcaggtccccgctaacacaatggacatggagggaaacccgattcctccagtccagacaaacactcctaaggtcgccactcccgcagtcctagcagaaatgaaaagcatgatggcacaacttcagaagaaggtggactatcatgaacaagcgaatcggtctttggcccagcagctcaaggcggctaccttccaagggcagatcatgaccacccgctttgacgtgcgacattttcatgatcggcgagtagcggcagacctcaatccaacgaggctcgtgatcaatacgcctggtaacacgacgaggccagtccgatgaactgtgccagcgctcagtggaatccgagcaaaaccaacagctttgggagagccgaacgcgacaaaccaagtggaggaaaccgatccgcagttttacattccttgagccgaggctgccaagggctgaggaatatgataggaacaagaaataaatgccatcaaactctccctagccaaggaaaaaaccgagatgaagcttgttcgatcgcagctgcatagcgcagtctcctcgtctcaaaacatcgatcacattctggaagagtcccacaacacacctttcactcgtaagatctccaacgcaataattttagacccgaggaagctcaatatcgagtacttcaaggggcatttaaagtcatttataatctctatggcccgagccaagttcaagccaaaggagaggaacgcttgtctctttcatctatttgtcgagcacctgaaggggccggccttggattagttcttaaaacttgaagagaattctgttgacagtttccaagagctgccaacacttttcctcaaacaatactcagtgttgattgatccaggcacatcagacgctgacctttggtcgctatcttagcagccaaatgagccactcaaaggattcctcacaaagtttaggttgaccctagcctaggtcgaggg

SEQ ID NO: 6257 - DNA, 1138 bp, Arabidopsis thaliana
ctcgtcacttgcaagaacaacaggagaaacaagctttaaaagaactctaggcttgttatcttgtgaagccgtcttcgaataatccaaaaaattaatcaaagataaaagatgagaagagagagaagagaacttatcacagaggtcctcaagtggtgtgggctgaagagaatgtgcagaatcatctgtctgtgaaaccagagggtgtcgatcgacatgggtagtggtgtcgatcgacaccgttgctctacaactctcattggcgagctaaacgtgttggagcgttgtgtgtggctctgtggtgggattctgatgtctggggaggtgtgtctgtgctggaggcaatgcaattgataggcttagtaagctctgaaccatccatgccaaactccatctccaaatcacaaaccttgagagagattctctctcttcacatcaaacctagcaccaactgtagctaggaatgctcatccaaggataagggaaccttgggttccttctcatagtccaggacaacaaaatcagcagggataacagagttaccaaccttaacatgaacatcttcaaggattccttcagggattcgcttggaacgatccgcgaagagaagagtgatgcgagtaggtctgtagtgagtcatgcctagtctctcagcaaacagacttaggcatgaggttgatgatggatcccatatcacacaaaaagcggctaaacctgcttctggagatagagcaattaagaacaaagctacatggatctacaagctactcagtggtctgaccaggagtaatggtgcggatgtactcggctatgtctactctctatgccttctccttcttggccttaggcagcatgattgcactgatgtccctggtaagcagcttagcttcatctaagctaattccattgtcaacaagtcgcttgacatacctgttgagtgaggaagcagatgtctcagaagcatccttaggaagagtatggaagatcttctccattatggctttgcacttggcagcatgaagctcctgcttagaacgacgcctcttcggatacgcgacaggaggagtgtagacaggctcgggctacataggtatttgcaccttacagggtgcagtccggatccaatgtcgatcgacacaag

SEQ ID NO: 6258 - DNA, 588 bp, Arabidopsis thaliana
gattacttgctcagttctgcttgagggaatggaggaggagttctttgtttctttcgtctatgcatctaattttgtggatgacaggaaggagttatgggcagatatgaaaaatcactatgactcacccatgtttagaaataaaccttggatgatctatggtaatatgatcctggttagaatcacagtcccttgaatacacttcgtgtggttgattgtaagatgatgagattgttcaggaacagtctgcggattgactgtatgatggtgatggtgatggcgatcgagtatcagatcctgatggtgcgatctagtagatttggtgacagtgatgatgatgacgcgatcgagtagatttgttgatatgatgctgcgatagagtgattttggtgaagtgatgatatgatgctgcgatagagtgattttgatgaagtgatgatatgatgctacgatagagtggttttggtgaactgatggtatgatgttgcgatagagtgattttggtgaactgatggtatgatgctgcgatagagtggttttggtgactgatggtatgatgttcgatagagtggttttggtgaagtgatgata

SEQ ID NO: 6259 - DNA, 1083 bp, Arabidopsis thaliana
atattgcgggttagaactttcatcttggacattgatttcatctggtttatctggtgctttggctctgagtccccgctttcaaacctcacctccaacttgttcttgattgtttgcttgagggcaaggaaagactaagtttgggggagttgataagtgtgtattttgcatgttttgagaatccatttgtcatcactttagcatcatatcatcactgttttataccatttctcatcatttgtcatcactttacatgtttaggataggtttgcatgcatgttgcatatttgtgttgatttcaggtgatttggagctgttgacgagctaactggaagaagcggacctgatcatgtcaaaccactcgaccccgtggttgagtatgagcttcaagatctcaagagaccactcgatcacctggtcgagtagaggacttctcgatttcatcacatcactcgacccctaggtcgagtgtcttcatccccatcacttgaccatcactcgatcacatcactcgaccccgtggtcgagtgtctttacctccattacctgatcatcactcgaccacatcactctaccaggaagtcgagtatcaccatcaccaccactcgactacatactcgatggcaagcttcagagtcttcttcattctgcactcaaccagacactcaagcacaaggaagaaaagaagactccagctattcactcgacctcccactcgaccgcatgggtccagtacagtttttaatccgtcccaatactgtgtcgttttaagtattaggattttggaatatttggctataagtagcatgtacttcacattttcgaaaacaagtttttttctagttttattccgcaaacactgtgttctagacctttgtaatccagatttctctttgtctattcagtatccaacattcgttcttgatttcttttactgttcttcattctgttatcaccctgctgttatcatgttcttaacctgttcaacgtttatgctttctactatgatgtttgagtagtgaataggtttctgaggatgggttagagtagtgtagaattctcagtatgctaggtgattgagtattg

SEQ ID NO: 6260 - DNA, 448 bp, Arabidopsis thaliana columbia
cctatcaaaaaagtatgtagttccataacgacatggctcatcgtaatgtgaaactatataggtcttactcttttactattactattttgactaaagattataaccgaaaaaataatatccgtgatttcacacatatcagacaaaatgattagtggcaatctagcaaatccaaataataaggatgggtaaaaatgtaacatgagaacgacccatccctataaggcctacataaaccgccaatcactcctctaaaaatcttacgaaagaagagaacaaagaagaaattttgaaaatagtgaaaatggtaaccgtaagccaaagtcacacgacgacgtttctcttcttcaccacatttctcttgatattcggatcaatctcagccgtccgtttgcttccacgaccaaacactacaacaaccaacgatctagatttcatccgaacaagctgc

SEQ ID NO: 6261 - DNA, 498 bp, Arabidopsis thaliana columbia
taaactttaataaatcaaaatatttttctgcttttatttggatcaagaatgtccatcaaaatcaaaccaattactgaggcttgcaccactagattcttataacttagaaaaagaaactgagaacaaggatcctttaagatcaacttccaagtctggggcatccgttagtaccacaatccgttagtacgacaatataaaaatattagatttcttccgaaattataaccatcgtacatgccaaaactgtcaaagaagcagtgtatggttccccttttcaaaaatattggaacacgtaccaaaacctccagcaggcgggaaccggtgagcagcatcaccagcaagtatcactctgttctcacaacacatgaatttctcggcgacttcagcatgcatgacccatggcttaatatcagctacatccaagtctgaaagctcatgtcccaccaaattgaatatcagcatcttgcacatctacaaaacaatcatcggtcaggcaga

SEQ ID NO: 6262 - DNA, 514 bp, Arabidopsis thaliana columbia
gccagtgtgctctaaagatcaacatttcattaaccaatgaagtgtaaggatgatatgtctgccgtactgaccgctgaacaagccctgaaattagtgggtgagatgtttgtttatcacatgccatttaaccgcgcattggggatggaactggagcgttacgaaaaagagttcgcacagctggcctttaaaaatcagccaatgatggtgggcaactgggcgcaaagcattttgcacggcggggtcattgcgtcggcgctggatgtcgccgccggtctggtgtgcgtgggaagtaccttaacccgccacgaaaccatcagtgaagatgaactacgccagcggctatcgcggatggggaccattgatcttcgcgttgattatctgcgcccaggcaggggcgagcgttttactgctactagtagcctgttgcgtgcaggcaataaagtcgccgtcgcccgcgttgaattacacaatgaagaacagctttatattgccagtgccacgccacctatatggt

SEQ ID NO: 6263 - DNA, 514 bp, Arabidopsis thaliana columbia
tggacctcactgggttccagttccacgctacgtggacgaagagatgctcgtaaccatcggtcttgggctagaggcatgcgcagataacaccacgtgtccaaaattctcagcttctatgagcaatcactctttcgtgttacccaagaagctatcgatcttggaagcagtgtttcacgacgttaaagggattttcaccgcggattttccagaccagcctccggttaagtttgattacacgaacccgaacgtaacccaaacaaacccgggacttttgttcactcaaaaatcaactagcgccaagattttgaaattcaatacgacggtggaggtagtgttacagaaccatgcgcttatagcggcggagagtcatcccatgcatctacatggatttaatttccatgtattggctcaagggtttggtaattatgacccgagccgtgaccggagcaagttaaatctcgttgacccgcaatcccgtaacactttggctgtccctgttggtggatgggctgtg

SEQ ID NO: 6264 - DNA, 1368 bp, Arabidopsis thaliana
acagtaaatggatctctactcttgttcaaactggtggctttcccattctttatctccctctttctctccttcctgcttcacaatcttcttcttcttcttcatcttcttcttctttcaagactctggtttggatttatctttctcttggttttgctattggtttagataatcttttatactcttttggtcttttgtatctctctgcttcaacttattcgattctatgtgcttcacagttagctttcaatggtgtcttctcttattacatcaattctcagaaaatcacttgtttgattctcttctctgtgttgtttctctctgtctctgctgtgttggtttctcttgacgatgattcaaatagcccatcaggagattctaagtggagttacttgattgggtgtttatgtgcagtttttgcttctcttatctattctcttcagctctctcttatgcagttttctttcgagaatgttctcaagagtgagacgttctctatggttctcgagatgcaaatctatacgtcgcttgtggcttcttgtgttgcggttatcgggttgtttgcgagcggggaatggatgttgttgagtgtggagatggaagagtttcacgagggtcaagtcatttatgttttgactttggttgggaccgcggtttcgtggcaattgggttctgtaggagccgtggcgcttatatttctggtttcttcgctgttttcgaaccttattggtacactctcactcattgttacgcctcttgcagccattgcggtgttccacgacaagctgactgaggttaagatggtcgcgatgctcattgccttcatggggttcgggttttatatctaccagaattatcttgatgacctgaaagtacaaagagcacgagaagctcaggctgaatagttctgctgtgttttattagttaattttgttagtaacctttcttagaacaagctagctacaagtgttgtattgtatatagtagagttcataatccggtgataatatacataatactaattgcatatggagcttgtttttacgggccaaagttctatgcagaatctacatacgtaatagatcaacgtatgaggttaagtataatggtggattcatcgagaatctcggagacacacatgttgtttcagaagatcatgatgttgctgatcttgaaacaaacatggttgaaagcaataaacatgttgatgattcaactttgaaagcttcgtcatcaaagaggaagatggttattaaggggttttgattgatcaaaaagaagaatctagttaccaatatgtccttaggcacgtccatacatataatagagatccactcggaaaagggtggcaattagctagagcagcgggtt

SEQ ID NO: 6265 - DNA, 1979 bp, Arabidopsis thaliana
ttcaagttatttctcatgatgtaaggctagtagatctatatgttgaatataaccctccccctttctatctgtcttgcatctatgggcacccaatacctagtgaacgccaccacctctgggaaaaactccaaagagtgtcagcacatcgttcaggaccttggatgatgtgtggggattttaatgagatccttaatctgaatgaaaagaaaggcggtcgacgtcgcagtattggcagcctgcaaaatttcacaaatatgatcaattgttgcaatatgaaggacttgaagtctaaaggaaacccttacagctgggtaggaaagaggcagaacgagaccattgaatcttgccttgacagagtcttcatcaattctgactggcaagcttcatttccagcttttgaaacagagtttttaccgattgctggatcagatcatgcccctgtcataatcgacattgcagaagaagtgtgcactaaacgcggacaatttcgatatgatcgtcgtcattttcaatttgaagactttgttgactccgtgcaaagaggctggaatcgaggccgatcagatagtcatggtggatactatgagaagctccattgttgcagacaagaactagcaaagtggaagagaagaacaaagacgaatactgcggagaaaattgagacgctaaaatatagagtagatgcggcggagagggaccacacgttgccacaccaaacaattcttcgactcagacaggatcttaaccaagcttatagagacgaagaactttattggcatctcaaaagcagaaacagatggatgctactaggagatcgaaatacaatgttcttctatgcctccactaagcttcggaaatctcgcaataggatcaaggcaatcactgatgctcagggaatagaaaacttcagagatgatactataggtaaagtggcagaaaactattttgctgacttgtttactacaactcagacttcagactgggaggagattatttcagggatagcccctaaagtaacagagcagatgaatcatgagcttcttcagagtgtaactgaccaggaagttagagatgcagtgtttgcgattggtgcagatagagctccgggttttgacggcttcacggctgcgttctatcatcatctttgggatctgattgggaatgatgtttgtttgatggtgcgacatttttttgaatcagatgtcatggataatcaaatcaaccaaactcagatttgcctcatccctaagatcatcgatcctaaacacatgtcggattatcgtcctattagtctctgtaccgccagctacaagattatctctaagattttgattaagcgcttaaagcagtgtcttggagatgtgatctcggactctcaggcagcgtttgtcccaggacaaaatatatcagacaacgttttggtcgctcatgaactccttcattctctgaaatcaagacgtgagtgtcaaagtgggtacgtggctgttaagacagatattagtaaagcttatgaccgagttgagtggaattttttggaaaaggttatgatacaattaggctttgcaccgagatgggtcaaatggataatgacttgcgtaacatccgtttcttatgaggtgcttatcaatggatcaccctatggtaagatcttcccatcgagaggtatccgacaaggcgaccctctatccccttatttatttctgttttgcgctgaagtcttgagtaatatgctgcgtaaagctgaagttaataaacagattcatgggatgaagattaccaaagattgccttgccatatctcacctcttgttcgcagatgattccttgtttttctgtagagcatctaatcagaatattgagcagctagcgttgattttcaagaaatatgaagaagcttcgggtcagaagataaactacgcgaaatcttcaataatttttggtcaaaaaattccaaccatgagacgacaacgacttcataga

SEQ ID NO: 6266 - DNA, 635 bp, Arabidopsis thaliana
taacggccgccagtgtgctctaaagataggagcgtcagaacaaatgtgtactcttttgaaatctctggcaaaatcgcgaaagaagtgtcaccgacgaggccgcgagtgacgcttgttagagcatcttggttgaccggcagtccaagtttcggtgcaactacgaacgtcagcgtggtgcaggaagagaaaccctaggttcatacgcacatggaatcaggatgcggtccgtgaatgaatacatagcccagacatttggggcccagtaagcatggcataagcctctggagaatgggaacagccgatctttcagctggagcagttggccccagtaaacaaatggtccgaacgcaagcccgaacaccgtaattatactgaggcctagcttgaaagcatttccaaatcgaggccgaaaaacagatttcgggtccaggcagtatgctcgcagcaggtagataaagtatgcaggggcaaggtagagatagatgtgctttaggcagagtagaacggcgaaggcgattccgctatacagcaatttcgactgcttccgagcccagacgatagacagtaccagaatgccgtacaggaagccattgtattgaaaatgaatatgatcgatgatgaacaatccgggtgat

SEQ ID NO: 6267 - DNA, 1076 bp, Arabidopsis thaliana
gtctctctatccgccgttacccaatgatcactcttaaatgagaacttgttcaaaaaggaagccgaagttcttggtaaagtcaagcaccgaaacatcacagtccttagagttactacgcaggtccaccagatttaaggcttttggtatatgactacatgcccaatgggaacttatctaccctgctccaagaagcttcccaccaagatggccatgtcctaaactggccaatgcgccacctcatagctctcgggatcgcgcgcggactcggattcctccatcaatccaacatggtaagaactgtatagtttaaatcacattctagattatacatcacttttaagtctttttaacatctcttattccaaataggttcatggtgatatcaagccacagaatgtactcttcgacgctgactttgaagcccatatatctgatttcgggcttgaccgtctcacaattcgatccccatcaagatcagccgtcacagcaaacaccattgggacactaggatatgtctctccagaagccacattgtccggggaaatcacaagagaatctgacatctacagcttcggcattgtcctactcgaaatcctaactggaaaaagaccagtaatgttcacacaagacgaggatatagtgaaatgggtaaagaaacagcttcagagaggtcaagttacagagctactagaaccaggactactcgaacttgacccggaatcatcagaatgggaagagttcttattaggaatcaaagtcggacttctttgtactgcaacagatcctctagaccgtccaacaatgtccgatgttgttttcatgcttgaaggctgtcgtgttggtcctgacgttccttcctccgccgacccaacctctcagccttcaccggcctaaccgtttttcttatttttagtcttcctgatttaaactgttagtcaaaaacaaaaaacaaaaaacaagaagcaattattaaaaatttcagcagtatttattggtctttggagcttctttaatgtcttttgtttggccaagaagttgaattaaattgttgtacaatctcgagtggtccctagaga

SEQ ID NO: 6268 - DNA, 481 bp, Arabidopsis thaliana columbia
tgtactgaaaattacattgctggaggaaagctttgtaagatttccgagtgcttggtgtagttgtaatgatacacttgaaatcttggaactcaagtattgcattcttttagattttccttctctggtttgtttgaagtctcttagaaagctgtatctctaccatgtgagatttaacgacgaagaatccgtttgcaaccttttatgtggctgccctagtcttgaagatttggtcgtgcatagacatagcacagacgatgtggagagttatactattgcggtgccatcattacagagactaaccatatatgatgattactatggagaaggtgttggaggctatgtgataaatgctccttctttgaaatacttgaacatcgacgggtttaatggtcttgagttttgtttgattgagaaggcgccagagctagtggaggctaaaattagtgccgtttttgaaatagccaatgagaacattatggac

SEQ ID NO: 6269 - DNA, 1410 bp, Arabidopsis thaliana
ggcaatgatctgatcaatcaaacaaaacaccattaatcaactttattttaatctaatcatattaattccctttaaagagtaaaagtggttaaatatcataagagtaaagttttatactaagaataaaagtggttaaatatcatagactaaagtttatactatgaatgaataaaagtggataaatatcataagagtaaagttttttcgatagatacgtacactaaagcaaaaattaaaaacaaggaatgtgatttcagtatttcgcaataatctttggcagtggatctaattaaagcgtatatttcgatttgattcctcgggaaaataacataattagaaataaaataaaaaattgatatcacaatttccgataattatggtgaacattgatttgatttgattggccggaaaactaaccttgatctctgagtacgatcaccggtgtgccggcaactgaatttgcatgtgaaaactggttgccggatattgccttgaatctgaacgacttgaggactacattcaggctcgccgtcaaactgaaaaacgaatctaggatcaggctccgccttcacattcaggtgaaactgagcagacgacgacgattttccagctccttttccgactgatatccatccgttgtggaagacgcacggtttcgattgcgtaccagatagatccaacggtacggagactttcgccagaagacgaccggagtgtacgccgcaagcagcgccggctcttccagtgtagatcaaaattttaagacaaggcttagaagtaaatatagatctggaagctaagcgttgaatatcggagctgctgagatgaaacgtggcggctagggtttggatctccggaaactgagtcgtctccaaaggaatgtacgggattgcggcggtttgcggcgggaagtttttgagtttgattttacaaaaacaaggagaagacgacggatgcacgacggagctcgttgtcttcgccgctaacggaactttcaaagctaggttcccgattgtaagacggatgaatggacaaggatccatttcaatcgcaacgagtcaattagggtttttcagagagagacggaggaagagaaagagaaggaaatgtgaacaaaaagggtttaggaagagttcgacattaatggcaggaaccgttcaagagacgatgacttaggggaattaggcaaaggaaaaggaggtgacgacgataaaacgcagcgttttaatggcgccgtattcacgacctaaccattggaggaagcagtcgtcttcttggtctttctgtgtatgtctctggtttttaagtggagacaaacaagcaagcacaatttacatttttcccatttttgcattccctcctttcgtttgctgtattttcctaaattgtccaattcgcctttattatacc

SEQ ID NO: 6270 - DNA, 532 bp, Arabidopsis thaliana columbia
tgggatgtataagccttcaggggagtatggggataaatatgattacggaagccgggatgaagagcgaagtagttatggaagagaaagagaatatggttacagagatgatgatagaaatagtcgtgatggagatcgtcattccagggactctgaagaccggtatgggagagatggtaatagggatgatgattacaggggaaggagcagaagtgttgataactatgggtcacgaggtaggagttcggaaagagagcgggaggatgatggccattcttcatcacggtatgttaaatttcaagtcgcctaaatcctgaaataaaaaaggaaggggaaaattttgaagattatcaactccatttggatagaatatttttattttgaatactagcgtagatgtccttgattttagaaatcatttcgaaccgcaatcttcttagtctagttccattttcaaattgtaaatggatacactcctttatgtcctgtaggggcagtggtgctcgagctgatgataattctcaggatgggaggt

SEQ ID NO: 6271 - DNA, 731 bp, Arabidopsis thaliana
caccaattactctgcgatagagataatcacgaaagcagtgcaggatgcacgggcatggcaatcagcccaaattatttgttcggaaaatcgaggagtgtcatctccttcattagttccccctctttctacacagggattcatctgctgtgtagatgcggcgtggcaggcacagacgtcgctagctggctccggatggatcttcaagacagccacaaatctagaagcggagtcggggccttactcagctggatgcatccgcgttcattcagtcctcgcggcggaagcttgggccattaagtcggccttgtgtcatgccttgcagttagagaaaactgagctcgtgttgtgttcggactcaaagactttagtcgatgctctgacttccaatacccaaatcaatgaagtctttgggttacttgaggaaattagatcacttcagactagtttcctctccctatcctttcgttttattcctcgtattgataatgtgatagctgattctgcagcaaaactctctctctgtagttttggtaacagtgggggtttcttccctggaactctgttattcggttaagtttattgaatgaatacaattggtttgacaaaaaaaaaaagaatgagtcttgtattattgattgatgtttttactttttactttttagttattagttatttacgaagaaggtggtacccttcaatagagaagaaaaagatagagcagctaataagaa

SEQ ID NO: 6272 - DNA, 481 bp, Arabidopsis thaliana columbia
gatggataaacataagaaatgcatacctattcttcttggagagaagcttattctcattgattttacgaccaccaccttcagttacattacgagcaccatccttccacttatcaggaactatcactttcgataacttcttctcacctaaaattaaaagataaaaacaaattgagtcaaaaggttcatactttgaactaaattagagatcctacaactagggtttcgatctaagaaaccaaaatcgaatcagagatcattaaatttcttcctgaaacatgtaatcgattaagctagaaacgaaacgaatcacaaatcctaacgccaatagtatagattcaattagaattagaaccgatccaagtatagattgattcaattagaatatggaattcacagagaagattattgatggacttacacttatcgcaaaccatcttcttcttccgagagagaaatatgaagaaaccctaacgcctaaatc

SEQ ID NO: 6273 - DNA, 597 bp, Arabidopsis thaliana columbia
cataacaaaaaatgggttttataactcgatttttagttttcatgtcactcttcaccagtttggtttctggatttgctctacaaaagcttcctcttatacagttcgacgaaggttacacacagctctttggtgaccagaatcttattgttcacagagatggaacatctgtccggttaacgcttgatgaaagaaccggtttgtgttcttgttcctctgagtatgttccgtttctgtgtcattaattgttattaacatagtattcttcttagatgatgtttacaggttctggatttgtctcaaatgatatttacttgcatggcttcttcagttcctctatcaaattgccagcagattactctgcaggagttgttatcgccttttatgtaagcaacaatctctaatctcttagatttctcatgaaaattgtgtttttcttccactgattttagaaagcactaatcttgaaacttttttatgttcttctcagttatcaaatggggactgatatgagaagaatcatgacgagattgattttgagtttttggggaatattagaggcagagaatggaggcttcagaccaatatatacggtaatgg

SEQ ID NO: 6274 - DNA, 521 bp, Arabidopsis thaliana
gtcgactctacagcataattttttcgccaaaaacgtaaacccgtaaattttcaccaaaaaagtaaacccgtaattttcccgccaaaaacgtaaatccgtaattttccgccaaaaacgtaaatccgtaatttccgccaaaaacataaacccttaattttcctacccaaaacgtaaatccgttaaccagtcattaagcttccgcaaacgcactaatttttaaccgctaaaccagtcgttcaaaatgttttataacgcttaaaatcgcaaccgtccgattccgtaaaggaaccccgataacacgaacccaaaaagtgatgtaaaacggatatcttggatccaccatcggcgcccatcagacaaaagaaaacatccaatgatcaaagtggaaatgttccatcttcatgatctcctgaatatccttctcattggtcaaaatcaaactggaatcgacctaaaccgatacctggctcgtctactctatcctctagtttccagatccttggcaccatgaacaaaacaga

SEQ ID NO: 6275 - DNA, 484 bp, Arabidopsis thaliana
catagttgcatccagcgttcaaattatcctcggtttcagccaaatgtgggctatctgttcaaggtatatatatacatacatatttcatataaaggtttatagattttaacgagttttcatcttaattttttttcagattctttagtcctattggtatggttcctgttattgcattaacaggttttggactcttcaacagaggattcccagtggtacattactgtcattcctctctttaaacatccaacaatcatcccttttggttcttattttatactgttcgtgttgtttgcaggtgggtaattgtgttgagataggactccccatgcttattctctttgtcatcttctctcaggttattttcctatgggactgatccaattctctttgatactgcatatgtttctttttaactgattttataatctgtgctcttgtgcagtatctgaagaactttcagttcaggcaattcccagtagtggag

SEQ ID NO: 6276 - DNA, 651 bp, Arabidopsis thaliana
gataagtgtcaaactgtagaagaatccgattttagtaataagttagaggatgttgaaactccactctactcaacatgttagaagtacaacaaggtttctgcaataacagtcctttaccactttaaagttaagagtgggatgacagaaaacttctttgatcaggtattgacgacagtaaaagacatgttgcccgaagataatgtgcttccaaagtccactacggagatgaaaaagttcttgaaggtctttgggtttggttacgatctcattcacgcatgcaagaacgaatgtatactttatcggaagtagtatgctcagatggaaagctgcccaagatgtagtgcgtcaaaatgggagttggataaacgcagtggtgaggaaaagaaggggattcctgcaaaggtcttcggtattttccaatcaaagacagactgaaactgatgtttagatcaaaaagaatgggtgaggatctgcgatggcatttcagcaatggtagtgaagatggtataatgcgacatccagtggactttgttacttgggcacgggtgaataataaatggcctgagttcgatgcagatccgagaaaccttcgtcttggtctttctacagatggaatgaaccctttctcgatgcagaataccaaatacacta

SEQ ID NO: 6277 - DNA, 441 bp, Arabidopsis thaliana
tctatcattggaattggaaacttatctggaactgtaactctgtatagacccctgtaatctacgaaaaaccgccaactcttatccttcttcttaaccagtaacacaggactggaaaatgggctcatacttgaacgaataataccagtgtttaacatgttagcaaccagaccttacagcgattccctatgagcatgtggatacctgtatggacgctcactcactgctacagtatcatgcaatacagaaatgacacgtacgatcgcgcgctactaggtggtaagccctaaggctctcaagacacgtccgcatattgctgtaatgcttcatcagtctcctggatttgaaccacaggatcctggagtaccatctgatgactattgagagtcacttctactcccacaggctgtaaacgcatctcagtagaccaagacttgagagaca

SEQ ID NO: 6278 - DNA, 453 bp, Arabidopsis thaliana
tttttgtcttgagcttgatttcgagccctttaacgcaaacgtgccacgtccttctcgttcgtcttcgattggtaatggagttcagtttctgaatcgtcacttgtcttctgttatgttccgtaacaaagattgcttggagcctctgcttgatttccttagagttcataagtacaaaggtcatgtaagtttcctataaaacctctttagttgctaattaaagatgttatgaaactgctgaaaattgtaagtttttcactttgttcgcagccgttgatgttgaatgatcggattcaaagcatatctaggcttcaaatccagcttagtaaagcagaagatcatatctctaagctttcacaagaaactccgttctcggaattcgaatacgcgttgcaaggaatgggttttgagaaaggatggggagataccgcaggagagtccttgaaatgatgcatc

SEQ ID NO: 6279 - DNA, 677 bp, Arabidopsis thaliana
catctaggttaaaaaaccttattaggactccctgagatctcgttttccgaaaaatcaatgtgatggtagaaagaggtgtctgctggcatccaatggtctaagctcattttgatcccacattttgcaagcttcaatgagtagatgaacttcgacaaggtcacccattcggggattgtttcaaggtgaaatcggttgtacgaaagatgtagatattcgatgcctaatgagttcaagacagggaatggaccggtaagcagattgtgggagagatcaagaaagataatgttggtcagattggcaaaactcatcggcacgacccctgtgtacccattcctagagagatttaatgcggagagaagctcgaatctcgataaatagtccgggatagtccccgatagcttgttatggcccacctcaagggtagaaagagtcggtgcaagagatgcaatcgatgaaggaaggtttccagagaatctgttgctggagagatcaagaaatcgaagttgccgcatggatttgaatatgtctgggaagatgccagaaaggcggttaccgttgagcttgagttggagtaagctagttaacttagacatcgaacttgggatcgaaccgctgaaccggtttccgccacactcaaaattccaaattacttagtgcactgatgttggcaggaaggg

SEQ ID NO: 6280 - DNA, 1675 bp, Arabidopsis thaliana
cccctgacttgagcgtcgtcttcaggttggaatggatatagtctgccacggctgatccaacaaatattcattatataatgagctcaaacttctcaaattacatcaaaggtcctatattccacgaaatttttgaagcttttggagatgggatcattaatacggacgcggagctatggagggattggaggaacgcatctcagcttatatttaatcatcaaaggtaccaaaacttctcagcaagtaccacgaaaagtaaagtcaatgatgggcttgtacctcttttcaattgtggacttgcaagatgtgttccagagattcatgttcgatataaccttcattttcctaaccgggaccgatcctagaagtctctccattgaaatgccagagattgagtttgccaaagctcttgatgatgtgggagatgtgattgtgtataggcatattacaccaaggttcgtgtggaagttacaaaaatggattggaatcggaacagagaagaagatgtcgaaagctaatgccactcttgatcgtgtttgtgaaaaacttatagcagccaagagagaagagctaagatcacaagggattattgacaatgcgaatggagacagtgaggatcttttgacatcccacataatgcttgatgcaaccaagtacgagcttttgaaccctaatgatgataagttcctcagagacttcacagtaagtttcatggcagctgggagagattccacgtcctcagcactcacttggttcttttggaatttaactgaaaaccctaacgtcttaagcaagattcttcaagagatcaacacaaatctaccaagaaccggaagtgaccaagacatgtcatcgtacttgaacaagttggtgtacttacatggtgcattgaatgaatcaatgaggctctacccaccaataccattcgaacgcaagtctccaatcaaagacgatgtgctgccaagtggacacaaagtcaaatcaaatctcaatattatgatctttatctacgccatggggagaatgaaaaccatatggggagaagacgcaatggagttcaagccagagagatggatttcagagacaggagggttgagacatgagccttcttacaagttctgggttgagacatgagccttcttacaagttcttctccttcaatgccggcccacgaacttgtctcggtaagaatttagctatgaatttgatgaagacggtgatcgtggagatattacaaaactatgagattaagattgtcagtggacaaaagattgaggcaaaacctggtctcgttcttcacatgaagcatggacttaaagtcacaatgactatgaaatgttccagcttggagtgaaatgctcatggtgctttaattttttttgagaatattacactctaagacactttttaaaaactatgtatggaatacgacattttcaaaacataaggcacttccaacaaaaaaattgtcccttctgccctcaaaccaatttcggtttaactctataatctcaatttttaaaccaaaccaatttatgagaaacctctctttctcacccaatctcccacgacgattttacagtttcatttatctgggcagtcaaaatccttaaataatcacaacatcgataacatcatctcgccttcgcgatcatcccggcgagttttctccgacgaa

SEQ ID NO: 6281 - DNA, 585 bp, Arabidopsis thaliana
aactcctggtcgacaaatcctcgaccactccggcactgtctgatgaagttcttgtaaaccttcggattatcgaaacgccgcacaagagcccacacggactcaggcggcgcgtggatcatctgcaccaccgaggagcaacactggtccggaccaacgtcgtgtgtgtggtgcatcgcaacgtgttcagggacatgcataccgcgcgtgagacacactctcttgatcggaccatcggtctgatcgtgaggctgcagcgtgtggaaaccgttagtggcgtctgagccgtgttggagttgcaccggtgacctcatgatctctcctctatctcttaatttgtttttgggagaatttatggaatcgtatatattgcgatcgagagagaaataagtttgatgagaaaagaagagagctagctttttgatcttgttcgctgtcggttgtcaagttggttttgtttgagaaatttaaaaagtatgatcatcttttattttataacaataacaataagatatgaacattgtgtgttttaacaatatatatttgaagatagatggatagagatagctggggatgtgaagctttgtg

SEQ ID NO: 6282 - DNA, 482 bp, Arabidopsis thaliana
aacccgtgtgctcggaacctttggctatcacgctccagagtaagctcctttagagatatcatttatctggaacagtgatattttgatttgtttacactcaagtcgtgctgagaatcttttgttatcattatctaatgttctgatgcactaagtccttcacttggactaagctttgataatcatattttcatacatttacacttctgtatgtcttgcatttcttcccattgaccaaactagattcttaaacatatttggttctgcaatttaggtatgcaatgacggggacgttgagcacaaagagtgatgtctatagttttggcgttgttctgctggagctcctcacaggtcgtaaaccagttgatcataccttaccacgtggacagcagagtgtcgtgacatgggtaatacatcggtctctgcttcttcttctggttgactcatatttataagaaaatcttagcgaatacatgatttattca

SEQ ID NO: 6283 - DNA, 1476 bp, Arabidopsis thaliana
gttaagtgggatgtatctgaccttgccttgtgattccgttctttcgtggggtgtgcttgacgagatgcaagtgacctcaaggggttcgaaagacccggagagactgggttagctacccaagggccggtgtcgcttacacgacggtgtagccaaggtgatgctccggttatatgcctttgtggttataattcgggtgttcacgatgtgctgaggaaggcagtgcattcgggtcctaattaaaactttaagaaacgttatcttcttgttgtgttgtgtgttgcttgctaccttctctgtgtactctgattatttatgttatgcatgtgggattatgggtggtgattagactaatgtttccttggggaacccgagctcattgagtaatgctagattactcatgactctacttgttttgcaggtaaccttagaggggattagagggagtggtgaacactagggaacccgcagtagtttttcagtgtccttttgtataacttaaagtatgtattttcgtatcatgtacttttgggcctcatgccttggccataaaaacgatgtttatgttgtgatttttccttgtattttcgtaactctatgatattgaaatcggtatttatttaaaattatacgggtttcaaactgataaaactttgtccgagtcgacacaacatttgggtgaagtgagggttggcaagcctaagtggatctcaaatggggaaatgagtaaccttaagtgggctaaagatcggaatgtgtttctgaacctcggctactctatgggaattcatttccattgtggtgtctccgggccgtgcggactggccgagttctactagggaccgggggcgttataacaggaaggtatatgagcatggttttgatgcttttgggatccggtttttcaaaagttttatcgagtaaatagtcgcaaaagacacataggataatccgggtcgttcaccactattaggatagaggggggaaatattagaaacctaagatcgttgttggattggatgcagatatcaaggcaatgatcagcctataagaagcatgttgatctctcggcttcacgaggctcgtttgatgatatcagtgtgatgttgatcccattgcggccagttcgtatagaaaagagaggcatcttagaagatgttagatatatgacattagaatttctatgatttagtccttttgttttacttaattcactcattcccaggttttttcgagtcattttcaaggtttcatcctcaaaggcgaattcaatagcaagggacattgctataagtgtgacaagggatggtcgtttcagatcttatttagctagaggaggccctggatggttactttccagaattgaagaagacaagcgatgatgactttgtgaaattttcttttctttacctttggattttttttttctttacctttggttattgtttggagttttcatgctctgtttttttatggatg

SEQ ID NO: 6284 - DNA, 758 bp, Arabidopsis thaliana
tttttattaaaaatattttaaaaattagatttaataattttaagagacttaaatgaattttagtgaatttccttaattaaaaaatacagaattttaagtctcatgattttaggtaaattttgagaaaattttataataaatcataacaacttccttaaattcacccaaattcttcaaaattatataaaaatttaaaataacttaaatcattcaaaatagaagattgaatacactcccgggcccaagagttttgcaaacaatcatatacatgtaaaagtttaagactataccatttatgtgatttactaatcatataaaataaattaaatacacatcgtttagttaccagtatataataaggctaccatttagacggacacagctaattatgagagatagacagagagggaaaacaactacacaagtcaaaatttctgttctaaaaaagtaaaagaagtatggtggaggaaacgagctctggtggtggctcatcggcttctccgatcaaaaccatcgtcgttttggttcaggagaacaggtcgttcgatcacatgttaggttggttcaaggagcttaacccagaaatcgatggagtatccgaatccgaaccaagatccaacccactttctacatctgacccgaactctgctcaaatcttcttcggcaaagaatctcagaacattgatcctgatcccggtcactcttttcaggtacaactccggtttagttcaaatcatcgttaattttgtatagaaata

SEQ ID NO: 6285 - DNA, 1020 bp, Arabidopsis thaliana
aactaggtaaaaaactactcctctcgaaaatgagaagtacatgctacttatagccaaatatcccgaaaccctaatactcaaaacgacgaagtatttggacgggttaagaactgtactcgaccaacgtggtcgagtgagagctcgggtgaatagctggagtcttcttttcttccttgtgctcgagtgtctggttgagtgcagaatgaagaaggctctgaagcttgtcatcgagtatgcagtcgagtggtgtgatggagatactcgacctctaggtagagtgaggaggtcgagtggttgtctgatgatggaggtgaagacactcgacctcacggtcgagtgaagtgatcgagtgaccgtctggtgatggagatgatggcactcgacctcggggtcgagtggtgaggtgaagtggtgatgtgctctactcgacctggttgtcgagtggtctcttgagatcttgaagctcctactcgacctctgggtcgagtggtttgtcatgatcaggtctgcttcttccagatagctcgtcaacagctccaaatcacctgaaatcaacgcaaatatgcaacatgcatgcaaaactatcctaaacatgcaaagtgatgacaaatgatgtgaaatggtataaaacagtgatgatatgatgctaaagtgatgacaaatggatgctcaaaacatgcaaaatacacacttattagtaatgcccttactaaagcataaagctctttgtcataggtaggatagttgagagtagctcctccaagcttttcactgaaataagctattggcttcttatcctgcattaagacagcaccaattcctaccccggaggcatcacattcaatttcaaaagttttaagaaaatcaggaagtgataaaacaggggcatgagtaagcttctcttttagggcctggaaagcatcttcttgagcttgttcccacttgaatccaacatttttcttaataacttcggtgagtggagctgctagagtgctaaagtccttcacaaacctcctatag

SEQ ID NO: 6286 - DNA, 1113 bp, Arabidopsis thaliana
cggccatctccaaatcatgcgtagggtagttcttctcatgtttccgcaattaccttgatgcgtatgcgataacactccccttttgcatcagtacgcatcctagttccactatagatgcgtccgtataaaccgtatagggctcaccttcctccggttagaccaatagcggtgcattagtcaacatggcctttaactccaggaagcttttcttgcactcatccgactagttgaatgctatgtcttttacggtcagtcgagtcaagggttgggccatgctcgcaaaactcattacgaaccttcggtaataccccgctagtccgagaaaactcctaatctcggtggcattccttggtcgtggccactcctttatcgatcgtattttctctggatcaaccgttgatccgagataatatggccaagaaaaccaacgctcctttgccaaaacgagcatttacttaacttcgcaaatagctcatgttcccttagccgttccagcaccacccttagatgttcttggtaagcttcctaagatttcgtgtaaacaaggatgttgtcaatgaagatgataacaaactcgtctaagaaatctcggaacaccccattcatcattttcatgaaggctgctagtgcattggtcaatccgaatggcatgaccacaaactcaaagtggtcgtaccttgtccggaaagccgttttcctcacgtccgttggtctatgcgaatttagtgatatcccgaggccaagtcgatttttgaaaaccactgtgcgcctccaagttgatccatcaactcatctatccggggtaagggatatttgtttttcactgtaactttattcaatcctcgatagtcgatgcatagcctaaagctaccatccttctttttcacaaacagaacaggtgcaccccatggtgagctactcggcctgatgaatcctttatccaacaactcctccaactgtttctttagctccgccaattccgccggtgccatccggtacggagctttagatatgggggttgcccgggtttgagtctatcgtgaacgggtctgacggccggtggtacacactaacggccgcaaacacgtccgagaactcgttgacgatcggaat

SEQ ID NO: 6287 - DNA, 1850 bp, Arabidopsis thaliana columbia
  unsure (1)..(1850): unsure at all n locations
ccctcttggttgtgtatgacatctaatatcttatacaatcttatgtctctaagccccaaaccgttttgatagcttagtcaagtaaaccaattttattttatatagtaaccgttactatgtgtctcaatcttaaacaattgcagaccgctgctttggcagacccgccatacaaaaatttaagttttaacagttgataaaatcagggaagacatcaatttacttgatattagttgaggaattaattttataactctagtttatatttaaaaaattatatccaatataaataaaatataactaatatatatccaatatatatctaattgaattatanntcactccgntaagcttaatcaaattaaaattattagttatctagaaagttaatcttattaaatttatagatctaatcagaatagaacataatataatcgagtttatcctaatcaaattaggatctaaagaattatcctaattgaataccatgagacggtggttgaggagcaggaagaggttgtgtcctctactggtactgggatggaagacttctatgtgattgggtcatagattgtgtctctgatggactagaggagtgagaagacactccgataccactcattcctcctctgcttccacctccgcgactattattcatagtccgactcacacttggattcaatggagggttaatcaaaccagcgctggatccggaggatttggactcaagcctctgcttggattcaaaggatatgccttttacgcctaccaatggttggtttcagaggattcggacgattcaccctctaagtcctactagcacttggcttcgtatccggactagtgaagaccctcgaacctgattgagatttgccactgcgacctcgtgtagaatttccctttagtaccattagatcgaggcgatattgagaagagattgaggagagattcagaagagacggaggagagattgacgagagaaatcgatttgagaagagaagagagttcagaggttttgagagtaaaacccaaaatccagaaagagaagtcccgcataatgaaaaatcgactaagtgtttacatagtaattaatacggaggagtccttaatcggtcgcaaacgagtcacaacaaaaacaaaattggaggcaaaattcactgtccaaaccaaagcccaaatccattaaaaatacatatataaaaaggggcaaaactcaccgcccaaaataaaagcccaaaattcaccatccaaagatcgcgagtatcaaatgagtctgaatatagtggcaaattgttactttcttatgactgttacgtttaagtcacaaattgtttttttttttcaaaaattctaggcattacagatcaaaactatcgataccaatcactaaaaacaatcataactgtattctagagtatccctattagtttttatttttcattaaacaccatttatattaagttatcggaaagagactctcagctagagagagccattcaggaaccgatttgcttacatgggaaaaaagctattacgagtccgagctttcttagctaaacaatctgctcgagtattagaactacgaggaagaaatctaatcagaaaagaaggaaaaaaacaaactaaagaaccaaaagaagccaattctgcaggaaaagtcggccaattgtcttggttatcaaggataccaatcaaatccaagcaatccgaagcaaaattactagaagtatcaccaatagagatcatgcattccattgcccataagagggagtcaaactccgcatgaagccggtgataacttcgacgagtgctcctctgtccaagctggatgaccacgtcttgacgaacaagga

SEQ ID NO: 6288 - DNA, 923 bp, Arabidopsis thaliana
gagtcgataccaaagaagctaggtgatccaggttccttcactctaccttgttcactaggacccttgagtgttcaacaacagcctttgtgatttgggagcttcggttagtttgatgcctttgtccgttgcaaagagattgggatttgacaagttcaagcctagcagcattcatcttattctagctgatagatcagtgagagtgcctcatgggatgctagaagacttaccggtaaagatcggatcggttgagattccaaccgactttgtggttctagagatggacgaggaaccgaaagaccctctcattcttgggagaccatttttagcaactgcgggcgctcttatcgatgtgcaaatgggtaagatcgacttgaaccttggtaagaatctctatatgagctttgatattgctaagaagatgaagaagcccactgtagaagggcagcttttctttattgaagaaggaaatttagatgctgagttgttgagtgggttggaaaatcctattccgtactccattccgactcgccacctaggagagcccgagaagcttcttatgatagaaggaggacctagcttagaggttgagactaaggggaaccatttggatgttggtcctattgctagagagcttatggagctcaggaaacagtatggagctcaaggagagaccatggaaaagttggacctcaagatggaggagctgaactacgctatcctggagcttaaggagatgattaaaggttatccagatcctgagatcgataaatactttgaggacccgatcttggagaagaggactatagtactgatgagaaagaggcttacttcgaggaaagatcaaatgagtactccacactccagctatcaagagaaaatgcggagtatgattcagactttgaggattcacaagtgaggatgag

SEQ ID NO: 6289 - DNA, 1096 bp, Arabidopsis thaliana
atcactcgatcgttgacttccgtggactataaaacctgaaatacttacacaaaacatcaaaaataacaagggaaaaaagtatatacaagaatagacatgggacttcctcccaagtgagctagtttaaagtctttagcttgactttcatactgtttttaggcaaaggtgatgagaggagaggaaatgagctctcctcttgaatgatctgctccgccatacaaggcttgactctctgcccattcactttgagttcagcttcatttttgctaaccaaggtggtggttccatcagggggtatgtctttgatgctgaatggtacttggttggatttcccacggaggtccttaatttgatccttgagttctttcacagtttgtgttagctcccctatggctttctccttccatttagattttatcagaggctagagtgttttgcttaacatgcaggtcgagtttagacgttgagcttgagcattttgtgtgagtagaggatgaactcggcctactggtcgagtttgatggtcgagcttgagttgaacatgcttcttttgctgtcataacctctgtttttgacctaatcacacctttaatgacatttgtccatgccactaccttgtgggaggctaaagacttcttagagatcaaggtctcactagggagatacttagcttcagctctcttagttaaagaagtttggagttgatcttcaacaacaagcttttctagcttttctcggacacgctccttgtgtataataagattgcactcttggctctgaacttccattccttgtacttctttgattctctccataatcagattttttaggtagttgtgggattgtggaataagcttaaatgcatccataagtggcattcttaattcgatctccattagctgcctatcaaaaagtgctttgtacttttcaattaattccttcttgaatcttccagggaaaggcattgttggtttgtagggcggcagagcaaattctttatcctttgcttcaacagcagcttttctttcttcaaaagttggttttgctcgatcgagtagagcgtcgagtgaagctgaaggctgatcaagtttagttg

SEQ ID NO: 6290 - DNA, 2495 bp, Arabidopsis thaliana
ggaaaatttatgttcccttttcgttctcttgtaaagaatactaagacatcagtttatgatcttcttaaggtgagggaggggaactgccatcccgtatggagcctcttgcggatggttcaaggaaccccaaaagaagttcgatcaaacaaattgctagtggaagatttggagtttctagctactatcttacaaatgctgatgagctgcagataaagatggctcaggtaccctaaaatataacttgacataatgttctcttattctcataccttttgcacatctttgggtttctactgtctcaatgttttgtttttcatatcagataatgctctttgcacaaagtagttataggtgccttgcaaaagttttgtgaatattgcatctaaatgctgtttcaagtgtctaacgtttttcttgaatgccatacagggtgccaaacctggggaaggtggggagctaccaggccacaaggtcataggagacattgctataaccagaaattccactgctggtgtaggacttatcagtccacctcctcatcatgatatctactctatcgaggatcttgcccagctaattcacgatcttaaggttcctatttatgctctcccaactcttactttttgaattattgtcctttgtctaacatccatttcttttatctcttgtagaacgccaatcctggcgcacgtatcactgtcaaccttgtatctcacgctggtgtcggagtcatcgccagcggtgtggtgcaggggcatgctgaccatgtcctgacagcaggtcatgatggaggtactggtgcatctcgctggaccggtattaaaaatgctggtcttccatgggaactgggtctagctgagacacaccaaactcttgttgccaatgaccttcgtggccgtactgttcttcagacagatggccagctaaaaactggcagagacgttgcagttgctgcacttcttggtgcagaagaatttggttttagtactgcaccccttatcacactagggtgtatcatgatgagaaagtgccacaagaacacctgccctgtgggaattgctacccaagatccagttctccgtgaaaaatttgctggggagcctgaacatgttattaacttcttctttatgcttgctgaggaagttagggagatcatgtctggacttggttttagaactgtaactgagatgattggtcgtgcggatatgcttgaacttgatagggaagttgtcaagaacaacgataagctggagaacattgacctatctcttttgctcagacctgctgctgagattcgtcctggggctgctcagtactgtgttcagaaacaagatcatggtttagacatggctttggatcaagagctgattgcattgtctaaatctgctctggagaaatctcttccggtgtacattgaaactcctatctgcaacgttaaccgtgctgttgggacaatgctgagccatgaggtaaccaaacgttaccacttgactgggcttccaaaggacacaattcatatcaagttcacaggaagtgctgggcagagtcttggagctttcttgtgtcctggaattatgctagaacttgaaggagatagcaatgactatgttggaaaagggctctctggaggtaaagttgttgtttaccctccaaaaggaagcagctttgatccaaaagaaaatatcgttattggtaatgtagcactttacggtgccactagtggtgaagcatacttcaatgggatggctgctgaaaggttctctgttcgtaattctggtgctaaagctgttgtggaaggtcttggtgatcatggttgtgagtacatgactggtggtactgttgtggtgcttggaaagactggtagaaactttgctgctggtatgagtggtggtattgcttatgtccttgatgtggacggaaagtttaacaccagatgcaaccttgaactggttgatttggataaagttgaagatgaggaggacaaaatgacgctcaaaatgatgatccagcaacatcaaagacacaccaacagccaacttgctcaagaagttcttgcagactttgagaatttgctgcccaagtttatcaaggttttcccaagagattacaaacgtgttttatcagccatgaaacacgaagaggtctccaagcaagcaatcgagcgggcttctgaggaagctgacgagactgaagagaaagaactcgaggagaaagatgcatttgcagaactgaagaacatggcagctgcttcgtcaaaagaggagatgtcaggaaacggagtgtcagctgaagctagaccttctaaggtagataatgctgttaaaaacggtggtttcattgcttatgagcgtgagggagttaagtacagggatcccaatgttcgtcttaatgactggaacgaagccatagagtgaatctgaacctggaccactccttactactcagtcagctctgtagcatggattgtggaactccagtcttgcctaccaggtata

SEQ ID NO: 6291 - DNA, 517 bp, Arabidopsis thaliana columbia
agtcgactcgatcccagtgtcggagtgagaagctattacttataagagccaacagcgtgacatatccagctagagtctttatccgtctggttcttgtcactgttgcatacccaaatctgaaacagcaaaagtgatatcagtaagacaataataacaaacaaaaaacacagagagaaaaatgtaaaatcagtttaagaactaccttgaagtcaccaccgaatgatgtactcactgccatggagcgggtagggtggaacacaatggctgagacaccggcatccctgtaagatatacaggaaaataaaatttactctctgcaaaggatataacagtttgtagactaaataagagaaattgaaatctatgtttgcaaggtttacaagaaataaaacatgacaagaaaattgggtaatggtgaaaaataaagctttatccattagcagagggtgcaatattaacctatgaggttcatatacgattgtggataaggtgaaagttttgctgtctggttcagacg

SEQ ID NO: 6292 - DNA, 1384 bp, Arabidopsis thaliana columbia
caacataatcaccttccttttcttctttcacctccggagtttttcttcttccatggacttctccttagcccttccccttctccttccatggaagcttacttaactcacgcaaaagtttaaagcttagctcaactcctccggtcttcttacttccaggcaaggggtgctacaacgccggccatgggttgagcacacgtccatctcggccaaactcacggtgccgagggtcacttacactttgtactgcgttcgtactgcatgcatactacgggcgtactgcggacgtactgcgggcatactacaggcatactgcgggtgtactacagggatactacgggcatactgcgggcgtactgcgggttggttttctcatcctttagaaaattcaacgatccaacttagtcttactcaaggtgaggtatattatagttggagagcgatccctttcaatgggagtggaggaacttctatttcattgcaaagatcctaactatgctctacatgtaccttcgtgcccgaggtcaggttccggggcttgtgaatgccccggtcgaggaggtcctgtctgacagtgaagaagacgatgaagaggaagacagcaacccttggaagcgcgtcaagaatgagcccgaagaaatgcagaaccggcgatgaaggagcctgttcctgagcctctcccataaatgtccccgaaattgacttcacttcgcttttattttattttcaactcgttacgggcttcggccgatttttaatttatggaaactttcgctattttcctgatttcgaaatattctttttggagatacgctttaaatggagattatggtccccaagggatacaatgtccttataaattgacactttaacttttctttattcttcacctttctctctttctttcgcatgcatggaattcaaccttcgatgttcggaatccatgctagatttctccagggtcagaatgattgatggagatgtgccaaatgtgccaagaaggcgacgctctccacctcgtggcttcttcagatcccaaatccgagctccatgtgctttgatcaaggacctcccagaaagtgatcaataaatcgcgatggcattcataaaagcactcgtgataaaacacctgaagcttacgctagagaggaggaagctccaaaaaaagattcaccgaattcaacgagaagaatctcctaatccgaggttgggatctccgagtttgcatgcattccgaattgttcttctcatcgagaagaatctcctaatccgaagtgcatgtgtgacgacactttgccttattttcttattgctgaataaatgtatgttcgcatagtcgaactttatttgctttgttcgttcacggagtcgaactcttttttcaatg

SEQ ID NO: 6293 - DNA, 499 bp, Arabidopsis thaliana columbia
aacgaatcttcgtctgtattgatgaatttgtggaggagtgaatcggaagggattggtttttgtgttgcgaagtagaagaccaagttgtagtgttctttccctgggacctggaaattaacggcgaagatgaagctacgagattgggatgttttgaaagcgtggattacacggttatcgggacgagagaggatgtgatcgagtttctttgtggtggatttgagccagtctacggcggcgagagagaggaggtaatcgccgccgggagatttttgttttgtggcggtgaagtagttatgtgagcggagagagaacacgttgcctggtggtgaacccagccgttggttccggtctcgagatctacgtggcagaaggagccaccgttgattgtttcggttaccattccggtacggtgatggttgattcggtttcggccggtttggagtgtttgttatcgtcggtggtagttttggtttggttcatggcgtgtgtgatttgttga

SEQ ID NO: 6294 - DNA, 508 bp, Arabidopsis thaliana columbia
ctcgttgacctttctttgatccacactccaatacattctgtagaaagagataaaatctagttagagaaatgcaaacgacttaagtggaaatgattcaataaatcaagaagcgaagaataagaagaggaagaccttaagattcagaagcggcgaagtttcaagaaggctgattggctggtccagcgcgctgtaagctgcctcagataatgcacaagcagaaagtgagccaagtgcctcacctgtgatatcttcaacgggaccatcagtctcataagtaaactggactaactggtttccgaaagaatttctcacagtgccatcataagcagcgtatatgtcccgcatgaagaacattaatcttctgctcagtgtccccgggagatcagcattaccactgaatgaactgtcacgacttgtaactgaatgaacaaaagattccaatggattcagacccgttagaaacgagttctcaatgactccataaggaacatatgactcagtagtggta

SEQ ID NO: 6295 - DNA, 616 bp, Arabidopsis thaliana columbia
gaaggtttcttttgtggggatctccacagccttgaagagtgaccttaaaaagggatctaagcctggtgagtgtcatcaagatactaaaacacacactgaagagactatggtagcaaagtttctacggtggctgttggcttcagtgattcttgggaagctttactctgaagctaatgattcggaccagatagtcttgagcgaaacaaagccagaaactttgccaacattgttagaatacttgaagaaaaggaatctccaaggcagcgtgacaaattcggagcacataataggggaagtaatcgtgtatctccaaaagcatctgctgtgtagaaactacggggttcttcttccctctgttgtatttgcactttctctcatggttcttcgcaatggcctcgagactacaggtatgctagtgtttcccggattacttggcctttattgataaatcaagcttgctgctttgattttcagttggttagaatgatatctgctgaaactaaagaattagacaggtttgttttgtaggtgtgaatctaaatctttctctgttttcctgcctaggtaccgagtcagaaggtggttcaaggcatcagactttgtgtctagaatagta

SEQ ID NO: 6296 - DNA, 545 bp, Arabidopsis thaliana columbia
tggatatctattcggattttattccgatattttgagtataaaagtctataatcctttggaataatttatcggtttggagtcaattcagaatttttcttttctcggttttagttcggttctagatatttgatctagcaatattcgtttgtcttaaactaaacaaataattatgaaaccattcgtaatcaggaaccttccaagatttcaatcaactcttagatcttcgcttctctacacaaatcatcgcccctcttctcgattctctctctctactcgtcgattcaccaccggagccatctacattcgccgatggaaagcaacggcggcgcagacactcaaactctgctgccgtgaactccacaggtgatgatgaaaccggcgaagattgcgttggatcaatttatagcttctctatttacgtttctgcttctctacattttgcgtcggagtagtaataagaataagaagaatagtggactcgtagtttccaaaacgataccgtatccaaaaatcttgaaacggaggctgattctggcactgatgtg

SEQ ID NO: 6297 - DNA, 481 bp, Arabidopsis thaliana columbia
tgctaagagtttcattatctcctctggaacaaaccattgagaattatgttgaactggaaaaatcgtccttgtgaacgccaaaacccaaagctctatccgataatacttgagcacgctattgccactacaagaaatttgttcattgatagcataacgttatagcacggattactcaactgctattgaagattatttacaaattttgttttcgtataacagcgtgttatcaacgctattaaatagatttactcatatagcaaggttctaacgctatgatagaattcctctaacccgggaaactaaaatgacacataccgcgaaacacttaattttttttttctttttttcttcgaaagacatatattccctgtgagctcgagaaaaccctaagacatagccacactctctcaaaccgacgactcgaatcctggagccacgattaaaccatcccttttgccacagcagttgttgaagtttgctg

SEQ ID NO: 6298 - DNA, 541 bp, Arabidopsis thaliana columbia
ctatgttatttgggtttaggggtttaatattcattaactgcttttgtgattcttgatgttaaggcagcggatttggtgttgggtggagatgaaggagatgagtgtactttcccaaagggttacatgaaaaggcaagcaattttctcatgcattacatgtacaccagaggggaatgctggaatttgcactgcttgttgcttatcttgtcatgatggccatgaggtaaatatggttgatatatagccaggttatgtattttgaaatctgatttcatagtgttaattggtttcctaatggttgaacattgttctggttatgaagcttttggagctgtggactaagagaaattttcgatgtgattgcgggaactcaaagtttggaactttggcttgtaagcttctcccgagcaaagatatagaaaactctgaaaattcttacaaccataatttcaaaggcttgtactgcacttgcgaccgaccttaccctgacccaaatgtggaagaacaagtagagatgattcagtgttgtcctgtgaggattg

SEQ ID NO: 6299 - DNA, 678 bp, Arabidopsis thaliana
atatataagaaaaatcatgtatttttttctttctttttagctatttgaaattataattaagttaaagccatagcttgattttgttttctgatgaataaagccatagcttgatattagatagaagcattcacatgacgagccattaattcatagtgataaatctttttatatttccccaatcgcggatgaccttatccatatctctctctctcttttctttttttttttggaaaaatctcaaactcatcaatctctctgctggttttacgattactgttgccaaaaaaagaagggtctctcgagacaagtgttaggattacaaacacaacaccagcttcctcctctcgacacgaccctccgtcatgtctgcgccagctatatcttctcctcgccacgtttcatcactctcttctagtatatatacacacctaaccattacctcatgtctttgccttatcactcaccaaaagtcgtcacataatatcactttcgagttatcaacatccgtacatgtcatccatagagccaaaagtaatgatggttggtgctaataagaaacaacgaaccgtccaagctagttcgaggaaaggttgtatgagaggaaaaggtggacccgataacgcgtcttgcacttacaaaggtgttagacaacgcacttggggcaaatgggtcgctgag

SEQ ID NO: 6300 - DNA, 558 bp, Arabidopsis thaliana columbia
caaacaaacaaacactagctaattgtcatccgaattatccgtaaaaaaaaaagaaacttgatagctttaataaacaaaagcctaaccatcctaatggaaaatataatcattccagtaaaaagaacgcaccaaccaccgcctatctaactaatcaatacgaaggaggagcacgaggcggaggaccaccccaatacacgtcgtgttgagccatttgatgaccatttgggataaaattaggaggcatattatacatcggcggctgcatcgatccttcgtttccgttattcccactctcgttatcatcattctcttctttctgcttcttcccatcttctagttgaagcggctgctcttgctgttgttcttcctcaatcggtaacctctcataagtggcattgcaaaacgtagcagctatcacaataacgggtccagaggcaataagcgggccagcaactccacctcccacaacttgaccttgagctccagctaagtaaatggttaaccagcggctgcagcaggagagccagacgtaggaagaaaaccccacacatagacaag

SEQ ID NO: 6301 - DNA, 548 bp, Arabidopsis thaliana columbia
cactctacataaccaccaccaccaccaccacatgtttcagatgaagaagagtcattgacatagaagaacatagaacatagttctcagttgccaaaagacaaatccctatacccatatctaaagagttttaaagacaggtgaaaaacgtagaacatgcgaggaaaacaatgaagaagagagaaaacaaacagacacaggccgagaaaagccacacatcctttcttcatgacctgcaaaacatgctagacgaacgagcaagccgaatagtcagaccaccaccttgaacactagcttcaaacttgattgtgttcctttcataaggctttctgcaaccaggacaacgcccatctccatcgcatatcgtcttgtggcagaaaaggcaaagcgggaatccacaaggacatggcaagaaatttgagtctgttaagtcaagatcttcgtagcaaatagggcacgaagatggcaccacagtcacagaactaaaatgcaaattcatgaccggaaaactacgctgcttttccaaattaggcagaccctgaggacggagc

SEQ ID NO: 6302 - DNA, 582 bp, Arabidopsis thaliana columbia
cccgataagcacattattcttttcgtattctaagcaataaaaaaatggaccatcaaccattccaatcaaatgacttaaggtagatgtgaccatcgactaaaatatcttatattattcatatgaacacgagttttataaattggtacacgtaaatttacaataatagtagtagtcaaccatctgtcttccaattcacttagacaaggtttcattcctcggtaagataaaatgaattcacatcgtgtacccgcataaatagaaacaaacatacacattaccaaataacttcatcttcgtccacacaaaaaatggacattaaagaagatgacgagtctcgagttataacaccaaccgagcttcaacttcatgattcagttactgcaagaacaggtaaatctgttagtaatcatataatccataatcattagtaatcaatcaaataattattacgttgtgttttcttgtaaaggaacgttatggacggcggtgcacatataataacaggagtgataggagctggagtgttgtcgttggcttgggcacggcggacgtcggctggatcgctggtccggcgccttatag

SEQ ID NO: 6303 - DNA, 748 bp, Arabidopsis thaliana
tcacgcatctgttggaccctccagccagtacttcaccaatctgtcatacacataatgatgaagagaaatgaatgatagatacagctatataaacacaaagttgagggtcatacctgcaattggttgtttcggtgaagaggaggaaagattggtctttagagagttgaattccattggggaaaagccaaaccctccagcacaatgtgtgttgttttggtaggtgggtcatatcttagaagccttcctgttgattctccttccagtaatataaagaaatgattcctacaaaatacaagtataatttctatatcatacaatttacggtaggaattgacatacaaagcaagaataagagagttgtcttacgctctgtcatatcttttgctggtgtcagtgaagaagatggagccatttctatggatgtcaaggtcattggcaaagagtataggctttccttccacatgagtagctaaaggcgtagcaatccctccttcaggaccaaccacaagtagaccatagtaagcgtctgcaatatacaaatatcctgtctctttatgaaatctcagtccaagaggcctcccacacagcttctcgtgcttccattgcttgtttgttgttgaatccacacctctcacacaagcttcctctgacctaattctcatgaacacacatcaataagaaaaactgaaacaaaactctctgcacaaaaaagaagtgatgaatatgtaatctcttaccattttgatgt

SEQ ID NO: 6304 - DNA, 590 bp, Arabidopsis thaliana columbia
  unsure (1)..(590): unsure at all n locations
tgttttttttaaaacatcatgtttattgatagatcaggttcatgttttacaaaatctgatatgtattgttttattcatgccattaataatatgccactttctttaactttcagccagaaccttcccctactactggttctttgttcaagcctcgaccagtgcacatttctgctagctccaagtccttatacaggcagggggttccatcagaacacctttactgagcagaagtccagtgaatttgagttcagacctcctgcatcaaatatggtattgtccaaaacaatgctgtttgttatgctttgcatgtaatgtactgttcagatagtcgacgacatatgaaccccgaacagtggctgacctaatttttctgcacgaagtctatttattcagcgcttggattgcttgtaaatctcaaaatctttcgcctttgcatacatataataccatgccagccttaaattgtttcataaggagccttgtatccanaagctcacagtgtataagttacttgtatattgttgggggatgactttgtctaacatctttattgatttcaggtatatgcagacttgggaagatagaagtga

SEQ ID NO: 6305 - DNA, 1674 bp, Arabidopsis thaliana
ctatgagtacagagaaaattgcaaatccagcgcaacctatacacgcagcttttggcccacctgaaacaagaccaatccattaagtcctcaagaacacatgtatcatgtaagagaaatcaaacctctacgagattacagtttgggaactaggccgttgcatattgataatgaatctctaagatttaaattccatgcacagaagataataggtcttacctcgggcggacattgaaccaccggtaacacatccagctatagcggtgtttacagtgtcatgcttagctcttgcctttttcagagaggtaaaccaaaaaagtcgataataaggttttgaagttacgatacatgagttagtagtggaatttccttgtttttcttggtcaataaacaaggtattaccttttcgacaatgcattctgcagcagagaaaaccaaacccataactgcaaatgtcttacaggaattccaactcctttgccccatttgttttgccgtgaacacaaactgctacctagccgtcatagtatcatgcgtaataggattatctaatgcccccaggaacaaacccatcatcaacccgagtcctcctcctacaccacaattcacacagaatgtgaacaaatcaattgaatatccttcacatgtctaactgtcatatcaactctacaaccggcggagcatttatattagtagctttacaccttttagagtatttatagaaaatagattcgatttgagatttcacatcatcaattcacctaaccaaatccgattattaagtgcaatctgaaagtgactcaataaccagctcagaagcatatcaccattagaaagctaatcactttaccaatttcactattctcaaaccaatcaaagtacctagagcttttagcatttttggaaaagcaagagcaatggagcaatatagatcgagaaagagaggatatttgaactgacccatgactccactagttacagcacgaacggcgcagttgttccaaacctcttgagctcggatctcctcgatggttggcatccggatcggttgaatctgggtagagttctcatcagaagccacggggggagaagaagcaccggttgttggttcagcagcactcgaatcagccatttcaaaggttaagagagtaggatccgacaagggacaatgtcatcaaaagcttaaaagaaggggattgtacgaatcagatcaagcgtgttcgttcgcgtgcctgtgagataaaattaatcagggtttatcccgaggttctagggtttaagctacagctagctaccactttaggcccattagtctacattttgggcctgtacactcgagccttactaaggtccaatatatgtatccaattaggttttgaggatatcaagatgtgccacgtggcatattgcttttcgaaagaaaaaacgtctacctagttcctacatatgcatgccgcttcaaattccccctccatatatgctgctctaatctcttttcaaaacaaccaaagacagagatcagaaacatcaaaaatcaaagagcgaaaccagagccatggcttcatcgaacgctctttttcttttcccggaaactaaatcctctgttttaccagatccttctcgtttctttagcccagacctcctctcaaaccctctccctacaaattctttcttcca

SEQ ID NO: 6306 - DNA, 587 bp, Arabidopsis thaliana columbia
tggagaaacagaagactgaagaagccaagcaatcgaattgcaactcacgatggagtcaagatgaaggtggagaggtagaaactcttgttatcttctatcaatccggtttataggggagagaactataacgtattagtgaatacttgatgggactaaaagcataagctattatgcaggtttggtgtgatgttggagtgccaagactggtacaaagacctttggagatagcaataactggctcgatgagcaaacgctgtgcttgctttgaggaagaccaacttgatcagtctggcttggagatctataaagactgtgaacctcttgccaagacttgcagggtttgaatatgattcacgagacttgtcttaacaagtttgcaaattgcaatagctagttctttcgtagccttgtactcttgtataccacatagaattctttatgattttgtatggatgcattgcgtgtagtttatgtgtaactaaattaaaacggcgaatagttctaaatactatgggtattttggttcacaccctgcagtttttgcttttgcgtcacagattgcggattgcgtagtttgtgtactgaat

SEQ ID NO: 6307 - DNA, 631 bp, Arabidopsis thaliana columbia
ggtgttgtggtcttcatttgatagattgcacacaagtgaatcatctttcaagaacgttctattactaggttatacaaacgggtttcaagttcttgatatcgatgattcaaatgatgttaccgaattcgtgtcgaggcgggatgatccggttacatttttacagatgcagccattacctgctaaatgtgatggagttgaagggtttagatcatcacatcctatacttttagctgttgctgatgaagctaaaggttcaggtcctattgttactagtagagatggatctgttagaaatggttatgaggatcctcttgcactctctcccacggttgtgcgattttattcgcttagatcgcataactatgttcatgttttgaggtttagatctactgtttatatggttagatgcagtcctcggattgtcgctgttggcctcggttcgcaggttagctttttatgtgcttatctatctcttcgatatggagtgcaagttttctactgtctgttaatgcttttccattgtgatgcagatatattgttttgatgcgctaactcttgaaaacaaattcagtgtcctctcgtatcctgtactcagcttggaaacaagggatactggggtaatgttggatat

SEQ ID NO: 6308 - DNA, 555 bp, Arabidopsis thaliana columbia
cgactcatcaccgtttcctgacaagtcactgtatcttgcagtaggtcaacctactactactactactactactgctacgacaaactccagcggaactcacatgtgcaagcttggatgcagggggccatagcgaaaattagtagctcgaatgatggatccaactctactgcaagcccaatcagtggttcacctaccttcatgccaataagcatcaatacaggaacatttccaggaacacctgctgttcggctcattggggattgtcatttccttcatcggttatgccagctgttgctcttctgttttctccagcggtcttcacgatttccacagcgaaatgctgatgttagttcacaaaaacttcaaacgggggctaccagcaaattggaagaagtcaactctgctaaaccaacccctgccttgaacaggatagaggacgcccagggattccggggtgcccagttgggtactggagtgaaagggattgatgaaaattctgctcgtacaacaaagatgggttctgggaatgccggtcaaggatatacttatgaggag

SEQ ID NO: 6309 - DNA, 517 bp, Arabidopsis thaliana
agtttgattcttttgtgctttttattggcattttgattgaataaacaaaaccattttaatcaaaataaaaaaacgggaataatatcataatatagtacaaacattccaactgaaacacgagacgggtcttttctttcatctagatcccaccgttgtccaacgagttttagaagagcaatgacatcacacagttttgttgcataaagatcccagaagcaataaacataaagggttgtctaataatctacccacagtttaggagctggggagatcattactgcacgctcagtacttcgatttcaaagtcgagaacagagtttggctggctcccccatgccggacatccaccagcgccatatgcgtaatccgatgagcactgcagaagcagataagatcgcaagccaaagatgttaaacatataacgaaacacccaaactatcatgaaagacaaaagtgcttcaacagagagccataacagcatagatggcaaagaggcacatgatgagagaagcagagt

SEQ ID NO: 6310 - DNA, 587 bp, Arabidopsis thaliana
taataataacaataaataaataaactagaaccatcaatcataagttgtccagaaaaatcaaagagaagccattcctgtagtcatacctgttcaaatggtgttggtggtttaccacgacaaaagttggacaaggtccatgtagcatttcttagcatggacaacttagaatttttcatttaactgagccagcaatggctcaagggccccatagttgagaacaagattcctgcagtttggagagtccccagcaacatttcccaaggcccacaccgcctacaatgatatcatgtaagggtttgtacgaagccataaaaagttatagcacctatgactacggaaaagcagttggctgactatatcacgaaaaaccactaaggatcaaaacaaacaacaaacaaaccaaatacgaccacggaacttagaggcatgtatccaggtggaccaggtcacatatacaaaatggaagcacgcagttatctagctagttagtggcaaacctgctctcgaacgtcatcactagcagatgtaagaagcttaacgaagataggaacagcccctgttcgattacaacccgagtatgatctgat

SEQ ID NO: 6311 - DNA, 516 bp, Arabidopsis thaliana
gccagtgtgctttccagaccaccgagagttatcctcacacggtgacgcgcttgaaggcgcgtgtgatgactcgactagattggcggcggtgaaagtacagaaggtctacaggagttatcgtacgcggcgtagattagcagactctgtcgttgtcgccgaagagctctggtaattatttataaccttttcaactaaaacactgtaattagatatttaaatggagagattatgttttagagtcattaacgtgttaaattaatgatggtaaaaaacaaaaggtggcaagcgatggattatgcgaggcttaatcatagtacgatttcgtttttcgattactcgagacctgaaactgctgtttctagatggaaccgtgttagcttgaatgcttctaaggtatgcctttttttcacaaaaatatcaaaaacatattttcacaaaatttctagttgaactttgtgatttatttatttccctaatgagtcttcttttgattaaaattcagaaaaaagtatatgt

SEQ ID NO: 6312 - DNA, 1004 bp, Arabidopsis thaliana
tcttctcccatgcgaccaatctggacttggagctcagggcccataagtgttgcgttcacaacgatgtctttgtagtaaggagcagctagattcccagcgacagtgacaaatccagtccagaaatggcagttttcccgttaatgtacacattaaagtacaggtcattgagagacttgctaacgatatcacagaaatgaagccggataaggtagttaaacgatgggttggaggggaaattccaggagacgttaaaattagggtctatggtgagagaattagccatttctacagctgttgcataaaccgtctgtggagcaatcaaaggtgtaacttccggtgggtacttgattgccgaaggggttgttttaacgtcctttgccaagttctcatctttcaagaattccttatcgggtatccaggttcttcctaatgtatcattctgaggcatgatcaagggaccgccgacattgactctataaacagactggtaagcgtagtcagacagacccgagaacccaatgacagggaaaagggcagtgccagaatcagagatcagttcgtctggagctgacacgacttcgatagcgttgatgaacgctgcagagcttttcataggtctgaacctgagggcgaattgagcatctgtcatgttgacgagatactccttctgaacagcagcttgactatcattgttgttgttacttattttgaagttatgaagcagcacatatttctccgttaaaacggaaaaggttgcttgttggagatcgaacttgtcattagggaaggccaagaaatgcaggcgaacccaatgccaaccaggtcgagtcaaatggaatttgtaggtggcttctcacggaagatccttgcagttaggtagataggagatgcgaccttgtctgaaggcggggctgagacctgaatatcttccttggcttctatgtattggattgtttcttggtcactcttaaagactcttccatcaggggtttttgatgacgatt

SEQ ID NO: 6313 - DNA, 1801 bp, Arabidopsis thaliana columbia
taatcgatcaccaaagaattaacagcgcaaccactacgaattacctcatctgaatcctgcgcaaaccaaccactgcgcatggacgaacgattacaaattgaaaatttacatgagagaaatttaactcagtaacaatatgattagcagacaaggaaataaaataaaataaataacctggcggggagatgaaacagcagaaggggcacccctgcaaaaagcctattaaaaccaaaacaaaagcgaaagttatcgattgacaacgaatgatgaattagttatatctgatactaataatgttatcaaactaaccgggacagtggttactggtagatcggccgacacatcagggatagggacctaattagagttttgtataaaacaagatgaccacatccgggataaaagatggtccgcttgaaaactattatggacattcttaataaccactaactaaacttcactccaaaaagataacgacaaagattgtattggagacaaagggtagtcatataaaaacaatgtaataatggattgactttaatagtataattagtgcgataaactttttttttttaggccaatcagttagtacgataaacttattacttaatttaggtcggttagtgtgaagagatcaataatcaatattttattttaatcttcaaaagatattaggattaatattttaaagaacaaaaaaaaaggttgaaaacaaactaaaaaaccgatggtaatttaggacctaataagttatcacgccaaacatttatccttacagaaagagaagaagttgatttggaaacaagttctaaagacaatatatcaaatattgatggtaatttagctgctaaccactatatctggcaactccgcagacatctcgttgctaaccgaatcgacgccaaccacggggacaccctacagaacgaaaattcaatagaatgaggtcaaatatacaaaaaaaatttgaaaactagtcaacccgactaggataatataaagggatctaatacctggctttcttcgcattcattacccaaaaggtcaacatcgtgtgctgcctgctgggaacactgaaactagaacaagaaacagttaataactaaattatatcaataagatggcaattattccgctaacgaataactgctaacctcttcattatcaaccgaatgattaggagatgaaactgctagattggctggtgtattctcaggccgcttaaattaaaaaagaaaaaagattatttgaaactgccaatatggagaatctggctaggaaaaaatagatataataccacgctaacctctacttcatttgtcaaggtatccacattggttgttgtcagctgagagcactggacctggaattatcattttgaagggcacttaaaattatactaaaaacatgtaacggtaacacaactaacttaatacgataaaagtataatgatttcgataatatggataacagctaacctccacattatcgcccgaaagtttgggagaagtgactgctccagttacagggctaatatcatgccgctttaaataaaaaataaaaaaataaagttacaaacaacgctaacacaacgatgacaaaactcaccaaatctggaggagaaaaaaatagaaaccaatatttgattaataatctaacctcgttaacatccgcttccacattaacatcccgtccgggggagaggtcatcctcgacggcgtcgccgttagagacctaccgacaattacagcaattacaaaaaatcgtgacaaatggagaaaaaatgtgacacattatgata

SEQ ID NO: 6314 - DNA, 1466 bp, Arabidopsis thaliana
cttatcagcttcctaatatcgcttataacttgctggagctcattcaccgctaaaagtaaagcctcgattcttctctcttcctcttaaacttgtttcagttaaatcgtttagttcgttagaagatccagcatgtttattaagcttagaattgcttaggatttgaacaggctgttttaggacatgattccttatcggtttctcagattttcaactttgattttgaagaaattcatcgttttaaccaccggtttctctttcaccgcctgtaatccgtcatctgtcgtcgagcctaccggcgctctgaactgctaaccaccggattccggtgataatttattgagtgttcttcagattttgggaagatcttcaacatgttcttgagccaaaaacttcccagaccttcctcaccatccgcgacacgatttcgcagtgttaattatgcctccgagaaagattaaacccgaaagattctcgattaacggtcagtttgggaaatatatgacttccctaacgactccgggcaaacttaaccttttaaagggggccactaaacttctcccaaatcaacctgttatccccgaaccaaccgtttcaccgaatcactgcctcctggtcatacttgcgctttcgagattttcttcttggaatgcggactttactttctgctttcttattgattttatgcatgatttcaaaattgctctgccccagttatgtctgaatgtcatctgtaccattatgtgcttccttactttagccgaagaagacggcttcatgctgtcgctgcccgaccttcttcaactatacacagtgaagaagggtcacacaaatggaacctttctcctgtcaccctggaagggtttttgagtgtttgatgacttcccagaaaaggatgaacaatggaggaagtcttacttctttttccctgtgaatgaactcacgtacggcaagaagacagacttgtttgggtctgaatggacagctcgggccgatagataatgaacttaggatgccatttttcatttcgtcgtacccttttgcgattcatctcgcattctacgagctaaccacttctgttctcttacagttaaagtcgacaaacccccagtctcacacacattgtcgtcaagacttaggttaagaatctctcacgtcggacatgatcagagcatcaggtagacggcttcaatatcgtaccgatcttgctgccttaacttctcccttccaaccacaaattctttccaaagctgacatgtcttccatttcataacgcgaagagaagagattggaaagagagagggctaatcaggtgaaagctcaaattaaatccgacaaagtcgtgatgtcgggaatctcaaagagagtaagctccgagatgccgaaaagtctaagaagccaatcgtcgatgatggggtcgaccttgtcaaattgtaggaagggcttcttcttcaactgggaaaaaatct

SEQ ID NO: 6315 - DNA, 1230 bp, Arabidopsis thaliana
gtgtttcatgataccagtctatgtatttattacctgattgtttatggagaacttgttcccccataaatgagtccctgttcgattgcatgttaaaagacatccacgtctatattttatatatcataaagttgtgtctatttggacaacaaaatttggacacacaatgatttattttggacatgagaaaacttactcacatgtctaattttttaaaaattttgtaggactcacgacgtcgctactaacccatctcaccaccacaccccaacctcttcaatgtgacaaagtattagggttcccattctatcacgatctcaaagttacaaaaattttcattaatagatcgctatttgtacacctttagtactatccgaatcgataatccaaaatgcccaaaatcgtctgcgaaaaaagcaaatgtatccaccctcaaccaatggcacctaccagacatttctggcgacccccaagtgcccttgcatctattaggggaaatcaatttgccgtccatcctcctcgtcaagctttggttcaattccacctacaggtaatgtttaactactaatctttgctatctgaacaatcacccgaatttaggtttatcatttggaattattttatatcagcctcctccgttctctgatttccacatgcctgaacacgtagctgctaaaatagtaagcttagtttcagaggacggtgttgatatgttaaaggcttggattcaatcaggaccagatggcaaagccgctgttttttccagggaaactctttcttctgttcgactagataagtcccctttattcattcacatggctcatgaatcttctagttatcacatgttttacacaaaatgcctagccttcaaaaatccctatgcactatatcttcagagtttagtgttggcgtttcatatgtgtgagctccaggaagcaattgctattttggatggtattaaagacgtgttcccacatgctggtctactttacatcatgctccatagttgcgctggatcaatcccgtgggaattttatagtatgtacaagcgaaggtactacaaatttagtgaagtcgacttattcgcagataagctaatgttccatatcaacgaggttggtccacgtcgccaagggacatacaaaaattcctgggagtttgaggattacggtgagtgttgatcggaccatcagaacctcaatgagtatgagggacagtggtgtaacacatgta

SEQ ID NO: 6316 - DNA, 1261 bp, Arabidopsis thaliana
cttggagaggcttgtgggttctgaaatccacactagagatttgtaattgagattatgagaaatgagggctagatcttcacggaaaccttgagagttatactgttaagaacgaatggactttttgtattgattataacaaagcttttacaaagtgaaaggagattacaagtgtaaaagtatgtgtgtgaatgtaagctaggttgaatgtgtctttcaagtcgtccttgctccttatataggtctacgcacgtggtagctccgtccgggatctgcggagattctcttggatattcggcaggtccgttccgagatatcaggtccgctccgcaaatatctcctcgttagttcctaggttgttattcgcttatctcccttcatcaggtgaccgggcttatcaagcccaagtacccattcgcgtatgtgggctcatcagctgcgtaggtcctctacttggtgggattggtgggctttgtgggcttgattggtttttttgcaggtggattcctgtaggggaatccagctccaacatttgccccccaacccattgagtgagtaggcgaactcgatgagtggacatataggtcaggtaagattgcgaaaatattccagatgaggtgatagatatgataagatcagtcggttttgaggataaactcaacaaaaacgatttaatttcaggttcctgaaccgaaatattttgagtacatacgcaagacaaatcggtgttggcgtggacgaatgagatggagcgtctcttcagcgcaccgcatctgacggcccagatcaggcgcggggaagagatctctgcaatctcgaaaaatcgtggtgatgatggctcctttaaataacttcccacatctccacttgatttcatgtcaactcacacgactctcaaggtaacttctcttcatcttatctatttactacgtttagttttcatttttagagatagaaaagtttcacctttcttctgctatctccatcgttttctttctcttctgctcccttctttttcgatcttccctctttgctttttccttcatctctctcgtctttctccatcaaaatcaagagatgagcaacctagaggattcccagaacaagagcaaccacagttacgccgacgacgagagttcgtcaaagacggggtcggcggcgtcaccgccccaagtacaaaggcgcgttataccctaggcggaatgggtcaatccgtcgccgtcgacagagccgcaagcaaagaagaagaagctccaagcaaagg

SEQ ID NO: 6317 - DNA, 1858 bp, Arabidopsis thaliana
tgctttactttctaaaacgatcgttttcagtcaggttttctatcggttcacctattttctcttttgtagaaaggcgatcgtgattgttaccggcctcactaaattatggtttatatattataattatctatggattgattatgatttcctaggcatgtacgtacgtaatattttttttgtgcgacgtttcagtgaaagtgtagttgatagtgaatgtttcgagttcaagttataaatcatatcaatagtaatccaaatctttttttttgtgatacgaacttggtaaacgtgaatcacattttgtaataatgcaagatgacagaatcgtggtaagaaaaagtaactaatgtaacttatttttacgttttaaccgttatattctctatataaacgaaggagaaatgaaagtattcatcaagtaaagaaacaaacaaacaaacaaaaaacacacttcactcgctacacaaggaagagagatggctacgtcaggaacatatgtgacggaggttcctttgaaaggatcagcggagaaacactacaagcggtggaggaatgagaaccaccttttccccgacgccatcggccaccacatccaaggtgtcaccgtccacgacggcgaatgggactcccatggagccctcaagatttggaactacacattaggtaaaaaatgtatttacgtacttccgttaattacatataacccacgtctgaaaactagggttatgatgattatcacataaaaaatgataaaatttagttttaccaattaatgtgtcataagtataaaaagaaatcatttatcaaacgttttgaccatatgtaaagtctatggaacaaaccatatacgtaatctttccatttaaagcattcatcggaagtataatctttgtggaagaatctcttaaaccttgaaattagttgggtgatacattacataaacccaaacatataaatgtagatgggaaaccggagatgttcaaggagaggagagagatagacgatgaaaacatggcggtaacgttcgttggactagaaggtcacgtgatggagcagcttaaagtgtatgataccattttacagttcattcaaaagtccccggatgatatcgtttgcaagatcactatgacctgggagaagcgagccgatgactcgcctgaacccagcaactacatgaagttggtcaagagtctcgctgctgacatggacgcccacgttctcaaagcctaatccctctcacctaaacccatcatcatcgtgtgtgtaactttgtatgatgttttcaatataataaatgggggtttgcatgtatggtttcatctactgtaatatgctttgatgttgtttataataattaatgatttaaagagtaattaatcaatattgtcctaaatagtgtttcactatatattgtacttagtggttgtattatccatcattttatatgttcatttaatggttgtattattgctctctttattcgttgacatctttatatttcattttattttatataatttttgtattctttgcacatctagtgatgccttcagcaactattccctggtgcaactactatctaggactacatgcctatctacctgctaccgctgcaataccatattaccatctacaaagttatctctcaggttctggtttcaagctaggcttggtatatgttcgtttagtggttgtattatattcatcaatcattgtttttctaactgcatgttctttcttcttgagtactgtatcattattaattggccatatatacaaaaataaatattagtatttttgcttggtttttcattttaaaaatatcattaaaattctaagatcatatttagaaaagaaa

SEQ ID NO: 6318 - DNA, 1424 bp, Arabidopsis thaliana
cttcaataatgtagtcaaaaggtgtgaatctgttaaataatacattttcccttgggtcggaatgatttagctcagttgcattcatgaactcaatcatgtatttgtgggttgttgttcggacaaaaccacagttttcgataacaccaaaagttctgatttctttccactgattctcttcaagcatgttgtagtaacgttgagaaaaccgacttccgattatagcttcaatttggataccctatgaaaacaacattggagggtgagttatatagggaataagacaagcagaaggttaagtatgccttgtatcacgagtgaagatcccattacccactcatcgacaaagacgacccgtagtttgaatgagttatctgtgataaacgagacgtacttcctaagaaccataacacaaatcgtccagcaagttatgtaaggattcaagtcgcggaggccgtcgtaacccatggtgaaattccgagtcgttgaaaattaaagaaatattttgaactcgttagcttctgtttgtgcgagtttagccttctggtgtttatgggagaagccgtttttataggcgtattaaaccgctggtaattaggccggatataaccgtacctcggttagtcagtaaatcgaattgaacttcatgtttttattgacaactcagccgtaatgtgatttaaatcagccataacaaggacgatttgtcgccaaactcagctgtaacacgcaacctttcgtataccttgacttgtcttttttaataattcttgacaactcatcatttagacgtctcatcctcacatcttaacgacatggtgcctcacatcgacggacagtttctaagagatgtcgaagccgtgctcaccgctcctgatcgtggattgggtacatgggtcgacaaaaccactgttacgtggttcaaattcaatcaccaactagctgtcgcaattggtgatatactccaacgcaactttcaccatgcgtggccgacgtaccggatgattcccgttgttttcaaggcaaggtggtttttcctcctcacggtaagcatcgagtttttatataaagcacttcctgtaaaccgtagaccaaattcttactatttgctctctttgtagcgtatgcacacctgggattcaaggcacacggtgacggtgtggacgcagtttaatttggtggctagaacgttgtaccgggacaatatgcgggtgctgaaacggggatgggcgcgtggtttggataagccgaggtggatgacgacaacagtttggaatgatttggtggacatgtttactgaatttgacccggatgatgtcggtttcatgtcttgaatgcttttgtgtctcttacttatcgtccctttatctcattcctatgaactcaatatgtttctctgtttttttttgtgatggctttatatctcg

SEQ ID NO: 6319 - DNA, 1678 bp, Arabidopsis thaliana
attgatttctttgtctacactgctatcgtttacttgctcttgctgctcgttgttcgatttttgcatttttcgcctatatcactctaatactcgactacccaattgtctggcaacagactgtgcagtcgagtattcctagtacattttctgtctgttactcgacttgtcactcgccaacactagtgcttggcaacaagctgtgttggtcgagtgttttaattgtttcttcttgaatttctgcttcctacatgttcacttaggcctgctagaaaccccaaaacctgttattgcttggcttgactctgtgaactctgattgcattttgattgttagcatcacacccatttggattggcaaccttcagtactacaacgacatgatagtgctttaggattaattgatcttaaaaagttattatcagataggacaggtctatggtcagtcccttcaaacttcatatattcactgcgccctcgagagaagagatcaaagcaagcagtgttagccaatgctctatccagtgtacaatgcactaagtggaaatgcctcactcctctccaagacaggaaattgcctgaatgctttagatcaaagagcccacactccgacaatagggacctgaactcaacaaaggaagtctcagctctttctggtcctccagccttttcagtattatctaaaattttgttaaaataccctatgaagaaccagggctcatcccgtgattcgccaagagccaacagggtattccagagagacgacctctttgtctggtcaggttcaccataaacaaaggtagcaaggaaacttgatccttggaaagtgatagtaatgtcaataaaattatcacatgtggaggaaatcaacatctccaaatcagacttccaaaacaaagctaaccctcctcctccatgaccttgaggagggactagtagagacttgtagctcttgagaaactctagcttcttaaccattgtagcagactagttcttcgtttccatgaggaagatgatatcaagggagatcttcttatggatcttcctcactttgcgaactgtcttaggattccccagctcttgacagttgtagctcatgatttttacatgaggcttgtggatggattccggagccttgaattcccaatggtccagagactgatcaaggttaagccttctgtgcgagaaaggaatggtggcttggttgagccggtgctgcttctttgatttgaccccagccaaagccttagggcttgccttacgccgtgttggtctgcctggcttcctcttgctgaccaatatcttcttgacccttagcttgtctgttggtccattaacacgtcccagccaatgagaaacatggcctctgcctctgctagaggaagttacttctgtatggagggatgagacaggtgttggaatagctgacctcaacattctctctacagtagcttcaatttcccctaactgttctgcctatcggacactctctcttcttgtagccctttctgtgggatccggacagttgacatactaggacattacttctctaacttcatcaactgcagcctcgaaagcttccacctagacatgatcccgagatccatgccttttagaggtcccagcaaggccaacagctggtaagacagatactggtatctcatgggtctagggactatcca

SEQ ID NO: 6320 - DNA, 1662 bp, Arabidopsis thaliana
gaggatccccaacagagaatattaacgacgatgatttttctctcccaggagattcactatatttacgagaatgccatgtctggtttctccgcgactcgggccgaggaccagcttgatacggtgaagaacacacccgttttgggctctgcgtatccagacgagctcttatctctacacacgacatattctcacgagtttcttggtctcgaattcgggatcggtctttggaacgagacgagcctatcttcggacgtcatcatcggccttgtggacactcgggatctccccggagcacgtgagcttccgagacacgcacatgactcctgtaccgtctagatggagaggttcgtgcgatgaaggcacaaacttctcatcttcggagtgtaacaagaagatcattggagctagcgcattttacaaaggctacgaatcaatcgttggaaaaatcaatgaaaccactgatttcaggttagacggttgaaatataaatgagccctctgttttttaacttcttttgatctcacattgtttagtctccaaatgttaatgggaataacgtgaagaataacttccaacttttaccaaaaaaagacttctaccatatatattatgcaaatataactcgtataaacacataagatataattaaaaacgttgggtagctccataacgttgatccgaacatcaaattaccttcctcaaaaataattgatcaaaatgaaaatgcttttgatgacttttaactaaatattttgtttgttaattcaagatgttctcattaaaagttattactaatggagagcccttactaatggttccataggtcgactcgagacgcacaaggacatgggacgcatacagcctcgactgctgccggagacattgtccccaaagcgaattatttcgggcaagctaaaggtttagcttcagggatgaggtttacttcgaggatcgctgcttacaaagcttgttgggctctaggatgtgccagcaccgacgtcatagcagccattgaccgagccattttagacggtgtagatgtgatttcactctcgctaggtggatcatcacgcccgttttacgtggatcctatcgcgatagccgggttcggagcgatgcagaagaacattttcgtgtcttgctctgcgggtaattcaggaccaactgcatccacagtgagtaatggagctccgtggttgatgactgtcgctgccagttatacggataggacgtttccggcgattgtccggatcgggaaccgtaaaagcttggtcggatcatccttgtataaaggaaaaagcttaaagaatctgcctttggcgtttaacagaacagctggagaagaaagcggaccgtgttctgtatccgggactcgctcaagagagaactcgtcgagggtaaaatcgtcatttgcttaagaggagccagcgcagaacggccaaaggagaagaggtgaaacggagcggaggagcagcgatgcttcttgtgagcacagaggcggaaggagaggagcttcttgctgatcctcacgttttaccggccgtttcacttggattttccgacggtaaaaccttactgaattacctcgccggagcagcaaacgccaccgcctccgttcgattcagaggaaccgcgtatggtgcaacgccccgatggtagcgc

SEQ ID NO: 6321 - DNA, 1050 bp, Arabidopsis thaliana columbia
cattagttttgctacaaagagtatgctacaaccatccatcgctcgggaattcgcggaagtctttatgttggtggtctcttaatgccaatactgggagctgtggggatggaattcagaacccttgacgtgttgcctaagttcattgacctcgactatctcaaggggaaggattttcttgagaaaacaactccggcggatcgctatctcttcaagttcaaccatccatagcttggaccttctctgttacccctaacatgcgagaaccagacttcggtgaagacaagacgcaaaatcaatttcatgccatctccctctaccttgaacatcgacattggaggagctcgagaagatgaactagaatatagtccaactgactatgagcaacatgagtactttactcaagctgattataagcagcaaatcgagtttgagcaacatattgatcaatcggagcatgggaccagcgaacaagagcaaggtcattatgaagaaggtgctgaccaaggaggagatgagatagctgaagttcacaagaagctcagtgtgcttgaagagcttgggaaccttcacagcaaaacaatgaagggtttcaagaagaagatgagaacaatgaagaagtatggctgctcaactcaaggacttccagatcagccaaggccaccatctcccacccccgaagtaagaaggattggttcaaggagctcagctgcaaggagagctgaaaggatcgatccaccccgagcttcatcttttgagcctcgggaagtgatcttcgagctgagagagccaaggagtaggcaaagacgagcttccacatgctcgaccagacagaacgagcataaccctcccgcctcaacttcagcccctgcctatacccaagagagtatggatgactatgtctccatctacttcacctgatcactgaggtacaccacctcaaccattgtacatacgattaactttttatttttctttgtgtgttgtttgttttggtcttgaattctctttcagatttttattatacaagggactgtgtattaagttggggga

SEQ ID NO: 6322 - DNA, 134 bp, Arabidopsis thaliana columbia
tctagacttggttggggcgattcatgatgtaggagaggtggagaatactaggcgtacacaaaacattgtcaatgatttaaggatttgtttcaaactcaaaaacaaagagtgagatttttttataaatataatga

SEQ ID NO: 6323 - DNA, 487 bp, Arabidopsis thaliana columbia
tcctctagtagcttgctccgaaacaggaaaaaaaccaatgtgaaatattttgttacctcattgatctcgaatagatcaatatcgctgacgttgagccctgcgagcttagttgcagcgggaatggcaacagctggaccaatacccattacagatggttccacaccagtaacagcaaaactccttgcattgttccggaatcagatttgctcggtttcttgaactggcaaaatgttgtatattcattttacctgaatactccaagaatgggaagtcccttcttcatagccaaacttctcttcattagcagtactgctccagcaccatcactgatctgactagcattgcctacacaaaacacatatacttaaatgcttcaatctatgatctcacttatgccagtgatagttaagagagttgtttctaaccagctgtggtggaaccgttctgtttaaagacagtcttcagctttgcgaaatctgcaatgttt

SEQ ID NO: 6324 - DNA, 572 bp, Arabidopsis thaliana columbia
tttcaagaaagcatccttgaagttaagaaagtaattaaaaagatgcatcaagacacatgtaacatgccttaaatagcaattccaagcaaaactaatacaaggtagaaacgagtacttgtgtaggatgactttgaattgtatccattatatgtttcccatgcccacattccaagtggcgtcttgcacctatcacgagggccatcctcttggaaacaccatgttgtactgctgactcttcacccgtcattccctgttttataaattgttaaaagccttggaaatgtaagaacagacttttaaggtgccactggtaggaaaaggaatcttccaatcaaaagatcacctgaataagctgccataatttttgcatgttgactgattttccacgagtcaaatcaatttctagactttcatatgcaccgttgaacaatgttgcaagctatacaaacacacaaataataaattagtaggaagcagagttaaacaaatgagtacaaggtcaactagttagattaatgctgaacaaaaggcacttatcataaaaaggtgaagggtttacatatatattatag

SEQ ID NO: 6325 - DNA, 663 bp, Arabidopsis thaliana columbia
tataataatataataaaaaaaagaatgtatatagtttattctcaccactacatgtatataacacaaccattttcattagaagctcaaatttcaaatctcacttccttatcacaatgtcttcctctatctctcccctcctcacaaccgccatctccgtcgcaatcctcctcttctccaccatctccacagcggcgacaattccaaacatccaccgtccattcaacaaaatctacgccttcggagattctttcaccgacaccggaaactcacgctccggcgaaggaccagccggattcggacacttgtcaagtcctccatacggcatgactttcttccgacgaccaacaaaccgttactccgacggtcgtctaaccatcgacttcgtggcagagtcaatgaatttaccgtttctgccaccgtatctcagcctcaaaaccactaacgctaacggcacagcaacggatactcacggcgttaatttcgctgtctctggatcaacggtgattaaacacgcgtttttcgtcaagaacaatctgtcgcttgatatgactcctcagtctatagaaacagagcttgcttggtttgagaagtcttggagcacttggaacgaatcagaggtttcgtgtttaagatctcctttggatggagaatggagtgatgata

SEQ ID NO: 6326 - DNA, 595 bp, Arabidopsis thaliana
taacggccgccagtgtgctctaaagtcatggacgagggtacagacgtggtagatattcttgctggcaggattatccctctgcgcctgggttacgttcctgtggtcaatcgtggacagcgcgacattgagaacaagcggcctatttcctacgcgttggagcacgagaagaacttctttgagagccacaaggcgtaccggaacaaggcgtcttactgcggaacgcgtacctcgccaggaagctcaacttggtgagtaattccacgcactgctacaaagcgtattctaactggagtagatccttatgatgcacattaagcaaacgctgccggacatcaaatctcgaatctcgtcctcgctgcaaaagtactcgtctgaactggctcaactcggtgactccatgctcggcaacagcgccaacatcattctcaacatcatcacagaatttagcaacgagtacaggacagttttggagggtacaaccaggagctttctagcgtcgagttgtctggcggtgccgtatcagtttcgtgttcacgagctgtactccacggtatcaaggcggttgatcctttgaccaggttaaggacattgatat

SEQ ID NO: 6327 - DNA, 1166 bp, Arabidopsis thaliana
tcgcctgttggtttctgttgtatgccctgcttcaagtctcggtaaccatcaaccactttatttgaagccaagttaggatgacagtccgcattaatagaggagcgttttttcttcatttttgacgtttcccaaccatcaataccagtagaagttcgatcttcaccctgaactgcattatgatttcccacccgcattatttctttatctttgtctacagccgctgactgtcgaacaatacagttgtttcgaacatccatctgcaccacaaaataaagagattaaggtttcccaaagcaatagtgactcacttactatttataagaaacctgagatatgaaaatactatcacacgcaaatttctataaatttttatcaaaacatttaaaaaacatcagttagtttcatactatcaattatattcaggtcataacagtattgtgataatatagcaagcgtaaaagcaaaaatagttgaggacctactaaaatataagaagacaaatgctccttgattaaacacttaaatttgcatgcaatccgacatatataaaaaaatactacattgtagcaaaaaaattgccttaaatgacagaagcttctatatcatatctaaaactagtaaccacgatccaattttttgaccaattcaaaagatgcaccttccagtgatcagaagcatgcaatgacatgcaaacagaagactgcattatagaatataagacatttgttcaagtacgaaccaagataacaactccatatgtaaaaaaaatcagaattaccatggaagtacgtgttcgcttatttggaacaccacttttaggtcgttcatccaacttttgctggtcaagctcaaaaccaccagccagggtctgaccctgaattcccattttacctaggcctggtcctgataccaagcgatcaccagagcggtcaccagaaaacccttcaggtcgagaccttttctttgtaggtacacttgggaaaaacttgttaaatacagaagaagcttcgttgaaaatttttacacgctccctgcgaccacaaaaagtaaatgagtcaaaagagcacctcaaacacaactaactaacttgtggtagttaaaactactggcctcacattgttttcggcagccaagcttaaacttttgatctcatctggataggagat

SEQ ID NO: 6328 - DNA, 467 bp, Arabidopsis thaliana columbia
attgcgttggctattggtgccaaatttgttcccatgaggaagcccaagaagctacctggtacatttttatttcttcctctagttgcttgtgattttgacattaagttacatgaaaggtctcaattaggaagttgttagtttaaatggcttcttgctccaagtctacactttatcattatctcgaacattagcaaggtgacttttatcttgcagtgtctttgatcaatatgatgctactcatttgctagatcatttttctttgtggtaacttgcagtaacttaagtggttgttattttttctgttacatatcaatggacttagttgtgtatcttgaccagttacaagaaatgtattaagccatttggaaacttatgagcagtgtcaaataattgtcgcattccttgtttatccatggacgttaatttctaaactgccgctgcatttggttcctttaacagggaaggtt

SEQ ID NO: 6329 - DNA, 592 bp, Arabidopsis thaliana
tgtgttgaaatttgttgctgtgatcttaaccctccaatactctctatagttcactttcacatgccagtggatgcggatgggacacatatgatccgaacacttcacgacaggcgatacttcctcatctggatcatgtttctgttcaagatatggcggcaactctccatccctgatcaatcaaatgttgctctctagtatatattatacatgttgttacatctatatccaaaaaaaagtgaaaggtttagaaaagtgaattacttgacacaatgggaactcgagcagccgcagctacaggtaggacaaggaacaatgttttggtagtagaaggcagagagtgaaacgcagcattttggcgatggtgatgaccgaaactgcgagtatacacacactgcctcccatgttgctgcactcaacaccacatatcttatgttacataactcaaaaaacctatgtataacatgtttctacatttctcaacttctttttgtaattatattgcaatttatataattttggttacctagagcttgtgttttgcgacggcccttatcagtactaaacttagtcggggacacggatgtacattgcg

SEQ ID NO: 6330 - DNA, 479 bp, Arabidopsis thaliana columbia
tctggagttcggttcagtccagacttaggttgcactcacttatttttctgaattgggctgaacttcttttatggattcgtcgttctagcacttctgctccctccacactgaggaagcttgttgctcattccgtcgtctacgcaacttggaagcagagaaataacatgctacataactcgcatcacttggatcctgcttcagtcttcaagatcatcgataggaaaatcattaactccatcaacgcaagaagacacaaaaagaagttccgtaatcttatgagtttttggctcatataatgtttctttctgaagattgtttacttctttgttttttatcttaatttttgccaaagaactaattatttaggagttctcattgtaattcctaactcttttattttatataatatttaccgacttagcaaaaaaaaaaaacactacgttttgagctaaaagaaagtcaatggcgtaacacacagt

SEQ ID NO: 6331 - DNA, 690 bp, Arabidopsis thaliana
ctctacacctccaccattaccaccagacctacctttcatctctcctgatccagcactcaagctagaagagccttcggatactttatagatttcacaatcctgtactatatctttcccggcactcgaggaacctgtcttagactgtgcctcatcctggagattgtacttgtccaacacagactcggaatcacctgctccttcacattttctcataaattcaccagaggctgaccgctgaaccgagctagcaatatcttcagcaagcggctgctcttcttgatgcccagacacagagtcgtcaccagtctcagtctcaaaagctttacttctctctgaccaagatccgctcctcccaaaatccgagtcataacggtgggatctccttcctttcaagctattcctggatccagctgagctatagccatcaatatacctccttttctctgcagctggagctgaaacatccattcgggcttcttcttgagacctggaactctgaaactctccagcttgcttcctaaaattaccattctgccatttactggaaagcacagtttgtggtagaaaccttgagaaacaagtactctgttgctagacgacctgcctccatgaaaacgtcaccgccactgcttctacgctgcaccggtggaggaggcagaggcggaggcagctgattgtggtatgatttag

SEQ ID NO: 6332 - DNA, 560 bp, Arabidopsis thaliana
gggtaccgagctcgaatgctatacctgaaaataccaaagatcaaggaaggaagactgaagaagatgtaaggaatgagaagtgatgtgagcatattcgtcttccaattggttcgatccaacaccaacaagtatctgcatttattacatcaaaacctcatcaagatcaacacaagaaacggataagaggaaagagacatagaaacagagagaatggttacatggcggcgattgaagcaacccattcgaggacagaggtaccaaagcctaaaccagtgagtgtgaaggcgtgtgtagctaggttcttagcagcgatagtgagctcgttgaaatcggatccgatcatggccttaagggttccatggtcattcctcaacgacttcataggcatcttttcttgccggagaagagagaactatgaataattgatgtgagaagagaagagagtaaagagtagatagatggtgatgaatgtgttggaagactttggttataaagatattacaagtgactcgatggatacgtttcgccacgtggcagttatgaacatagtttaatttgga

SEQ ID NO: 6333 - DNA, 1022 bp, Arabidopsis thaliana
ctctagtagaaaatattcgatataaaaaacgactctgttagaactcagaagttattacagtttttattaattggccaacattttaagaaaaacagaccaactaaagaggtctctctacatgataaacaacctcaaacgttaaatagagagattaagaaagttcgtaagttttagactgaaactgcaaaacaaaagttccatgacgtaaacatacacggcacaacatcgtggagactaggctctcttggcaacatcgccatcgtcagtttgatcaaacccaactggaccattctctgtgttaccgttctctgcatctccaaattgattgtcactgccaccaaattgttcatcgcctcccaaaccgctttcagtctgatgatccgtatcattgcctaatggttggttgctctcaaacttgtcatcaaagccagcattagtggagctgccttgggcaaagttttcacttccaccaacaccacctgcaacaccatatccaccgccgccgccaaaattgcttccatagccaccgccaccaccaacagcattgccactataaggagggttacctccataaccaccagcatttccaccataggaagagttaccaccataaccaccaccacccccagcatttccactataagaagagttgcctccgtaaccaccggcaccacctccataaccaccagctggagcaccataaccaccatctgaagcaccataaccaccaccaggaccaccgaatccccttcctccaaatccacttcctctttcagttgcataattcaccctaattcttcgaccatgaaggtcctatatgcaaaaaaaaagaaacccaataaacaccaattgaaaatgccaagcaaagtgggttcatttccagcgttttctgaatcatctagacagagtctgaacgcaaagcttttactatgtaacaagatatacaatccacaaacagaaagattgctcaccattcgacccatcattaagagagagtaagtcgtgcttacagattaatagta

SEQ ID NO: 6334 - DNA, 534 bp, Arabidopsis thaliana
tttccggaagattaagagacttatctctgatgtttatagttaccaagaactgaagaagagccaagatcccaaacacaagaaacgttgactgagctgaaaacgttttgatagcaataccacctaaaaggttacctaagattccaccaagagaagaaaccatccaaacaaatgacggtagctcaccggattgcgtctctgaggttttttgctttccggattcagcaacaatagcatcattcgctacttctactaaggaagcaccgagattactaaggagaagatatatcgataaagctaagattgatacattggatcttgacaagaatgctatagctagccatgagattgcttgtaacaaagctgcaatagtaacaacaaatgatctctctcaatcacaattccaaattatttctctatcaattttatttgtggttaggtcttatactccaacggcgatgtatgggattcgatgttggcaaagaagtagacagagtctgaaacgacgccgtagatgggtttacgaccattggaaga

SEQ ID NO: 6335 - DNA, 616 bp, Arabidopsis thaliana
ctcttcgatgggttgtcgacaaatcggacatttgttggactgaagcctcaattctttagcacagtcgctacacatgcactgcaaagaaggacatacagcattattataagacgtttgaataaagcaactacaaagttcttttcttgaaactaattctaaagtgatctatagaccttgatggttggatctgatcgaaaacaacaactgtctatcaaagaaaatgcataactttggaagtttatatgacagttcatgttggtattatcagctatcaggcagagatctcgataaggtttggaaaatgaaatgataattgtgaaaccacaagcaaaagattgagaaagtgttaccaaatgtctgcaaggcagcacggccgtgtccttagcctcagtcatgcagataacacattctgtacccgaaccactctcatctaagcccgaggctgcaccttgagtggtcgagccatacaactcacggagttcatatcgagctccttcaatccaaagaatctgcttcacaactttcactttgaaagatctatcattatctttctcgagaaccgcttgtgtgacttgcttatgaactgatgattgctctgagattgaatttggagaga

SEQ ID NO: 6336 - DNA, 511 bp, Arabidopsis thaliana
tgccggatgcagtttaatcgccttccggcagtttcatccttcattatccttcgataaaagccatccctgtaaatgtccgtcgcggagttgccacgttcaatctggtgatggaacattcgccgctgcgatttcagcgccgcgctattttcctgttgctgttgctccagcttccaggcaatcagcaatcgtgccagccgcttgttagcatgctgactacgctctgactgaaccttcacgctaataccggatgccaaatgcgtggcgcgtaccgccgagtcggttttattgacatgttgaccgcccggccccgacgaacgcagcgtctcataacggattgcatccgattgttcctgctcatcagcggtaaaacgcccaatgcccagaaaccagtttttgcgcccatgatgaggccgatacggactcggacaaatccactgaatagtgccacaccagctttcgcttaatgcccatgcgttatcgccatcgagagaaaccagcgccgaacgcagtg

SEQ ID NO: 6337 - DNA, 559 bp, Arabidopsis thaliana
  unsure (1)..(559): unsure at all n locations
cagaaaggtaataatgtaaagagaagaaatgtcattcaaagctactagtagagtaaaattaaggaggttacttacatttgcttttgctcgctatgaagataagacttttcacagtaatcagcagctgaataaagttgaggcctcaagttcttgagctcctgttacatacaataaaggccaaagtaaaaataacatttgtaataagccaaacaaaaccaacaaacaaatcagaagattcttgagtcgtcgtctctaggtagctaagtcatgccatagtctgtcttgataattccaagagaaccagattcaaatcttgaagacagtagtaacacactaaccgacaatcatcatcttggtcccatcaataaacttaatccacaaaatttacagccaacaagacttttaaagtttttaccaacatgtatattagcctagcctacaacgagatcatggatctgcctcaactanaccaagtttattgtgatcatagctcttaatttctacagaatctaactgatcagaccccacaaaaaatgtggacanaggagactagtacaga

SEQ ID NO: 6338 - DNA, 554 bp, Arabidopsis thaliana
tctctctgattgcatcagtctaaataagtattccatttgttttaagtctcctgccctcccaaacgcgtcaatgaccacattataggtgactatggtccatgaataatgatacttctgcatgtattccatcacagcactcatcttcttgtagtttcctgatttcccataggaatcaaggaggatattgaaggttctgatgttgggttcaatcccagagctctgaaacttctcataacaattctccatcatttctatttgtccatttcccccaaaggctctaagagttgagttcatggtccacgaatcaggcttgcaatcatcctctccaagcatttggataagtgttgattccatctccacgaaccttcaaaaacaaaagaaatatctcagttcatggatgctttgaagtaaagcataacaactaaaaatgtcaaattcaggtatttactccatcctagcaagtgtaaagttctcggttaaaatggaatgaaagataaaaggcgtcaaaatgcatgtgtaaagttctctggttacatcacacgggatggagtgag

SEQ ID NO: 6339 - DNA, 542 bp, Arabidopsis thaliana
gatttttcaacgttacctacggaggctcccaaattacttttaaacaaagcaactcgttttcaaatatcgtagagaaatcaatggcgccgcgcgctattgcttaatactttgattcttaaaccacaaagaaaccctcttctctttatccaagatcctaactaacttatatatatacacacgtgcatacttctatctttcatcgaaaaatacaataatcttaaactttaaatccttccaattaaaaaaaacacacaacaaatggcattgtttctaagctttgttcaggtctttagcatcgttataacaatcattatgtcccactttggtcagtttgacgcaagaacaagtcttaacgttctgagtttcggtgcaaaccaaacgggatcgtagagtcggcaaaagccttttcggatgcatgggatgctgcgtgtggagtggaagactcagttgttatttacgtccaaagggaaggtatttggttagtggggaagctaggttcgaaggagaaagttcaaaagccgtgagataccttaaggattgac

SEQ ID NO: 6340 - DNA, 639 bp, Arabidopsis thaliana
cagtgaatcctgaggctgggcagtatcgttgaatcctccatcgttcctcgagaaacttgagcttatctttgaagatagtaacttagatgatgaaggtacttcaggtagcaaaaggaagcgaatagccaagcatcgtgatgaagataatgataatactggagatgaagaagacacgcaaagcgcttctaatttctcgagtcctcagtcgaaaggatactggtcaccgtcttcacatgagctgtttgttgatttgttgttccaagaggctttaaaaggaaacagacctgactcacattatccaaaggaaacttggaaaatgatccttgagactatcaatcagaataccggtaaaagcttcaccagaccgcaactcaagaatcattgggattgcaccaggaaatcgtggaagatctggtgtcaagtgattggtgctcctgtcatgaaatgggatgcaacttctcgaacatttggtgctactgatgaagactggaaaaactacttgaaggtataaacgctactcgactttttatattagttgattaagtttgcagcttaacattggttctttgattaacaggagaatcatagagcagcaccattcagaaggaaacaacttcctcacgcggataaactagcaac

SEQ ID NO: 6341 - DNA, 472 bp, Arabidopsis thaliana
tccctatataactcaccctccgatgttgttaccacagataggtcacattaccacagaggagtacggtgccgtgatgcgcccctcggtttaaacctgacccaagctgagcttcaggaggagatcaacgattcggatttagatggtgacggaaccatcaatttcactgagttcttgtgcgcactggctaaggacacttactctgagaaagacctcaagaaagatttcagactctttgacatagacaagaatggtttcatctcagctgctgaaatgagatatgtgaggactatcctccggtggaagcaaactgatgaagaaatcgatgagattatcaaggcagctgatgttgatggtgatggtcagatcaactacagagagtttgccaggcttatgatggccaagtgagatctaaacaacttttccgcttcccccatttcttactacctcattatctaatttcatcgagaatgtt

SEQ ID NO: 6342 - DNA, 593 bp, Arabidopsis thaliana columbia
ctgaaggatgtttctagaccacgtactcgtctctctagagattgcattccgttatgcgagctctccatgaacttctgcaatattaagtccaagaaaacattcaaaagtcagcacattacagtttgttggatgttttaaaagttaataaagataaatgagatcagaagaaaaggttacctgaaagagatctaacagactggactgctgtttttcgatctgtgtaatctggtgtcttatcagagacaactcttctgcattactctttgcctgagaagaactgctactaccactgtcagttttaggactctcctcatcactactctgaacaacttgtgacttgttcgacccattctctttgaccttatgcatctttgccgggaacagaacccgtttagctcccaatgtcgaacgattccgcttctctttcgacacaacagcttcctgctcaacatccttaggagtgtcaccacgatctaatggctcaacatcattcgactttgagcttaatggtgtgtttaaatcctatctttgcctttcaatgtgttgcttctcttcctgaagcgcagcaaaccagaagaactgatttggaggag

SEQ ID NO: 6343 - DNA, 951 bp, Arabidopsis thaliana
ctaaatcttaacaattccaaagacatgttctttatagacagtaaaaaaggtaacttttatttaactcaccaatgatacttagcagcaacaagaacttcttcgtacttctctgcagcattatcccaactcaaatcctgtgtcattcctcttctctgaagcccttcccaactctccttatactctctatatgtcaacaaacagtttcctaaggcatgaatcaacttacctgcttccgcgctatcaaatgtccaaccaagacccgtttcactatagggatcaaattgttgaactgtatccctcaatcctcccacggcatggaccaccggaatggttccatagttcattgcgtaaagctggtttagaccacacggctcaaatctagaaggcatcagcaatatgtctgcaccagctgttattctgtgtgctgttttaaccgagaatccaacccatccccgtgctttatctcgatattgatgctccatttgtctgaggacctcttcaagatccggtcgccctgtgcctaacataaccagctgaacatcctgactcatcatccatggaaccgcctcagctatcaaatcaacacctttctggtgatccaatcttccaataaaaccgatcagcggaacatcaggccgaacaggcaaaccgagctctttctgtaatgcagctttacattggggtttaccaatgtgaagattctccaaggaatagttggtataatcatcagagtgcaagtaagtatcaaattctgggttccattcttgtgtatcgataccgttcacaattcctctaaatttccagtcgttttcatttatgatgttatgcagaccccaacctccttctaaggtcttaacctcccaggagtatccatggctaacagtgagaactctatccgcagcttttagaccagctgcaaaaatattgaagtgctcacctcctactggggga

SEQ ID NO: 6344 - DNA, 557 bp, Arabidopsis thaliana columbia
tgcatgcaaaatatagcgggaacaaataactttacgagagcttgtcaaacaacttcacttacagctgtttcgtgtgcaatcctttttgcagtatcagaggtcctctgatatctgatgacaggtcttcgtttcaacgccagaaacactgccgcaattccatcaacaacccgatcggaaaagcgttgcaaaccagagggatcgacaactgcggggatcatatatagatgatttgatgccatattcaatgtgaaatgatatggatcaccagaaacaaagtctgcataatactcctgcaatataaaaaaccacaaagactatgttaaacaagccattatacagtactatgccgagtgcaccaagcaatataagtttaaatcagaaaactaaagacaggtaggggggatactaagctccacaagtatggccgtttcatcacaaaccaagcaacttctcagagacagctaaaaatctatacatatattgatccatcatataggctatgaaacattcttttagcattagcctcctattcaaaaacatcatggatgagggaagtc

SEQ ID NO: 6345 - DNA, 515 bp, Arabidopsis thaliana columbia
  unsure (1)..(515): unsure at all n locations
tattttccatcatcttgttgcagttgttgatgcgttttggggactaattggtagtacactttaagcttattagtcagaacaaatatggatgtgactggcactgtgactgtgagagatgcatttgatcgagtttctaaaaaacagaagctgtatcactcagttactcaagatgtcattgatctagtttgtgatggaatccaagatacattgactcgaatccaattaggtaacgacgatggagtagaaccggaatcggttcttaccgagttgagacgcaagcttgatgctcttttaccgattatccagcttcagaaatcacataaggaaactaaatggagtcttagtaagttggtgaaattgcttgaggtttcttaccatcctgatatatctctagcctgctttagcgttgatttcgatatcaacttagtgaataagatacttatccaccattgttaccgagaagggttgntcgacgttggtgattgtctggttaaggaggctggaagagaggaaga

SEQ ID NO: 6346 - DNA, 437 bp, Arabidopsis thaliana columbia
gaggatagaggatgaaagttactcggccgaagttcttgtctcgatccaaggtctaatcttaaatcaaaaaccttacttcaacgagcccggctacgagaggtcagcaggttctgcacatggtgagagtacctctaaagcttacagcgaaaacacattcatactgtctttaaagactatggtttacaccatgaggagaccacccaaggtaaaagcaaaaacctcatcccattacacttgtctctctctactaataaaaaagcgtaaaccttttcactaaaacttgagattgattgtttctggtggtttttcgaatgctacagtattttgaagactttgcgtatggacatttcttcagctgtgctcacgacgtgttgaaggcgtgtaatgcttacagaaacggagctacaccgggatatctggtgaagggggcccagatg

SEQ ID NO: 6347 - DNA, 512 bp, Arabidopsis thaliana columbia
gttgaattcacttcagaacacgtacttcccctgattataccacttctcactgcccaacaattgaatgtccaacagtttgccaaatatattctatttgtcaaagatattctcaggtatacctccgaccaatcctgtcctgtttccaagttcttattccccttataactgcatactgttgtaattgttttcaacatctggtttgtctatcctctggtcactgaacaggaaaatagaggaaaaaagaggagttaccgtaaatgattctggagtcccagaagtaaaaccaggctgtgtggcggatgggcttcagtttcaaacaccaaccaaaaaaactgaaaaggttgcttctgcagcaaagaacagtccagcatgggatgaagattgggccctcccgaccaaaatttctgctccaagagatcctggacccgcaaactctcctcagtttaacaattctacagttcagtcacagtcatcgaaccggacatcagtaccaacaacatgccctgcagttg

SEQ ID NO: 6348 - DNA, 794 bp, Arabidopsis thaliana
ttaccagagactcatagttgctcttctgagctcgatcgcactagcacgaccgatgaactcatatctgcaaaaggagttgaagaatcaactggagagctaatgcagtgcacacgaaacggtaatgtttcagtaagagcttctttactaattgttgtgaatgatgatgatattataattcaagaatcaattggaaacaaaaaaatttcacttaccacgagattgatgaattgactcatggactttccaggtgttctgcggtggaagcatgtaaaagtgtacatcaccaaaaatctccaggttaaccttcgattatccatggagcctaccaaagtaatacgctggttgaattctagagttgaatttcgctcggtttctcttttgcaggtcatagtagaaatcaaaagcaaacacgttgtaggagcattctccatgaaaagcaaagggttagtgagctactcttctttctttcaatgtctatggtgttcatttgtataagcagagtgatcttgggactttgtccaatgctttacaataatccagtggttgaatcactacaggcattgtaaatgatgtatgcgagacagtctcaggcctgcaaaatggaaaagacgacggaacacacagaagaagagctctatttcggaatcggtacagggaaaggtctgacaaagttcaagtgcaagagcaaggctgataagcagacatgggtggatagcatccggaatcttctccatcgagtaactgctgttgaggtcgacacttctcttgaaactataaacattaacgatagcaca

SEQ ID NO: 6349 - DNA, 548 bp, Arabidopsis thaliana columbia
ctagaggaggaccctattcacctccggagttttacatatacaacaaagagtccataacgtacaggagcggtccatggctcggaaatcggtttagcagcgtaccggggatgaaaccagttgattacatagacaacagtttcacagagaataatcaacaagttgtttactcataccgagtcaacaaaaccaacatttactcgatattaagcctaagctccacgggactattacaacgattaacttggatggaggcagcacagagttggaaacagttatggtactcaccaaaggacctatgtgataactacaaagagtgtgggaattacggttattgcgatgcgaacacttcacctatttgtaattgtatcaaagggtttgagccaatgaatgagcaagcggctttgagagatgattctgttggttgcgtgaggaagacgaagctaagctgtgacggtagagatgggtttgtgcggttgaagaagatgagactgccagatactacagagacaagtgtggacaaaggaattgggttgaagaatgtgaagaga

SEQ ID NO: 6350 - DNA, 544 bp, Arabidopsis thaliana
cgtccagacactgacattggttttaggttattctgcttggaatcggcttctcttctatcctttactcgtctcaatttccctcaagggttcttcaactggatctacatatctgaaagctgtgatggccttttctgcatccattccccaaaatcacattccgtatatgtagtgaatccggctacacggtggctccgcctacttcctccggcagggtttcagattttgatccacaagtttaaccccactgaacgtgagtggaatgtagtgatgaaatcaatctttcatctagcattcgtgaaggccaccgattacaaattagtgtggttgtacaattgtgataagtacattgttgatgcgtcgagtccaaacgtgggagtcacaaagtgcgagatttttgactttaggaaaaatgcttggaggtacttggcttgcactccaagtcatcagatattctattaccaaaagccagcatctgcaaacgggtcggtttattggtttacagaccatataatgaaagaatcgaagtagtggcttttgatatcag

SEQ ID NO: 6351 - DNA, 1324 bp, Arabidopsis thaliana
cgttcttcaaaagcgtgttccaatacggtctcggtaccttgaccctgctcaatatagtgtggacgctaggataagtgctttgtttaaaagccgaaccaagaagcctgcctacagcccccttgggtctttggatgagcttgaatttgagaattttaaatctcttcttcaagaagatacagaccagtaagttattaaacacactcttccttgctttacaaattactaatccaccatctgcactggccacaagctttctaatgcacactttttggatattgcaaccaaggacaagtgggtgacaactgaggtaatacatacttgaatctttccatacaatgttactaatgccttatgccaaaatttaagcatattgttacttctcaaacagcatatgcaacttatcatgggaatgttgttgagacgccgctgcaaatcatatgccctcaaacggattaccataattgacacttggtttactgctcttctgatgacacatcatgaagatttcatgcaatgtcaagacaagggaaactacgattggggtttatcaatgaaggcttatgtaactggcaaatcaatcggaaatcttatgaagtctgaatttctaaggaatgttgatgttgtctatgttcctatgaactgggggtcctgtcattgggttggcttggtaatcaatcttcagctccgtaatgtgctgattcttgacccttttagtgccccctttccggacgaacaagtttcggtgatgatcaaacctgttacagagttgcttccttcgctgcttaaaagatttgcaattccagctctcactgaaaatctcactactgaacccttcgattggtcccgagcatcttccatatatgacaacaatggcgatggcgactgtggcccagttagctgcaagtttctggagatgcatgctcatggtttaggtgttgctgacatggctcggcttactgatgatgttgtatcgaggtttaggaaagtctatgcgatggacacatatgccacctttgttgattcccctaatcaagccgcctagtgctttggatgttaatattgttttttggattataaacttctacttttcttcactcaccctctcttcaaacgattatgcgtaccttttgtattaatttctgaactttttataagtttcctgccttgtaactcctggtaactttcttccaaactctctgttctaaatatctaactttcattaccttctctgccttgtcactctttgtttttaaactctctgatatattatccaacaaagttcaaactgtacattcgattctgtacagatatgtctgtacaatgg

SEQ ID NO: 6352 - DNA, 1081 bp, Arabidopsis thaliana
gttacaacatgcaatacaatcgtatctaatcttgcctcttttatttttatcaaaaatcctttaaagtttcctaaatgttatcattgcttgtttccatttacaattatgttcgattcttagtattagtatatataaccattgaaattgaaatggaactgcacgactatcttccacatatcaattcatttcttttgttccaaaaaatcaaaacgtttttttttcttttttttgaaagaatgtaaaattatattcaaacaaaaaacgtttatacaatgaatgctacgttttgttttctctataaaatatatatatttaaactaaaaaaaactctatgatgatagttaaaggtggagctcaacaaactcaaaatctatgattgttaaaacgtggagctcaacaaacctgtgcaataactctagtccggagaatttggaccttctcggagtcaacggaggactcgccggtttctccatcactgaccctcttagacgctttgcaatgcgatttatagaaactcgaagtggcaaatgtatcaacggataacgtcaagatcgcagcaatcatcgcaataaatccggtgaacggaaattcccatgcttcagatgtcaaacatggagagttaagcatctcgtaagcctcaggcaagacatgcataaatccggtagccaagataactccggctgcgaaagctttcgtgacgaagaagaaacatgtttctggacgcaaagaagggaagactttgcctaacaaagggaaaagaactccgattatgccggctattagaactgtaggaattgcggcgatcttgtatttccgagctccggctttgttttcatggtcgtcttcgtgtgagcattcacattttggtccaccatgtgaatgcgttcggcggcgttgacgacggcgatgagaaggagggagacggagaagaagaagaataagagtttcacgttcttagtcttcataatctctatcttattttaaaattagggcttttatgaaccggataggttggattcttgatgatgaaaagaagagaaaagcttggtatggtaatggaagtactgaatgtatatatacg

SEQ ID NO: 6353 - DNA, 456 bp, Arabidopsis thaliana columbia
aagaaactggaactggtctccatttaaaggttagtttttcttctaatttgcaccatcaaccacgagtgccatgagtttccggttttatttatttatgatgtcgttttaattctctgacggacaccgtggtgcttactcggaatatgtgttgtgatacagtcaaaagaagagcttaccagtagggcatatggttactatgatgaaattgctttgccaaggctggtatgtctttagttagattacggatattaatttctgaaaatatatataaccatacatatcaagtaatcattgtaatggtttattaggtagcagatttcgggtcactggagctttctccagttgatggtcgcactttgaatgatttcatgcatataagaggactccaaatgcgttctctaggacatgtggtaagaatgcttgaccttgttaatagcgcctttccctgttttcaag

SEQ ID NO: 6354 - DNA, 802 bp, Arabidopsis thaliana
ctagtaacggaagtcatttttagattatatattttccaggtttgtgttgatgataatgtcgtcgagaaattttgattagagttgtacaaaactatgttccttccaaatttctaataataacttaacgaggcatacatatatcttacacgtactagacaatttggagaaaaataaatgcttttggaggaacattcaactccttttgcatcatggactaattcacatgagttggagaaaaataagtaactagagaaagtgtagagcacgatccacatgagttgtctccaatctgcgcctttaattctagtctccgagattctctggttagagttttgcgaggtaatcttcaggttttgtatcgtcgtagcttcaatgctccaaacattcccaacatggcggtggaagattcaacggcaccaaaatttaaggaacaagacctccagttgtggcagttgatgattgcaggttcagttgctggttcctttaagaacatgacgatgtttcctgttcgcaccttggatcaacgtatgctgcatcgttcgtattcgcaaagacatgtcggaatccggcaggctctgcgttcggtaatccaaacggaaggaccatcggctctgtaccgtgggatatggtatatgaggcatggagccatgggacccgctcaattcgtacatttctccttctacgatgtatccaagaatttcttgtctaccgggaatccaaacaaccccgtggtgcacgtgatttcctgggcttcacggctgtatggagttatgccgtttcaactcctgttgatatggcgaag

SEQ ID NO: 6355 - DNA, 1341 bp, Arabidopsis thaliana
ctaatttataatcattggccttcacgaatgctagatgaaagactgacttcatgtctaaccaatctctataagtggccttttgcatcaaaatctgaaacctagctggaggaagttgtcgtaaccaccgtgtagccggatttactacatacatggcttgcgatctcggtgaatggacgcagaaaaggccatcgcagcatccagaaacgtagatatagttggcgaaactttgagggaaattgagaagaataaaggatagaagagaacccgattccaagcagaataacctaaaaccaatgtctgcgtctggacgaggtcgaggcaatagttttaggggatctttttcagtgatcaccataaccctaggatgatgtgcatggaatcgctcggcgatctttaagtgtctctcttcgaaggattgagactcgatcgtcgatctccattgtttcgagagagttttgagtcgaaatagtgctttcactggaaatcgtaagaagatttcctctacgacgtcatttggcagagatgatggagcaatcactggcttctcgtttcttcttcttctttctttttttttcttttttttttttgaaagaatgtaaaattatattcaaacaaaaaacgtttatacaataaatgctacttcatgctgaaatttagaagagaagtagaaacagagtttgacatagaaaaacagaacactcgggctaagaggacgagcgtgtggagaaccaaagctgcaggccatccttgtaacgatggttgctagtggctgtgattgtgctgagacggttccgtacggttccatcgattagcttgatttgtcgaattgttgtggtaggtatctcgccgtgtcgtctagcattcctctcgcgccatatatggtaaagagtagcttgaaagacataacgaagcagaaagaggtggagccggggagtgcttgtgttgtgaagcattgcggtgagctggtgccaatttgatgagtagtttgtttgaagaaggcgatgtgccaagttctcccagatcgttgaggagtatgggcaggagaagaacaaatgatctctcgtctcctccgtgttcgtacataagacacagtgtacatgctgccccgtattccacttcttgattcgatcccctgttgctaatttattatgaattggaagccacgttaagaatgagtatttgggcgtagagtaagagaaccatacacctttcgaccaaaccactgttggatgtgtgcctctaatattattccaagtgaactttgttgagaaagttgtcttaaacttatctcccacaaatctccacatcgagatgtccttctcatttattctgatccgttgg

SEQ ID NO: 6356 - DNA, 508 bp, Arabidopsis thaliana
catttattcatttttaaaagttggatatgctacaaacctgcggctttcattgtaccctaggtctcaccatggccctcaacggcttcttcatcacaaccgcaaacaccaacttcccggcaaaatccatctcgctctgcggtggataggctaaccactcgaactcttgaaccatcctcgctatcatcaaatgcacatgtaccgtcgccattcccatccccggacagatcctacggccaacaccaaaaggcatcatcttcactccagcaactcctgttatatcggcgtcttcccgccctgataagaaccggtcagggtcgaacttttttggctctgaccagatcttcgggtcttcactaattccgggaagataaaactcaatgttgaccccgacagggatgttatagccagagagagtcgttggttccgttacacagtgacttaatgtaaagtaagtcggtggatgtcgccggagaatctctttgactacagcttgtaacaagaccatttt

SEQ ID NO: 6357 - DNA, 516 bp, Arabidopsis thaliana columbia
gaaacaagaagcatgttgataacgaacgaacgaacaagagaatgcgtttcgaaaacaataattgtgtcaggattttaccttggcatgatgtggatgttgcatcataccaagaagatcatggtaaactagcacctgcatttccaagaaaacaattaacaggtatgagaaatgcaaatttgtctcttggctacacacaaaaccggaaagaacgaaacttttcaaatagaacctgtccactgcagaaaggtccagccccaatgccaatggttggtatcttgagggcagaagttgcagcagcagctacaggaggtggaacgcattccaaaacaacctgaaaaacatccagcttcttgtaaagccattgcagtctcaacaactttaacagcactagctatgtttctgccttggggtctgaaaccaccaagaacgctaatcgcctgaggggttagaccacatgaccaataaccgcaattcctgcttcaactatagcttttgcagcagtgatcctagaagctg

SEQ ID NO: 6358 - DNA, 504 bp, Arabidopsis thaliana
aagcctgctttggataaggaagggaagcttcagattctaacctctcacacactcaagccagtaagtccatatctgtaatctgtgttattaccataacataaaccattggaccatatctgatgggagattgtaattattgtttgtaggtgccaattgctattggaggtcctggtttggctcaaggagtgagattccgtaaagatctggaaacaccggggcttgcaaatgtagctgcaacagtgatgaacctccatggatttgtggctccctctgactatgagcccaccctgattgaagtagtggagtagaagaattgagagccttatcagtttttgaagagagggctgaaactctctagttatcttttgttgcttttctaataataagagtttacacacagactacttgtatttttgattttggctttaggccaaaaacattgaaattccatcttgaatgatatgcaagcttttttctttcatttgggtaaaagtgatgatagag

SEQ ID NO: 6359 - DNA, 744 bp, Arabidopsis thaliana
gctaaagagccatgggatgtagacctcgcaaccagatttatcaaagtctgacaatctccttcaaagatgacatgagtataacctcggatccatgtttgttgtagtgctgccaagagcgcctttgtttcagcctctaaaggtgtgcttgtgtgttctaaagtcatcgaaccccaatgttttggtgtcccgttatggtctcgaattagccatccaccccttgccgttagattctgcacatcaaaactagcatcaaaattgcacttgaaatacggtattggtggtgttgtccatgaattcttcggtgtggcgttcgatcggttcagtggtcgtcgtggaccttgaatttgtgtagcattaagccaatcctttgtttcagcctgtgctcttaaaaccgttattgaaggactctctcggaagttattgaataccacgttatttcttgctttccatattcgccacatcaagcagaatggactaagtttctgagaatcgtgtatcgtggcggtctggaggaataggaaaatattggagatgttatcttcaatgttgttggatatcggaaagttcctatagagcgttggatccaatagtcgcctagccatatctgcaaatggacatgtgaatagagcatgattgatggattcgttttcctttcggcaacgtggacagccaggatctatccgcattccccttgtagttaatcgttctgtagtggtaatgcccgagaaagaattctccacagaa

SEQ ID NO: 6360 - DNA, 827 bp, Arabidopsis thaliana
gttaatgaccttgatccccttctcatcaaaggccagacatttctccaactgggcagagaccatacgaaagtttatgttggctgcatatctcttactgccattccccttgaggaggactcctaagtctgatgttatcttttatcactttccaacccatttctatttttagaattttagtttgtgttgtttgtttttgaacaacaaagttatgtttagttagatcacttagggatgtttttactcatgaataatattgtaagatactcatagacatgatctacaaagaacaagaataaagaaaaggtggagtaatgggtatcagtctcgatatgatgtctaaatacaaggaaaaaacaaattaaccaatcaaataagaacgacgtcgtcttggatcagtgacattgatcttccaatgataatcagtggaacctctaagccttgctttcctcctctcccagttgatctccgttctcctctttttcgtcagcctgcaaaacttttgcaatgcatcgtccatggagtcgtgcactttccaccacctaacgtgagccgcatcactagcgtacaccaactgctcgtccacgtcgtagttgcaatcgtagtccctatagcaaagccatggtttccaacctaagtagtggaccgcgtagacctgaggcggctccgcggcgaagaggttgttcttgatgtttctttctttggttgtgttcgacagaagtcttcagaaagtttactcgtcgaggcaatcggtgccacacacaaatatctcgtttaggtactgaaaatatatattttctttttttgttaatataattgttaagtataaa

SEQ ID NO: 6361 - DNA, 413 bp, Arabidopsis thaliana
acttgatgctttttttatttttctcctttggaccaattaaggtaaatcattcaatttgtaatcttgttgagataaataatagtcccatgtataagtacctcggatctgagcttatcgttgtccatgacgatggagtcgtagttagagagaagttggtcgtaagtggacttgagaagatcgtagtctctctcaagctgttttgttttccaacgagcgcggcgattcttgaaccagacagccacttgccttgggtgtagaccaagcttcttggcaagctgagtcttgcgttcaagctctagcttggtctctgtctcgaagctttcctccagcagatgcaccttttaccataatataatgagaatctatcaaacttgtttttgaatagtggatcgttaattattattgtggatagt

SEQ ID NO: 6362 - DNA, 539 bp, Arabidopsis thaliana columbia
  unsure (1)..(539): unsure at all n locations
agacttgccgaccaacacctgcggtttcaagaatctacagcgtcggatccgacgatggacctgcgtttgtggtttcttccggaaggagttttccagtgaaccaagtggatttcgggtggggctcaccggttttcggatcttaccatttcccatggggaggcagcgcggnatacgttatgccgatgcccagttcagtggacgacagagattggatggtttacttgcaccttacgaaaggacagttgaggttcattgaggaagaggcttctcatgtgcttaaacctattgacaatgattatctcaagatttgaaaaaaaaaacctaatctcttagttttcaattatgggtatataattcgtgtgtttaatttctccggctggtttttttttccttgttttccattttatgtgatattatgtttgcctcttgggacttcgtatttgaattcttgtattcgttacaagattatgcaaccgtacaatgtactatatatctgtcaatatttgaatcaaatttatctctctgatgtgtttgttgga

SEQ ID NO: 6363 - DNA, 917 bp, Arabidopsis thaliana
tgaagatatattcattagacaaagtagttatagtgtcaactcctatggatttttcaagattcaaaagtcattattgtgatataatatacttttattttaataacaagccaaaaatttgtgaaagtaaacgtagcaattattataattttactactctaaaaatttcatgtcgcattcatcaattacattagtaaagtgagcatttcccaaagtagtatatatagcaaggcatgaactttcttcatatgtcatataactcaataaaacattaatatacaaatggttaacattttgattctatcacttctcttccttgtcatcttgcttcttctcaccgccttcaaacgagcaaagcggcggcaacatcgaccaataccatctcctcctggttttccgatcataggaaacttacatcagctcggagaattaccacatcagtctctatggaagctctcaaagaagtatggtcctgtgatgcttttgaatcttggaaaggtcccaacagtcatactttcttcgtccgagacagcgaaacaagctctaagagactatgatctccattgttgtagccgtccttccttagcaggtactataaatcattccacatactaaaatcttgaattgttacttcattaattcatctctcactcctcagggggaagagagctctcttacaacaaccgagacatatctttctctccttacaatgattattggaaagagctaaggaagctctgtactcaagagctcttcagtgctaaaaatattcactcaacacaacacatcaaggacgaggaggtcaagaaacttatcgtttcaatcgcggaatcagcttctttaaagactccgataaacttgaacaagaagtgtcttgctttaactgtaagtatagtatgtaggatagcatttggtgtgag

SEQ ID NO: 6364 - DNA, 575 bp, Arabidopsis thaliana columbia
gtgataccaccatacggacgttgagatatctccttttacaatagtgtaccaaacattccctatattgcgataacaatcatataaatacttattatgttctatgcttggtgtaaccaggtcccatctaccttccttggaattgtaagcatccacacctttgtagctcaccaggtgcaattttccgtcaaaccttacgattttgtagtgaaagtcgtgttttgtctcgctgcaagggacagacaaaggatcccaagtttgtgtatttgtgtcaaacacttggaacgtcatggagtcgccatctttgcatcttcctgatacatatatcttttcatcaagaacgcaagcagtacatgacattagcttcacccgcaacctagggccctcgtgccacgtgttagacgtgcaatacagaatctagacgctagaggaaggcaattcatatccgccaatgttgtagatactagaacaaaccgacacaatgctcgaagaagatgactcaagaggagtatgtggaaatgggactgtagcaaaacatcccacttgactttagggttcagtatgtttacggaaagagt

SEQ ID NO: 6365 - DNA, 518 bp, Arabidopsis thaliana columbia
catcacattgtccctttctcaaaggtttctcaagaggacgcgcctcatgcctcccatgcaggcgcgtaccctcagcgtatacaacgtcatggtaccactagtatgtctcctccttttcttctccacacccactcatggtctttcagattctgaggctatcctcaagttcaaggaatctttagttgttgggcaggaaaacgcgttggcctcatggaatgctaaaagtcctccttgcacttggtctggtgtcttgtgcaatggcggctccgtctggagactgcagatggagaacttggagctttctggttctatagacatcgaggcattgtcgggtttgacatccttgaggactctaagcttcatgaacaacaagtttgaagggccattccctgacttcaagaaactcgctgctctcaagtcactctacctgtcaaacaatcaattcggaggagatataccaggggatgcttttgaaggtatggggtggttgaagaaggtccatttggcacaaaacaagt

SEQ ID NO: 6366 - DNA, 774 bp, Arabidopsis thaliana columbia
aagcgttcaagaagacattcatcatattgttcaacaattagtcttgctctttcaacaacatatgttccatcagatttttggtgtgtagctctcatcacagcaacgaaggaagagtcttcgttattcgcttcctaaaaacaaaacaaaaaagaaagtaaataagtcttatgaaaggttttaaataaacataattgttaccaaaatgaaaaataaaatatattaccaagacatcttgaactttagcatacgaacgttaacccgctctgtgacaatgttggtctaaaccatcacgactaaatagtcgtgaagaacgagctttttcacttttttcttttgcttttggagtcttccaataagctaccattactctcaaatattcagccagaatccagtcaggttgttttcatttggactttgcaagactaaccattcctttgatgcgaacagcagaaagggcatcaaagttggctttaactagatgctcaatcgaggcatcccactcaaaccttgtctaaaatatatctatatcagacatgtattaaataaaaaattatttctgaaaaatagtttatatatgactaacacacaacttaaacgttgtaaaccatgcatctctataaaattgcggcacttttctccagctataccaaggtccctaaaaacacccttcaatgatttttctaacacgcgttgatacttcggtgttgtttttgacctgatgcatatgaatttaaattatatttacagttacttttgttacattaaataatgaat

SEQ ID NO: 6367 - DNA, 965 bp, Arabidopsis thaliana
gaatccgtttgtgtcaagctttcaagaagacattcatcatattgttgagcaattagtgttgctctttcatcaacatatgttccatcagatttttggtgtattgctctcattacagcaatgaaggaagagtcttcattatttgcttcctgagaacaaaacaataaaaaggtaaataactcttatcaaacgttttgaaagaaaacataactgttaccaaaattaaaaattaataattaccaagccatcttgaactttagcatacaaacatgaaccagttctgtgataatgtggacttaaatcatcacgactaaatagtcgtgaataacgagcattttcacttttttctttggctttaagtgtcttccagtaagctaccattactttccaacattcagccagaatccagtcaagttgtttttctttgaactttgcaagactaaccattcctttgaggagagcagctacaagggcatcaaagttggctttaactagattctcaatcgaggcatcccactcaaaccttgtctaaaatatatctatgtaagacatgtattaaacaaaaaattatttttgaaaaatagtttatatataactaacacacaccttaaacgttctaaaccatgcatctttataaaattacgacacttttctccagcaataccaaggtttcttaaaacaccgttcaatgatatttctaactcgcgttgatacttcggtgttgtttttaaacctgatacatatgtatttaaattatatttataatttaaacaatcacattaaacaatgaatgaaacaaaaaaggaagaacaataccatttaactccatttcttcgagaggggtgaagcctctctgaatatcatactataaaggtgcaattttgtaacgttcctgaaccaaaaaatcggttagggtttgtgtttaaatctcccggttaaataagtttggttaatggatccatagagtg

SEQ ID NO: 6368 - DNA, 451 bp, Arabidopsis thaliana columbia
tgaagcattttaacacctctctccaaaacctgaactctccatctcagaaacttgttaagcttctcttcatcaccaaacactctctcatacatctctttctctttaaacacaccataagcattgtaacaaactgggtgtccttctttgtcgtagcctctcatgtaagcaactttaccttccaaatctttaaaacccagatcttcttctgtcaatttctctgctttgaactcttctctccactccaaacacttctcaagcattctcaaagagtctgctactttgaaatctcttgctctgaggaacttgaggaggattacgtcagctttgtcgtctccaccgaggagtgagacccccacattgaagaagctttggaggatgaagctgagagcttttctttgagttcttgaagtgatttttgctccgtgggtttgagttctgagacgaagtatgt

SEQ ID NO: 6369 - DNA, 280 bp, Arabidopsis thaliana columbia
gatcaccaccaagcgaaccaagtgcgtgattggcaacaacccaagcatagataccttcatcagttcctgaataaaattttccccccagtaattagcacttccaattgccaatggatatgtgcacatttactatcactcaactaagctaaaagacaacaaaatgaaacaaaaatcttatgtttacaagtgcaccaaagaaagggaaacttccacacaagcttcacaggaggtaccttcgtgagcgtaaccccacgggatctcgtcggattcaaaaaagtgg

SEQ ID NO: 6370 - DNA, 703 bp, Arabidopsis thaliana
gcttatggttgttttgttttgtttctaccattttcttattttcttccgcttccacatccttgcgccaggcatcatttgagtgcttcttcatctccaatcgcatcctcttggttttcatcttcgtcattctgacttgacattggcgaccatggggttggaaatgatgtctatggtctgtgcaagcaatgagaaatttacggtgatcaaagatgcaaccattagctcgtgcacaaggctgcaaaatacagaacaccagaaagaagttgtcagagcaagatacaggaatagttacagctgcaagttaattactctatatctcaagtgaggaagggaaaccggaaagggagtagtaatagaccaaatgataggttcttggacatcgatcaacccgacagccagtggttgccccaggtctatcacagcgagtgcattttaatgacctccctctgaaaagtgctgcccttatattctttaagcatcctacaccagcaaaaaaaacctgcagcacaagagtattgaacattaacgtttacagaaaacagggttcagtagaaaagaaattaatgaaaaaacagtaagggtatagttacaatagataaataaatatacagaacgattgtatgtatagatccaggactaccgaaatttcgcccctccaggtcatggtcccgcctttttgtcttccctctcctaccgccccgtc

SEQ ID NO: 6371 - DNA, 1295 bp, Arabidopsis thaliana
aaccttcaggaccacaactcacaggcaatgcagttaaataagagaaggactctgatcacgatcactcttaaccatctacataaatatccacaagcatttacttaatggatctaagcacattacatgacgaggtagagaaacagagacaaacttcaataccaagcaatacaacaaataaaattctttgattacgcaaattgcaaaacccccaactggtaattcctaaaaccccaatctagaaacgagtaaaggaatcaaatcggaaatttgagaatacctaaatcccttatctagaagttgagtaaaggatgaatatttagaatgaaaccaatacaaaatcaaagaatacctaaaactcaaattgagaaacagagtaaaaggaccaatctttagaatcaaaattgaagatttggaagtacctattgttaagcaagttcttgacggcgactttggttccatcagttaaaatgccacgatacacaatcccgtaaccaccttctccgattacattctcttcacaaagcccattcgtggccgcttcaagctctctcagagtataccatcggccccatccaagatgcgacacctccggcccacaattcccgctaccggaatacgacgccgtttcacttgcactcgctgttcctctactctcaccactcgacactcgatctgaaaacaccactcgatgctcgatcttcccgatatcgacctggatctccgccggaacagactgattctgcgccggaacgatctctttaatctcctttgaaatcggcggtgtagcgatggcggcggaggcgaaatcggctctcggctttcgatttttccggcgagaagttaagcagagggagagaagaaagagtgcgatgacaattagagatccaagtaagattccgatcacgacccatagccggagaccaaaaatcgatgtcggtttcgaaagctctgtattaaggaaagcagcgtcgtacaccgacatcgtactttaacttttagcttagattccgttacagattcttccggtttcttcgcattcttcgccggaaacacacaaaactttccggccaaaatctgggctttgtcacagcatcgagtgttgaatcgaggaagaacaaaacaaataaaaagattaaattgataaaataaaaaaaacgataacgaatttaaagagaaaggctttggagtgatctgtgttgatgtaattgaatgagctgtctttttgagttcctgtctgagtgtaattgcatgtgtggtgacggtgagagaaggttacccgaaatgtctattttacc

SEQ ID NO: 6372 - DNA, 430 bp, Arabidopsis thaliana
attcaaaaatgcgagctaactccagaaggggttgacactatgctcactcatgataagaaagcaattcaaatgcaggtttgcttactcaactctctgttatttcctttttagtcttttgatatttttgttgtgtaatgtgaattctcgttgtaggtaacacaagatcaagaactcctaacagagaaagtacgacacctgagtggagttgcaggagttgagcgcatggaaagtgcgttgttggaaacacgaacaaagtactttcaggcgaaggaggatggaagccctatggctaatcagctcgcacatttcttttctccaagcccagcttcatctccagttcagtctgtgtctagttccagcagcagaagtaaagatagcataggttgttgaaggatcaaatcgtgttaatcggtcgttattgaaggatgat

SEQ ID NO: 6373 - DNA, 654 bp, Arabidopsis thaliana
caaaggaaagtgttgatgtcagcagtctcgtggtgtcctgtgagacgacgctcattgccttcaccgtaagcagcaatgtgttctttgtgtctcagtcccaatttatcgattgctttcttgatgatctcgtaaccgccttcttccctcattgacttggtactgaaacaattaccattttggttttatgaatcagcgaaaagaccataaaagaaaacatttaagagattcttgacatgtacctgtagttgcagtgagcaccagcaccgttccagtcaccgggaatcggtttcgggtcaaaagataccactacaccagcaatctctgtgatcctctgttttaagaacaagctaagtgttactaatcaaaaactacataaacaaacattgaagttataacgttaaacttacctccaaaatgtaacgagcgacccaaatttcatcagcagccgagataccaacagctggaccgacctggaactcccactgacccggcatgacttctccattgatgccactaatgttgatcccagcgtataagcaggccttgtagtgagaatcaacaacatctctgccaaaagatttgtctgctccaataccgcaatagtacggtccctgcaatacattttcgcctaaaattttagaataaccgacaacg

SEQ ID NO: 6374 - DNA, 977 bp, Arabidopsis thaliana
tggatgtcattagtggttggagccacgcgcatttgtttcgactgagtggagaagtctttggacccaagggtcgttcacctcattctctgcgtactcggtttctgttaactcgtagcttatggtagccacggtgtctagaaccggacggattcttggtgttacggttgctactagctgttccatgcctgagttgagtaactgcttgaacgtgctgcttaactcgcctagctcggatagacatgattttatcctctctcgatctgctggtgcaggaaatacctgtgattaggacacgagataaagaaagtgagaccgattgtctaaaattcaagagtgcaaaacgaccattcacagaattggtgcccctgctcaaatgccaatttaaatggattttatgagacgaacagagcctgcattagctctagcaaacaatacagctgttctaaaatcgctatctaagttaacaccttaacacagagtaagtgaagagatatatccatatagagtcaggcaagagtaagcaagagaattctagtctaatagatcccagattgttgttccttaagtatcctagataagtaaatcacgaagtatcagaagtatgagaactaacctcagtacattgctcctcgatttcatgttttagtttgagaatgtactcgcagctcacgtccatattgttcaaagcagttgcaatctcagttccggtgttttccacacctataccacccaagaacaacctagcaccaaggttaggctctctaatcttctgttgtagagcttcatggtaatcattgcccaacaagctaccagcatagctcaacacagcaatcacagaacttatgtttgaagttgaaatcgctctcctcagacaactctgcaacacgtagaacacatcgtccaccattgaagtggtaaggctgtcaggtacatgctcatcgatcctaatagctttcctcacattctcaaccataaag

SEQ ID NO: 6375 - DNA, 494 bp, Arabidopsis thaliana columbia
cctccgagctagaagagctaccacgcgctggtctatctctctttgttgcaaattaagtctgcaattggttcgctgctcaatcaatctcgggaagaaggtcgaggagagtcacggcgaggggatcgatctctttgaggtgagcgaccactatggccctcacggcgaggactagatctgaaagcgccggtagacctggccccatcgatactgccatcatcaactagcagagtcctgctatattccttttcgtaaatagaagacataaggaatgatttgtttgcctcgcaagcctcgaccatcagtttggctagcgtcttgcgccgggaagcaatagcccgggctgattttccttgaggtaggggaggaggcggcagaagatgatgaagttgctcaagaggactcattttaagctttcgattggcttctatgaaccggttaggggtaaacgagttccatagagttcaccttcgagaacactttgcagactcgatgaa

SEQ ID NO: 6376 - DNA, 544 bp, Arabidopsis thaliana
tgttagtacttaattgcatttctctttcctcaggcttgcaagctcttagacgcaaattggaacccaaagttccttttgttggtggctcaaaagaatcatcataccaagttcttccagccaacgtctcctgaaaatgttcctccaggtgattgacaaatctatattataaccttttttgacacatagctgatctctatctcatgggggttttggttattttgcagggacaatcattgacaacaaaatatgtcacccaaagaacaatgatttctacctctgtgctcacgctggaatgattgtaagtttcatctatcaactcaaaactttatttgttaatgtttgctcctctgaatcgttttaatactctttatgttctgaattagggaactacccgcccaactcactaccacgtcctgtatgatgagattggtttttcagctgacgaacttcaggaacttgtccactcgctctcctatgtgtatgtagtctcttattcaaccttcattacattttttgtgcaacttcgattgtgatgatacagaaa

SEQ ID NO: 6377 - DNA, 465 bp, Arabidopsis thaliana
ataatgtattgattaacttaggactctctgatggatgtcatggactgtaaatttaaatagctggaaaataaaaataagaaaaatttcaaattggcatgttaattagaaagagaatccaaaaaaactactacaagtaaatttaccttcgattgagtcataattttttatatttcctcttcacaatatggaaatccattgcaggatattatatcaagatttcacgagaggagcaccactgaaggcagccggaaatggtcagagtttccaagtaaagttgctgttcaaatgaatgacacacacccaactcttgcaatacctgagctcatgcgattgctaatggatgacaatggacttggatgggatgaggcttgggatgtgacatcaaagtaaaatatttatgcatgaacctttcaatatttcccaacaaagttttcacacttttctgttgggacttatttatatggt

SEQ ID NO: 6378 - DNA, 542 bp, Arabidopsis thaliana columbia
ccataaaagcccatgccctcttgtatagggaccctcggaatcgtcaagtatccttcgtaatgtacgtctgtctttgtactcagtttggtctccaatggcaaatcgaaaacctccttggaggactcgaacaaggccttccgtagctccatggaagctccatcgaataaggcctcaaaacatccgtactcttctaaggcttttcggacttgggatctcaccaagtcccactcgggggtttccggtttgagatctggattggagaagtcgatgatcgggagcgaaagggggacttgggattccgaacttatcgccatatctttagatggcgttgtgtaaagatttgaagattaggaggagaaacctaagaggagaaagaccaagtgttcacatatatagtccaagtgttcaccacgtgttcacatagatttcggcccaaaagaccaaacatgacaaccccagtcaaagatcacatttcaacattgatcatatgattacataccatttaaacatagatcataagattacataccaaatcaactata

SEQ ID NO: 6379 - DNA, 1186 bp, Arabidopsis thaliana
agcttggcgagtgatcaggaggcaaaggggggaggaacgtggtgaagctgcttgggaaaagagagagccagtagctgttaacaagaacccggtccagtttctttgctaggggggaagctggctgattattactccatgtgaagaggggaccttggaacttcaaatcgaacatttccaattgatccagtgtatctttgaaatcagtcattggaggagttagcgagttcacagtaggagaatagtgctcttcatagtggataatctgattgaaatcacctccaatgagccaaggggaggaatccagagcaagagtctgttgaagctgcaataactccacccacatgtcagttttttcttctctaacattagatgcatacacagcagtgaacacaaactgagccttgtttgcaatgttgacctcacaggtgatagtttgcctagactgattcaaaactctaacagaagtaggatccttccaaataatgacaatgcgtccatcatcatccgacaggtgattagaagtaaatttccatccagggcagactttagccattatctggttaaagttaagatctttaatgtgtgtttccaaaattgctccaaaaagaggttgatgtcttctaagccaattacaaaagggctgatgcttacccgagtcatttaaacctcagatattccaaaagaagtggtttgtacacattaatgaagaacaggggactcttccatactaggaagaggacaaaccacttgatgatcactatctatgacagatggtgacaaaaaactcgagcctgcaacaaaaggaaggacaggtgggagaggcaaaaaggctccaaagggatttggtgaaaagctagaggttattaaagaaggatgggaacgagatctttttagggattggggaggggtataaggatacggcaggccagcgggggtaatagacgcaggaaagccaactatcataggcaaatcaacagtattttttagcacagggttagggagggttctttgtggtttagtagataggggggggaggggaggcagaggtggtagaaacagggatgaggggaatgatgggggttaaagctggggtaacagagggatgggaggataaacaagcgaaggtgttagaggtaggggttaatgctgaggtagcaggtgacagaataggggttttcaaggaagg

SEQ ID NO: 6380 - DNA, 457 bp, Arabidopsis thaliana
cgcaaatagttgacatctatacacggccatcacatctcttccaaaacttttcaacggattttttcttaaaaaaacagagctcactcaaattacataaaaattgtagaagcagagattatcaagaacatgatctcataagctcttctaagtattcagcacctaaatcctcaagaaccacaagtgttgtattactttcttgcgtcataacaacactctgttttctacttcttgacgacaaagaagaagaagacgaagaagatgaataggaggaggaggaagaaggagaagatgtcaacgtcgaagaagaagaagatttcttctttcctctaggacggtttctcatggagtgttttctcttcaaggctatcaccggagactctccatcattgagattcacattctccatcttccggagagattcttcaacgacatccgcggggaaattgagtactgcgag

SEQ ID NO: 6381 - DNA, 563 bp, Arabidopsis thaliana columbia
tattagaagaagtattggagtttggtaaattgtatgaagaacccaatttgcatgcacatgcatgcgccatacgtttcttcaaaatcttgttaatttgttgggtattattagtgaacacgtaaagttttgatgttaattataatatcaacgatctaatagataaaaaaagtgataaatgaaggaatggagtgcatatgaggaaaaattcttaccaagatggagtgtatgggacgaattgtccaatcccaccaggcaagaattacacttatgactttcaagtcaaagatcaggtcggtagttacttctacgttccttccctcgccgtccaaaaagcggccggtggttatggcagcctccgtatatacagcctccctcgcatccccgtccctttccctgaacccgcagaagatttcacttcctcgtaaacgattggtatcgacgtaaccatacggtacatttcttaattatttactagtcatgtttaattagtatttttcattgacgtatatatgatgaccatataattgattccacaccagactttgaagaaaattttggatgga

SEQ ID NO: 6382 - DNA, 685 bp, Arabidopsis thaliana
tcgacctgttgtagtcttgtacgttgcaagggaatgagggtaataattggttgcaatgttgctgcgcaactgaggataatctattggttgagggaccggtgaataggtaatcgcattctgatgaccttgcacagtttgcctattgttctggttatgcagctgttgatggttcggagcagtttgtgctgagaccatttttggttccagtaagctttttatttccttctcggcaactggtaagcaattcaacagcttaccgtcatactcaatagctttatgccagttctcgtaagccagcttcaccaaaatgtctgcagaaatctgtgagcaaaccaattatcagcttatgaccaaaaaattcttttcaaatcaagacagaaatatgactgtctttacactttaccttttggtcatggttaagagactctagagataggaactgtccgtttgtaattaggcctcggaattcatatatatgattgaagacaacgcctgtagcgtgagtttggtctgtgtaaaacacataaagcttcccacccaacacgcacgtctttgcgtgctccaccgtgttctccacattctattcgacattccactcccaagcaactacattatcagggagaaaaaagaacatttaactaggatatctttggcaatattggtggtttgtcacattaccaataat

SEQ ID NO: 6383 - DNA, 472 bp, Arabidopsis thaliana columbia
attccctctattcactgctatcttctgtttttgttgaagattcattagtgttctctccagtccgagttgattgcttcctgtgcctttggttcgcagtggattttcgagtcttattcgtggtgatactcttcagtatttctatttggatgctgccctcaaggaatcctgaggtatcaaaagaaataagtatgtagaaaatgagatgggatttgtgatataaaaatacctttaaggtattagaggaatttcaatattcaccttcagattcgtcaaatatatttcagcgacgatttgttgatttggatcatcaggatcagaaccatcacgaggaggactcaagcccgagcttttgttttaattcccacttcagaggctgctagaagttaaagagcatttcaggttaatgatacataaaccattcaaactgcagttgttgaacctaagccagctaaacgattctgacagatgagaa

SEQ ID NO: 6384 - DNA, 586 bp, Arabidopsis thaliana columbia
tcgactccaccttcctctggctatccggcagtagcagcttaagagagcaggttgaacaacaacaacctctaagtgcgaagtcccaggaagaaacaggttctgtatccgcagactctgcgttgatacaaaggaaacttcagaggaataaacaggttgtgagggatagttttgaggagtgggaagaagcatacaaggtagaagctgaaagacgaacagttgatgaaatattcatgagggaagcgttagttgaagctaagaaggctgctgatacatgggaggtacctgtcggtgctgtgcttgttcatgatggaaagattattgcccgtggttataacctgtaagtttaatttactttgaccccttctcccgctggattcatctaaccatagttttgtgtttcagagtagaggagcttcgtgattcaactgcccatgcagaaatgatttgcattcgagagggttctaaagcacttcgttcatggaggctcgcggtaatcttctctctttctctctctaaaacacctcgtgttgggtcaaatatacatttttttgttacattgcaatagcaggaacaatatatgagtata

SEQ ID NO: 6385 - DNA, 424 bp, Arabidopsis thaliana
tctaagaatcttccaagtccacttgggaagaagtccgagaaagtaaaacttcctatagctgttgtagccgcggtaacaagttcttcaatcccctcctgatcgataatggagccgctctcgtggaaattccgccctaaggctactctaaaaattacgcttgcggtgagggagaagaaggtagatccacaggagattgcttcaaagctgattctgacaatttcttcaccataaattcgatctcttcccctcttatatacctataagattgaacctttttaaggctagaaagttcggtaaccgcgagttttcgcatttcccgccagtactcactgtatggcacgaaactgatgtctttaaaaccgtaagagagttttccggtccccatcgtctttggtcggctgcaacattccaaatcatgtgtttt

SEQ ID NO: 6386 - DNA, 546 bp, Arabidopsis thaliana columbia
ctcggagagttgctgcaatgagcgttgcttcccgagtggctcaagaggttggtgttaaacttggacatgaggttggatattccattagatttgaagactgtacttcagagaaaacagttatcaagtacatgactgatgggatgctgctacgagagctactcatagaaccgaaactcgatagctatagtgtcatcattattgatgaggcgcacgaaagaacactgtccactgatattttgtttgcgttagtgaaggatgtagccaaggttaggcctgatctgaggttaataatctccagtgcaacgcttgaagctaaaaagttctccgaatactttgattcggctcggatttacgtgattccaggaagaagatatccagttgaaaagctcttcagaaaatgtcctgaacctgactacttggagacagtgatacgcactgtggttcagatacatcagactgaggcgataggagacattttagttttcatcctggtcaagaagagatcgaaacagtagaacgaatttgaagcgaacgatgatggatttg

SEQ ID NO: 6387 - DNA, 293 bp, Arabidopsis thaliana columbia
gcttagtgatcactcaatattacatatcatttagaatcagttgtggcatagtcagcacctataggcacttaggaccatcctgcatacatattgcaagcattagtgcgaactcaggtgtagaaggtgcttataaggaagctactcgacactctactctagccaaccaggatggtatcaccgcgcaatctactcgacgagtgcactcgatccaggcaactgcacaggatgcagcattccactcgcccagtttactcgatgcaagcagctacagacgaagcaggacatcggtctac

SEQ ID NO: 6388 - DNA, 993 bp, Arabidopsis thaliana
tcatcagaggatcaggatcccctacagataccttgtcccagctgatctaacggtaggccagtttgtgtatgtgattcgtaagagaatccaacttagtgcagagaaagctatcttcatctttgttgataatgttcttcctcccaccggtactgtctcctcctctcaatctctacttaaacaactctttagtccttacataaacctgttggtttttatattggaaactcaattgcaggagcgatgatgtcaaccatttacgatgagaataaggaagaagacggcttcttgtatgttacctacagtggggaaaacacttttggatcgtcaatgacttaatttggtgttcttgcttttaattgaatgtaaatattccattttcttttcttgtccgtgaacttgcttagatgcggatatgattattatggcttatgtaggcacaaccaatcggtttgcaaacaaagtgttggtttttttatcctctgtttttttctttggtctatatctatctttctctttctgtgccttgctcgagcatcacacacatcatatgttgcaccttcacagaccacacgagctacaagagccaggtacaaagtgttagtttggttttggtttgagaaattagagttttgtcccggcaattccgggtcgagcccacggaggctgttgggctttatctagaccacaatgaagaacgattgtgggctaggccgacgtggcggtaaaagacaaatcacatggggaagcgccacgtgttaaagttagcggcaatggcggcttggggttgcggttagggcacgaccttcacgaacaacacaaaaacagagcggtgatggtccacgcacacttgtctgctgtttctcgaccccacacgttcttcactctgcattttccttccataatgtattctcccatgtcatgtcaactactaatttataactacactagtacgtctaatctattattttttcgcaatagttgacaacaagaaat

SEQ ID NO: 6389 - DNA, 299 bp, Arabidopsis thaliana columbia
  unsure (1)..(299): unsure at all n locations
tgctatagttatagtttccaatacacattccagactcttcatgggtcagcaatataccataagacagcacaacagggagcactacatttcatcatcaattgccatgctgatgcttataaccttcggatancatggatcctatgctgttangctttgaaggnctctttgnnggcagccaagnccaacgacnattgttctttgcgaacgaccgatggctcaaaagccaggggatagtagtgcgggtagtgcactgntagcatattcttactcgagtgacgatcttctccaacttgacattg

SEQ ID NO: 6390 - DNA, 1702 bp, Arabidopsis thaliana
gttgggattttggaatgcagacataactcttttgatgtgcagtcaccaatcaatgtggatttcactgttatgttactaaggtaaatggtatatacagttttcttttcgtctagtcatgtgaatggtacttgtgtcatatgttgtactagaatgatatttaggagaagttgactcatactagtgtttggcatgtgtgaattcgagagtgtacatacatttgcgtcacaataatggaaatagaaatcataatttgatgaacgagtttaccaggggaaccagtatcagagtcgagatttcacctttggattgactcgaaatcacattcagtcattcactgatgaaattgtactttttgtcaaatgtcatatgtacaactatatgaaatattaaattgtactgttttacacgttcaaaatcacacaaatcataagaaaatctttagaccatgcaaatcacacggaagcagtatttttgtgcataacaattatactggtcatgtttcttaatttacttcgactgtagttgtgtagttaacgactaaacgcattggttcaacaaattatgtaaaaaaaaacttaactctttactgttagctttttctcaataagacattttaaatgtaaaaaaatcgactaatttacatatgctagagacatagctagattttggtctgctttttcaggttacaactatttcttcgtcataaaacgtttttggtttcactgttatagataaataaatataaaattttggtgaaagtaattagtttctcactagtctagagcaatccaaaatattgccaataaatacccaaaaactctctcatcatattcactctgctgcaatcacacagcaccaaaaagagttatctgctatccacttaacgacaccgttctctgttatgggttgttgcctcagctccgccaccgccgacaagaaagatgatcctgtctccggcaagaacaccgcacggcctccatctgttatcgatgaagagacagtagtcaaagaagtcttgtccgaaaccacattgctcacttcctctaacgacaattcgacggtggagaagactacgttgacaaagattcaagaagaagaggagaagaaacccgggattgttgtcgacgttgctcaagaaccggttttgaccaagcccagtttggttgaaccggaaaaaggatcggaggtttcggagaattgtagtttaagcgagagtttgctttcgatcgtgaataagtacgacgaggaagaagtgaagcagatgaaatctcatgtagtgagacagagatctccggcgaaatctcggaaccgggtcatggttagttatccaaaccggagaaccgatatgtctccacgtaagagaaacaacgaagaagaagctggctcggtgaggctggttccgtcggctacgggtacgagagactcgactgaaagatccgagagaaggtctagatcgccggcgatgaacaggtccgtcatgatgggcccaactcggagtcaacagagtacagacagttgtggagcaatgaggagacaaagccagtctccgggtcgggtcagactcaatccgaatatgaacgggtcggatcaagagtgtaatcatcacaagtggccgggttctattggaaattacaattctgcccctaacgactcgtttgagaaccctcttgtttcattagagtgtttcatcttcctatgagat

SEQ ID NO: 6391 - DNA, 913 bp, Arabidopsis thaliana
gggtgttataattacgggccgttctaaaggagtgctggaggtgcaaaagtacaaggtccaacaattttttcttaaattttagagtaaaaaaattgtagaaatataatttttaagaaaaaagtttagaataaacggcaaaaattaggtttagaagaaaaaggtgaacacatacataatttacatgagttaaataatattagacttaattaaaactagatgtcatgtctataacaaagtctatctaagtcaaagaaaccattaatatcccaaagtaactgaaattgacgcccaaaccacgactaagagaaaaaatcaaaaccctcagatgaatctagagggtttcgtttttcaccaaaacaatctctattctattcttcttcaacactgcaaaacttgagataaaaatagagtctttcctcttgtttttctctttgttttgctgattgtatctcactaagctgaagaagcaaacaacaatagaaaagagatgcgagcaattcacatcgtgacgacgcgattgagctccagctttattaggcctgttcttcttgacttcgtttcttgttcgcctctacgccagttctctacccctaggcgctttatctgtgccgcgagcaaggtcaatggaggaggcaggtcaggttcgattgttgctccattggtagtgaatgaagaatttcagaacatcgatgtcaatcctcctaaaggaactcgtgatttcctcctgaggatatgcgactccgcaactggctcttcaaccacttcaaagaggtcagagaattacatgaactctatgttttgtttctgcaattcttcttttggttcgatgaaattttgaatactgtccgtaaagtctgacacttttatctgtatatattgctttgaaggctcacggttatttgggtatgaggaa

SEQ ID NO: 6392 - DNA, 1004 bp, Arabidopsis thaliana
agaagaggtcgtggagttgttgaaatctctccttcccatgagttcagaatcagcgtggtgaattatcatcggagctcggtgagctacagctctgagaagctcttgctcggagacacgaatctcgacgtccggtggaggcatctgttgccgtaaaattctctcgacggtggagtaatcaggtggctgaggacgtgagacgccgacggtgtcgcaccaagtatcgattgttgatttcatgtttaggttagggatgatgttggagaaatcgggtagagattcttcgtcgtcgttgagtttggggataaagttgaggtcgcgacagacttgaacacagacacgttcgaaggtttgaccggaagagacaacaacagggtcagacattactgattttgaaatcggacagagaaattcgaccggagtctgttgttcttgttgctgttgtcgtgaagatgaagaggttgaagaagacgatctgtggctgaaaggattccatctgagccgtccgttttacccatctgcgacaaatcaacggtcaggaattggtggtgagtttgatttctgaaaagggttttgggttttatggagaggaattagggatttgaattcatctttcgtgattttctgagaagaagaagaaagatgagaagagaggagagtcgtcttcttcctcctgaactgaaggactttgtggcctactgactttttttttttggcttttgtttattttcgaagtgactattaattttttttttaaaaacttgaacatattagtagtaatcgaaaatgttgactgtgaaattaatataggtggacccagatgtgaattggctttcatagttcatgcattctgaaaagttttattgctttctttttcaggtcaattttgttcatatacttttcttaaaaacatatcttttaacttacgtacttataaacttggaatgtaatttatcattttggaatgtaatctaatttgttttaaatggatgaaaaacaatccccgg

SEQ ID NO: 6393 - DNA, 483 bp, Arabidopsis thaliana
cctaccccggaccacggccatagcacaactcgttctgtccattgcaggtactgtgattgaaatcacaaggcagtccagtgtcaatgcaaaaggtaccaagagtatttggactcacatcaccacagtttgattgacagaaggcagagacaaatttacgcttcgaaccgtttcttactcgggttttaacatcaagggacttatccacagaatgtcctctagatgacttataagtagccgcaatatccaaaagtctactctctgaaacaaagtaaaacaaaaccataactttccacatcagtctctctgcaactgcaatgtagagaattgctacattaggtaactcaaggaaaggatatgactcacggtttctactgaaatcagaaacaatggttgatactctccgagggatgtttctagagctaacagaattcttctgtccattctcaaaccaatcctccataaaccgagctgcagcgctttgtt

SEQ ID NO: 6394 - DNA, 473 bp, Arabidopsis thaliana columbia
cctcaaaatcccttccaaacaggttgctatggttttagtttccaatacactttcatgtctcttcttgggtatgcaactctaccatatgaagcaacaccaggaagcacttcctttcatctccgttgcaatgctgatacttattacattaggtcacatgattcctctgctgttaaactttgaagaactctttaaaggcagccataaccagcgaaacttgttctttgagaacgacagatggctcgaagccaaggaaattgtggtgcggatagtgacactgatagctttcttactcgagtgccgtcttctccaactagcttggactgctagaaaaaccggagaccatcatcaccgtgaagatgtgtggaaagcagagaagaaggtttcttatgtgtgtttcctctctacatcaccggtggattgattgcttggttagtgaccgtaatagaactctaaaagaatagtatacataggaa

SEQ ID NO: 6395 - DNA, 751 bp, Arabidopsis thaliana
tgtagtagacatcacaaaataccatttgctttgttcatcagttgatattggcatggaaactatcaagctcggatggaaagaatatattcaacagccagttcttcctgctagcctcgcatatgtccttctctactttaacatcgtcctcaccccaggcagcttgatgactgcatttctaacacaacgatgtatgctacttcgactcggtcccttacttttctttagtgcttggatgaaaatcgtaattaatcttgcgagagtctttgtgctattacctattactctttcaaattagtcaccaatctgtcttttttcaacaggtgtgaatccatcagttattggtggtttcagtggattatgcgctgttatgggcgtcgcgcaaccttcttatcagcaaacttggtcaaacgagttggcattttaaaggtgaaatgttttcccgccatttgttatcttgagcttgtattgcgttcaagctgattaatgttattgcgtttgcgttttaaaacgatgcaggcgggtgcagtaggattgtttttccaagcttcactccttgccgttgctgttgctgtgtattgtagctcttctctatcccataaaagcccactcttcttcttcttgtccatgatcgtaagttgtttcttcactctctctctcgaccagtaatatgcggttttggtgttgactaaaaggtaacaaacaaatgcaggtattatcaaggctaggtcacatgtcttacggcgttgtggga

SEQ ID NO: 6396 - DNA, 854 bp, Arabidopsis thaliana
catcagctagagtactcgccgaactccgatcaaatccggtgaaatgacagattcatcgttgttatcaatttcaccaccatcggcgagaatgatgacacctaaagcaatgaatcgaaactacaaggctcacggaacagatccatcaccgccgatgagtccaattttaggtgcgacacgtgcggatctgtcggtggcgtgtaaacgtttcgcggtggagaatggaatcgggaccattgaagaacagagaacgtatagagaaggagggattggtggaaagaaagaaggaggaggaggtgttcctgtgtttgtgatgatgccgcttgatagtgttaccatggggaacacggtgaatcgaagaaaggcgatgaaagcgagtttgcaagcgttgaagagtgctggtgttgaagggattatgattgatgtgtggtggggtttggttgagaaggaatctcctggaacttataattggggaggttataatgaattgcttgagctggctaagaagcttggtcttaaggttcaagctgttatgtcgtttcatcagtgtggtggcaacgttggtgactctgtcacgtacgtgattcttctctcttgctcaatcacttattaattcgtgtatcatttttaaggctacttgagattggaaagattagaagtaggatttgagattatgaccaattttggaactgaatgattgaagtttgagtaggcaggattgttcatttttttaattgattgatggagtaacgtgtacgggaattgatgatacaatattcaagaagaaagtgataggtttaagagtgtacgagttacatctatttctttgttgcgtgagagtcttaaatttaatattg

SEQ ID NO: 6397 - DNA, 585 bp, Arabidopsis thaliana columbia
tgatatcggttcaagccacgggtaaagattcaatatagggccttacatgagctttctttttcaggtgaggcggtttttgttgatgatataccgactttaccagactgtcttcatggagcattcatttatagcacagagcctttggctaagataaaaagcttaagcttcagagagaatgtaactcctactggagtttttgctgtgcttactttcaaggatattccacaacaaggacaaaacattggttccaagaccctttttggaccaggacctttatttgcagatgaactaactcgatgtgcaggtcaaagaattgctcttgtggtaactccagtttcctcttcttgtttaattcttgctcgtatttcgttgcgtatctagagaagtatatggcttttgcaggttgcagacacacagaaacatgcagacatggctgcaaaacttgcagtagttgagtatgatacaaagaatttagaacaaccgatattaactgtcgaagatgcagttaaaagatctagctttttcgagggttcaccgatgttttacccggaaccagtaggtgatgttataaaaggcatggaagaa

SEQ ID NO: 6398 - DNA, 627 bp, Arabidopsis thaliana
ctaaagggcccgttcgggcgaaatcgatctcggaaatcggtgtaaatggcgcacgtccggcgagttgctaccgcaattcacgatgcatgcggcatctggttacgcgaatggcatttcacaccggagaaaatactcactgcgctggaaaaaatataaataataaaaaaccgcttcggcgcgtgtttctctgtttgaacgatgactaaatagtgactgcgaaaatgagataagccgttctcaaggcgtcctgcgccccaaattcgtgggaatttattttactaattcagatgatcaaatttactttaaaaggagtgaagggatgtctgatataaaccatgcaggttctgaccttatatttgaactggaggatcgccctccctttcatcaggctctcgttggtgccattacccatctgttggcaattttcgttccgatggtaaccccgcgttaatcgtgggtgcggccttacagctttccgctgaaacaactgcctatcttgtttctatggcgatgatcgcctctggtattggtactggttacaagtaaaccgctacggcatcgtcggttctggcctactctcaattcagtcagtcaatttttcagttgttacggtcatgattgcgctgg

SEQ ID NO: 6399 - DNA, 557 bp, Arabidopsis thaliana columbia
ggttgtgtttatgtttcttgttgttagtcctaatgatttggggtttgaagaattgggtaaagagattgagattgagatgagtttaggtgagaatgtagaggaaagtttgaggaaacatgaagctgagggcgcggtgctacttgaaaacgtagatgattcgtcgtttgctatcgggtttctcgaggcttggagattgcctggtgttgcgccttacgctttctgtttgtttttctcgaaactcgtcgcttacacgttcttgtattggttaccatactacttaaggcacacaggtatgtatccatccatggctggctttttccatataactcaacttgcatcaccttcttactgttatagtttgtaacagctgttgcgggtgtgaatctctcccataaaaccgctgggattctctcgacggtctttgacgttggaggagttcttggtggaatatcagcagggttcatttccgataaaattaaagcgcgtgcgtcgacgtcaatcacattcttggcactctctattcctgctttaattatgtacagagtctatggaagtgt

SEQ ID NO: 6400 - DNA, 720 bp, Arabidopsis thaliana
tacccgggcatacctttgcttcaggccatgtatggagattacactcaaaccctcatggtccaactcgttgttcttcaatgcatcatttggtacgttatcaaattactatccgttctttattcatttaccctgtgattgattagaaaacctcataataatggaattattttgtgatttcacatatttttaccacacattttttcatggattttgtaaccaaaacttaaatgaatttcgttactctaggatataattcaaccaaatcaaatgtttttactaacccaagcttcttattagttgaattatttaattataacgtatgataatataagctaagtgtatatacatgtataggtatactctgctactattcctctttgaactccgagcagcgaggttgcttatccgagcagagtttccgggtcaagcagccggatcaatcgccaagatccaagtcgacgatgacgtcatttccttagacggcatggatccgctccgtacagaaactgaaaccgatgttaacggtcggatcaggctcaggatccgacggtccgtatcatccgtacctgattctgttatgtcctctccttgtgcttaaccctagagctctaatctttgaacgccgagattttctcgtcacactcctaataactgtttcttcacggcggaggaggaagcggtccgttcagttttatacggtagtacgagatatgttttgta

SEQ ID NO: 6401 - DNA, 523 bp, Arabidopsis thaliana columbia
  unsure (1)..(523): unsure at all n locations
nnnnnnnnnnnnnnnnnnnnnnctaaagtggtgatgttgctgtgtcagttcaaatacggatttaccgccttcaaaattgtggcgggtgacgataccagcgtcgtcaaactggttcagtacgcgatataccgtagccagaccaatttcttcacccatatcgatcagacgtttgtataaatcttccgcactgacgtgatggttgtccggctcctgaagaacttccaggatttttaaacgaggaagcgttactttcaggccagctttctttagggcggtattgttatcagtcatgcggaatctgtcctgttactaagcggttcacttcattagaagaagtgacagaatttgctcttgagataatgcgtatcattatagaattgccacgcctaaatgaaaaccacaagtccctggcaaatattgttaataaaaacgtggcacagcttacatttacaacggcaaggccacttgaacaccgggacattgtacaggtacaacagcaacagttacaaatttgtagcaatta

SEQ ID NO: 6402 - DNA, 578 bp, Arabidopsis thaliana columbia
agccgctgccgttgtagtaggaggattagtagatggagtctgcatcataccaagaccaaactgatcgtgctcattgcttctagggtttgaaatatgagcttgaagaagagcttgcagattcatatcctcgaaaccgttgttagggttttgatattgctgaatttgtgatccggataagagaggagtcgctggagtgagtttttgagcaaacggtcgtaacaagagattgttggtgttgtaagtgtttggcgaagaagaagacaagccgaggaaagtgttgaggcgcgtggtgttcacgatggagttgttgttgaatagcggtggagctgggattccggtaaactcttgaaccatcgctcggaagttggaagtatccgtcgttagaaccgtcgttggtgctcttcttgatgctcgagatcttttctttgttttcttgattactcctatattgttagtaggagggagtgatgacgtggcggaggaggttcggaggtcgagttgagaaatcgggtcgggttgttggtttacgggtaagaacgtgttgttgttaaagtagtttggtggtattagagagttgt

SEQ ID NO: 6403 - DNA, 1330 bp, Arabidopsis thaliana
tgataaaaaaaaagtcagctaaatcgccaagttattcacaaagtttctgatttataatgttgatagagaaggcgaaaatgggaggaaaagaatggtacttttttagcctccgggaccggaagtacccgacgggagtgaggacgaatagggcgacgaatacaggatattggaaaaccacaggaaaagacaaagagatattcaatagcacaacctcggagttggtcgggatgaagaagactttggtcttttacagaggacgagctcctcgtggggagaagacttgttgggtcatgcatgagtatcgacttcactccaagtcctcatatagaacctccaaggtacactattttcctttgttattcttctaccaaatatacattatgtcatggtcatgatttaaatacgagtcttgaatgtttttttttttttgtgggattagtgtttcacaagaagaatatacataaactcaacaattctcatttcatttttcatgatgtaacatgtaaatgcagcaagacgagtgggtagtgtgtagagtgttcaagaaaacagaagcaaccaagaaatacataagcaccagtagcagcagcacaagtcatcaccacaacaaccacacaagagcctcaatactatcaaccaacaacaataatcctaattactcatcagacctccttcaactcccaccgcatctacaaccacacccgagcctcaatattaaccaatccctcatggcaaacgccgttcacctagctgagctctcaagagtcttccgtgcctctacaagcaccaccatggactcttctcatcagcagctaatgaactacacccacatgcctgtctcagggctcaacctcaaccttggcggtgcactggtccagccgcctcctgttgtgtctcttgaggatgttgccgcggttagtgcttcgtacaatggcgaaaacgggtttggaaatgtggagatgagccagtgcatggacttggatggatactggccatcttattgattggtaattgtcagtttaagttatggtttttatattgtttccatttacttgttggtaaaacgtttttggttgttctttctattgcatttgtttacctgttctaggaaaatattaagaatcaaagactagtcaaaccaattatggtctggctctatgatttttagttacaaataaaataaaagctgtaacaattcccaatttggtttcgatttttgagaaaaagttttcaaaaagataaaagacaaagagtgattgcttttaaagagtaatggcacaagtaccaaatttatccacatgaatcacaaaatacacaaaccaagccctta

SEQ ID NO: 6404 - DNA, 577 bp, Arabidopsis thaliana columbia
cccattcccaattaagtaacaatcctccattattcttcaataaataagcgggaacttgagtagattacaagaatgacccaactgataaaaaaaacggctcctttaaatgcaaaaaaactcctttcagtttcaaaggtatcgtctccctcaaaatcacaagctctacatacaattcctgctcacatcatcacatggcttcatcagattcgtcttactctcggaaattcttactcatcacctttcttcctctttccttggcctgcttggccttcctcctccaatggcgaacgggagtcaacgattccgttacgcagtggtttgatgataactatccgttcccaggaatggccactgtctccgagaaacgttctcttcgttctgattcgagctgcgtttctcttctgggtcagagccgtacgcaagcgtttccttatctccgagatttgaagcttgatcacaagcccgatcttaaacctagggttagaaatcttggttttcaatttgatgggttttgagaaatgttaagacttgattcatttgatgatgtaaaatcgatttttttttgtagatatgtata

SEQ ID NO: 6405 - DNA, 314 bp, Arabidopsis thaliana columbia
taatgaaaaaaaggaccgacgactcctgagaattgattgtaagaaaggtctaaaaaggaaagctttgttaggtttcttacaggtgggaaactaccagtgagctcattatgggaaaggtttaaatgggtaagcaagataaggttactaattgaggaaggaacttgaccagtaaagctactagaggcaagagaccaaacctctaatctggtgagattgctgaattcagaagggagtgaagaggaagtgaagttgttgtgagagagattaaggtaacgaatctgatgctgctcagagagactactgtctggattgac

SEQ ID NO: 6406 - DNA, 1637 bp, Arabidopsis thaliana
tcaaaatatcaaccgagtttaagatggcatcacttttctttctgatgctgaaaaagatgtggcatatatatcaagttgaggacacaaaattataataaaattgaagacttgttgttaatgtcacacacaaacacacacaattctattttatgaaaacagagtaaaagaaaacagaatagattagagatcttcttcatcgaagtctatacgaattttaagtctccataaatttccctatactcaacaaatgctcaatccctgaaaccacaaaaaaaaatgcaaactcaaaccaaaaataaaaaataaacctaaccaaatgtttaaaaactcaaatgatctttttacctaagtcaggacttgggaagagtatatgctcataagactctaatccccctgaatctccacaactcctcctttcctccgttgtcaccgccacatcgtcagcctgaccattagctgtcgtcgtttgaggctgctttcgtttggaccgagctcgccggttttgaaaccaattgtagacatttgtctccgtgatctgtccatgttcagacagctccgtcgcgatctctctaatcctccgtcgattcggtgttccacttccttcgtcgtaaatgctctcaagtatctgaagctgtgttgaagtcggagtccaccgatgcctagtcgatatcctatgagaacttgacgatgcccccatcggatcaaagtatccgccaaccattggcctcactccttttttacactcaatcattataaaaaaataagtgacgtgacccttaagtttcttccatgtacaaaatatgtattatcaaaaccacaaagcactaataactcaagcttcttaaaaatcggccacgacatgataaccctcaaatcagcttacgtctagagaaaataaacattaataatatattgaattgttcgatctaagcaaatcataaactatattaacaaatatctttagcaatgataaatcgatatctaagcggtaggtaaactgtcttcgaatgtctaaaacattatgaaatttgattcaaagttatgcatcgaacactgggaaaaaaaaagccttggatttcgttagttgtataccaaacgcaaacacaattttcacatttttacactaaagtctcaatgggtcaagtgtattaatggaaacaacgttgcatcgcaaaaaacgctgcgtttaaacactttcgtcttacacacttcttctaccgtatacaaagaagctcatcaaatggtctcttgtaaaaaaatcaaatacatagaaaagtgattgttgttaatcaggaacaaaaacagagagaagtgtacctgatgagagtggatggtaagaagagagggagttgtggaggaggacgagttggtcacaaataacggcgtaaacggcgatctgcttacggagaatctccatctgctcctcagtcatcactctcccactatacgcaccgttttggatctctctatccatctcctctatttctttgcttttctccttttccttttttttttttaccatatgaacaagacaatgagaaagtgaatgatatatatattcttttgtttatgaataaagggatctttagtttatttgttaccgttaaatcaaacactttttggaaagatgtctttgt

SEQ ID NO: 6407 - DNA, 935 bp, Arabidopsis thaliana
gttgattagtctagcatgacattttttatttttccaactcatgataccgtagcatctaaatagtggaattcccaaagtttgaatatggacggaggtggtacactcatcatcagtcgattgtcgcgcgtgtatcaccttcattctcctactgctactattccaacacaagccacaaaatgatctatgccacgtatgtcttaaagagggtcctacacttatcaagagaagaaaaataagttaattccaatatatctaactgtgcaataaaactcaatatatatatacaaatccacccattaactatgccacagagatatcttcctctctactttttcgccaccatctctcccatctctcctctctctctttgagttgcgactatgtccggcgaaaactggattcgagtggccatgtctgacgattccatggtggcggaggcgcttcttcggctccgcactccgaaccgaagaatagagtcgacgcgtcccctctcaagctgaaatggagcgtgcgtcaacggagatcgaagaaaggagaccagacgcgagcaagccccaccacaccgctttcctggagcggtgccacgtctcttagcggcggaggcggcagcggtggaagcggcgccggtgctaccaccatggaaggcctcgaggagtctagcgccgccgtaaaaccctctgagccatttagatctaaggtttgtccgatcatttcactcatttttttgtttatccgatttgaaactccgcgacggtcatatctcgtaggtcttgttttctgctatagccctcgtgatgcggcgttttgcactgtcatgattttagtttttaaaaacgtaattttaagcgtctttgttgtggtttgggctgatctactaccgagtacgcccttgacatttcagttggtagcttgtgggtattttggtcattttagga

SEQ ID NO: 6408 - DNA, 538 bp, Arabidopsis thaliana
ccagcgaatccttctcattcttatgggttccaatactccacttggccatggttcgggtcaagagcctcagtggcctgtagatgaagatgatcataagctgtgtaagaaaaatatcatggacccggggtatcaaacaagacctaggttgactcgattacttaaaattacctgaacaataaacggagagcgaaaccaaacatttttaacccatcgatgctttccaacatatggacatcttgtttttggttgctgcgtctcatgatctcttccttaactctaagcaacaccatttcccagcacttctgaggtgaggcataagagaagctctcgtcttgagattcttccaaagtaacctgaaatgataaacaacaatgtaaggcaggttttagtttttccaagcgtacaccaactaataataagaaccttaaaaaggtttattaccttgaagagtggacccagaagtcctgcatctacaatctcagagacgtaatagcttattctcattggatcttgcacgttatagaacttaacacgactc

SEQ ID NO: 6409 - DNA, 563 bp, Arabidopsis thaliana
atatcagaaactggtcaaacacacttttgagtcttagccactacataaatggttccaataactttgtgatttgttgcaggacaaatggaaaacgttggttcacacagcaagtatatcaccacagcaacgaagaggagaaccagtgcctcaagaactgctagacagagtcttaggagcacataggtactggacacagcaccaaatgaaacagaacgggaaacatcaggtggctacaacaatggtggttgaagcaggttcgtccatgtaaagaaggagaatggtaataacaataactttcacttgacgactaaggaaccaaagtgggcaactgtacaaagggaaacaacaaaatacagaaacatacttaatttctgaaaagaagagtctatatttttattttttttaaatcatagctggtagaaacaagacgttccttgacacttttggttacttttatggtaagtctgttcattccaaatttctaattgatttgattatgtaatttggtggtaggccatggaaaaaggggaaatgtaattttagacaattcttttatttttttg

SEQ ID NO: 6410 - DNA, 891 bp, Arabidopsis thaliana
cttctcaaggagaggctcatactccgcaatgcgcagcttacgattcatcaaaaggaggcccaaatacctaatacggtagggtgccaatagcgaaaccataggcagcatttgcgttggattccaactgattcagacccgctagataaagatggctcttatctttgttgactttcaaaccagaccaagatgcgaaatcgtccaacgtctcacaaataccatgaagagagaaacttccaccatcaaagaagatcataacatcatctgcaaacattaagtgggatatggagagattggaggccttaggatggtagtgaataagaccagactcataccttgaatgaagcaaattagagaaagcttccattgctagaacaaagagatagggtgaaagaggatcaccctgccgcaatcccttggtactcttaaagaagccaccattgcctccattgatagaaactgtgaaagtaggcgtagagatgcattgagaaatccagttaataaatttttccgggatggcgagacacgcaaagcagctatgacaaactcccatctcaccgagtcaaaggccttttttaagtccactttaagcatccctctgggagaaatattgctccaattatacccatgtaccaaatcagttgcgagcaaaacattttcagcaagagaacgacccgggagaaacgcagattgagccgaggagatcactccagagagaagccgctgaagccgatcagtcaaaagtctagcgataactttgtagagcgtgttcaaacaagaaataggcctgaaatcagaggtgcaagtaggattaacaatcttagggatgagcaccacagtagttgcattccattgcttcagtaagcagccagaggagaagaattccatgatcgc

SEQ ID NO: 6411 - DNA, 574 bp, Arabidopsis thaliana
ccgtgttaaatcggaagcttcctctcttcggttcacactttgtaaccattcattgacttctgcttcagtttgtgtcacaacccttgagcaactttcactgaacttattaaacacaagattattgcgtgctttccataatctccatatgagccaaaatggggccaacctttgctctgtattcagagtattgtttgaaaaagaattgataaggaaagaaatattctcctctgtgtcttgagagaaagtatgacccggtaaccaagggaagtttgatagaccccaaattgacgcagcataaggacacgtaaataatacatggtttatcgtctcttcttcagttgggcatctggggcagtgtggatcgatgtccattcctcgagtgagaagtcgcgagcgtgttggtaatgcttttgaaattgtacgccaaagcatgtacttgatttttggaataatagggagtttcaaagcttgttcttaatttccactgaaccatgaggcaccactggtctaacttgaatattcgttgggtcattaaagagaaaccagtacccgaacttaactgtataatcccaga

SEQ ID NO: 6412 - DNA, 538 bp, Arabidopsis thaliana
catcacttttatttcgttcaagctccacttctagtccctaggtcgcaaaattcttgtagtgatccatgttataccttgattttgattttgggacttaattttgttgtcaatgatgtgaaggtatggacctaaaggtatatataaagcacacatgttcgggaacccaagtataatagtaacaacatcagacacttgccggcgtgtgctgacagacgatgatgcgttcaagccaggttggccaacatctacaatggaactcattggaaggaagtcattcgttggtatctctttcgaggaacacaagcgtctcaggcgtttgactgctgctccagtcaatggccatgaagccctctctacttatataccgtacattgaagaaaacgttattactgttctggacaagtggaccaaaatgggagagttcgagttcttgactcatctgcgtaagctcacctttaggatcatcatgtacatctttctcagctctgagagtgagaatgtaatggatgcattggaacgagaatatacagctcttaac

SEQ ID NO: 6413 - DNA, 609 bp, Arabidopsis thaliana
ttcggatttagaatttttgggtcgttgctgacatctactagctcttcattcacattctcttcttcctcatctgaagaatactctctctttctcgctgccccgcttgttccccctcctcctccctcggattcagcccatagcattctctgcattctagtggtaaatatattttgcatatcatcataaaaagggaactgttgtctcgctgtctctgcctccattgtctcacatccctagaaacatcaagcaatacatcaccaatgagattgtatacatataattaaactacttagcagattatggacaacaagattcagaaatatttacaatggtgtttgtctatatgtcccggaaagattatggactataagattcaatatttcttggttacaaatttttatttatttatttgttccatgcaagacctccaagattataaaacatccacaaaatgaaagaagagggagagagagaatagaccttaaaacgagtgacgaggttctccacttgcacttgcactgttcagggctacgaggaaagcttttgtctctcatcttgttagagataactcccaaagaagcttgttcagttttgccccatgaaagtttg

SEQ ID NO: 6414 - DNA, 1592 bp, Arabidopsis thaliana columbia
tcttgccgtaagtgctcctccagttgtaaaaaagggtatcttcagctttaacaaaagaaatgatggtcgtcgtcatcatcatcatccaaacacctccgtttaaccaccactccatactcaatcttgatgaaactttggtaatgtagaggaggccaaagaagaaaaagtgagaagagagagcttgaatatgagttttggagtttgtagtaaccgaaatttgactcggtgacgtctttaaagtctaatgcgaagcttttcaataagctaaataacttattacgtgtatcattcaatttcttgtaaaagaagaaaaaaaaaagttatctagcaagcccattagcatcctcattagtgaaccactattttgagtgtctcaaaatcaaaagatttaatattttaatgtcaaaaacacattgaccaattaaaaggaaacacatgaaaagtagtgtctttaaataagtggtaaagagtcttaagtgtctatacaaagacacaaatctcttcttgattctctcaatgattttttttattattattgatattcattttatatttaaagacctcctattatggtgactgttgcattctcacttgttgtttcagggcttcattgagatgtattattttaagcagttaattttactccagtgagatcagtttaaaaaaccttcaaacttttatggtagaaaggtggttctcattgacatggttcccaagaaaattttcgcaaaaatagtttgtcaaaaatatagttaagcttgtgtgagataacaccacactttataaactagtaatagattaataagaggaattgcaatgccttttggatttgactttgggggaatacattcgcattagtggacacgaccaacatgcttagtaagtatagtccttgggattcgacgactaccaaaggctctctctcttttgtaattgtttattaagttcacatgatatggttcttatatagtccaatatgacaactttctaaatgccaagatgattttttaaaatttcaagacctcgtacaaagtgttaaatgggacaaaacacagttaaaaccaaaaaatgagggttaagagtttgcagaaccaaaaaaagagcacagcatttacatacacataactgtcttgtagcttcacgtgactctctttacccctcccgaccaaaaaatacagaaaaaaatcacagtagaaagagaaagatacaaaggactaagggtaaaaacggtaaaaccccaaaaagatgagatgatgaagagaagctcttttgaaactgtagagagtcaactgctaaaggcatgttctcttggtcaggactacacttgttgaggtgaggtgggtgtggactatacataatagctcttaacacagccgaaacagtgggaatgtatgccgttttgttacgagctagtagccatgtgagtcccatgagctggcaatctttgctcatcatcttagtccctctctctgttgttgtcttcttgtttcccctcttacctttagctgtaaatccaccatcaaaatttgaaacaaaaaacaagattcattaatataatggagaacaaaaagattgcgtgtgaaagtgaaggg

SEQ ID NO: 6415 - DNA, 872 bp, Arabidopsis thaliana
gaatcaaaagtgttcacccttctagtttcttgtaattgttaagtaaagactaaaaactattttcatgtgtgtttactttcccccattctctttatcttgtcataacattgataaggaggagattatgtgattattaaatatcatgcatgacatgttcatcaaaaccaaacaattgaaatggatgtattcaaaagcccatccataatggtcagtgagaaccaaattgataaattaatcttacatttacatttcaatcactgattattacacaagttttagagtctcttgatgaatacacatatagttaacatggggtaagacaataaagcaaattatcatttattcattcattacataatatatttggtagtaaaccatcttcactccattctccatagatgatcaataaagaccaaactcactttttaccatggagattatcaaagtaacctttagtatcactctcaaacttatctcttgaaatggtagaagatccgttgctccccggcgctaccatgtagccacctcctccactaccggcaacaattcttccctccttcccctcctcctcctcctccacaaccaccaccatttttccctcctccaccaccaccaccacttttccctccaccacaaccacttttccctcctgctccaccgccgcttattcctcctcctccaccagcacctttccctcctccaccgctaccaccttttccttccattctttgaaatcttagaagttcttagtgactctttaagaaaacttaagttttgtttaaaagtgagaggtgagaggacggatatttataatagagtaaattttcaagtagatggttgatgaggtcaataaggtcgaagaggcgggaaga

SEQ ID NO: 6416 - DNA, 687 bp, Arabidopsis thaliana
acagcagcagaatatagctctgtgtaagccttcctagccagaaacctacgcaagtctctctggatttttaaagcagcagcttccctacgcatgccttcatatacacttctagcgagataacctgacaaaaaggcagacacataggtttgcaacttagtcaataaataaaaaaaggacagaacaatccaatcatttagtctagttgagctatagacatgttcgacaacattgaaaatacctctgcaaactgactgaatctgtttagcagaattacgcagaacgatgaaactctttttagcgagatatgaccgaacttttctctgaataatgcttgctgatcttcccaagacctcagtccttcgggtatccaagtcagccatttgtccagcccgcagaaaaactttcgtcttgccaatctacaaaagtaaaatgtcaatcctcaactatcaatgtagctcacacaagcagtagtggcattgcaaaaagcttgatgagggaattacctgatacccttcgagtcccactttgtccagaagcttcttgcaagcagcagggtcatcagagctattataaggactcagttaagacatgaaaatggatatcacccattataagaaattctatgagaggaaacatcttacttctttaccaacacttctggagcaagaataccagtgatcttctcta

SEQ ID NO: 6417 - DNA, 580 bp, Arabidopsis thaliana
gattaccagcgatcgatgatcagcaactttcccccaaaagaagtaatggagatcaaagacgcagatcatatgccaatgttctccaagcctcaacaactatgtgctcttctcttggagattgcaaataaatatgcctaaataaatctgaaatatcatcatcactgcatatcaattacaaattcagtgtccaccacaataataagccatatgagaatacataatgtatgagaactaagcaaatgataatattcacaagaatggttttatgaataatgattcgtgagctagataactatattattacctgaaaattatgttttatggtttctccattgatttaaacttataggatacagatttatacaccatatttcatgataatctctatcaaaataatgaatttataagcaatcgagtaaatacaaatataggcgccgaatggagatgtacggtacaactgcgaatttttttaagtcataagtaatttttaaaaaatgttatctctatttttagttacgagtaattgttgtaatattatacaaaaattaatattattgccaactagtgtgatttgcctggt

SEQ ID NO: 6418 - DNA, 884 bp, Arabidopsis thaliana
actagtattatatgttagcgaatcctactaaactatgacaacaaatatacatgcgagtcgtatacagaattgattctcacatttaagctgtcaacaaaacattcaacaagtcttaagcaagccattaaagaagggacctgaacaatttaatatatatggttaactatttaagtatcatgtccccacttgtccattacgtgattactacaaaagttcacataaaagttcctttttatatatataggaaagggaagaagatctcaataacacaaaaccttttaaactagtaaaatacacagattttaggatgagccaatgtgttccaaactgtcacatcgatgatactccggcagcagcaccaccaccgtccgctccagcacagccgcagacatcccatgtacataccttaatttatcatcttgatagtataagtggccacaatataatgatagcttttcttgtttgtctacagattagactacgaggtagccgagctgacgtgggagaacgggcaactaggcttgcacggcttaggtccaccgcgagtgacggcttcgtcgaccaagtactccacaggcgccggtggaacgttggagtcgatagtggaccaagctactcgcctccctaaccctaagcccacggatgagctcgtcccgtggttccatcatcgctcctccagggccgcgatggcaatggacgcgcttgtcccttgctccaacctagtacacgagcagcagagcaagcctggtggcgttggctccacccgggtggggtcatgtagcgatggtcgtaccatgggcggtggaaaacgagcaagagtggcaccggagtggagcggcggcgggagtcagcggctgaccatggacacttacgaccattcgcgg

SEQ ID NO: 6419 - DNA, 813 bp, Arabidopsis thaliana
ccgcctgcttacgttttccaaaaggtacgtaaaaacgatgattattaacttcacggtgtgatctcttcaatgtgattctgatatctgcctgaaactagcagctggtcaaagacgttacacaagaggtatggatggatactgtgtttgggaaacctgatcgtcctctagagtttgctctttttggaccagagttcatggccaagtatttgtataacctatctcccctccaagtaagactccaagcctcataaaaactaaaatgggattgcttgtaaacctcagttaaacttttgttaattgttgttgtgttggtttaggattttgaattggcgaaaatgtcggtgagggtaagcccgttcatgacaaacaacctggcagggacaataagcttcagtgaggacaggtacggatccgttacacgtatatatatcgtatgcggagaggacgttgcggtacctgtggattaccagcgtgggatgatcaatgacttcccggtgaaggaagtactggagatcaaagatgcagatcatatgccaatgttctctaagcctcaagaactctgtgctcttctcttggagattgcagataaatacgcctaaataaacctgagatcgttactgcaaattagtaatgaatttcaacttcaccacaacaaaaagccatatgagaaacaatattttagaagaatgatttagtaaatagagatcataagagaactataataaacatattcctagactctccattgtatccctataaatttgtacatctcttctccaataaagcattcactttcaaaaactacaaatttta

SEQ ID NO: 6420 - DNA, 569 bp, Arabidopsis thaliana
gatgagaagttatagcttttcttgaatctaagattagatcagtgcagttgccatattgttcagttgttttcatcttgcatatagaaattgctctgcaacattggttatagtgatgcttcgcaatgcagacattgcagttctctctattatgatgctatgatcctacatttgaaaccaagaggccttgtaactacttctctgtgtaatacagttttctcacgaaactttattatataagcattatcatttgcttagttctcatacatatagatgtattctcttatggcgtattatttattggtggaagctgaaattggttaatttttgcaatatttatttgcaatctccaggagaagagcacaaacttcttgaggcttggagaacattggcatatgatctgcacatttgatctccattacttcttttggtggaaagttgctaatcatccaacgctggtaatcttcgacttccacaagatcctctctgcatacaatatatatacgtgtaacggatccgtaccttcctcactaaagcttcttgtccctgccagattgtttgtactaacgggt

SEQ ID NO: 6421 - DNA, 575 bp, Arabidopsis thaliana
accgtacccttcctcactaaagcttcttgtccctgccagattatttgtaatgatggggtttactctcaccaacattttcgccaattcaagatcctaacccgtcacaacaacaatcaataaaggattgattacaagcaatcccatttttgtttttattaggcgtggagtcttacttggaccggagagagttgatacaaattcttggccatgaactttggtccaaaaagagcaaactctagaggacattcatgtttcccatacgttccaaacacggtgtccaaccatccttcttgtggaacgcttctgattagctgcggattttagtaaaatattagaaccacttggaagaagtcatacctcaaaaccatattagaatgtatgatgatgtaccttttggtaaacataagcaggtaggtttcttgtgtcgggcataaaagctgtcaagaaaacaatagtagcaatcttactagggaatatgtcagaagcgagacgagcaggtattcccccatactatgcgcaacaagaatcaccttatcgtcatccgagccaagtgagttcagtactcaagcaaaggt

SEQ ID NO: 6422 - DNA, 1343 bp, Arabidopsis thaliana
tgcccgacacaacgaatccaccttcttacgtgttcgaaaaggtacatcaagttattagggttcctttccttagttataaacatgatgattaatttgaaatgtgttgatcaaaaacgaattttgagagtcttttttaagttatttacctcatgtttttggttttgtacatgaaatcaaagatcataaggagacgtatgatacaatattgtttttaattctgagtcattttgatctttaagatgtgattgaaaacgcagtttctcggaagcattacagaagaagaacgtatggacttcgagttagggagctatggaacagatgaccatccactaaagactgcttttcttggacctaactacttgaagaatatgtatctactttctcctatcgaagtaagactcaagaaaatgctctgtttcttacaaaacctaattggggactttgtttttgatgaattgtttgttttgctgattgttaggattatgaattggccaaaatgttgatgagagtcacaccggctattactagtaatctgacggggactaaaagcttaacggcacaaggatatggatcgattagtcgtgtgtatatcgtatgcggagaagataaaggtatacgtgtagatttccaacgatggatgattgagaactctccggttaaagaagtgatggagatcaaagatgcagatcatatgcctatgttttccaagcctcatgaactctgtgatcgtcttctaaagattgctgataaatatccctaagcaagaatatctatgacaatatcaataattttcatgggaataagtttttttattgttctgttcacaaaatatgtggaaaaaaaaaaagacaacaatagaatttacgcacgaggtaatatctaatggtccaaaataattggagagtgacactgacagttcaatgagaaactgtctcaccataaatgaaaaacaacaaaacaaccacaacattagaagaaagcaaaaagacaaatatcaatcaattgagaaagagaacatgaaacattatgttcttgttcacggcggttgccacggcgcatggtgctggtacaaggtcaaaccggtgctggaagcttcaggccaccgtgtaaccgttgttgatcttacggcttctggtgtgaacatgagcaaagtggaagagattcagactttggcggattacgctaagccgttgcttgaagttctcgagtcgtttggttcagaggataaggttatcctcgttgcacatagcctcggagggatatcagttggtcttgcagctgacatgtttcctagtaagatctctgttgctgtcttcataacctctttcatgcctgatacaacg

SEQ ID NO: 6423 - DNA, 630 bp, Arabidopsis thaliana
aagtcgacttatggtcacccatttacatgttttctttctgatgttttgttgttagttagaaatttgtctctgtttaggccatctttcgtggcgcattgtcacttacagctatgcactgtattctggagatgaacttttgtaatctgaatgatcatatttgtttgttcgattatctgaaggatatccttacatttggtcaaaacgaataatttactttttgtgttttgcttgttaatagaacttaatcttctccatcttccattgtgtaggccatcgtcagtttcataacaatgcaatttcagctatgtactgtcttcttcacattttcccttggtacaagaacccattattttggacggacaattctccatggtggtgcaagggtatattctcattctcggttctaaaaaatctctgtaaattttttggaatgtgataaccattgtttgttaacagtaccaagccactggaagaggcttcgtcgtgaagcatatcaaattttctgaaaactaccgtctttattccagaagtcattttgtcaaagcgtaatccctcttctttagttcttatgtatatacatttctgatgtatacctgtttagcgatagtaaaggattgaaaatcattgata

SEQ ID NO: 6424 - DNA, 593 bp, Arabidopsis thaliana
aacagtgttgtcttgtgactcttcgtaaattatggaataaacaagtgaaatatttgggctaagtgagtttaatccggtttcaatcaactttaaagagggttaaacgccaaaacctcacaaacagtttcactgtttcaggtccctaatttttctaaaattccaaaaagcctcccaactaaactaaccattgtccattgatccaaagatccccagaaaattctagcccagcacttgtattctatgaaaatgtcaagctctttttcctttagtcttcctcctcttcttggtacgacgcttctcagacgattcaaaccgcttctcacataagagaaccctgtaacttgagtgaggtccttcagcagtttcacgtaagctcgtgtgccacctcattgcgtttccaatctcttgaagctcactcgttacattgattgtgtcccgtatgtatacacgtcctccaggtcttaaaatccggtccatctctagcatcattgttgtcatgttgcatctgaacaaggccaccaaccaaaacaaagtttataataactccaatgtccttgaagattcttctttattttggcaaacaaagtgactgt

SEQ ID NO: 6425 - DNA, 548 bp, Arabidopsis thaliana columbia
cctatatgccgctgcatttgaatgaacattgtaacatcactatcttcgctgatgtattgaggtggagaaccgttgcctttatctatagtcatccactctggaaattggtatgccattttaactgtgatgcctcttgcacgcaagccaagtttatctttcaccttctgtgatagctcttcatacgtcatgttagttctgagtcggatgaatgacgatccttcgacagtcttaggttcaaactgccaggctagattatccaccctgacccactcgccaatcaccaacaatacttcatcttgtcctgcggtctacatggattatggaaatagttcattattatttagaaagaacataatgaagagtaaatgtaaatatcaatcaataataacagtttttgaatttaatcgatcgtagcctttaattgcggaatacaaaatatagcgtgaatcacgatgtaatttaagtaaatactaacaagttgtttagcagatctacaatctagaaagtggtatatcgaacgaaaaagtgagaagtttacatggaaagtt

SEQ ID NO: 6426 - DNA, 561 bp, Arabidopsis thaliana columbia
gtcttcccaattgggtccattattcctttccctttgtcagtaggtcaacattcatggcttttcattcggatgcagtctttaggctctctaatactgatccctcttgttgggaaaagttcccccctggtcctacgtcgttgttctgtctctgttgtagcagacgtttgctcttgagtaggcccaaccaaggcactatcaagtgcaaattggtgaagttcctcctctgagtcataatctgactcgtcagtgtcctctgaattgaagttcttgtcagctacatcaacatgacaacttgaaatagtatgttggacgacagtgacatagagattcacctcctctatatgccgcctcatttgaatgaacattgtaacatcactatcttcactaatttattgaggaggagagtcgttcccttaatctataaccatccactctggatattggtatgccattttgattgtaatgtctcttgcacgaaagccaaatttatctttcaccttctgagctagctcttcgtacgtcatgttggtcctgaggcagatgaaggacgctcctttgaca

SEQ ID NO: 6427 - DNA, 724 bp, Arabidopsis thaliana columbia
atcagccctatatgaatcaacgccttctaaatcatcattttctggaatgtggtcagattaggttgcatggtgaatggaacgatgagaaaatcctcttcattctcgttgtcttatgtcccacttgctctactaggaccagccttcgttgacttagcacttttgtccatgattcctttccctttgttagtaggtccacattcagggcttttaagccggatgcagtcttcaggctctctaatactgatgcctcttgcgggaaaaacttcccgcctggtaatacttcttgactcttgctttgtctcaggaggcgttgggtcttgcgttgcacccaccaaggcactatcaaaggaaaattggtgcagttcttcctcagagtcataatatgtttcctcactgtcctctcaattgaagtccttgcatgctacatcaacaggagaaattggaatagtatgttggactatagtaacacagagattgacctcttctatgtgacgtctcatttgagtgaacattgtaaaatcactatcttcactgatgtattgaagaggcgacccgtttccttcatctatagccatccactctggatattggtaagcaattttgattgtgatgtctcttgcacgaaaagaaaatttctctttcaccttctgagctagctctttgtacgtcatgttggtccggaggcggatgtacgacgatccttccacagtcttaggttcaaact

SEQ ID NO: 6428 - DNA, 546 bp, Arabidopsis thaliana
gctggatgttttcgatccgttcgaaggtttcttgacgccgtcaggagttggcaaacgcacccgctatggatgtggcagcgttcacaaacgctaaagtggattggagggagacacctgaggcgcacgtgttcaaggcggatttaccgggactgaggaaggaagaggtgaaagtggaggttgaggatggcaacatacttcagataagtggagagaggagcaatgagaatgaagagaagaatgacaagtggcaccgtgtggagcggtcgagtgggaagttcacgaggaggtttaggctgccggagaatgctaagatggaggaaatcaaagccagtatggaaaatggtgtgttgtcggttaccgtgcccaaggtgccagagaaaaagccagaggttaagtccattgatatctctggttaaagggaattgtttaagaccaaaaatgtgtgatggtagtgaaataattggtgtgtgatgtgtttttcttgtaatcatgaatctcgttgtatcattatcataaaatcttaataagagtgtgctttgtatactt

SEQ ID NO: 6429 - DNA, 630 bp, Arabidopsis thaliana columbia
tctagaggagtgtgctctaaaacagcaaccggagaacttggaatagtgtgttggacgacagttacacatagattgacctcctctatatgccgccgcatttgaatgaacattgtaacatcactatcttcgctgatgtattgaggtggagaaccgttgccttcatctatcgccatccactctggaaattggtatgccattttaactgtgatgcctcttccacgcaagccaagtttatctttcaccttctgagatagctcttcatacgtcatgttagttctgagtcggatgaatgacgatccttcgacagtcttaggttcaaactgccaggctagattatccaccctgacccactcgccaatcaccaacaatacttcatcttgtcctgcggtctacatggattatggaaatagttcagtattatttagaaagaacataatgaaaattaaatgtaaatatcaatcaataataacagttttccaatttaatcgttcgtagcttttaattacggaataacaaatacagcgtgaatcacgatctaatttaagtaaatactaacaagttgtttagcagatctacaatctaggtaagtggtatattcgaacgtaaaagtgagaatttttaaatggaaac

SEQ ID NO: 6430 - DNA, 500 bp, Arabidopsis thaliana
atttctccctataaatacgccaacgcacataagtgtttgcattcgaagagagttctagcaaaacaaaacaaaacagagcaaacagagtaagcgaaacgatgtctctagttccgagcttttttggaggccgaagaacaaacgtgttcgacccattttcactagacgtatgggatccgttcgaaggattcttgacgcccgggttgacaaacgcacctgccaaggacgtggcagcgttcacaaacgctaaagtggactggagggagacacctgaagcgcatgtgttcaaggcggacgtgcctgggcttaagaaggaagaggtgaaggtggaggttgaagatggtaacatacttcagataagcggtgagaggagcagtgagaatgaagagaagagtgacacatggcaccgtgtggagcggtcaagtgggaagttcatgaggaggtttcggttgccagagaatgcaaaggtggaggaagtaaaggcgagtatggagaatggggtg

SEQ ID NO: 6431 - DNA, 747 bp, Arabidopsis thaliana columbia
gaaatcagatagtatggtgtttaatgcttcttgtgctcgaccccaaaaaagaatgttatgcctttgaattgcagtttcttccacaccatttgtagtaggagatacatgatggccagtcggagttccaaccgcggcccttgatgaatcaacaccttatgcattaacattttctggaatggcgatagctggcagattaggtagcattgtgaatgggactataagcaaatcatcgtcactgtcgctgtcttctgtcccactttgcctactaggaccagcaggccctgccttatcacttgtttccattatgcctttttctttgtctgtaggtccacatgccgggcttttaagacgaatgtagtcttcaggctctctaatagttacgcctcctgtagggaaaagttccctccttgtactacttcttgtagctggctctgttcctcccggagttgggtcttgcgttgcacccaccaaggcactttcaagtgcaaattggtgtagttcttcttcagagtcataatctgtctcctcactgttagaattgaagtcatggcacgcaacagcaacaggagaaactggcataggatgttggacgatagtaacacagagattgacctcttcaatatgacgtctcatttgtatgaacattgtcacatcaccgtcttcactgatgtattgaggaggagacctgttgccttcatctatagccatccaccctggatattggtaagccaattttatagtgatgtc

SEQ ID NO: 6432 - DNA, 542 bp, Arabidopsis thaliana
cccgccatcctctgttgctgaagcctccagtgtaaatcttggtttaaacaactcaaagtctctatagaagaagctaagtttccgtcgcttgctccggcggttgtgaaccccgtcggtgaatggttgttgttgaaatctccaaaacccattagggataaacccgacccgacatcaacgggtgtgttttctcggcccgaggacatcatgggcctaagatcaagaacttcttggttattcaaaagttgaagatcgttcattttgttgagagataatccggccagctgaaaatccattgttgtcggaggagggaagaatttggatgaatcttccatgattgatgagaagaacctctgagaggaagaagacgaaggaagtgtgttcatggaggaattaggtttgatagattttttggttttccggcaaccaccaccgatggggacgtttcttagagcaccgccacgtgtccagtaacggcgacaagatttgcagaagtgacgaggttgagagagactgtagttgttgtagtacagaactttgtgttt

SEQ ID NO: 6433 - DNA, 546 bp, Arabidopsis thaliana
ggcgtgcagttacttttctgcttaagaatactgttgttactctctaacttttttataattccaggtgactgttatggacactttgagcagactaagccatgacacagattcagaagttgcaatggtgagttatcttttcgccactcatggttgaggtagagtagttatttctttgacttgctatgcagcgttggactgatgtttcatctgattcctacaggcagcaattatctcccttggattgataggcgctggaaccaacaatgcaaggatagctggcatgcttagaaatctctccagctattattacaaggatgccagccttcttttctgtgtaacgttttatgatttctttttaagttttcatggaataaacacggtttctacttatgataggcttgttctcattgtcttaagtcacaatgcaggtgcgcatcgctcaagggtttgtgcatatgggaaagggtctcttaactctcaatcctttccactccgaacggctcttgctatcgccgtaagttataacatatattttatgtatacttt

SEQ ID NO: 6434 - DNA, 724 bp, Arabidopsis thaliana columbia
aggacactgaatcaagagtactaaagataatcgtccagtcacatatgtagtcaccagaaacaggtacctctaatgagaatgtattaacaagtctgttaacatgatctcatatgatatatcaatgtctcaattagaaaaaaaaacaagcaagaaggtaagggtaatccagtaatgaactcacgagtgccaatttctacggataacaccgactacacggcctgatggacgaacaggggctgcatttttatccccagaagtttcatgggataaatttgaggttctaggagcatcatcaacattgtcgggagccaaatgaacagtatcatcctcttcatcatctgcatttgaatttgatatttggaagaaagataagtttaacacaacgtcatgcaaggaaataactgctgtaaaatatatgtagatattgaaagagaccttcttcagctatagataatgccttctcatcttgccattgatcccgaggcaagagttcgactgcaacaatatcaccatcaaaagccctgttcatgttctgcgcccatagataattatctcttcaccaagtgtctcgcttccaacataagcttcgtaaggattgaaacgattgacccggagttttccttgatgatatattccacggtgtaagccagcagtaatctcagacatgggcttatgctgcaggcaggaaaaaaaacaaaattggagataaaagttgtttgatggc

SEQ ID NO: 6435 - DNA, 782 bp, Arabidopsis thaliana
cttttgtctcttcccgagaaaaacaagatcgtctttggtgaagagacaacaaaatcttattagggtttctacttcttcatcgcttatcgatcttaaccagttccctaccgattctgagatcgaagacccacaaaaccatcttcaagggctatcctcttcatgtttcattgccgctaattccgagacaaaaacattacaaaaccctagttcagaaccttgttcttcactcggactctttggtcacaagacggctgagtaccaaaagacggagacgaaagacccaccaaaccctaatttcccatgtactatgtctttgtgcctaatggagaacacaagccgcaagagacgtgctgtggaacaaaggaagcgtagtggtggagtcaagaaagcaaatgttgctcctttttcacaaacggcgagagagacacctgagtggcttgtcaaggtgatgacaaacatgaaagaagccaaagacgctaaattgatctttgagaagactctgttcgtgactgatgtaaacccaacaaagaaccgtctctcaatgcctttcaacaacttactccgaaacgatttcctgacgtctgtggagtccataatcataaacgaagacatcaacaacaataacaagattggagtgggagcgattctcgtggatcaacggtgtaaaaagtggggtgtgatgttaaagagatgggagatgaagaaggaatcaggtaaaggaagctggagttacaatttgatttgtgggtggacgacatcgttgaggctaacagattgaaaga

SEQ ID NO: 6436 - DNA, 978 bp, Arabidopsis thaliana
cttgccggggtttctgaaccgaataatgcttatagattagggtttcctggaactacaaatcctgctattcagtccatggtacagcaacagcagcagcagcagctaccgccgccgcaatcagagactcggaagcttgtttttggttctttctcgggagatgctactcaaagccttaatgggttacataacgggaacttgaagtatgattctaatcaacacgaacagctcatgaggcatccccaatctactctctcgaattctaacatggatccaaacttgtctcatcatcggaatcatgatctccatgaacagaggggaggtcacagcggaagaggaaactggggtcatattgggaataacggcaggggtttaaagtctactcctcctcctcctcctcctggattttcgagtaaccaaagaggatgggatatgagtttaggaagtaaggatgacgatagagggatgggtaggaatcatgatcaagcaatgggcgagcattctaaagtttggaatcaaagtgttgatttttctgctgaggctaatagattaaggggattgtctatccagaacgagagcaagttcaatcttagtcaacaaatagatcatcctggaccacctaagggtgcaagtctacattctgtatcagcagctgatgctgcggattccttttcgatgttgaacaaggaagctcgtcgtggaggtgaacgtagagaggaattggggcagctcagtaaggcaaagagggaaggcaatgcaaactctgacgagattgaggattttggagaagatattgttaagtctttattgcttgaagatgaaactggtgagaaggatgccaatgatgggaagaaggatagcaagacttctcgcgagaaggtacgtttcagtttttgtgtaagcttgtgatataggatatacctaatgacttgttgggaacattcagtgatggtgtttagctcgtgtaatcaattcttaact

SEQ ID NO: 6437 - DNA, 755 bp, Arabidopsis thaliana
cgtcgcaacttcatcagttttctctacaaagaactcgttcgaagaaaaattcgaactttcaaagacgacaaggagctcgagaatggccggaggatttctccggagctcaaacgcgccatcgaggagtcgaaattcgccgtcgttgtggtctctgtgaactacgctgcgtctccttggtgtctcgatgagcttgtgaagattatggatttcgaaaacaagggttccatcaccgtgatgcctatcttctacggcgtggatccgtgtcatttgaggaggcagatcggagatgtcgctgaacagtttaagaagcacgaggctagagaagaagatcatgagaaagtgcttaaatggaggcaagcgttggccgctttggcagatatctccggcgattgttcagggtgaaatttcttaacttggtgataaagattgaattgaattttaaccaagtcgccttggtccagtggtaaaaggaagataattcccgccacctggtttgatggtttccccggacactaagattagtcttccggtttaggaaaaaaaatagattgaatttttattgttagatatgatttgaagagatgctaagtttcgattattttttattttttttgtctatgtagggaagatgactcgaagctggtggacgtaatcgctgacaagatatcaaaagagctgatgatagttacaagaataagcaatgggaggaacctagttgggattgataaacacatgaacgaacttaaccgattgat

SEQ ID NO: 6438 - DNA, 808 bp, Arabidopsis thaliana
ctgaatcttgtgtagcttcattgtcgtttcgtcttgagtctcattgctcctataaggttgtttcctcaaacaatctcctccttcattccacaacccgccttcaaaatgtgacggtgcaaaacttcgtaagtacattacgcctttgaagctttccgaatccaagatcgctttaaacgcggttctaaaagcttttctatacccataaaacattgtgagatcggttatgttcggtaattggcaataatggcaaccggtgatagtccggttttcgtagtagactgatggccggtaatgccagtggccagaagagatgattacgaagtcaaaatctcctatatcggctgtccaactctcgtctgcctcatcaaggtataggtcaaaaatatcaatatgcttgggctgggtctggtcgggttctttggacttaaccaagtgtggtgtccaaaatgcggcgatcgtgaaattgtatgtttcgtatgtccatcgtttgaaataatcgtcattcttaaccgaagcatccatcggatattcaacctgaaatgagaaattctagtttaatctcgagaaaccaagtaatacgagggatctctagtccggacagatcgaaaaattggattcagaaacgaaactaactgcaaacaaatcaagttggtttcatctttttactttgaacaaagtgtaacaaaaacgaaccaaatcttaccaagacaaaacttgatttcatttgatttaaaagataaaaagtaaacactttcattctttgacgccaaattgtaaaacgaaaccaaatcacaatagattcgattcc

SEQ ID NO: 6439 - DNA, 729 bp, Arabidopsis thaliana
tgcccaaatcccaatcactctcacacttttcttagaatttaaattcaataaacggtgaagagctttcatgtgtgcatcaatcccttcaaggtcactcccattgcttcttgttgtatcaatcatcagctcttttgatatcctgtcagtaatttcttcgaccatcttcgagtcatcttccctgcaaagtaaaaatcgaaactttacaatccattcactcaaattaacaataaaaattcgacctttattatcaaagttaggaaatttttaccatttccatgaacaatcgccggagatactcgccaaattagtcaacgcttgcctccatgaaagcactttctcatgatcttctctaccctcatgcttcttaaactgttcagcgacttctccgatctgtctcctcacatgacacggatccacgccgtagaagataggcatgaccttgagcgagcccatgttttcgaaatccataatcttcacgagctcttcgagacaccaacgagacgcagcgtaattcacggagaccacaacgactgcgaatctcgacccttcaatggcgcgtattagctccggcgtaatcctccggccattcttcaactccttatcgtctttaaaggttcgaatgtttcttcgaatcagttctttgtagaggaaactgatgaagctgcggcgagtgtcgagtcctctgaagctcagaaaaacatcaaactttggggggtgtttgaagaatct

SEQ ID NO: 6440 - DNA, 583 bp, Arabidopsis thaliana
catctttgccactacatgacaaaaaaattatgaacgttttggtgactgaattgctactactttgtgactgattagaggtttaattctcgatttagcctgcaattaattcttgatttaattctagataaattgattgtaatttttaatttattatcgacagacttgttaacacataagaaatttgtttttaaaatacaaacaacaaaccacacattcttgttcaattcaaaaccaaaaaccattcatgttcaaaacgaacaaacattcttattcaaaccaacacacgttttcaagttcagagaaggataaaaaattaaaggaccaatgtttggacatcagcaatagcgggatcaatagtttgagactaagggaaggctagaatgtttgggtcggttacgctcaagtacttcttcatgatcatcaagtgctcacctgctcagatgcaatctgcaaagcctctgcttcacgttctgcttgtaaagttttttgttcctttattttgtagttagcttcttcaagctgtgtttgcaggcttgtgaaagaagaagagcctcccgagtatttccgctctagttggtgtaca

SEQ ID NO: 6441 - DNA, 1052 bp, Arabidopsis thaliana
ccatccgatctcgttcagcttcagcaaatcggaccttgactggaagcatttcctgaacataacgaaataaactttataaaagaatccaatatcagagaggaaatatttaaacaaaaacattgtggaagttaagaacccaccccaggaaaggtaaactgttcagttaaagctgcaatagccgcattaccctcttctacctttttgtacttaataaaacagtaagctgcaaagatacattaatatgttataagcaaactgctaaaccccagaagcaagaatatcaagagaaaatcacctgccctttcaccggtcatcttatctttgggtagaatgatctcagtgacattaccatatttttcaaagacctgacggatctgatgtataacacagattgtcacaagtcacacagaaactcatcaaggaaacatgtcataaaaaccataaagactgaaccaagaaactcacatcatattcagtagctgtctttgagatgggcgcaacatataacttggcaatactaccatcagcattatcttcatgtatacaaacgaaagtaccaaagggagttaaagacaaagtctacaccttttgtggatacgtagcagaaaaattcaaaattggagataacctgtagctgattgagaccgtctcttccttaagctgctgccaccgcaaggactcggcggaaacggcggaggagcgttattactctgatcaacgatcatgttctgctgttggccggagtaatgcggttgattgaaacgctgatccctgttgtcgttttgggggtatttgtggaatccaacggcagcgatatggtggtgcggcggcggcggcggatgaatctgatgatgaggagggttgttgtagttgttatgatagtagggaactggtggtggagcaccagggaatgcgtttggggcgcgtctctccatctagaatcctatttgagtcgataatttgaactcgtctcagttgtctcgagattgtgttgatcgggaatttctccggcgccggtagagggagggaaagagttatagcctaggcgtttc

SEQ ID NO: 6442 - DNA, 1745 bp, Arabidopsis thaliana
  unsure (1)..(1745): unsure at all n locations
ccttttaataataaggggatgagcgaccgatttaagtgctcactatttagtcgcaatgtcgtcgctaagtatagtgattgttatgcgatatctttgccacaacatgacaattgttttgtgaacgttttggtgaatgagttgctactactttgtgactgattagaggtttaattcttgatttagcctctaatttatcatcaacagacttgttttttttttttttttactaaatgcaaaattagttaaaaaaaaaaccttgtttacaatatatgcaaccttaatatgaaaagtttctgaaaaagaaaataagaagaactagaccatcgcgttgctaacagaatccctcatgatgtttgttagagccgaggtgggttatggtgcttaacagattgtgtactgttcgatcactgagcttgatgaggtggccaaagtgtgtggtaggtcgccatgccttctaccgttgcgttcaccccagatagagtaagttgtagcctgaaacacataacagatgaggaagcgtgtagatgggacatgagaagccgattagttagtttctcccacacccgattggagaagggacatgagaagaaaaggtggtcgcgagtttcgcacggactttggggttgagttcttgaaccagatacctttaaaccaaagctgcagaggacttggagacctttgttgagcccaagtttctttagcggagaatttgggtcgaaacttgtctcctaagccacgccaaagagcaacatcgttctcggagcagagaactctgtttctaaagcgatctagtttgagctcaaccttgtttaggttttcagcgtgatggagtctacgctggtgaaagcgaagagcatcgattacagtggatgtagattgaagtccaaacggtgccccaagagactgtgcaatggtcctagtgaacaccacttatcaaaccagaaagaggtctgcagaccacttcttacttccataaaacagaattgtgttgtttgttgtcgatattggagaagttttctccacatccaagagccagattgtgcgttatgctttatagaccaaaaagagccattccagagaagttcacgtttaatccaatccacccaaagagaagaagctgaagtgatgcgccagacgagtttaaaacaacaaactctattagcctcaacaaaagatttcagccccagccctccctccttctttggacgacatacatctttccatgcaactttagctttctttttgttcaagtctggcccagaccaaagaaaagctgattatatcgtttcgatttcttttatgcatgcacttggaagacganaacctgaaatttattaggctagacattaccgagctgagtagttgcaacctccttgcataggaaagaaaccgattcttccaataactgatatgtgccctgattttttctagcaagggcaggcaatctgccagtgacatatgcttagtcaagagaggtaatcccaagtaccagacacgttaggtaccagtttcaaaagaaaattgctaaaacataagaaatttgtatttaaaacaagaacaataaacaacacattcttgttcaattcaaaaccaaacgacgtatatgttcatcactcactaccatcgaactctccgatcaagtgtctcgctctaaccccttaaggatctccttcttctccggtcaagtcttcggctccacagacgttgggtattgaatctctactgcaatcaagtctctgagagac

SEQ ID NO: 6443 - DNA, 866 bp, Arabidopsis thaliana columbia
gatacctgtgcaaccgatttaagtggtcactatttagtcgcaatgtcgtcgctaagtatagcgactgttatgcgacatctttgccacaacatcacaattgttttgtgaacgttttggtgattgaattgctactactttgtgattgattagaggtttaattcttgatttagccttcaattaattcttgataaattgattataattctaatttattatcaacagacttgttaacacataagaaatgtgtatttaaaacagatccaacaaaccacacattcttgttcaattcaaaaccaaacaacctatatgttcaaaacaaaacaaaaattcttattcaaaccaacacacgttttcaaattcagagaaggatggaaaaggtacctatgtttggacatcagcagtagcgggatcaatagattgagactcgaggaaggcgagaatgtttgggtcggttgcgctcaagtacttcacgatcatcaagtgctcagctgcaatttgcaaagcctcttcttcacgctctgcttgtaaagtttcttgttccttcattttgcagttagcttccttaagctgtgtttgcaggcttgtgaaagaagaagagcttttcgggtacttccgcttctcgttggtgtaatttcctactcttctaactttagaatattctcctatgtcgtttgtgacagtagagtgcataaacaaaacaaagaatattagttcttaacagtttttcaaaacaataatataagaaaaagcaaacataaagaagcacactacttgaaaaagattttgtcatcctcttcttaagatagctctgatcgacgcgaagtacatcggaagactcgtcattctcaaggaaaaccaacttagct

SEQ ID NO: 6444 - DNA, 1132 bp, Arabidopsis thaliana
tttcctgcaggaataccttcacttctactgtgaccctcccctctgtcacagagacattaagtcaagcaatatattactcgacgagcactttgttgctaaggtgcgtctgcatcctttcacatcaactggtcactgacttatcaattcgttttacctcttaaagaattgacctgtgggtgtggggttatgtggtgcagcttgcagattttggccttgcacatgcttctagagatggctccatttgttttgaacctgttaatactgatatccgcggaactccaggtcaggatactaaggaattaactactcttgaaatattgagcaaaatctaaaaccatgatatctgaatttcaggctatgtagatccagagtacgttgtaacacatgaactaacagagaaaagcgacgtgtacagctacggagtggtgttgctagagatcataactgggaaaagagcggttgatgaaggtaggaacctggtagaactgtctcagcctttgctggtatcagaatcaagacgcatagatctggtggatccgagaatcaaagactgcatagatggagaacagcttgaaacagtagtggcagttgtaagatggtgcacagagaaagaaggcgtggctaggccatcaatcaagcaagttctgaggctgttgtacgaaagctgtgatccgttgcatctcgggcttgcaatggcagttgaagagaacaaaggacggtcactgagaggtgactcagggttccaaagtggagacatccgtggcttggcttcttcctctagtactacttcaaggtcgcattgtagccggagttttctgcttgagactggctcccctcactctccaccaaatggtctctctttttgagtgagcagagacaaattagtcacattttttctagaaatttgtcacttaggatcatcctaactgttttctaattgcagttttgaaagatgacatatgttttccaccagagtcaagaatgatttcgttgccactcttaagtaataatggctaaacccaagttaatgacacaagagaaccaaatccggaatacaaagtcagacatatatataaacaactatgtcttttagaaacctaacaacagaaagccaataagcaatacagaggat

SEQ ID NO: 6445 - DNA, 994 bp, Arabidopsis thaliana
tcacagcaacaacagcagccatatctttaccagcagcagctacagcagcaacttctcaagcagaacttccagtcagggaatgttcccaatcccaattcgcttttgccatcacacattcaacaacagcagcaaaatgtgctgcagcctaatcaactgcattcatctcaacaacctggtgttccaacatctgcgactcagccctccactgtgaactcagctcctctccaaggtctccacaccaatcagcaatcaagtccgcaattgtcttctcagcagacgacacaatctatgcttcgtcagcatcaatcgtcgatgctaaggcaacatccgcaatcacaacaagcctctggtatccatcagcagcaatcttcattgccgcaacaatcaatttctcctctacagcagcagcctacacaattaatgcggcaacaagctgcaaatagctcaggcatccaacagaagcagatgatggggcagcatgttgttggggatatgcagcagcaacatcagcaaaggttactgaaccaacaaaataatgttatgaacatacaacagcagcagtcgcagcagcaaccactgcagcagccacagcaacagcagaaacagcagccaccgcgccagcagcagttgatgtctcaacaaaacagcctccaggcaacgcatcagaacccactgggcactcaaagcaatgttgcaggattgcagcaaccacaacaacagatgctcaattcccaggttggcaattcgagtttgcagaataaccagcactcggtgcacatgttatcacaaccaacggttgggctgcaacgaacacatcaagctggccatggcttgtattcttctcagggacaacagtcacaaaatcagccatcacaacagcagatgatgccacagcttcaatcgcatcatcagcagctgggtttgccacaacaacctaatctgctacaacaggatgtgcaacaaaggctaccagcttcaggccaagtcactggtt

SEQ ID NO: 6446 - DNA, 727 bp, Arabidopsis thaliana
gttcaagaacatgttccaactaggagtttctgaaacattcaagagaaggatgtccagttttataggatacacgcagtggcaaccaatacttcttcgtttaagcaccatatctgatttgcaacaatctggaagaacaacaaataaacacaatgaatcttgaatcaaaaagttattcaaattcaaaatggaaaagagagaaagttgaacttaaattatccttgtaaaggctaacattgatttagttatgagaatggataatttcttacttgaaatggagggcgacaaaggtggctgagttaaggcatcaggaagaacaccattgctagattgtgctggagcaatatcagccaagccggctccaggagactgagcattccttttcatggaaggtttggagaaatgtgagctggtagggggatgatcagaagcgaccaaacgactataagggggagaatgctgaggtgcttctgcttgttgtggtgcgaaatactttctgtgaaaccgcggaaattcagctggtaggggcagatcagtgataactggtgaagttgaaggtgataacgttggtgaaactggcagtccttcatgttgagcatcagctaattgaacactgacgagagaaaccacacaatatacaataaccaccgccttcaacgccattattaggtcatctctttgtgaatctgggattgttatatcgttaaaaacagtgagatagagctaagac

SEQ ID NO: 6447 - DNA, 572 bp, Arabidopsis thaliana
ggcaagtgttttgcctctgctaaacctgtttggttatccgatgtcgtcaattcgggttctgattattgcgttagatcgtttcttgctaaatctgctggcattcagactgttgttttggttcctactgatcttggtgttgttgagttaggctcaacttcatgtttgcctgaaagtgaagactcaatcttgtctataagatcattgtttaccagtagtttgcctccggttagagctgttgctttacctgttactgtagctgaaaagattgatgataacagaacgaagatattcggcaaggatttgcacaattcagggtttcttcaacatcatcagcatcaccaacaacaacaacaacaaccaccgcaacagcaacagcatagacagtttagagagaaactcacggttagaaaaatggatgatagagctccaagagattagatgcttatccgaataatgggaacaggtttatgttttcgacccaggcaccaacaacaacactcttctgagtcctacttgggttcacatgagaactcacgaggccaatcacgtgaaggaagttcaagcacggatga

SEQ ID NO: 6448 - DNA, 365 bp, Arabidopsis thaliana
  unsure (1)..(365): unsure at all n locations
caacaacactcttctgagtcctacttgggttcaacctgagaacctacacgaggccaatcaacgtgaaggaagttccaagcacggatgaattcaagtaaaaacctttacagcaatcatcgcaaaggctgcatcctcctgctcaaatgcagatagatttctctgctgcgagttcaagggcttcacagnatagttcaactggagaaggaggaggggaatgggcagatgcagtgggtgctgatgaatctggtaccaacagaccacgacaccgcggaaggagtcctgccaacggaagagcggaagtttgaaccatgtagccgccgagaggcagaggcgtgacacgcttaaccagcggttttacgctctga

SEQ ID NO: 6449 - DNA, 879 bp, Arabidopsis thaliana
tgttgacggcgttgactttaccgaaaaattccggttagaagattccactctcttagccaatggtcaagtcgtcttaaccgatgttccggttaacgttactctcacctcttcaccttacttagtcgacaaagacggtgtaccactcgacgtctctgccggttcattcatcgggtttaacctcgacggagagcccaaaagccaccacgtggcatccatcggaaaactcaagaacattcgtttcatgagcatattccgtttcaaggtttggtggactactcattgggtcggatcaaacggacgtgacatcgagaacgagactcaaatcatcattcttgatcaatccgggtcggattctggacccggatccgggtcgggtcgtccttatgttctcttgctacctcttcttgaaggctccttccgttcatcattccaatccggagaagacgatgacgtggcggtctgtgtcgaatccgggtcgaccgaagtaaccgggtcggagtttcgtcagattgtgtatgtccatgccggggatgacccgttcaagctcgtgaaagacgccatgaaagtgattagggttcatatgaatacgttcaagcttcttgaagagaaatcgccgccgggaattgtcgataaattcgggtggtgcacttgggatgctttttacttgacggtgaatcctgacggagttcataaaggtgttaagtgtctcgtcgacggtggttgtcctccgggattggttcttatcgacgacggttggcaatcgattggacatgattccgatggtattgatgtcgaagggatgaatattaccgtcgccggtgaacaaatgccttgcaggttggtttattccggtttagactttcaattttatcgattgtt

SEQ ID NO: 6450 - DNA, 1294 bp, Arabidopsis thaliana
  unsure (1)..(1294): unsure at all n locations
gtctcggtttactggtccccgtttttggtggccggtttagagaaatcgggaaacttggaccacaatgtattgcacatagaccgcgtggatgagagatggggcaatgatttagaacgttttgatacggtcgtagtctctgtgggacattggtttctgcatccagcggtttactacgagtctggttcggttttgggatgtcattcttgtgaaacaagtaactgtaccgaggtagggttttatgatgtatttagaaaagcgataagaacaacgttgagagcggttgctggaagtggtcgtgaggtgatcttgacgacattttcgccatcacattttgaaggacggccttgggacagtctcggcgcatgtaacatgaccaagccgtacgaagggaaggttttagaaggtctggacttggacatgcgcaaaatagaaattgaggaatatacggcggctgcggctgaggtgaggttagaggtgttggacgtgacggctatgtcggtactgagaccagacggacatcctggtccgtacatgtacgcggacccgttcaagaacggtgtaccggagagaattcctaatgattgtttgcattggtgtctacctggtcctgtcgacacgtggaacgagatcatgatcgagatgttgcggcgatggaaggtttaaatgatgaacattgattgttgaagatcctatgatatcattcatttacacgcatatgacaaaagaacaaaatgtgtaataattttttgggatttcaaaaagtagctaggtagtttattttcttggattagatacgaaaaaaacagacatggatgatactcttttttgttggttatttcttccgttcttcaaaccatggaggagtacaaaaaatagttgaacatttatttattttttgcaatatattcaaattaagtaattacatgtcatgtatacgtagctttttcttgatttggaataatctttcaattattggcattaaactgtccatgtactacagtagccactagcatgcccgttctattatattagggcgtagatagctgtgataatgattagaattccagttgtataacggactgcgtcaagacaaaaaatagtaaaagtaattaatggagttgttgtaacttgtaataattatgtcatcgcaaagaacattgttataacaatttgaatagcatttgacctattaactggtgtattagatttgagtacattataagagagttttgtggaagcaagtggcaactggcaagaaagggatggcactgtgaatangaggatatttgagatg

SEQ ID NO: 6451 - DNA, 694 bp, Arabidopsis thaliana
cgtaccttaatttggagctgtagatatttgacgtattgtactgcgtcttccaacaacgtgctaatatcaacctgatacatacatatttaacacatttaatttacttagtaatcatgaaacgatatgagtaagaagtgatgtggttacgttgtactaaataagtttgcatggttgaaaaaaggtttgcatgaatgaaagacatatgtacctttgttccattagggacgagatgttgcaaaatccttagcctctcgtttatccacactcttctttactgcaccatcatacaatggactttgtttaattggttcagctatcataataaattttgttatgtttgcacaatgcatatacataagactcatcatcacatttgtgtacatgtttgaataacatcgaagccttaatttttaaagtttatgtgtaaattacccttgcgtaaaggctttgaggatctgctcgcgcgccgcggctggccctagtcttgccgttgaggttgagagccttagagtcctcgccatcttctttggacaagaaagtgtctccaccgtttgattcgtcatccgaacaacaagtcttttgcggcttaagtggtttggtctttctcttccccgcagccttctccgtatattcttcttcgccgctattttcattttcgccactcatctctacgcatttctggctccttcgtgcc

SEQ ID NO: 6452 - DNA, 822 bp, Arabidopsis thaliana
  unsure (1)..(822): unsure at all n locations
cgggaagaagacttggacaggggaggattgttcgccgccaaacgattgggtccgtaagacggattggactttcagatttgaggaccttcagggagagacacaacccgctcaccagggccgttacgaggaaccactgttcctccttgactgagagagagagactaggaacgaccatcaactgatccgtcgagatgactatgtctctgatcctctgccattagagccactcgctgattttcatcgaggaggggacactggtcaagttcgtgacagatccggcgacagtaggtacaccatcaaaagagcttttcataaaatagttttactttaactacttcaccatttgggagttgagcattcttattaaacctgaaagggacgtctgccttaacagagatttggagtcttccttttgaagagtcaactcgcctaactgctccaatggaagcaccaaaatttctcagcacttcctcctcccagaattcagtagggattccttcagttttgatccagaaggtcatcgtatcagggaaggaaatgccaatgtgggacttccatctttccagcgcaaaggaccacttactgaagtggcaaggtctcttattaaggaccttctgaagatcagtctcagattcaaagaagaattggaaccgggaatctccaagagaaactccccggaccctcccttcgacatcccatatatttgggagaaaagagagcaaagcttcagtactccgaccagcttgatgaaacattctaccaaccaagctaagttgaagacgacctaggagagccgaattgtgancttgaggaaggatgaca

SEQ ID NO: 6453 - DNA, 1247 bp, Arabidopsis thaliana
gtcgtcgtcctctttctctaattaaactattatttcccataatagaaaacactaattttttgcctttttggtaaggaaagtaacatagttgttagtaaatatgaattaggaaataatatacaaagtcttggtcctcttctcatcgactttaaaatctctttctcccattacaaaccaaaaccattagaagatttcgaaaaagaaaaaaaaacacctccacaaacaaaacaatggcggtgaagaagaaatcatcttggagatcattgatggttttgtgtttccaagatccagacaacatatattctcccaagaagacaaagaaagatgatggtgaacgtgtgattaccaaacagaaatcgtttcttggattgtcgattctagacataagtaatccaagttccactaccttgtccgaagatctctcaatctccctcgccggctcggatctccacgtgttcacacaagcagagcttagagtcataacacaaagcttctcttctagcaactttcttggtgaaggagggtttggtccggttcataaagggttcatcgatgacaagctccgtcctggtcttaaggctcagcccgttgccgttaaacttcttgatcttgatggtcttcaaggtcaccgtgagtttatggttcgtacattcatttcattagtcctctgtttaagatacaaaaatattgagtctaaatgtctaactaatattatttttggggtgattttttcagacggaggttatgtgtttggaaaactaaagcatccgaatctggtgaagctgatcggatattgctgcgaggaagcacatagacttcttgtttatgagttcatgcctcgtggaagtttggagtctcaactcttcagaagtgagttgacttttttttattgtaaccatcaaatagaaatgatcatttcattttaagaaccagaactgatgaaattgtttcagggtgctccctaccgctgccatggacaacgaggttgaacatcgcttatgaagctgcaaagggtctacagtttctacatgaagccgagaagcccatcatctatcgcgatttcaaggcctctaatatcttgttagattctgtaagcaagcattcttcttttttgatcttaagggttacaccaaactagaccattttagttttagagcggacaataacctaaaatggacatatttgtttctttctattcaaattatggtggaaccgcaaattacatccatggtcaccattcaaaatta

SEQ ID NO: 6454 - DNA, 394 bp, Arabidopsis thaliana
gtgcatgtggttctggtcgagctttgcggtcgaagtactcggagtcggggggagagggagggtagaaattctcccagttccagacagaggaagcttgagatggagagcgagagtaagtagagttctggtgagcagtgggatagaaactggtggcaggagaggaagaaggagaggagtcggagagaatgtgtggaagcctcctaggcctagtaggcttaggcttgctgcgatgggcggaagagggggttctggggaatgggaagaagggacacgtggcgcgtcctgactggaggaagggcggagaataacagcgggagtattctcggaagacggagaagggctctgcggcggcaaaggaggagagggcagagcaagtgagacgaagggagcggca

SEQ ID NO: 6455 - DNA, 1274 bp, Arabidopsis thaliana
tggtgagaacgactcctcaaaacatatcctcccatcagtcattccaggctgtgtggtttcttggttagcatttgatgcagaaccaagattgaagccaaccattccttggttgttgttcccgccttcagagctccctctctgagtagatgtactggctgatggttttgtctcttcaagagggattgcaggcgtgtgtccctggaacagagctatgtgaccaaacaacttgtctttccttgaaaatgttgtaccacaggaacaaagccacttgtttttcccgcagtgcttctcgtgggttttaagatctgcaatgacagagaatttcttggtatggcaccggctgcaagtgaagcttttatcgcagtgggtgcgtttatagtgattcttcacgcatagaatcgttttcaaaggctggaactttttgtgctccttgttacgtttgcaaccaaggaatgggcacgagtacctcttgatcagcatcggctcagacccgggtacggattctttgttcggtttcgccagagcagctgctgttttgtactcatctccatgccctctcatatgcatcctcaaattcgcgtctctcttgaaacccttgccacatatcgtgcagaagtgagtatgcggtgcgagaatctcttctttctcaagctgcaatatctcatacgaaccgggaggaaggttctctccttcttccacatcatcttcatctttcatctcatgttcctccacaacatgaccttccctctcatcaacaagaaccggcttaggcaaatcgaactctcgagcaccacagttgttattgttctgactctgtgaagcaacgttattagcctcccttacataagggaacacggctgaaccgggctgcccagtgaatggacccggagctgttgacatattatgcttaacagatggaagaagactacctgcagttgaaataagctgtatgataatggaagtaagatccgtcgttataagctgctgctgctgagccgcgagctcgtcttgacgaccttgaagctgcccaccacgaccaacaagaagatgaacaagatcctgcagctggtgaatcttctgctccataaaagaaaggttactcaacatcgtccttggatcccacgcttgagccctaacaccttgtaagaaatcaacatttgcttgaatgctctcttgcaatccaggctccacacccatctcataatccaagattgaagcatcttcccacttctgctgggacgtaaaacctgcgaatgtcgaattcccacagtctg

SEQ ID NO: 6456 - DNA, 1058 bp, Arabidopsis thaliana
tgtcaacctttctccacacaagtatctattactacccaagtgatcctcaatctcatctaaggtactaaagagttcattcactgctccatcatacgcttcttggctctgcgcaaacccgcacctttcaaaaatcaccacacatgacacaacaaacaaagccatcaactttagcaacaaacacacattgcagcatcaagaacacaagctacgcaaaaaccgcatcaaatgtgaacaattcagttgctttctatagcttttaatactaaagagttcattttacagctccatcatacacttcttggctctgcgcaaacccacacctttcaaaaaatatcgcaagcaaattaccacacaacaaagtcatcaactttagcatcaaacacacattgcagcattaagaacacaagctatgagctaaacccgcatcaaatttggaacaattcactccattcctatagcttttttgatatcccgcttacttgtaaacgccattgtaacattctataaacattgtaatgatgttttccaatttacctgtaaacgccattgttaactttaggatacacaatctgattccaaccttgtatcatctctttcaactctggtggcgagagatccaagttatcatttcgggccaatttgtttaaacctgaattgaagaactcgataatatcatagctttcgttacaaacaacatctttcttccttaaatcccacagcattggaacagtacacctcccatcgtaacctccacttctagatttgtacacttccttaagattccggcaccggtttgctttatccaaactcgggataagtttatccttatccttgattgggatattattattcttgaattcccatgatccatcttgaccaggtgatgcgattgagaccggaacggcgtcgtttaaacccttgagagcacggacaattagggttcggtgagccaagggcaaggaagaccaacgtagaggtggagctcggaggaagcagcggaagtgaattgggtcgggtcgagacgaaattttgaagtggggcgggtgtatgaccggatg

SEQ ID NO: 6457 - DNA, 698 bp, Arabidopsis thaliana
accaggtctgcaagagtggctttagcaagagctgtggtatcggtaacttttgcagattcctttgacagctcgaatgaagaatgtcttgtcctgaaagaaaaacattatatggaatcagtcaacgataaccacaaaaataaacaaatacaagcatgaagaatgccatacttgggaccgtcatctgaaatattggtcagagggccgaccgctgactcgaaattttcttttgttaaaaccacacaaaccacttcgccaactgcaaccacacttaaggaatctttgagttcgccaagaagagcccattcaccaaagtaacttccttcatgcttttctatggagacttctgttccgatttcaagattgtcatactcgttagtgattccagttgtaaggcttgaaacattttgactctccaacacctctgtacagaaagatatttttacgcgtcccttctggataacatacaggccctgaagtttttggtcctatacatgcacagaaacgtgtaagaaagaatctcttggagtagagttatttagtctttacaaaaagcaaaattaacttcaccttggtaacaattgtttgtccatcagaaaagcaagcttcggaaagagactctgcaacatggcttagttgcaaaattgtaagacgggaaagaagatcgacagaacgaagaagcttcaaggatgctaagtttg

SEQ ID NO: 6458 - DNA, 740 bp, Arabidopsis thaliana
caaaaaaaaaacaacaataagatcaattataactaaaatctcttaatttggacaattttttttaagaaaaagacgtatatcaataaatatataaataatctgaacttaaatcaaactaatctttaggttcgtaataattaatagaaaagattttggccaaaagtattttgtagtataattttactaattccactaacaattagaataaaccaatccctaaagaataaaacttcacaaagtcaactcttcactttctctctcccacctatgtgactctgtctcttcttcttcatttggttccaacttccaacatatattcaaccaaactcaattctcaagcatctccttttcatgaacaacgccgattcaagtggctagagaaaaacgacatcgttttaaagattctaatctctcacttctcttaaacaaatgggaaatggagtcaccactttgaccggttgctgtacaggaactctcgccggagaaatttcccggcgttacgacgtatctctcgttcacgatggacttggccactctttctgctatattcgaccagatctccccggagtagtattaccttcgccggagtctcctctccgatcagatcatatccaagaaaccactttccgttcaatctccggcgcatcggtcagcgcaaatccttcaacggcgctctccggagctctgtcatcggattctgattgtccgtacagctccgcagtctcgcgctccgcattcga

SEQ ID NO: 6459 - DNA, 987 bp, Arabidopsis thaliana
ggagaaaataaaatataagattactacggataaaaaggcaaccattggacggaaatattgcagtcaaagaaaaaggcacaagatgagagatacctcttaaacaggaggcaacacttccattagccatgtagggataaacaagcaatctttcggttggagtcatgcaaaatccacgaagccgaagcaagtttctgtgaaccgccatactaatcatctcaacctctgtctggaactgcagttcgccaccttgggtgcgctcctcttttagccttttaacggccactaaagtaccatcagctaaccgtcctttataaactttaccaaaaccacctctacccaatatgttcttgttgctaaaattatccgaagcaacttgtagttcacgcaatgaaaacctcttcagttgtcctaaatgaacttctgggtcctcttcagctgcaaaaagacggtaataaaaaaaaatcagcaagagaagtgttaatgaggaaacaggtaaagcaagtttagctaacctggtacatcaaagaagtggtcctgcggctttttccttcgccaccaagctagtgcaatggccggaacagcaaatagaagtgcagcacctgcagcaactcctcccgcaatcgctccagtaattctattactccctgcaagaatgaaatgaacaatctctttcttaatacttaatggatctgcttaaaatgtttacttattcagttgaataacatttcaaagacaaagacatatacaaaaaaaaacctgcaggtgatggcggtgtaggagagataggaggcggtggagatgcaggaaggggagtcaacttggtgttggcaaaactgcaaaatttcaaataattaatcaaacattctgacctctccaccaagatttaaactaggagcaggatcaaaacctgattggagtgaaagtgaaaggaccattacaggaatactccggtgagaggattgtttgagagaccctgcattataagat

SEQ ID NO: 6460 - DNA, 679 bp, Arabidopsis thaliana
cataagcgatttttcactattttatcattttgcatacgcctgtcaatctggtgagcggttgaatcaataaatgtgaatcaatatttgcagcagccttatctcttgctcgacctggtgtatcatcatttggagcctccaagggtttctggaagcttgaaaaggtctgaagtttggtactcttacgctcaagtaatgaactgtctcgcctaagaggtggaggcgctggaggtgctggatgtgccggcgcttcccaaccagctgcccctgcagctatcattgccagtgccattgcagaaggaggcgatgcaaaagcagctgcccactccggagaaatcatagagagagccgcctagaataaaaagtaacagtttaataccttaggctaagggatgaagcagcactgtcagaagctataaatatatgtgatagaaactacagggtatgtgaacagatttgtggaacctcaatgggaagtgcatcagcagccaaagcacgagtatcaacgacaaggggattcacaccatcaccagtggaaagttcatgaataccagccaaaagaggcctccatcttcggagaattgcaacaaatggtggtaagatagcctctagatactgcttacgtagtggtcttttatctttgctaacagcattccatacctgcaacagattttgaacaaaa

SEQ ID NO: 6461 - DNA, 921 bp, Arabidopsis thaliana
aaggctttccaacttcttctctttcaaaacctctttcacctaatcacacccagaaaagaaacactcttctttattgcaaaataacagttttgaactcaaaaatatgatcgggaactattaaaaacatacccagtcgagtaacatgatatcatcatcatttgcaagccgagcaagatcgaaagccttttgtccagtgatgagctcgagaagcatgaccccgtacccaaaaacatcagtcttctcagaagattttcctgtcgagaggtactcgggcgctatatggccaattgtaccgcgtacagcagttgtcacatgggagtcattataattcattaattttgcgagcccaaaatctccaacaacagcttcaaactcttcatctaacaatatattagcagctttaacatcccggtgaatgattttttggtcgcaatgatcatgtaaatacgcaagcccccttgctgatcccagagcaatatgctttctttttggccaatcaagtgctggattgccttcaggacgctctaaaatagaaaatcaaggataagatacttcccaactgaccaatcaaaaaccagtcaaacaatactataggacaaagttgtggtacctcttaaacaagaagcaacacttccattagccatgtagggataaacaagtaatctttcagttggagtcatgcaaaagccacgaagccgaagcaagttcctatgaacggccatactgatcatctcaacttcggtttgaaactgcagttccccacccttggtacgttcttcttttagccttttgacagccactagattgccatcgcgtaaacgtcctttatacactttaccaaaaccacctctacccaatacatttttattgctaaagttatcagtagcaactaacagttcacgcaaggtaaaccttttgagt

SEQ ID NO: 6462 - DNA, 934 bp, Arabidopsis thaliana
ggacaaagcattaaaatcttttccataaactgattttgtatccactggttggagacattccatccacgccactcccatagcttcagaagtgttccatctctgtaaacgctccatgtcaccgatattcctccgctgtgcagatgttgccattgcaacagcgctcagacctcttcctgaaccaatctttgcattccgttcaagatctcgtgcggctgccaaacgtgccgcctttgcagcagctttgtctcttggtcgaggtggtgcattgttgtttggaggctccagtggtttctggaagcttgaaaaggtctgaagtttcgcagtcttacgctcaagcattgaagagtctcgcctaagatgtgaaggtgtaggaggtggtggtgcttcccaaccagctgcccctgcagctatcattgccagagacattgcagcaggcggtgaagcaaaagcagcagcccactccggagtaaccatagaaagagcaccctaaacagacaaatttggatagctcaatctaataactcaagcataacaatattggtatctcatcgactagaaataaacagtggccaatctagaaacatataactatgaaagcaactgagggaatgcaaacagctttaagctacctcaacggggagcgcatcagcagccaaggcacgatcatcaacgacaaggggattcataccatcagcagtggcaagttcatgaatgcccgccaaaagtggtcgccatctccggagactgcaataaatggtggtacaatagcctctatatactgcttacgaagtggtcttctgtctctgctgatagcatgccatacctacacagatttgttctggaatcagaaagcgaagaaagacaatatgtatacacgaaggacacttgacggcatcagaagaaagacaatatatatacgcacagatgacaactt

SEQ ID NO: 6463 - DNA, 549 bp, Arabidopsis thaliana
tgaaattagctcctcatatatatctaacatgaaagacacatcctgtaataatgacttctcttagagtgaaaacatcaacactacttctactgacatttagcaagcataaacacatatctccaagaagaaacatctcgtccataaaaattctcactttctagcacccattattagataaaacatttccagctcatgaatcatggagagcaagagttaacccaagtggcaagtgtgcagaaccaaaaaaaaaatcataatacgttcttcacactcattcttttgagctgagcatttcaacaaacatatagtaggcacacacacgaagaaaaaatacaaaacagaaacacacctttccaaatctgtaaatggcgcgttcaacgagaaagcaaacaaagaccaaaacagtaacaaccgaagcatcagagtaagtcggcgtctctgcaagagaccttccttctttcatcatatgctccatctccggcgaggaacttttctcccgagaaaaatggagaatcaatctgcatctgtgattaagaaagtttagctttt

SEQ ID NO: 6464 - DNA, 565 bp, Arabidopsis thaliana
ttttctgccattgtttaagcatctgacggatccgaacaacgcttccgatcttattgttcttccccattgatatcgaacaattgcttcttgtggattgcttttgcgttttttggctcgcttttccccagaaaatgaagggaaagttggagagcaaaaaaaaaaaaaaaaaaaaaaggttagagaagagacatttttgctttaggcgttgctttcaccaaattttggaataatacggcaagcaggggaatattgaagggagcgttacggtatttaaaggttaatcatttaggtttcattttgcccctctaacgtttgctaaattacgattttactcttctctatttatggttttttgattttttttctctttttttttccttctttatcttataaataaaagattcatagctctgtttttgttttcattctttttaacaaatttttttcagaaacaaaattggtcaacttttcataattggtttgtgtgtattttttttggtaagaatattgaattgatgcatatatcaatttttttgtggttaatatataatatcttactcaacac

SEQ ID NO: 6465 - DNA, 579 bp, Arabidopsis thaliana
gaatctgctgaaatggggtggagctttacttgaactttcacagttccagcctattcctgaagctaagctcatgttaaatggtatgatctcttctttaatgtcttaaaataaacgcctcaaattcatctttgctctgaaatgtaacgaaatattattgatcatgtagatgctatttccaagttggaagaggccttgacaataaatccagggaagcatcaggctctttggtgtattgccaacgcgtacaccgcccacgcgttttatgttcacgatcctgaagaagcaaaagagcactttgataaagccactgaatatttccagagagcagaaaatgaggtgcattttcagattttatgcttttgaatttgaaacttttatgttgttgtgagtgctgtgagaccaacttcttactattatattatttcaggatccaggtaatgacacatatcgcaagtccttggattcctcactaaaggtattatttcaacattccattttcagagtcaatctttgtgtacgcaaattataacattaatcatggagacaattgctgctgttataataacaaggagagacatt

SEQ ID NO: 6466 - DNA, 646 bp, Arabidopsis thaliana
cagaggatagaggatcccctcaagtttcccgtgacaaggattcacataggtgtgtgtgtgaaaaagagagaacgagagacaattgaattaatttaaagacccgaagcaaagacaagattccaccgaatgtcattatcactagtgcattttaaccccacatgcgacaacagagcgtgacataaaagcttttccatatttttcaaaatgacacagctttcaaaattacaaaagtgacttcgaaataagtgaaacgattcataagaagaaataaattgaaactaggttatatgattatacataaatatagtcaagaacaaggacctacctgttccatcattaaccgtgacactttgtcacttagcttcatctttggccgcagtggcagaaacgtaataagcaacacagaagagggcatgaagaaaacacaaaatccctccaatggagagaaaatggtgatgtgtgaaccacaagaggatcttgacttactgttcgacatcgtcccaatcactatactcccaaatccaacagcgaatacgatcctgtgattacccagccaatcatgtcattttacttggaccaacaattattaatgccaagaagattttgtattaacgtccaagtgaggacaagacaagcgatggagatt

SEQ ID NO: 6467 - DNA, 1029 bp, Arabidopsis thaliana
cttgaacagaccttcgactccacgggttaaattcttgacggctgtgtctttctgcgccaacatagcaggaagatctacctcaaccgaagagaccttaacaccatggttagcaaaaacgtgctttgcttcatggtacatgtgagaagagtgaagaagggcctaatacagcagatactagactagattatgtcatatatattaatcaaatctcaaacagagactaacacaatcacaaaacaaaaaatgcgaggatcgtgatccagcatatgcaacgagaacaaaatattttcagatatacaaaaattcaaagacaaatagttccatttccgaggaatcaagcacaaacagatctgaaaaataaataagtatcatcatcacacaatcatttcttaaacctcgaaattaatctaacctcagatcgaatctaaatgatgatcaacgagcaagttccacaggagacgaatgaaaatcggagaaaatttccgacgaatcaaggtaatcggaaaaggagtttctaaaatcacctttgaaggaatacagccgacgttaagacaagtaccaccgagagcgactcgcttttcgatacaggtagtcttaagaccgagctgtgccgctttaatcgccgccacataacctccaggaccgccgccgatgatgacgacgtcgttgtcgtcggatcctgacgaagcgaagccgcgagtgagggagaaagagaatctgaaagcatcagtgggagaattagagatgtttctggtgagaaagtacgcttttctcctagctaagctcgccatcgccatcgttattgttgttgttgttgttgttttgttcttcttccgtcgaagtttctgagagagagagagagatggagaagagagactttgggctctttgaaaagtcgaataaagacgaaaacaaaaaggacctcttcgctttttccctgatttttttctaattttcgctaatcataactaagaggatccagaagcaataagcatattattatgatgatataatataaccctaataatc

SEQ ID NO: 6468 - DNA, 734 bp, Arabidopsis thaliana
taggatctagtgactctactcggtggagaaaactccatagatatcataatagccgcgcaagctcttcactacttcgacctaaagagattctaccccatagtgaaacgtgttcttcgtaaacaaggcggtatcatcgtagtttgggtttacaacgatctcatcatcaacccaaaggttgattccatcatgaaacgtcttgtggattcaacattaccttacagaaacccgactatgaatttggcgtttgatggttatagaacaatagagtttccttttaaaaacattaggatggggactcaaggaaggcctaaagctcttgacatcccacacatgctttcgctagatggatttctagggttcttaaaatcatggcagcctctagtgaaagcaaaggagcaaggagaggatcttttaacttcttatatgattgatgagtttaaggaagcttggggtgatgatgaacaagtcaaggatgttcactacaaggcatttatgcttgcagggaaactttaggtaattaatatatgttcccctttgagatatatattaactatatgtcatacacgcatgtcatcaatgatcaatcgaattaggattgaaaacttatgtttaacaggtcttgagagcaacctggttgatttaaatgcggatcattactttgtataactttcgtttctgtataaattaatatattaattaatatatttatagcactgtaaatataaagatgttat

SEQ ID NO: 6469 - DNA, 569 bp, Arabidopsis thaliana
tatatctaaacgtaagtaattcatctaaagatcagtcttaattatctgttcctctttatgtctccagatatttgtctttgtggatttatagtaagctagatgattagaaccactagatatctctaattcgtggaccctggattattataggatgggcgtgtcaatgctttctactctaccccttccatatatacagatgcaaaacacgcggcaaatgaggcttggcccctgaaaacagaggactatttcccgtgagttgggtcttaattttttaactccttcatccagattttgcttatatattaaaccaatctttacttcagttatgcagaccgtataaatgcttattggactggatattttacaagtaggccagcacttaagcgttatgtcagagtgatgagtgcctactacttggtatatgttcttccaagtttaaaataatgcacttgaagttgtgttattatccatgtatttaacttaagagtttaggcggcaaggcaacttgagtttttcaaagggagaagtcagaagggtccgaatacagattcgttagcagatgcactagc

SEQ ID NO: 6470 - DNA, 701 bp, Arabidopsis thaliana
gtgaatagatggatcatgtttatagaatctctttcaagtaaatttaatcttattttagttggatcacgttcaagcatccactagcttgtctaaaattgttacgaaataattaatgtgtattcatttattctatagagtaagtggacgaaaaaaagggaaaacgtgtatggttttacagtaactacttacgaattgcacttttcaaataattagctttttaaagaaagctttgtagcttgatccgcattggcattcgtgttttacgtgtagatgtgaattcaagacccaaaagtaaagcgatgaatgcgcctattactacatgctttaaaaagtttttaacaaataaatattttaatctccactaattcagtcacttttcttctccaattcctgctaaaaagttatactatcatctttctataaaaagacgtcttctctatttcttacgcccaacaaactttggataagctattttccattctctgcacgttttcatggcgactcaagattctcaagggattaaactctttggcaaaactattgcatttaacactcgaacaataaaaaatgaagaagagacacacccgccggagcaagaagccacaatagccgttagatcatcatcatcatcggatctgacgtgcgagaagcgtccggataagatcatagcatgtccaagatgcaagagcatggagacaaag

SEQ ID NO: 6471 - DNA, 646 bp, Arabidopsis thaliana
agaagggtccgaatacagattcgttagcagatgcactagcaattgctcaacatcacgacgctgtttctggtacgtcgaaacagcatgtggctaatgattatgcaaaacgactagcaataggctatgtggaggtagagtgccaacttcccctgtgaattgtggttctctagtggcctgttttctctatttgcacctcagtaagatctgttaactttccaggctgagagtgtggttgctacttctcttgctcatctgactaaagtagatcccaccctgaatccaaccttccaacaggcaaataatctcctagcttatacgtatttctcagaagaattaaatcactattgtaaaggcttacattacgtccgtttgataataacaacccaaccttttctcttagtaacagtttggccttccttttcagtgtttgttacttaacataagttactgtccctcaagcgaagtcaacttatccgatgggaaaagtttggtaagcaaaaattattatccctatgggctttcagctcgtctataatgtgcttcctccacttacacttcttttcctctctgtagatcgtattggcttataaccactaggatggaagcgagtggacatgtcggcttctgtgagcaacaagtcttgttg

SEQ ID NO: 6472 - DNA, 769 bp, Arabidopsis thaliana columbia
tgtagtcatctattgccaaagtacaaagttagtttctccattttctcttaatttgcatagttcaatgtagtaatagtactaatatgtgaaattcttgatctgatgcagatgtacaaggaacatgcaagtacgggacactggtcgaatagcgttttgggaactggaggagttatcttatgaatttattcgtggctcgtactcagttgattcatccaaaggtacttctgatcatcatatagtcaaagtcgatttagttataaccaaagagcgatctcgaggtaacttcaaacattcacgcaagaaagcaaagcagaagatctttcagataaaagctaatttgatgtcgaaagatacatggaaactaggaaatctgatgtcttcataaagtttggacactgattaagaaacaacacttgtgtatatgataacgtttattcccatcatattaagatgcaatacaacatttagtctacatattaatagctatgcttacaaagaactaaataaaagtttaagtaaacaatgatattcttgtacaatctacaacaaatcttgacaaataatttagaaacaactgaggtaaccgatcttaggcagagaccgaggctttcttggtctcctcttcagcacctacctcctcagcaattggcgcgtacccgattccacttcgtttgctcggaaacaaagcaaagatagtggctgaggcacacccacggcaggaggcaaagctatgacaagtgtcttctgtgttccctgaaccgaggataaa

SEQ ID NO: 6473 - DNA, 508 bp, Arabidopsis thaliana
caatattattaaggatcttaccagtgttgaacaactgaaagacagagatacgacccaaacaaatctgacacttctcaccagttttgctcggcaaggaagaatttttctggggcttcctatctctggacaagacgaagatgtaagtaggtttcaagatcaactgaagttttacttccatatttgatgagctcttgtctgtgccttccccatattttccggtacgtagctaaatgtgactaaggttttctctagtttttcaagggtctcgacgtcactgcagatcagaaaaagagttttaagaaagctttcaacacatattatgatgctcttgcagatctccttcagtctgagcacaaggttagatccttaattgtttacccatgagcttatgtgcaggaattttgatttttcttgcctgaaaaatgaaacatttcctctcccttttcttttcttttcattttgctagtttccctttctgtagtatcttcgtaatagtttttttctacag

SEQ ID NO: 6474 - DNA, 769 bp, Arabidopsis thaliana
ttgagaaatttcaactttgcaaacaaaattatgagaaaatagtttcatcaaaaaagacctcaaatccaagaagattgtagaaatgtctaatatttgtctatttggttagattacgatccaaaatctgatattaatatgattcgttggtcttattagtcaaaagaaggccctcgcataaatcacacataagaaaatgttgggagaaacatacgttgtgttgttttcccgatctcacgttaccaataaaaaataacattgtatacaaaaagagaaaaagttaaaacgtaagaacaacctcttttagcatgagtttttttagatatacaaataaaatcatactcaataaggcttcctaccaagaaaattccccggtggatcataattgcaagtcaagaatacgcctcctccgccattgcagatcacgtgagcgcaaccaatcttttgtgtgttcttccacacgatttgtgtgtaatggccacacatctcggagttgcacgagttagatctatagttatagctccttgcttcagacaaccatccataggcggcttgagatggaccccatctattgcctgagccccaaaagagattctcaccatagggtccattggaatgggtcaaggcgcagtcaccgcgtctctggttagcccaccattgcgcgtaacgggccaatttggcgtcccagctttagcggtttgagccttaaatgagctcttgctgcgttttgtggacccatgaattgttcttggtatgttgcacaatgacaaca

SEQ ID NO: 6475 - DNA, 657 bp, Arabidopsis thaliana
tatctttcacagattgtaaggtgtagaatacaaaattacacatgaaattaaatctttcacggtagacaaaagatggtacaacaataaagaatttccatgcaaacaaaagtatcctagtatattcacaataaatgaaagaaattaattggctataaatttactacttataaccgtcctcgtaattaactttgagagtagaaggctctgtttttcttacaatggccccatctatataactctctctctgcctaacagaccccataactgacctcccctctctctctctctttctctctgctttcttggtatggctgctgacgtcagctctctcgtacggatactgagtaggttcaaggatgatcggacggttgtaaaagattccaccggaccaagatccacggtggcgctcatgacacgcgatctcctcggaatcggcggttgtgtgggtggaggaggaggaggagacgaacagtcgctggagcttgaccttgacgtccaagtccctaacggatgggaaaaacgtctcgacttaaaggttcgtcgctattttctttcttcttgatttttgtagtttcgtgttctcgagagaatttggagataagaactaacaaaacagagaggttccaaagatttgaatgatttatagattcgttgtga

SEQ ID NO: 6476 - DNA, 890 bp, Arabidopsis thaliana columbia
gtttatagtttatataagaagttttttcatttctataatcttcaaagtcggtacgacttcatttctcaatttgtgacgtggaatcagagcagtgaaaaagctttctttcattcacacattttctctttgattccttggaacttttccaggaagcactctcaatgctataaacatatataggattagggataagcttggccatttagttactcggatcggttccattcagattcggttcttcggatcttgcatttaatagttcgttccgcggattgcaagttacgtttaagtgtattcacagcgggaaaatggctgcatttatgaaatatagtctaaggttcacatatacatagagaagggtttgtattgtaaggtggacgaaaaaatcttgtaacaaaactctatcacgattaatactaaacactttcaagaaattcttaagggaggattctgacatccataatttggcgccaaaaggaggggcctctagaataggaatcgctatggcaaaaaacggagatcaaacctctacgctcgacgaaatcaagaagatgatgaatgatcaacaacaatgcaccatcagtgaactgttaaagaagttcatttcgtttgaggagcgttgcaacactcagcttgcagcccttaccgcaagttgctccaaaatcacgtcaactcataatacttatgccgaccgagttgacactctactccagggactttgcgaacctcaagatcaagagggcgtttagagttttacgaccctatccacccgaaccctctgagtttctcaaactactgcaaggtctcaggtcccaaagtgtaaccggaggaagttatcagcagccaccaactgctcaaatacttctgtaggcctcaactacttctggtta

SEQ ID NO: 6477 - DNA, 570 bp, Arabidopsis thaliana
caatccgtcgtattcgatccatgaattgatggtgttgccgctcttgagatcgatgtttacggtgccaagatcaccggaaacagaggaaactacgccatttacgtcgaatccaacatggttactgttaatgtccttgaaatctacatccattaaagtatcgaattcgacggcgacaaattttgaaccggaaccgtttggaccggttagaccaagagagccaccagcgatgccgattgagtttgcgtcgggagagatgacgaaagcgagaccaccgccgatggaagaagggttgacattggttatagagaaggagaaaaaagaagagaagcttgtcggaaagtgagttccaggttgtcggaatctgattgggttagagtataagacttttccggcgccggaattaggtacagagaggtcacgtgtgaggccaacgattccattgcttaaacgtgcatcaccgaggagtttgaggttgcttatggctagcgtggagaaatcaaactgtgtcgtcgtagctccattgaagaaacagagcaagattgaaatgaagaaggagagaaagagagacat

SEQ ID NO: 6478 - DNA, 541 bp, Arabidopsis thaliana
cggaacagcttttgctctgaacatgctctttagcataccggtgtggatcggtgttcttctgacaggcttaagtacgctgattcttctcgcacttcaaaaatacggggtattagtttcatctcttgttctcgttcacggtgcttatatgtaaggtgaattcttatgaatgtttggtataatacaggtgagaaagctggagttcttgatagcgtttcttgtgttcacaattgcaatatgcttctttgttgagcttcattactcaaagccagacccaggagaagtcctacatggtctctttgttcctcaacttaaaggaaatggtgcaactggtctcgcaatctctttgctcggagccatggttatgccgtaagctcactctctctcttcaccaccattcatcataagattctttgctgagaacaacatctgttctctgcaggcataatctcttcctccactcggccttggttctctcgaggaaaatcctcgttccgcttctggtatcaaggaagcttgcaggttttacttgatagaaagtgga

SEQ ID NO: 6479 - DNA, 616 bp, Arabidopsis thaliana
caaaatttcctgccttgcacaaatagtgaatcatcgtctggtatatcttcaaattgggtttgtaccccttaccatgcatcgctgtataaactctttccgccatgtcagggaacctcgcaaggaaaaaccctttgataaccatgttatatgttatgctgtccggttccacctggagtttaggcatcaacagcaacagatcatttgcatcccaagctcgtctcctattcactaaaaactgaatcctaacattaaaagtggtgaggttcggcttacagcccttgaggaccataaggttccacaatccatttccaatcacacacctctcgtgcttgtataacgccgatataagtgtagtatatgtaactacatctggtgttaaccctgatttctccatctccctcattgccatataggccccgtcaagaatacccagctcacagaaagatttaatggcaatgttaaaagaaaccgcatcaatatcaatgccatacttcgatggggcgtcgtgaaggaactccagatggtgtggagatcaggattgaaagataagacttgaagagcggcattgaaggacttaacagatcttttgcaaccgtataaatcatattgaagaaag

SEQ ID NO: 6480 - DNA, 807 bp, Arabidopsis thaliana
tcaaaggtgaggttgtagctaaagctgaaatttcctctcataacaaccgacgatcgagttcagcattcttttcatacacaaaagcagcagcaaacgaagtggcaacagaaggaactttgatactgcacaagatcatttgttcagatttcttaacgaccaaaacggaaaccaaaggatcccagactagccagatccgacccaaaacagaacgacaatagttgctctccattctccaaccgggaagaatggaagccaaaatagcaagggggttattctctgcaacatgagcttccaaaaagccgccaattaataacttattcgaagtaatccagctacgaactactctttgacgagaatggctatttaagcctctgatattccagcaaaaaattgtcatttctacacaaaaggttatattgaaggatacatcaatgaattccagccttgctcgaggattcacctcgtgcactagcctgagctccggactgcaatttattatgccaaatcttcatatgtttcttcctctccttcttagtcatggccccccaaccaggaggggttggaaacatggcattatcaaccaactgttttgagctaacattgctctgaataggatcccctatggcgctgcaaggaggcataggcctaccggctggatcaaaaacagagggagaagggatctcagcagaagtaccccttttagcaaaactggagccagcgagaccagcgacagagacactttcaatgccttgtccacactggttttccaccactacgtgagttacaggtacgagccatgggtacgag

SEQ ID NO: 6481 - DNA, 1058 bp, Arabidopsis thaliana
attaactagtaaaggtaaatgcagcaaaactctttagtggccatacatttttgttggtggccaattcttaccgaatatttttatcactggttttgcagtatagtcttccttcagacacttcaatgaactacatggataacttcatgcagcttccagaagattctgtaccctgcaaaatccgggccaaacgcggctgcgccacccatcctagaagcatcgctgagcgggtcagttataaacactttttaatttatttagcgatggataattaattcactaaatttagcaacaaatttgatcgtccctaatcatgtagaccctattctttttgccatcctcctatcttaacctatacaatatgtttatattataggagaggagaacgagaataagtgggaagctaaagaagctacaagatcttgtccccaacatggataaggttactttatatcaaatatatatagtatatatggtaacatcattttgaaaaagtgttcattacctcacacacttgttgctgattttcttagcaaacaagctattcagacatgctggatttagctgtacaacacatcaaaggccttcagcatcaacttcaggttcccttatcttactttttctgtttaggtcagctgaatccatttccagagttctctctagttcatgatccatattgatacataaacacattttcatatacaaacgcagaatttgaaaaaagatcaagagaattgcacgtgtgggtgcagtgagaaaccaagctagctcaaacccaaaggtagggtcatcctaattttatttgcattgttccgattttatcatatgagagaattagagaagatgtaaataaaatagattatattaaatgtctaatcctcttataattaagctcctcattcgttatcattataagatagaacagtgacaattgtccattatgtttttgtttcaagtttatgttttgagtgtcgcctattttgtaaggattatgctatgaattctgaaactaattcgagttatgatcataagcaaagcaagctagcatccattatatatat

SEQ ID NO: 6482 - DNA, 872 bp, Arabidopsis thaliana
tcaccgagtaacgaagctttatccatttttgaaacgtttggtacaaccgctcgtaacgcgtagaatctttggtttagtttctcgcgtctttgtctctctgcttcgacgtggtttagtggctcttctctaccgtttgctggctttcttcctcgtttctttggacgtttctctactgctacttctttcacgacggaagcttctagatcggagtgatctgattctccggcggttttatctccgaatgatagaactttatcttcgttcaaaaccatcgacctctttcttttgttttcgaattgtgtttgacccgaataagaacttggatccgggtttccggagcttcgtttaccttcatcgccgaagtttaatatctcgccggatcttggtttcactaaagtagaacttgacgtcgaaaaattaagttctcgggagaaagtgttattgaatttcggattctgggtctgagaatgaaccggactcggagtcggatccagattcgggttttcggttattgtgcttgagctaccgttctcaaactgaatagactttgaaaaaagctgggagctagaacttggagctccgttacccggttcgttagatccaggtgttccaatcgggtcattaatccacatagacgggtcgttctcaccttgatccgggtcaagattccaattaagacccgataaatctccagctccgccgtcgaaattgaaaagaattcgaaccttgttaataaggtccgaactctgtcggatcggctccgttgacccgacttccacaactcagttcgccgaaggaatacacgcaatagtatgcatgcacacactcctccttgcttagcccgtcacaacccgacctggataattgatctg

SEQ ID NO: 6483 - DNA, 975 bp, Arabidopsis thaliana
ccggagatttagagcggcgatggcggttaagtagagatagctttctctctttctcgccaaaattcgaggaaaacagaggattccgattcggagtcaaatcttccaaatcggatgtttcgtttacggcggcggaggaagaagaaactctgccggaagagctacatgcagagctgatgccgaaacatgtggcgattataatggacggaaacggaagatgggcgaagaatcgtggtcttcaaccttgggatggtcacagagctggcgttgaagctttgaaagagatcgttgagctttgtggtaaatggggaattcaagtccttacagttttcgctttctctactgataattggattagaccaagagtgagtgacaaacctaatttttaaattttagggtttcttttcgaaatctcagattttgatgcgattatgagtttattcctctgcagattgagattgatttcttgtttagtttatttgagagatcactcaaaacagaatttcagaacttagccaagtaagtattgcgtataatttgtaatcaagaagtgtttgtgattgattaattatgtctcaaaagctaatcttttatatgtaggaacaatgttcggatatcgatcattggagattcctcgaaacttccgaaatctcttttaagagtgattaacgaagttgaggaagttacaaagaacaacacgaggcttcagctaatcgtagcggttggttacagtgggaaatacgatgttttacaagcgtgtagaggtatcgcgaggagagtgaaagatggcgaaatcgaagttgaggagatagacgagagactgattgaggaagaattggagacgaattgtactgagtttccttacccggatttacttataagaacgagtggtgagcttagagtgagtaacttcttgttgtggcaattggcttatacagagcttttctttgctcaagaactttggcctgattttgggag

SEQ ID NO: 6484 - DNA, 716 bp, Arabidopsis thaliana
tagaggatccccccttttcagaagaaggaataacactaactcaacaccggtatgctaaacgtatcttagaagaagctagaatgttagattgtaacttggttcacacaccaatggagtcgggcttacaattaagcaaatctgcagaagagaatgatattgatgccacgagattcagaaagaatgtgggttgtcttcgttatttgctacatacaagaccagacttaaactattgtgtacgaattctaagccgttatatgcaaagaccaaaggagtctcacagagctgctatgaaacaatgtttaaggtatgtaaaaggcaccactacacttggtttaacatatgggcgtttcacttctacgatgccaagccaaagttggtaggctacagtgatcgtagtcataatgttgaccccgatgatggaagaagcacggctggttacatattctatcttggagaaagctcaagtctgatttcttggtgttcacagaagcaagatattgtggctatgtcatcttgtgaagcagaattcatggctggaacagaagcagcaagacaggtgatatggcttcaagacttactttgtgaggtcactggtttacagtgtgagaaggttgtagttcgaatcgacaacaagtcggctattgcttaacgagaaatctagtgttcatggctcaacaacacatcacagaagatacacttcataagagagtgtgttg

SEQ ID NO: 6485 - DNA, 736 bp, Arabidopsis thaliana columbia
attgaattttatcaatatccagatttctaaaatatttaagacattacatatttttttaatatcaactttgatattcaaagtacaggaagcttaaaattcagtaacatctctaacaaatgaacattaaattgagaaatatcgaggtccaaaacctgtttttacaaggatcaaaccgggccagacttctagaattggtcgtaactgacaatgtgaaccggtccgaattttggagttaggccagtttagtacaataattgtagttgggcctattttgttgggctcgagacttttctcttttagagagaccctctaaacggaaaagagggccagtggtgacttcacgaatatctctcttcagacgtggtttgctccagtccggtgagcgcggcgccgaggaatagagattgattcagcgacaatggcgattaggaagcttttgcttcttttgaaaccgattgatccgtacccattccttcaaacagaaggtgcatcgctcatcaaaaatcctcaggtactaattaattaccttccccaaatgcgtctcatctcgattttgaatcccgatcatgtctatttcgttttgtattgaagttgtttgataaaatcaccacagattataccgaaacgttgacatttacgtgaaaaaggaactctttttttgggttcttattgggaattttgaaaatattcgtatcagcagtgtttactcatatgtatcaaataagtactaagaaat

SEQ ID NO: 6486 - DNA, 612 bp, Arabidopsis thaliana
ggaattgaggtatgtcaacatgaagaaggaataacactaactcaacaccggtatgctaaacgtatcttagaagaagctggaatgttagattgtaacttggttcacacacgaatggagtcgggtttataattaagcaaatctgtagaagaaaatgatattgatgccacgagattcagaaagaatgtgggttgtcttcgttatttgttacatacaagaccagacttaaactattgtgtaggaattctaagccgttatatgcaaaaaccaaaggagtctcacagagctgctatgaaacaatgtttaaggtatgtaaaaggcaccactacacttggtttaacatatgggcgtttcacttctacgatgccaaagctggtaggctacaatgatagtagtcataatgttgaccgcgatgatggaagaagcacggctggttacatattctatcttggagaaagctcaagtctgatttcttgttgtcacagaagcaagacactgtggctatgtcatcttgtgaagcagaattcatggctggaacagaagcagcaagacaggcgatatggcttcaagacttgctttatgaggtcattggtttactgtgtgagacggctgtag

SEQ ID NO: 6487 - DNA, 703 bp, Arabidopsis thaliana
caaggcttctcctctaaaaccataagtagtcaaattcaaaagatctgtgaaatcctctaatttagaagtatgatgcttaagtgcaagaacctgtaaacccacacacatagagaaaaacctacttcaatagggcaaaaatcagaatcccaaacatcaaaagttcttcggagaatttggacacaaaccttgaaattggttggggaaatgccacaaccattgtcaatgacctgaaaatagtcttcgccgtagtctcggaggttaatctctatactggtggcgccggcgtcgagactattctcgacaagctccttgacggccgaagagaggtctaagatgacttgaccggaacagattctgtgaattacgtttctgtttataggtcttatcaaaggagagctagtagtcgtcggagacggataagaatctccttgcatttgctaaaccctataaacagatgaatctcctcaatcgaatcaacaccaccgtactctgggactgtgtgtgtgagaagagagagagagagtgagaaaacccttagggtttatgttttgccgccaaaatcgaaggtgagacaaggatgaagaagaagacgaagcttttgcgttttgggagttcgaagagtttcacactgggacgcagctgcacaatgcgatttgcgtttcgcgtttgacaaattgaatttgatgttaatggcttaagattt

SEQ ID NO: 6488 - DNA, 836 bp, Arabidopsis thaliana
cctttgattttgttctctggatcccagtttaggtattgatcattcacaaacacctaacaataaaatcatacaaagtctttaatatatagtctatgaaatttaattacaatctcattttgaatatagtagtctatgtcaagttaccttgtccaaggagtttaagtaatcaacagctctctctcggttcaccaaaaaagttttttcatccatttcaatgtttggtgatcctctgtaaccaaaacgaaattattattttttaatgtcaaaactagaaaaacaaatactaaattttgatgcatgtgttgtcatatataatttggtgatcttcaatatatatgtgaagtgaaatgcatgtagataggaagtgactcactttccccaccagagttcggcctcagtggtatcatccttaaccacacgcttgtctttaggagaccgaccggttttggctccagacaatgtagccaacgcaccggtcgatgtcacaaacgatcccttctcaaactttatcgcttgctcgtacaactctgcaatcataaaaattcggaaggtgatacaaaacatgaaacaacattaaaaatagggctcttagttaaaacggtggcgttttagggatgtattaccggcgggagagaggttgtgaaggatgtgagtgaacttcaagccactgtcgctgacgtcagcagccggaagtgacgtaggagtcactggcacgtgtgctactttagctgccgaagtcggatctcctcttattaacttcggtcctgtctctctcgtcaacgaagccaacgatgcactgtccaatattcaccaaattatgcattcgtatcattgtt

SEQ ID NO: 6489 - DNA, 765 bp, Arabidopsis thaliana
tttggatgcttcaggtttagctgatccttacgtgaaagggcagcttggcgcttacagattcaaaaccaagatactatggaaaaccttggctcccaaatggcaagaagagttcaagataccaatctgcacatgggactccgcaaatattcttaacattgaagttcaagacaaagaccgatttagcgatgacagtcttggcgactgttcagtgaacattgcagagtttcgaggcggccaaagaaatgatatgtggttgcctcttcagaacattaaaatggggagattgcaccttgctataaccgtacttgaggacgaggcaaaggtagattgagtttcttctgtttagttttctttaacgtaagagtttcatgatcaactcttatgcaatatgcattcttttacagttgaacgatgatccgtttgaaggagtgacaatatgtaaggaagacatgtgggcttcttttgcttccgacgttacaaataaaggttccttctcatcagtggtatctgacaagtctccaagggttcctgataatatggaaccaataaacatcgaaggacaagaagagactgggatttgggtacatcaaccaggaactgaagtctcacagatttgggaaccaagaaaaggcaagagtcgatgccttgataacaaaatacagtgcgctggcagtgtccgttccactgcatctacgtcgcccaacaatgaaagcagcagcactgataaaaatcaggaagggaagagcgagatgaagtctgttggtt

SEQ ID NO: 6490 - DNA, 559 bp, Arabidopsis thaliana
gctaaactcaccaatcagaggagtagacacactcatcagcagcagtggacgagttgggtttcaggtaggttcttatgcagaaaactacatgattgatgagcttaacattgccagatccagacttgtaccactcggctctcctaaagaatacgctgcagctcttcaaaacggaactgttgctgcaattgttgatgagcgtccttacgttgatctcttcctctcagaattctgcggatttgccattagaggccaagaattcaccagaagtggctggggatttgtgagtaccttcatttaaaactgtctctgcggtttgtttgaacattaatcttgatcatcttttttgcggttttgtttgtaggcatttccaagagactctccattagcaatcgacatgtcaaccgcgatcttaggtctatcagaaaccggacagcttcaaaagatccatgacaagtggctttcaagatctaactgcagtaacctcaacggttcagtgtcagatgaagattcagaacagcttaaactccgaagcttctggggattattccttgtgtgtggg

SEQ ID NO: 6491 - DNA, 532 bp, Arabidopsis thaliana columbia
aaataaatgataagatgtgaatgtaattaatatgaacatcataaatatacaattaaattaaagtatttgtctagattagcaaagtactagctaaaagaactaagattgtaaactttatttcaatctgccttctttcaatgttttatatatttttgtatgaactcataatttcttaattctgtagagaaagaatatgtttacatattgataagtgtgtgtattagacatactttcatataaagctttattcaaagccaattataagagagaaactcaacacttcccaaaacgagatacttcttcttctttgtttgtgatgaaacaaaaaaaacactttgcaaactaaatcccgtagggaatacacatactacaatggttaatatccatcctatcacattggcccagattcaagataacggcttatgaaagtttaacgcatgtttctgttaaggagaccttggaaagataaataaagatctttgttctcttccccaaatatctcatctgctttcctcagagtttcctgtgaaat

SEQ ID NO: 6492 - DNA, 888 bp, Arabidopsis thaliana
ctccgctaaaatgaaaatgatcaaatgtaaaatgttcacaaaatccaattagtctttgcttgactgttaacaacaaaccactaaatacagattcaaaaatgctctaagcaaacaccatagaacaacatacaatatcagaagcttcaactttctccactaatagaacaacaaagatgtaaagcacctcataagcatcatccactcagttattaccaaagtttacaactttgtaataattccaacaagaattgaaattttcctatacaattagattgccaacgatccaataacgcatatacaaatgcactaacaaatcttccacagagaaaggaacaaaaagccatagttacacaaaccgttaaacaatcttcaggcctagggttagtgggcacaatcgcagacgaagatttggagtcagacacttcagaatcggactccaccgccttagtttcagcttcagccgccgcctctccattggtaggctcagagcagaagaaagcacgatgacccaacgaagtagatcgccgattccacccagtgatttgactcaacgctttgaacaatggagactccactggagaagacccgacgaccctacttaccggagtcaaatggtggactcgagaggcggaggaagtgaagagctttaacatggtgggagagaaagaagatctggggtaacaatttctgcgattgagttttataaagttttgccttttaggcaagaaaccattggagaattctggagaagaagcctgtagacgaagattagtatcaaagcccttcataaaccccgacgaagcaaaaccccaattttaaaggcagcagagagacaacaccattttgccttacaatacacgacgtcgttttggagtcggtcattgaatt

SEQ ID NO: 6493 - DNA, 1866 bp, Arabidopsis thaliana
ttaaatcgtagtgataactcatgtaccttgaacaaaatggacgccattagtctctctctcaagatgtacatttgagcaatttcaaaagctgtaaccttgaaaggcagccaccgatccactactacttttactgaattttccggcccaagcattattttctctccaggcctaccaacttctttatctatgtccatcgcgtctcctacatttcctactttgtggtcttcctcgtcatcactcttaacagcatcatagctctctgtagtagaaacggctatctctcttgaaaacagtaacacaggtatagtgggaagaacagtgcagctccttatcaccacaccccaatctcctcgagtgatctcatcaaaaacaattaaagcttcgtcaaacttggtagaggacatgtcaacattgtttgatagcgagggcacacggactttggctccagcaatagtctctattacagaccttgtccgattcttggaaagtgggcacatccttcccaacatagggtacaatccaactgctataacagcacggagaatacccggatcatgagcattcaggctacagtttgagctgctgctaggtatgaccccatgtctattaagttctccctgaagcttgcgacacagatcatccagcctcttcatgacaacttgggagatgaagtacttagaacaaaactccttagcttgaccacttgcttttgcatttttccagcactgaaaagccgcgacagtggcaagatgatcactgtggtctccataaagcgatgcaagttcatgttttgcggcagcagccttttttctatcacctggcgacaagggcatggtaaacggatccttctcgtcagctgcacatgccagaataagtgctggatccaaacagttcactaatatggcgaaataaatcatcttgctaatccgaggatgaactggaagctgaccaaatttctgtccaagttcagtcagctcttcttcaggagtcaaagctccaatatctttaaggatgattaatgcattttcaatactttgagcaacaggcgggtccatcaatttctgaaggaaatcatttacgttgcaattcggatccagcatcttaacctgaacatattgatattatagaaggacatcagtaagaaatcaagaacgcaagaagtctcaaacaggacgctaccatgcatgaatgacaattaaacatcatagaaaaaatctacgttagaaagaacagcacctgcaagcagagttcatccactggcattctcataacttcaggaactctatattcgggcaaagacgctgcccggagtttagaatatagatgataacagatgccagcttggcaacggcctgctcggcctgccctctgttttgcatttgcttttgatacccaagaagattggagcgttgacacgtcattatagggatcataactcttttccttcatccgaccactatctatcacataaaccacatcatcgatggtaactgctgattcagcaatatttgttgcaagtacaattttgcgacaaccacgaggggggcgattaaaaactttcttctgttcctcagctggaacccttgagtgaagacatagaatgatgaatttagcactatgtgaaaaaaccgatcatcaagcaatttctcttttgttttgcttatttcctcccacccaggtagaaaaacaagaatggcaccatcttttgaatcgctgcatattttcttcattaacttcactataagacccacatctacttcttctggtttgattgtcgccatatacttatcaagtaagtcttgtgcttgctgagaattggactggatgttaccgcatgtccctgattatttgagcagttcaaattga

SEQ ID NO: 6494 - DNA, 1292 bp, Arabidopsis thaliana
tgacagctgctaccttcccataagaaagaacataaatacacattggcatagccgcaacataaatggacacttgcaattgcattttccaatgtctcttctctgaccctctttgaccttcttcttctctttctcattactctccttctcaatgaaagatccgaaaacagaagagatatatatataaaaaaaaacactctatatatagttctagcctttatagccgatcccaaaactttatcctctgcatttacttctcctcctacttaccacatcaaacccaaacacacatacttagacgcgtatacagaacagagatacagagatagtccccatgcaccgttcttataaccaatcgtcttacttcatccaaaaccaaacagttgtcttaaattctctatgtttccaacattagtcgtctcactaccacaagaactcgaagaagcttctttcattcactattactctcacagatctcttgtttcttgaagaagaagaagaagaaaaaaaatgcagcaaaactctgttcttcttgctctgtttttcctctgtttctcatccagggttgggttcgggtcaaccgggtcaaagagacgatcttcaaactcttctcgaactgaagaactcttttatcacaaacccaaaagaagaagacgttctccgagattggaattccggtagtcccagttactgcaactggaccggcgtcacatgcggtggtcgtgaaatcatcggtttaaatctctccggtttaggtttaaccggttcaatttctccttcgatcggccggtttaacaacctaatccacatcgatttgtcttcgaaccgtcttgtcggtcccatcccaacgactctctctaacctctcctcttcattggaatcgttgcatctcttctctaacctactcagtggcgatataccgagtcaactcggctcacttgtgaatctcaaatcgttaaaactcggagacaacgaactcaacggaacaatcccggagacgtttgggaacctcgtcaacctccagatgcttgctttggcttcgtgtagactcaccggtcttataccgagtcgattcggtagactcgttcagctccagactttgatactacaagacaacgaactcgaaggaccgattccggcggaaatcggaaactgcaccagcctcgctttgtttgccgcggcgtttaatcgtctcaacggttcgttaccggcggcgtgaatcgacttaagaactccagacgctgaatttgggagataacagtttctccggtgagatccgagtcactcggtgattt

SEQ ID NO: 6495 - DNA, 1055 bp, Arabidopsis thaliana
tatgatcttacttacatcttttttttttggacgacgatttgtgactaaaattttgaagaattgttttgtaaagaatcttacttacaccttttgaactaagcagatgggtggccgcggctggagcgtaaaactagggagacgtgattctatcacggcgagcttctccactgctaactccggcgtcctgccacctccaacctctactcttgataaccttattaaccttttccgagcaaacggtttatccccacgcgacatggtggcgctctccggggctcacaccattgggcaagccaggtgcgtcaccttcaggagccggatatataactcaacaaacatcgacctttcatttgccttatccagacggaggagctgccctgcggcaactggctccggcgataacaacgccgccattctcgatctccgcacacctgaaaagttcgacggcagctacttcatgcagcttgtcaaccacaggggacttctcacatcagatcaggtcttgttcaacggaggttccaccgactcgatcgtcgtatcctacagccggagtgtccaagcattctacagagattttgtagcggcgatgataaaaatgggcgacatcagcccactcaccgggtccaatggacagatccgtcgcagctgtcgcaggcccaactaaaatagtctctactattaagcccataataatctcttagtgaactgtttttttcttattttaatgtgcatcattctgatgttattgcgatatgtcaattaattaaaccggaaatatctattgtttaatcgatataatatataatataattaagtaacagatcaatagaggtaaacgagtttaatcgtattcactattcaatttaaatttcgccgagatttgagttcttttgacgaatgttctctcccaatctaatatctattgttctcctaaaccataatattccatgttacccatatctatgagatatggctcaacctctcaagtcacccatttcgcttatttaaggcccatttgtttatggcccaataagaggaagggccccttttataaa

SEQ ID NO: 6496 - DNA, 626 bp, Arabidopsis thaliana
  unsure (1)..(626): unsure at all n locations
tccccaaaagaaaataagtctgtttccttcaagtagaaacttactacttcacacatcaatccatcatcaggatttggttcactaagcaacaatctcatactcgtcaaaactgtcgagatattcaacgatggttgccaagctccctatacattgttaaacatgattcatatattccatcactagtgttgaatatagctatcatgaagaatcaacaaaggcatggaggaagatgatgaagcaaagtctaaccttgggagggagatttagaatgtcaaggcaaatccggccactgttatcgatgtttgggtgataaatcggtgtagcgaacgacacaattggtggctgaaatggatatctaatagagccaaattcacattcagattcaaatcatcaaacaccagaatcgagtttgatagattacctctcagggatttgaatcttcaaattgaagattccattagcatatacagtatcttcaggaccttcgatttctggaaaaaaatcatgaatatcaaaacagatttgaatttgaaaattganaaaagaggatatgaagaaaagctgacgagcatcgatggtggagaaagtggagaatcgccggagcattggcgcggaagagagatgtg

SEQ ID NO: 6497 - DNA, 571 bp, Arabidopsis thaliana
tctcactaaacctctttgccctggatggcccggtgggaggtgggctagcacgtacctcatactcatacgctccctcctcagcagccaccgcattgtagtagtcctgcttagagcaccggaaaacttccacgtatctcctccccatattgtgtctgtccctttgcaaggcaatctcgacttgcatagggccggcaaacaccacaaaggcctccccagagaatttaccgtttttgctgacgagcaggacatcgacaatgttgaggcccgcaaagaactcgaagatgtcaatgtcagcgcagttgaagggaagacccctgaggcgaacgactgggaatccgccggcatagccaaaaggtggaaagctggtaggtccagtgccaactgccaagtagggatttgattgcatcattctttgtctctttgatcccacctcgtacccccgctcccaaacatggcccttcaattaccaaacaagaaacccggaaaaagatccccaactcaaccagttaatataccacacccaacccagacttcctgtcattcttagtctatatatgttgtatagtaagta

SEQ ID NO: 6498 - DNA, 1048 bp, Arabidopsis thaliana
tatattttcactgagtccgtgagcgattggtttagaccgtatcgaaccaaacaattaactactactaggctagtcaaacaaatgattaatttattgtggagtaataacaataccttttcttgcaatggcacttgccgttgccggagccagagatcttgccggaaaagccttcagagtggtcatgttcaaagcatctcttcctgtaaggaagaccagaaagcggcggtttcccggaggaagtcactggcaccgctggagccggagcaagaaagatcgaagagcctttagagacacttccatcaccggtgatcgcagaagacatgaaagaagagttagaagatacgctaaagctctctttagcaaactcaacaacctccgagctcttggttttagcgccaaaaacgctcggtctagtgaaatctaacgtcacgctttgttgatttgcctgaacgaagctaaccggtgctggagcagagatctgagtgggagccggagttgtcactttcaccggtggaggaacggaggaggaaggaggggaatgaaccggaccacgtctaaaccgggcgtgaccggaacggttaagaagagagataactttcttgaacttagaaactgtgaaatcagtgatctcagagcaatcaacgttacgttcttcgggacggttagagaggacacgaatcaagtgttccatgctttttaagccttgtgatgcagcttcttgtatagccgtttgatcttccatcttaggtaaacgcataatatcaacggtcatgatgagaaaccagaggagaaacttgaagatctgagaagatgtgcaagttttttttgatgaatgagagagcgaaactggaagaaaaaagaatggcgttggcgtgatatatggggttatgggtgtgaccgagtgaccggttgagtaggtttaagatggagtttagtcaaatcggtgctttagatctaacggctgagattgagttgaagatttctatggagtaaagtaatcaaagtttggtctccttgagttgtgagatatgtagggtcttcttttgtg

SEQ ID NO: 6499 - DNA, 1243 bp, Arabidopsis thaliana
caaacttttccactccttgtttacggcaagcatccacaagattcactgtcccgaaattatcgactttccaaggagtgatatatcaaatccggacgaaacccagtagcacaaatcacagcttgagaatcatcacctataacttcagctagcttatcaggaccttctgtcacgtctgctctaacctatagaagaaatcacagagcagttgtgagaaaatgagagcgagaaaacattggattaagaccaagaacatactatctgaagagacgggtcgtctttgaaagatgtttttgctttctctacatcacgaacaccagctttgacggcaaagccacgggacaacaactgctccacaatcctcttcccggtttgtccagttgctcctgcgacaaacaccttctttgtcttcactgcattctctgcttcacctttttccatctgagatacaaacaagcaaagtcaatttcagaattggggaaatctaaacacacaattcaatacaagattctagaatcaatggttttattacagataaatcttactttgatggaagtaaaggagcgaaaagatttgttcttggtgaagaaggaagactgagagaagaagacagctgaggaatgtctgagaagcaaagatgttgccatcgatgtgtaacctctctgccacaaacgttaacttttgttaaattgtaaatttttgatctttgccttttttgttgattagattacgccacgtggcaaaggtctccgacaatctgtttcagtacgcaattacggaaaaaccccaaagaggcagcgaacgaaagttcgattccgagaaagtgagagaaaatgacgaagagagctcccaagtcagggcctttgtctccgtcgtgcagcggaggctctagtcggtaagttttgtgtctggctttgataggttacagaacaagtttggctttttacacctggttttgctttgatttctctgtttagggtttaagggttctgcttagtctctctggttattactgattaagtggttagatagggaattggatatgaaagttgtgaactttatgctatccaatggcaaatgggtgagaagaagagcaaggaaagaggatgttagttagatttttgttaattgtgttgtaaaatcttggcaggaacttagagttggctgtgaagtcaagtgaaggtgcaaggaggtctacaagactgagacttcagcatttgagaaaccaaagacaagccccaagaag

SEQ ID NO: 6500 - DNA, 558 bp, Arabidopsis thaliana
cttgctacttttcccgtttgcagatatcgtcgtgcttgtggcaattgtcattttgataggattgttcagtatgcaacactatggtacagacaaagtcggatggctctttgcacctatcgtgcttatttggttcctcttcattggagccactgggatgtacaacatctgcaagtatgacacaagcgttttaaaagcgttttcgcctacatatatatacttgtacttcaaaagacgaggtcgagatggttggatatcgctcggtggcattcttctcagcataacaggtacttatacttacacctttaatctccatgatttatttcatagccatatctaaatgttacttcttgaatattgcaggcacggaggcactatacgcagacattgcctatttccccttactagcgatacagctcgcctttacgttttttgtgtcccttgtcttcttctagcatactgtggacaagctgcttatcttgtgattcataaggaacattatcaagacgcgttctatgcatctatcccgggtttgccttaaatctttttaaaacattactg

SEQ ID NO: 6501 - DNA, 999 bp, Arabidopsis thaliana
gttttatttaaaaataaaatcaccattaattaagttacaaaaaagtttaatatatttaacaaatcttcattcaaaaaataaatcgccgtttttttttaatcctcgccgtcgccggtaacaaaacttcactaaacgccgttaaacggccagttatttcttaaacagttaagacaggatccgacccgaataaatccccaatatcttgaaaatggtcctcaacgtgccagctggagaatccagacccagacccgaatccaaacccggatccaaaactcatatccgcaaaaagattatctccaaataaatcgccgccgaaactttcactcatcgacgtcgagaaaccaaaaacgtcgtcgtccgagaacaacggcgccgagaaatctgaaccgttaaaagacggctcctttttaaccacaatctccgccgtcgatacaccgacaaactcctctttaaccgcagtagactcgccggagaacggagattcgagaacagaaaccggcgaacgaagacattctccaccgccaatgataaaatccgaaactcctttcacctccgtcgaagcttcttcaacattctccgtcaccggaggaggagggaagttaagctctgcgttaggaccacgtagctgaatagctgcgttatcgtaaacaatggcagcttcctccgccgtgtcaaaagtacctaaccaaaccctaacacgtctactcggatctctaatctccgccgcccattttccccacggtctttgcctcactccacgaaacttcctcgtcgccgtcgtaacaaccactggaacagtaacaacgcgcttctttctcttcttcttcatcggcttctctttatcagaaaccaccgaatcaagcaccacttccttcacgtacttcttaacacgacgtcgttttgtagataatgcatcaaaatcaacttcttcttcttcgtcgcttgacgaatctgttgcgtaaggatcagtaacagagattcgtaagattcttgggagag

SEQ ID NO: 6502 - DNA, 1003 bp, Arabidopsis thaliana columbia
tttggtatatacaaaaaaaaaaaaatgtttcaaacagccattttattgtgacaactgaacagagtaaagaagttgaaactcttctgaacgatctcaaaatgcgtattacaacaaatctcaaaatacaacattcagcaagaccccaaaaaaggggtaattgcacttcagaattagaagaaaatgacgaatatactaacaagattcacaaaatacatacaataaagttaaaataatattatttaaatatattcaataatatagcataagcttttgcaaacagataacaaaaaatcccaatcacgtgtgtgggaaaacaacttatactatacaacaaaaagtgaggaaaaaactttttggctttttttctttagttttgacatgaacctgcaagtgaatcacagagctgctattgaagacgagagagatccgtcagattcaggaagctgctacatatttctcccaagtgccgtattttgagctgaaagttccaccgccaaattgctgtgcgtactcacagatcactgcccgagcacaggcgtcccatgtcttggctatgtctttgagcgacatcggctgtgacaaacttcttagcaatatgttgaaccttgccatagctttggacgacaggtcctcgttttctttgctgttcaagaaaccagaccgtgttacggtaagaagataacgcagtttctaataaagggtttctagtagatgattcttgtgaagattttaactgtatcgtagaagtttgctcgactcggtacggaaaatctatggttctatttacttgagactgaaggatttgcttgtacctggtttcgaccgggagtttatctagaagagatggagagccattggggtagctacaaggaaccagcagacgcaatggttgaataggagactgtaatagaagcacaaagcatatattataaaaaaggataaatgaaatattttgtttacaaaacgttaatgttacgagatgacatgtttacatttgtgttga

SEQ ID NO: 6503 - DNA, 582 bp, Arabidopsis thaliana columbia
attgttttagtagcaactttcctctctttctgcttcgatgacttcacaccaagaggaagatccataacttgctcctcttcatctagtacccacaagttctcaagtcttgatctagaatcggcctccctttcttcaagcattgttttagtagcaactttcttctctttttgctttgacgacttcacaccaagagggcgatccataacttgctcctctccatctagagctataggcacactctccggattacagcttgaagaatatacaccacctccattcaactttgttctctttgagcttccaccccccttagaattttcagaggtgtatgtactacaccattttttattgtgtcggagctcccgccatgcatgctcaagtttgaaattactcatgtaattgttgtagtacaattggtatgcaacttggaaaacatcatcttcagattgaccactagctctttgattcaaagcttgatcataacatccaacaaatttgcagacgtagtcgttaattttcctccatctttgcctgcagtgatccactctcgctttggtagatttgcaagtgaagcgctatttg

SEQ ID NO: 6504 - DNA, 542 bp, Arabidopsis thaliana columbia
tcctcttcatctagagctataggcacactctccggattagagcttgaagaatatacacgatctccattattcaactttgttctctttgagcttccaccacccttagaattttcaaaggggtacaaactacaccattttttactgtgtcggagctccctccatgcatgctcaagtgtaaaattactcttgtaattgttcgtgtagacttggtatgcaacttggaaaacatcatcttcagaatgaccactacttctttgattcaaagcttgatcataacatccaacaaatttgcagactttgtcgttaagtttactccatctttgcttgcagtgactcggctctcgctttggcagatttgcaagtgaagcgctattgttaaaatatgcaccaattctcttccaaaaagcgcatgctttatgttcattatcgacaattggatccttgctagtatttaaccaagcactaataagaatggcatcttcagctcgactccatttgcgtctatgttttctacgatcggttgtgttttgaacgaggtttgg

SEQ ID NO: 6505 - DNA, 1184 bp, Arabidopsis thaliana
atgagagtgaccatcaatccgcatagctaaccagacctctctttcctggtggagaaggtgagtgagaagggctgagtgattctgcaggagaggtgcgtcctcctctgatgggggatctctgtggcccgagacgggatttcaggtcttggctaattggctgcctctttctagggctctggctacggctacgatgcctcggactctggctcctgcttccgtctctcaatcgtctacggtacccatctggactccgagaagtgctccttctcctccggttgtacctatgcaagacaacactcaatttcagaggacatccaacattgctataaagttgctcttttcaactttcagcattcaattagaatgttttgcttaaccaaaataatatcacaaaaagggtcgttctaggatataaatctaatgcaagtggctctaggtgctggtttacaagctatatcgtcccaagccaaagccagaatctgtacagagataagaaagcgaaccttggagggctccttcttctgggtgggcttctaaagcgtcccctcggtgagcgctcagagtaacttctgttgctcggatacctacataattaaacaaaatgaggctttagtactatccgcagagctatcgtcctttgttgtatgtatgtatagattaagttacctatccctgttcctatcctgaaagtttcttctgtcaggccaatgtctaggaggagaacgctcaggagaaggagtatggtacttccgagcaaaggaatagcgttcggtgaacccacgcccctttcggatgcgcttgggcacaccacttggagatgggcttctgaaagatttccccacagtttcctctgttggcttctcacgaggacttctgcttccatttccaagatctctcacagggctcctactaggacttctgtttccatttccaagaactctcacagggctcctactaggacttttgctcctgctgttttggtttctcctacgaattgggctcctgctcctgtatagcaatagaaaatggcaaagtttgtcagtgaccacaaaatcagaccaccaaattgcagaagcaaagctgaaatacataaagccagggagataaaccttgatttcactgagtcatccaagttggcgtgttgatcagcgttatcaactttcactgactttatggctttgtgg

SEQ ID NO: 6506 - DNA, 741 bp, Arabidopsis thaliana
tgatgtttatcaaaatgtcgagtccgcaaaggaattgtgggatgcgttggaatcgaagtacatagtcgaggatgcttctagtaagaaattccttgtgagtgattttaataattacaagatgtccgattcaaggcccattatggagcaataaaccgaattacttcgcatcctaggccaattcactaaacacaagatgatgatggatgaatccatctcggtgtcgtgcatcatcgacaagttgccgccttcatggaaggattttaggcgcatgttaaaacacaaaaaggaagagttatctcttgtacaacttggtagccatttgcgcatagaggaatctctaagggtgcaagagggtggaaaacccaaagaaaaagaggctgaaacttcttcagtcaatatgatggaagaaggtgggagttctaagatgaagaacaaagggaagaaacgcccctttgctaacaacaccaatgatggatctaacaaacgattgaagaccgtttgttggatttgtaacaagcggggtcacttcaaacgtgattgtcgggcaaggaaggataagaacaaaacgaaagggtctaaggatcaaggcccatcctctcatcaaggtcaaatttctgttttatattcatactcaagtgtactatgtttcaataatagctgaggcattttatgtgcagtataatgaggtgtcatggtggattaactcgggtgcaacacacatatgtttgcaaggatcgtggc

SEQ ID NO: 6507 - DNA, 1432 bp, Arabidopsis thaliana
tatttgcaggtgattttttttcttctagatgtcaaaatctcttggaaatgtcattgatccacttgaagtaataaacggagtaactcttgaaggtcttcataagagattagaagagggtaacttggatccaaaagaggtgattgttgccaaagaaggacaagtgaaggactttccaaatggtatccctgaatgtggcactgacgctcttcggtttgcgctcgtctcttacactgctcaggtactatccattgcaccgtccctaacaagctccttctgtgtatgttctataaactaaaaattgcgtttcttgattcttttctagtctgataaaattaacttggacattcttcgagttgttggttaccgtcaatggtgtaataaactgtggaacgccgtcagatttgcaatgatgaagcttggcgatggttatactcctccgcagactctaagtcctgaaaccatgcctttcagctgccaatggattctctctgttctaaataaggcaatatcaaagacagtggtgtcactagatgcatttgagttctcggatgcagccaacacaatatatgcatggtggcaataccaattctgtgatgtgtacattgaagcaattaagccttattttgctggtgacaacccaacgtttgcttcagagagggctcatgcacaacatgctctctggataagtctggagactggtttgagactgcttcacccatttatgccttttgttactgaagagctatggcaacgacttcccgcacccaaagacacagaaagaaaggcttctatcatgatatgtgactacccatctgccatagaggtgagtaagattttcggattttccttgtaacttgtcataattgttcaggtttataacgcttttattctgatgctgtgaacccagaactggtcaaatgagaaagtggagagcgaaatggacaccgttctggcaactgtgaaatgcatgagagcactcagggcagggttgctggagaaacataaaaacgaaaggtctgagtatatgattaaagccccattcgaggaacactttgagacatttcattaaccatcctgcatttttttaaaatgaatctcactaaaaaggttacttaatagttttattcatttttctcaggttacctgcttttgctctgtgtgaaaacaacgtaacatctgaaattgttaagtctcacgagttggagatcagaacccttgcatatctgtcatcgttagaggtaaattctatcttcaatttatgtcttacggtttatctattgtttcgtgtatcatttctgagtttctatggggctttggtataggttgtgtcaaaaggacaacatgcagcaccacctggatcttcagttgagacggtgaacgagaacctcaaagtatatcttgaagtggacggagccattaacacagaagctga

SEQ ID NO: 6508 - DNA, 544 bp, Arabidopsis thaliana
tttggaacacatatccaatatcttgagtcttcataatcataagctcttccgcagagtatttatttacctcatctctgaaaacaataactttgtcaaaatttacaaaccaagaagaaaacgagaaaccatgagaatagcaaaagagataatagtgaaaagcaaaaagaagaaaacgaagagtttcgatatgcttactttggtctatgacgtccatcaactgttttactattaatcatcttaaagttgaattcatctggattcttgaatgcagccttctgcctaagtatctgcagtaaagtaaaacggtgtaagagaaactgaactcccaacgatttagtttcttagctatctcacagatatcatcaatcaatcccgtaaactaacaaatgtctacttgaaagactttattaacataatctcgacagtataatcataggagagatggaattgaaaacagagagtgtaatagttacctttaaagtgtcctgctttttgtgataagcattagctcggataatataatccttatgcttctcgaggatgc

SEQ ID NO: 6509 - DNA, 624 bp, Arabidopsis thaliana
cgtccttttcttccccgggagatttcggacgagagttgtgacgggagatcgtgcgtttccgtaatcggcggcgatggaggagataccagcgaagtggcggtttacctcaaagatccagatagctggtaatcgtctttttggttttcccttgttcaattttgattctttattactagaaatttgaatatggatttggtgattcggtgtaatttggagcagtcgtaacgaaagctatcagctggatgcgttttacgggagagaggatgataatgtgaagcatatattcgatagagaagtaagccctttgattcctgggatctttcatggtttcaatgctactgtgcttgcttatggagccaccggaagcggaaagacttttacgatgcaggtctgttaaaagctattaactttcacaatttagaatttacggttagaatcttaattggattctcttcggtctgtgcttccttgtaatggttcagctctctttgcatttgattatcagggaatcgatgagctaccaggtctgatgccattgaccatgtcaccattctgtctatgtgcgagaagacaaggagtagggctgagatttcatattatgaagtttacatggacagatgttgg

SEQ ID NO: 6510 - DNA, 827 bp, Arabidopsis thaliana
tagcataaaaaattacgtaccgcacagaatttggatacacgcatgatccataacctacacaataataaacaaaaatagagcgagttaaaacacaaacaatcttatacacaaagcttattgttagtaaaaagtaaaaataaaccgagaaaatgtatgcaacatgaataatgcaaaattctcaaaacgaaaaaaaaaaaaactgcctaactagaaacatcgtcaactattatgacagttttaccgagttaaccaatccggttaagccatgtttctgtaaaatacatactaggatcggttttggcgatagtggatgtgccagcgaagttacatgagccaggagccatggctgcacgttggaagtagctattgaaagcgtaagatgcgtgtgcctgaacggtgttagggagaaaacagagaccattgggttggattggagcacagtcagctccagcggcacatgcgtagtctagagccgcctgaagcgcttggctcgtaacatcgaaccgagcaacgcaccacatcgcagcggaggaacggaagagaagaaggaggaggaaggagagagtttggagacagagagccattgggaagtggtaagagagaaaggaaaggaaggagtgagagtgaagagtttgagtgtggagccttacctctctcactctcttttgcttttgctttgttttctcttttcttttcatttacattaattctttttgcgtttctttgttcttttttttgcttatgttgaatatgagctttccgtgttgattttaaaataaagcttaaataaaagatataaggactagttattaccagaaaatatttat

SEQ ID NO: 6511 - DNA, 573 bp, Arabidopsis thaliana
  unsure (1)..(573): unsure at all n locations
agtaatctgtacaatgaaccatataatatacagttatacacttacatatttaccaagtaaaacagctaactaattaacaaacagttaacaaaagaatggtaattaactaactagtcaaatattcgcttttagggatgaagaagactcttgtctcctataaaatcatactagttactaaagaagataagagtgattgggctatgcatcaatatcatctcgatagctaattctcttaccatcacatttcctcttttgcctatatttcacaattgtgtgtactttatataatacgtttatccgtatatatgtatgtacgagaaatataatgttcctctccggaatggtaacgacaattatgtagattgatattgtacatgtgattgcacgccttatgaccagaaaaatgttaaccatgctatttcatttaatgtttgactaatatgttagattagataagtagtgaaataacgagacagtcgacggtaccactttaactgggtttttttgtcccgaaaatagcgatgaaatgtttaaaagtttttacccanaacaaacattaaaagttggttttag

SEQ ID NO: 6512 - DNA, 1621 bp, Arabidopsis thaliana
tcgctgaaccatgttcttcctttacctcgctctcgggtcgactctttacctcatgacccggcccaaacccgtttatctcgttgactttagctgctacctcccaccgtcgcatctcaaagccagcacccagaggatcatgcaacacgtaaggcttgtacgagaagcaggcgcgtggaagcaagagtccgattacttgatggacttctgcgagaagattctagaacgttccggtctaggccaagagacgtacgtacccgaagtcttcaaactttgccactacaacagaatttggctgtatcacgtatagagacggaggaagttattattggtgcggtcgataatctgtttcgcaacacgggaataagccctagtgatataggtatattggtggtgaattcaagcacttttaatccaacaccttcgctatcaagtatcttagtgaataagtttaaacttagggataatataaagagcttgaatcttggtgggatggggtgtagcgctggagtcatcgctatcgatgcggctaagagcttgttacaagttcatagaaacacttatgctcttgtggtgagcacggagaacatcactcaaaacttgtacatgggtaacaacaaatcaatgttggttacaaactgtttgttccgtataggtggggccgcgattttgctttctaaccggtctatagatcgtaaacgcgcaaaatacgagcttgttcacaccgtgcgggtccataccggagcagatgaccgatcctatgaatgtgcaactcaagaagaggatgaagatggcatagttggggtttccttgtcaaagaatctaccaatggtagctgcaagaaccctaaagatcaatatcgcaactttgggtccgcttgttcttcccataagcgagaagtttcacttctttgtgaggttcgttaaaaagaagtttctcaaccccaagctaaagcattacattccggatttcaagctcgcattcgagcatttctgtatccatgcgggtggtagagcgctaattgatgagatggagaagaatcttcatctaactccactagacgttgaggcttcaagaatgacattacacaggtttggtaatacctcttcgagctccatttggtacgagttggcttacacagaagccaaaggaaggatgacgaaaggagataggatttggcagattgcgttggggtcaggttttaagtgtaatagttcagtttgggtggctcttcgtaacgtcaagccttctactaataatccttgggaacagtgtctacacaaatatccagttgagatcgatatagatttaaaagagtgagtgattctatttatcgttattaagttatgatacgaattaagaagatagagacgtatagactggttttatatatcgactatcgtactttaatttggtcggtccaaatatgtacaactaatctatccgttctctatgtattgttctcttttaagatttcttgttttttttttctttggttgttatgatgcttaattcctctcgtcaactgtttaagaataagatttgatgcgtggtagtggacttgttttcacacttcgtatatatatgaccttgtttacttttctacaaagaagttttatcacac

SEQ ID NO: 6513 - DNA, 1809 bp, Arabidopsis thaliana
tgacgtgttgactataaacttctgactcattaaatgcttacgatttttcttaaactccttaattactagtttcattcttttttttccctccaaaattatgtaattgaattcttacgaaaacaaaaaaaaaggatctactttttgttcgtaagttcagatcttaactttcaagtaccgtacatggtcagtttccaacttttccaaagtttagggaacttctaccaaccttaaccatcgtcagaaaagaccaagagatcttccaaatccattattgtacttttactttatcttcattttaccccataatttattatatacacatttttagcccactgacatataatttctgacttttcttccattgattttttgtagaatgaacaaaatcaacttgttctttactttctttcttttttttgtgtaaggtttgtctaccaacctaaaccatgtttacaccaagagatcttccaaacttttcaaccttattttctttttaccccataagttattaaatctaactgtacatccccaaaaatcatgatttttagcaacactcgtataagttgacttttctcattgattttgtggaatagtcagaatcaacttgttctctttgtcctttaacctttgcacgtagttgtagatctcaactttatagtaggggtcagtttctgacttttccaaactttagggacgttccacctagtcaccaacctaaaccattttagactactagatcttccaaaatccacccttatactttttaccctagaagtttattattgaactttttaaccgagttgtaattaaatcattgacttttcttgcaattgaaattcttgtgataataaagcaggatgatgagaaattagcagcagcgagacaaaaagagatcgaagattggttaccaattacttcatcaagaaatgcaaagtggtggtactctgcttttcacaatgtcaccgccatggtcggtgccggagttcttggactcccttacgccatgtctcagctcggatggtaaattcccctaaaccaaaaccggtttattttacctaaaccggatttatcaaatcttaaccggttttaatttgttttcttttcaggggaccgggaattgcagtgttggttttgtcatgggtcataacactatacacattatggcaaatggtggaaatgcatgaaatggttcctggaaagcgttttgatcgttaccatgagctcggacaacacgcgtttggagaaaaactcggtctttatatcgttgtgccgaacaattgatcgttgaaatcggtgtttgcatcgtttatatggtcactggaggcaaatctttaaagaaatttcatgagcttgtttgtgatgattgaaaccaatcaagcttacttatttcatcatgatctttgcttcggttcacttcgtcctctctcatcttcctaatgtcaattccatctccggcgtttctcttgctgctgccgttatgtctctcaggtaaatcattcaaaccggttcggtaatttaaattagtttggtttggtttatttaataactctgttttctcttccttattatccggttctaaatcaatttcctttttgtttctagctactcaacaatcgcatgggcatcatcagcaagcaaaggtgttcaagaagacgttcaatacggttacaaagcgaaaacaacagccggtacggttttcaatttcttcagcggtttaggtgatgtggcattatgttacgcgggtcataatgtggtccttgagatccaagcaactatcccttcaacgcctgagaaaccctcaaaaggtcc

SEQ ID NO: 6514 - DNA, 476 bp, Arabidopsis thaliana
gaggctcacgcttcgtttgctttcaatagttattaccagaagaagggtcgtgccggtgggagttgttacttcggcggcgctgcttacgtcgttagccaaccaccgagtaagtataactttttttttgtgtgtggcgcatgttaagagttggtgtggggcttttcatgctaaactacgctgattagggtagcgtatttttagggtagtgtatgtgtggttaaattttgtgtggacgacacgacagaggtcaaatgttcccacgtgaacatagatcactagtgtttaatgtgacgtgggtttacgtcatcttggtgttaaagagaatcctatgatattttttttggggtttgattagatattttaaagtgtgttttatgaatctaattaagaagctgattggtttgaatatgcagagtatggaagatgcgagtttccgacatgatattaaggaagaagaagatttaagtttagattaa

SEQ ID NO: 6515 - DNA, 581 bp, Arabidopsis thaliana
ctaaagcagcgacctgcggcaaacctttcgcattcagccaggaaagttcatacagcgtccagatatccgtaccgtgaaaaggcaggttatccgctttcagacccagcgggtcgcgattcaggctgcgtggaacccttgcagtaggctggcgtcataggtatcccggtaatcggttgattttccaagagtcaggcccgcaagtgcctgatggtttgcataagaagacatgtttcaccgtcataaaccagataaactaaacgacaagtgtatctggtttaagtgaagagagaaattagtggacgatttgaccgcacaagccctgaaagattttactgcacgctactgcgatgcgtggcatgaagagcataaaagctggccgttaagtgaggaactgtacggtgttccttcaccgtgcattatttcaactaccgaagatgccgtatactggcaaccccagcctgtttaccggggaacaaaatgtaaacgcggttgaacgcgcttttgatattgtgatacaacccacaattcataccttttatacgactcagtttgctggggatatgcacgcgcagtttggcgat

SEQ ID NO: 6516 - DNA, 819 bp, Arabidopsis thaliana
catccctattattacaaaagatatgtactccatttgctactagtgaaaataaactcaatgctctgatttattactctgtccctagttttgctaaaaaacctttgtgggcacacagaactataaacaaacagtctttggaacagattgcaaaatcaaaatcatgtttggtctgactttctgtcgggagacattgaagatctaatgatacagactcttcttctgtagatagttaactcgttaaattggtgggtctcacatttattattaccttccagattttgacctcacagaagcaaaaacacagtagtgattgaaaagcttagaaaagaaattacaaaaccagagattgttgattcttagttcatacatagaagaaagaaacagagctaatgttttgtcataaatactaaaaaccgttaaaagtatatttttaaaatgagaaaaaatgtgagccattcgatttttggatagacccatcatgtaaaggtttaagctttttttttgttagccaaagagaaagcctttttagttctattgacaatggcgacgaagctgatttctccgccgttgtcttgtccgtgggttacttcaagagaggtgataatcaaagggcttccacggcggagaagagaatggatggtcacgaagagaaacagagtctctgctgtcacggccatgattgtggagcactttctgttgtttcttcttcagcaattcagattcatcaatggtgggaacaaaaccctaattcgttactgttaatgacggaggctactggtggttattcgttggctagctattatacgtctttgggtttgt

SEQ ID NO: 6517 - DNA, 578 bp, Arabidopsis thaliana
tccccaagcaatatcaggatatgactgcaaaagtatataataataacgtcaatagtcaaatgagaaagttgtgtaaacgttgcatgaaagatcaatcaataataagttgtacctcttggaggaaatcaatgtagtgaagagcaccattcttgaattgagtacctccaccagggaatgttaagtattcaccactcatcttcacccagttttgatgtcccttgacttctgcaagcttggtgtgtggaatattggtgtaccagatctgtggcaacagaaaacagaataataaattgatatcattcacaaataatataaaggaggataaggaggtttttgtcttccttatatgcatattgaatttttaccttttctctgctcttaggccacttgatggatcgcttatacccttcgggaagagaaacaaggcagcgtggagactcctcgggacaatgcctctcacgatgttcataatgctttgtcgaatgaagctttctgatagcttgccaattgtcaaggcaagggatgtagtctggtccagctgtcacattgcagactttccatttaattgaggacacttg

SEQ ID NO: 6518 - DNA, 1255 bp, Arabidopsis thaliana
catgtataaaaaccatgggattctgtaggatatgattgatagctcatgaggaatgtacctttaaagctatatcttaactagtgtctccctcctgggcagcaaaagaatgctgagagtatatgtgcatatcatgattataacaacttttgaatggaccgggggtattttacaaatccgagcggttgggcggaggaaccgctgatttgatcaatggtcttagcaagtccattatagttgcaaatgatggacgtttccatggctcactggtaatgaaacacatacataaacatgaagtctattcaagaagaattcaaaaaagagatagaaaatcttaacgtacttggtccaacaaccctcgattatggctgcaacgtgaggattcagattacgcgggatctccagccgtttacacttgaaaccaaccgcagctacaacctatggaacatttttttgtatgatcatatatagcatgttatgaaatgtagagtgagggacttccaaatgcaaaataatatcattattatttgagatgtttagagtggaaagtacctgagccggatttaagttaccccatggttgttgcaatgtagcaagctcccacaagatgaccccgaagctgtacacatctgacttttcattagacggctcatctcgcaggacttctggtgccatccactcgggctgatatatcaaagtcagtaattatttagcttccattggaaataggacctagaagaaagttacgttgttcagcgtgttttagtttcaaacaaactgaacttacggttccagctgctgacttcgaggaaagaaacgtgctggccttcaatcgcgagagaccaaaatcacaaacctgaaatttcaagacaaattgaggagttagaataataatgttctgattgtttttaagacgacagcttgaggctgctgtatcttttaagtttcagcagattaacgcctttttgtaatgtctccaaaccaatttagaattaaaaatcataatttatatataagcttgtctcacaagaggaataaaatatcaaaatcaatacattggacacaacaatttctaatttagattcaaaccttgactgtatattttttgtcaaccaataagtttggagattttagatctctatgcacaattggaggattgcgattgtgaagataattcattcccttagcctgtgacagagaattggaaagaaagttccatgtgaagaaacactcaagatcaggaagtaatcacccatac

SEQ ID NO: 6519 - DNA, 1228 bp, Arabidopsis thaliana
tcctcaccgctaatagaacatggcgtggtataatacggttctttttgttatctcttgcagcgttaccagcaagctcgagaacctaaatcgacaacatatatataacggatcagacttgtaaactttaaaatggggttttgtcacattcgatcaaaaagattagtatgcaatatttgcatatcctagttactcagagatttgttgacaagagttacatgtaacatgcacatcagtccaaggtattcagattctcaaaacggtgttacatgatgatagattctcaatgaagtttacttgcagatgttttatttaggttttattgactatgcaactttagtttttatgtaacgctaatatatctctatctaagattttgagatttgcaaagcaaagatgttaaacctaattgaaagtgaaaccatgtcttgaggttgatctactcgtgatatagtatctaacaaattcaattttacaacctcagatgattatcaatttaccctaaaatcagaagaagacattctacacctatagatggtcaacgaagcaacagaacaaaacccacaagaattctagtgaaatcgatgaaactgcgataattccgatgaaatgattagctgatctgaattcagaactttattacctcagcagcaagatactcgaggacggcggcgagatagaccggagctccggttccgacacgcttcgaataacgacctttcttaagataccgaccgatcctaccgacaggaaactgtagaccggatttaaccgaacgggaaaccggtttcttcttaggacctccaccacttcttcttccagcggctcctttcttcactttggttccggaatccatggcttgatttactccgacacgacgagaaatttgattctgattctgattttgatctgaccggaaaatatgcaaacggaggaattaagagagctttggcgtaagatagcgaaagaagttggttggttggttggttttgtcagttgatgaatgttagcttttggattggaagtgaatcaacggctatgatttgctgatctggcaaccttcgcttcaatgttttgttcacattaaaaggattaatagcaatactccaaaatttaggagaagttttaaacattgaataatattttctaaattatgctgaacctatattaaatttgtaatatttcttctcaaattatatgtgaaggtttggaaaataatttgatgtatttt

SEQ ID NO: 6520 - DNA, 1275 bp, Arabidopsis thaliana
aagcttaaaatgttgacactatcaactgcgtaaacgtaatacatttcaagtttatcaacttcttacaaataacagaagtaatacatttgagacatgatttaatagaaacaactttttaaaaactttgcgttccttattattacaatgcccacattttaaacaaaccccataggaagctaagacaccaaaatacctcttagctaccgcaccattcaccatcacgtcatcaccatcagcatcacattaccattaccatccaccgttcacccattcaccatcagtctatacagagtcacaaacactaatctccttccaaactcctaaagacctaaatgagtcctacaaataggagttttcatgacagagcaaccaaaaatacagctcccccggaaaaattcacttgttttttttttccagttttaccaaactcccactttcaatttactgtttctcctgctttcaaccaccataacgaggaatctaccaagttttaagagaaatctaaaaggaacgacattttgtcacctgagccctgtgtgaaccagctactcactttgatccacaaacaaaccgtggcaccgcttcttaatctcacagtttgtttcctatatggttaaacttaacccctcacaaattcagagttaatctgaccaccacttgcacttgcacgggttgttgtcgactcgctaactggcgatgcactacgaccaacgttaagtaagaagttccgctggtcttcattagtatgacgaagactcgcacgtaaaagctcggcaggcatttccctctttatagctaactccaacacatcagctgcattgtcgtggttctgaccatggattgtctcgtacttgctcctgcaatatttagtaagaagagagaagaactcatcaaacgaggctctccagagtccatcattcggattcccgtggttgctgacacgcggtggaaccaccgccgactattacttcagcagctctctcaagaagagataccaagacaaccgatgctccgtccccggaagaacttcctattggacggagaggtggctgttctgacgagcaaacaacagctgcaagacaagcactcaatgctcggaggtccattgcttgaacacaaaccgtaactgctttagcaagattagctatcgtctctgctgcaaggctatctgacggtaggccaccgaatagaaacctcaggtggcggaatacagccatacagacaacccgcgcgatctcagtacccggaacaagaagctgtagatactttgtcagc

SEQ ID NO: 6521 - DNA, 571 bp, Arabidopsis thaliana
gaattcggaacggagtctggttcttcatgggtcgccgatataaaagagccaacgcggctccggttgtgatggcatctaagccgttgatgaatctgactttcaaggatctgattgttgccacgtcacatttcggaacggagtccgttatttctgacggcacttgtggtccactttaccgtgccgttttaccaggagatctccacgtggcaattaaagtgcttgagagaatcagagacgttgatcaaaacgacgccgttactgcgttcgaagctttaactcggcttaaacatccaaatcttttgactctctccggttattgcatcgcaggtactaaactaatctctcccaatatttttaatttcggtttagttacgacctaaagttttgaaattgacttaaaaaccccaatataggacatgctttgattcgactaagtagcaaataaattttatgctataatgtatatataactttggataaatatgtagttttagacaaaaaaaaaaggataatatgtagtaatgtaacaaaatattttccgttttttaaccaagttactaacaaagtaaat

SEQ ID NO: 6522 - DNA, 581 bp, Arabidopsis thaliana columbia
ccccaaccgtttcgccataacattctcttcctctcctccttcctcaacccttgtcgccttctctttgatgattctctctatctcagacttctcaaccgatgggaaaaccgctattaacatcactttaagaagcttctcatcctcctcttcaataagtcctctccgaaagcaacaagcataaataccttcaagagccttttcaactcttagttccatcggtattgttggcgcatcaatgttcaactttgctcttctctgtataacccaacaaaagtatcaacctttctgacacatgagtgacatttagtacttgaaccaaataccagaacaaacctgtctagcttcagtcatcaaagcaatgaagttctgttcttcaaactcgagatcattggaaatgctaactctagtaacaccttcaagaatctcttcagatttgagaagacctgcacctactgcagcaacccaacaacacagaagcacatacaaaggctcacctgcctaacaacaaaacagagcaacaacaaggctataattcaacactgatcacacattaacaaaaaacccaacaattcaatttcatg

SEQ ID NO: 6523 - DNA, 516 bp, Arabidopsis thaliana
tttctccaaagtctctcattttccccaaattaaagcacaaaaatctcacaaagttttatttattcaaactctcacttacatcaaaacatgaacaacaacaaaacgaaaacagtttcaaaaagatcccaaaaccatccatcaccattacgaagaagctttctcaaggcttggaagcttccaaatccgcagcttttttcaagaaattatcatcatcatcatctaacaccatcgtaatcggacaagatccaagcccatcagcaatcgcaagcacgatcttcttcatctccgatctaaactcctccagatccacagaaccgctttgatccgtatcgaatttctcgaagatcgaatcgtagaggttcgtcagctcgtcctgaggagtcaccacatcaacgccaaagtgcgattcaagtagcctcatcgattcaaacgcttttcgtagctccgatcgcgataaaacgccgtctttgttcagatccagagctgcgaacctctcgtcgacgctttttttgaatt

SEQ ID NO: 6524 - DNA, 587 bp, Arabidopsis thaliana columbia
tatcatcatatcaagaaaagtcaattccatgaaacttaaacggtccttcggtccataattcattatgattccaaacattacacatggtccatgcacgtatatgcacgccctaaaagttttctcaagtttgtttttattcgtgtgtttcttgataaaggcaagtttatcattataagcaacaaaacccttaaattaaatggaccctatgcaataatagtgaataaaaagtaacataatgtagagtcaaattaaaggagtaggcctatatcacctaagtttaaatttggtggtacttccaaataatgtacatagtaaaatgtatttagttatagtatattgagatttcaatggtgaaaaatgtgaatataggaccgggatgttcatcaatcggattcggagctgcagaagaactgggaccattcttcccacaaaactcgagtcagcctaaactcaagctaaatccatacagctggaacaaaggtatgggtatacataactttctaaatattcaaatattatctctctttctatcaataatgtaactgaattaatgtttttgaaatgtgatttacatagcggcgaatttg

SEQ ID NO: 6525 - DNA, 524 bp, Arabidopsis thaliana
tgccattgtcagtcaaagagaaacatatgttttcaggaaacaagaaagatgttttggcatacccttgaacaagctcaagaagctgtggaagcagttcttggtcgcgaagagtctcgatcctttcggaaatagactctattgagtgtatagagaccttgatctgagtatgtagatctcttattgtagctcttgttttatcaactgccgaagagtcagctcctttcacatcctgattcctcagcaccaaacatttcttttcatatgcaatccgtattcggtctccagactgtcacaacattcaagtcagttaaccagagagaggtgaactgaaaatactattagaagtctcagttattaccttgacttcatcatagagtttcttctcccacgcgtatagtcggtccaatgttgattgatggctacccgagagcatacaagattcttccgaaaattcgctgctgctttcgaattcactcgcccttgaacctctagaagagctgatcaagaatcttgatgaggaagaa

SEQ ID NO: 6526 - DNA, 802 bp, Arabidopsis thaliana columbia
tctagacccgggcgacgactctttcatattcaaaggtttatttacactgcctcaattacagcgcgctatataagcatacaatataagaatcttctcggacatttttcttgagcacgctacatattctatcttctgatacccggttatgcataacccagtgtccgaactcgtttccagaaacgctggtagacgattgaatcaggtcatgtcgcaaccgatcagattgaaatacttttcactaaattcaaaaaaatggttcaaacaaaccaccaacgattttgattcgaagacaattcatttaactagagaaatggataaagtcatccaggcataagtctacaaaaatatacggataaagcatccaagcacaagtctttatatatattaaaccaaaggaaaaagaagttctgcctcgggtcacgaatcatgctcttccacaagatgcgcctcttcgcctcgcagatgggagccggacagttcggtaacacaaacctcgtacgaaaggctttcaagcgatctatggaccccccgctattgagcgccttgatcagcttgtcattggccctcgcctgggataaataaatgaaccggtcgcttgcattctcgaggagtgacatcttctcttcggcagttttaagccttgtggtgaagactgccgaagtttcctacctcgcagtctgagtcacccgagccacctcactgtctcggagtcctatcgccttagcaagcatgcgtttgtagtggtaatctcgaagtttaacggttgttcattacacggttgttttgagctagtttgacagag

SEQ ID NO: 6527 - DNA, 493 bp, Arabidopsis thaliana
gggtcctttgcatatgcctgggcattggatgagagtgctgaagagagggaacgaggaataacaatgactgtggctgttgcttatttcaattccaaaagacatcatgttgttttgctcgactctcctggacacaaagatttggggccaaacatgatagcaggagcaacacaagcagatgctgcgattcttgtcatagatgcatctgttggtgcttttgaagctggttttgataatttgaaagggcagacaagggagcatgcacgggttctgagaggttttggcgtggagcaagtcatagttgcaatcaacaaaatggatattgttggctactcaaaggaaagatttgatttgattaagcagcacgttggatcttttttgcaatcctgtcgttttaaggattcttctctgacatggattccattaagtgccatggaaaaccaaaacttggtggcagctcgctctgataaccgcctatcctcatggtatgctcctg

SEQ ID NO: 6528 - DNA, 564 bp, Arabidopsis thaliana
ttggaacgattaaatttacactttagagattagaccaacactatatgaatgccactatgtctatgttgaatgatctcttcaaattttccattagcgctcaggcataaaatttccaccagattcctagtaacccctaacccgcctaatgatcttagaaagaaaaagaaaaaaaagcaaattgagattgtggggctccacagaagaaaacaaaagaaggataaatttaaatcttgagtagtaaagcgaaatgtcttacagtcatagggtttggatccaagattcggacgatcaaattcttaacaccagaagagagccaaggaggacaactaaaatcagcagatgagatctgaaaataaaaatgcaacttagaaacaggaatcacagatgatagtgagaagaagcctggagatatatattacaaacttcttacctttttgtacagcgtcgtgagactagaatcctcgaaaggcaaatacccagcaagtagtacaaagagtacactccacaggaccacaagtctgcctttgcccatcatagccttgatcattaagaaccttgggacaa

SEQ ID NO: 6529 - DNA, 608 bp, Arabidopsis thaliana columbia
agaggatccctcaaagccttatttcaatgaagctgggtatgataagcaggtcggaactgcggaaggagaaaaaaactcactgggatacaacgagaatactttcttgctaaattgtaaaaccatgatgtatcttatgcggaaaccaccaaaggtaattttgaagctctgttgctatttcttcttaatttcacaattttcacttctcaagttcgtgatgaaatttgtaggattttgaagaactcatcaaagatcatttcagaaaacgcggatattacattttgaaggcatgtgacgcctacatgaaaggatatctcataggttccctcaccaaagatgcctcggttatcgatgaacgcagcagcgctaattcaacttcagttggttttaagcttatgctggctaagatagcaccaaagcttttctcagcactgagcgaggtaggagctgactgcaatgaattccagcatctgcagcagcaataacacaatcctaaaaggagctggatacccgatcgttgcaattgaccaagtgaaggtttgcggcttctttactattacaagtttcaaattcagatatttctgatacgtgtgtagtagagtttttttgga

SEQ ID NO: 6530 - DNA, 591 bp, Arabidopsis thaliana columbia
tgtttacttaaattagttgtgtgttttcttcattaatatgagatcatatatttagacgatatcaatgactaatctgattgattaattgacttgaaatggaacagttgattctagcaaatccaggaccagtggtgattgagaaactttatgcttcaaagttcgtcgaggagattggagagaaaaatatcttccttactgttggcgacgcggtcgagtttgttctacggaagtggctgagcaacaaacttaatatcgtctattcatatacataaacacatccatatatgtatgtgtatatatatatgaaagaaactaatttaagaactatgggttattttcatttttttgagatgatatgatattatgtgtgtaatatatgcatgattgttgaatttgtttggttcacacaatggtgagatgggaacaaagtcgaacgtttgacttttatttttattttttaatctttcaaatgttattttctcgtgatttgtgtttcgtttgagatgatgaataaattgtatttcaacttatattacaattgtgttatttcaccaaatattatatatatatatatctccagatgtgtttact

SEQ ID NO: 6531 - DNA, 572 bp, Arabidopsis thaliana
  unsure (1)..(572): unsure at all n locations
nnnnnnnnnnnnnnnnnnnnnnnncccatgtgtcaaactactaaagctcattgaactctatcgttcccagaaacttggaactcaaatcattgcattctatcttagttatcagagttcacgaacttaaaacagtgaagtcataaaggttcgatcttaattgaagaaccctaacatacaagatgtgaaaagagggaaatgtacttaccctaaattgatatcaacatagtcgcagtaaggttcgactctctttgcagcttccaataacgtatcaggatcattagcacagaactgcacaaacaatggcctgtcctcctacaatttcaaaatctaatcaaaaccttaaattcaaaactgataaatctctgagaaacgccaaaatcaaatgaaatcttaccttacaggtggtgaactcctgatttctatacttctcagtctcggtgaagatctagaatgaacatcggagtataagcagcctgagctccgtatttctggcagagcaatctaacggaagctcagagttatcaaccattggagcaacgatatacttgggtctacaagttttttccagtgtg

SEQ ID NO: 6532 - DNA, 975 bp, Arabidopsis thaliana
actcctgatctagtttacataattaggctctgattttcaagaaaactagtgtgtttttggtatacactcatttgtcttctgttttttcttgtttgttatagatgttatctcttgccgagctccgtggtgtttcttttccaaagttgaaggctaaagctctgatacttgagacaatgatctctcgatatgttattcatggtatagtaaaggtgctacaaaactcgcctgacttgaagaagctaaccatacacccaatggggtctgccggctcatatcccataccggtaattatgaatattccttgaccccgaattttgaatcatcatattgaaatatacttgcattacaggaagagcatattgacatatacttggattctcatggcttgaattgggatccatcctggagctcggagtttaagaacacttcccgcaggaatgtagagtcaaagcaagtggcttcgtttctgcaacttgtgcttaaaaccatatcaacattagagttgattgtcgcaaggttggaaggttatatcaaaggaagacgttttgtagagttgcgtcagatggttccaatgcttcctcgcaacaacgatgtctccattgtgctcagctcaagaagaaaacgattcagagtgacttaagtcattttacatttaagtagtacactagatgaaaatctcttgcatgtttttcttactgaaataatcgaattctgctaaattgattttaagttgtgaaattgtttttacgttttaccatttccaatctactggctagcctcggaaaaacggtctagtgagcgagcattgccttgagaaacagtacccgccaaatccagctctcatgtacacagttcgatattacttctttccagtacttttgattcagcaacagagagttgttttcgggctatgtaagacacaatttgcattgtctgcagcctatccggtggggagctgaccaaggagcaagattt

SEQ ID NO: 6533 - DNA, 546 bp, Arabidopsis thaliana
tattttgattctctcaggttcttggtttcatgtttatattcctaactcctaagttccttggaacgatgtttcagttggtaaattaactcataatccttttttcttaaactcttgattcattgactgttgatttatttaatctaataccattgtattctccacagtatgtcgaaccaacttagattaacttttttggtagccatattatggcggtgatggattctcggtcggcagaacatgcggtgaacttgaagcaggacccggggagctattgaatgaagcggaatttgcagcagcagcagaagagaaagaaactcactcatttgagattgaccctgcacaggtaaatttctcctaatgcttcttaaaagtaatcgaattgatgagtttggtaaagttgtatgatctttacttaactcgtggtgtcatgctctttttctcttggtgtttaggtggagaatgtgaagcagcgttgcttaccaaatgccttgaattaccctatgttagaggaatatgacttcaggaacgacaatgtgagtacaaata

SEQ ID NO: 6534 - DNA, 540 bp, Arabidopsis thaliana
gacacaacgtaaacgtatctatgtggttgattgtatgtacatatgtacaaacgtacacctttctcctctttcacttcatcacttggcttgtgaattcattaattcctgcgaaatggaacctcgaatcaatgaccttcaggtggaatctcgggttcatgagttgctcgattttccggttcatacaaaccagatatcctctgcaatctacgaggtatgtatatcatatcatattgatactactacaataagaacacaacaagtaatatacagatcctattgcagtgtcccaacgaccacatcgaaaaccctaagaagaaaccgtacaattgtccacactcaggagccaagtgtgatgtcacaggagatattcaaaggctactactgcatctaaggaatgatcacaatgttgaaatgagtgatgggcgtagtttcagtcacagatatgttcatcatgatcctaaacatcttcatcatgctacttggatgtaacagtaagttataaactgattatcagctctgtttctgaactttgtgaatttt

SEQ ID NO: 6535 - DNA, 511 bp, Arabidopsis thaliana columbia
cattcttctactccggtcagtcttctgagcaaagggacaagtacacggtcgtagaatatgatgaaaactgtcatgccagtcatcaagaacactacataggtggccgcagaatcctgaagccaccagaacctaatcgtcggtcgctctggagcgcttggaagaccggataagtcatttgtatagttattgcaaggtagtatatcgtggatgcaaaccagattggaatcactcttacaatgcatttcacttcttccacttgctgcaacgtgcatagtttccatggatcggaagccgttccatcggagttcaacttctcctcgggggtcataattgctgctttgtctagaaatctggcaacataataaacaaacatttttcagcaaaacaatagccagaaacatatagcaagagaatcaagaataagtagatatcaatttacctgaactggtcggtgtattttagagtagtaattgcatagttagacgggatatggttgtacagattgacccaa

SEQ ID NO: 6536 - DNA, 561 bp, Arabidopsis thaliana
cgatgtgtctcattgactgtttatacatatatttaataagctctgaatactgaccattctagattctcagcttatcaaacttatttggtcttggcagggtgatggtcttcttcacactgcatgcggaactccaaactatgctgctcctgaggtatgcttaggcatgtgtcttgtatgtcatgcggttgttgcaccatgttatgttactaatagcttcgttgttgctcttgtcacaaggttcttaatgatcaaggttatgacggggcaaccgcagacttgtggtcctgtggagtgatactctttgtactacttgctggctacttgcctttcgaggattctaatctcatgacgctgtatataaaggtatgaagttttgtcattgtttcaaagcttcttccgtcaccagtatcggtgattactgtttctatgttaacactttcgtcatttctcagataatagctggtgaatatcattgtccccttggctctctcctggtgctaagaacttgattgtccgaatcttggatccaaccctatgactgtaagatatatcagtttatta

SEQ ID NO: 6537 - DNA, 894 bp, Arabidopsis thaliana
ggaaccacatgcacctatgaaaaacataactcttaaaatgtcacgcattggatggaaacttgttatttgtagatcccagtaacactggatagtggatacacattctaaatgaaccacatataacttttccgcaatgtaaactaccagtaaacactaacttcaattcaaaggcacatcacactaagaacaatttgattacctcgtccataagcagcaacccccactctctgtttctcatttcttctataatcttctctgcttcttcagatcgtttaccaccaaaggcaatcatattataggttgtcacaacaacaccagcatttccacggaatcgttctttactatcatgaagtgaaacgacatatttggtcatctcttatagtagaccacaacttgaactggaaggcccactgatccactgagacagcattcgtcgccaaacaaagacaactcttctttatacgagcagctgcagaaacaccaactagagatttaccagcaccacaaggcaacactataatcccagatcttgctcgccctgcaaatccaagattcaagatcagtcacaatatttctcaagaaattacaaagataattatctattaggtgttcaccataaagctagatcagtcacgtggaagtacaagtggacatatctatgagaagttcaccatcaataaggaaaaataatgtggatgcagacagctataccgttcccaaacattttgctcaaacttttttcctggtatggcctcggttgtgcatggggcttcagttccatgtcaagatcgggattaacctgagagacaccatcaagttattaacaatcacacacctgcggtgcatatcatctggtaagcaaaaattggcctgaagtgtaatatttgttactca

SEQ ID NO: 6538 - DNA, 583 bp, Arabidopsis thaliana columbia
aaactcaacttttaaacactaaaaaaatgtgtatatttgcagtccagattacaaaataaaccattatataataggatccaactgtattttgacttaaataaggtagttgaaaatatcttgactaagaagtatatttggtttactcggtgtcaagactaataataattagtaagtagtgtatcgaataaatatagcaatcgcttttgcagaaaataaatatctactgaacagatgtatcgttctcaaaggaaaaaaacaacactaattggtgccgcgtatctaaagatttgcatgggaccatatgtctagtagtctagtaccatataaaccgttttttgcttactcgtcagtagtttcttttgaaatcttcacaacactttcaacacttctcagtgaccgtgagcaacgaattattttcagttcaacgactccgcggaaatggaaaattcagaaaatgtccctcttacgatcaaaacatcaatttcactcctaatttgacgagagatcaagaacatgtgatcatggtctctgctttgcaacaagtaatatccacgtcggaggtgcactgactcgaatgcatggg

SEQ ID NO: 6539 - DNA, 556 bp, Arabidopsis thaliana
gtccttgatctgtgcaattaccttgcgaacttcttgtctgccaacaccggaaaactctctagatatggaggtaaaatgagcattccttccttctctctcataccattgccttaattctctggcttcagggaaatctggctctataaagaattgacttgctccaattgtgctcacttgcttcccgttgaattcaccgatcctgcccgctttcaaagcaagaaccgggaataccccagaatcacaaagattttgcaatttctgtccttctgcgttgcagaaattaccccacatggttacctcaacacttcggcctgacatatccttcaactgaagagaccttttctgtacctcagttaagtttttccgcataattgctactgtcggactgatggacgaaacaataccaattacatcagtggtgctgttgttcccatgttttcaatatcacctatgttacgaaaatggaaatgatagcgtggaatggtaccatcatcttcacaaggctgtatcgttgatgcagagtccaaatgtatttcataatcattcggaagatgat

SEQ ID NO: 6540 - DNA, 521 bp, Arabidopsis thaliana
  unsure (1)..(521): unsure at all n locations
nnnnnnnnnnnnctaaagcatttctacctcaagttccagccgcgtaatcccacgatcccacgccatgaacaacccgtaatacactccccataactccgctaaaggcgccgaacaacgaccaatattcagcgcaaaaccaaaacaccactcaccatactcgtttctcaacgctccccccgctatggctaaacccggattgccatgagaagcaccatccgtgttgagtttacaccatcccaagctaggcttactccaccggacttgtctttccatccgactcctggaattgttactaccgctgccacaattatttgcctttgccacctcctgtgcgatgtctttcacaaacttcacacggtctctacactttctattctctccaaacacattcccgcatctccatttccggactggccagttagttgtctttactaaatgatactcaattcgttgttaatttggacattttagtatccaccactcatactacaaagccattctttatcctaattcagatttga

SEQ ID NO: 6541 - DNA, 739 bp, Arabidopsis thaliana
tgcagctccaacaataacaaaaaaagatgctgttactgcccacataggaagagtaaacgggcgtaaaaaggcccaaggattttcgttaagtcttgtgacaggagcaacaacgacaaggcctgactcaatgtatggctgggtgaaatccacaatcctggtccgtttggtgacaatggctatgtcgcctacaacagcatcaaagtcaaccccagtggtgaccttgttgaccagctcattgtagtttggattcgtcaaaccatctccgaaaaagatgaactcgtgaggaaccggataagaaagcagtttcactgcagcttcaaatacatcaatgcaatatccttgaactttgttgctacttccattgacccttgaaacaaagtccttgaagcttgctctatcaggaacaccaattcttagccgccttccattgttacgaaaaatccatccacgaggcgtaactgaagtaccaccaggccaagttacagagttcagatgttggtttgagctagaacggttaggaggtttgctgtaaaatgattcaggcggtacaatagaaagaccagaatagttagaccagtaacctatttggtgaacccggtcatcaaccaagttgataatatcatatgaaggctgtagcattgatctgtctggatgaaattgaaccggaccagttagaccagacatctttgtatgcacgaatataatcaagaagttgtgatccttgatcaaatctgcttaa

SEQ ID NO: 6542 - DNA, 518 bp, Arabidopsis thaliana
aagaagacgtgtagggtaggctttaatccggagttcctcttgcagacatcatgcgctttaccgggctgtcagaagaagagttggctgcggcgagtcagtaaagttctgtctcgccatttcaaaagccacctacaccctctgcttcaacgccaccagcaggtgacaaaactcggccggatgcgaaataaatggcgcatgggccgctttggcgaagatatatgattcgctgtgaggccaaagtttatccagcatcggcaccactttgcgcggcaccagaccgtcgagatagccatacaatcgcaaaaacggcatggacacgttttgcagcggctgacggagatcgaccgttttcaggatttccaggcccgccattaagcacgtcaacctccggcatcggtaacgccagaacggttttcttcaacgcccgcgcatcctggcgcgccgtttcagtccccatggtttgtacgccaggaaccgctccactgtacgctgaaaatcatcactgagttgctgctgaa

SEQ ID NO: 6543 - DNA, 362 bp, Arabidopsis thaliana
ccgggattatctcgacacctgtccgccacctcaagtctctatcaaatctgcggaaagtattaaatcattaattatcacacgtatgagagcttgtcgttcaattaaaaccgctattgaatggatatatcgtacacgtgtgataaagtttggcaaaagagtcagaacttgatactaataactcacttcgatttagaatttgttaaccccaaaaaagtatgtgaaagtaacattaatgaaatctgtcctaaccattatccattatcatatactagtactattttctcttaaaaatgtgattaatgtttttaacaatgcgtacgcggcatagtacggggagggaatgaggaaaacgtcgccgggat

SEQ ID NO: 6544 - DNA, 712 bp, Arabidopsis thaliana
gtgaatacttactgcagaattttgatcttgatcatgtgatggaaattcttatgagatttcctttaacctccctgacgaggttcaagtgcgtctctaagcagtggtcatccctcatttctagtcgatatttttgcaaccttttatatactacggtcacacgacaacaaccacgcctatacatgtgtttaaaggatgacggcgggcaccgtgtactgctatctatatcatcaccgtctcgaggcaacacttctttcgtggtggtcgagcaagatttgagcatcccagggatgggaggcttcttcttgaacgttgttcgtggcttgatgtgtttctctcgcagaaaaaaggcgcgtatctataaccccagcaccaaacaactcttgaccttacccgccataaagtccgacattgtagctcaacaaggtcaaacgaagcatcatccccggtattacatcggacacgaccctgttagtgatcaatacaaactagtctgcacggttgcgatatcctcgctattgccacgtttgggtaatctgaagtcagagcactgggtcttcgcactagaagctggaggttcgtggaaaaaggttgtccactggaaaattatcgtcatcatgccccttccacggaaggacggtctaccagtggatcagtagtgcgttatatggcctggcctgataattataattgtgtggttgtgagtttcgcatta

SEQ ID NO: 6545 - DNA, 907 bp, Arabidopsis thaliana
ccaagttgaaaaaaacattacacgaaaatagatacaacgattagggaatcaaaaccaactaacgtttcctactatcataaccaacgaagttactaacagctttagagccttcagcgacacttggcggctaagttcaccaggcagaaccaacctaaccgctgcttcgatctccctcgaagacaacgtcctccgctttgtataatcgcttaacctcgctgcctcctgcgctatcctctcgaacatatctcccatgaacatgttcaccaccgtcatcgccttcgacgttatacctaaatccggatgcacttgcttcatcaccttatacacatatctcctatactcatctcccgccaaatcgtctctcttcttctttttcttcttcttcttattctcctgcttcttctcaaccttatctgttttcttcaaagtgccttcactcttggaagcgggagtttccggtggctgaggtgaaggttcatctcgaacctccaccggagtctccggcggctgaggtgaactttcatctcgatcatccaccggaatcttaacggtggtaacgttttctccgacgggaagtgaccgttcgtctggaacctccactggaatctcaacggtagtaacgttttctccgacgggaatggagaaagtgagatcttgcgtctcttgatcgttcgctgtctcggtgatcacacacggatctccttcttccgtgacggttactttgattgtctcttccactactttcttcttcttcgtcacggaaacaacctttggttttctcggcgccatattcttcgttagaaataaccgaaaatgttatgtggttaagatttaaaaagggcgttttgggatgggtcgtaacagtacttctgcgattgacatgtggtgccacgtgtcgttcgaatac

SEQ ID NO: 6546 - DNA, 509 bp, Arabidopsis thaliana
tgggtgccatgcttattttcctctttagtgcttgggcatgcgcggcagttggtcgaactgcacaagaggttgtcaacgaagtaagaaggcaatttattgagaggcctggcataatggtgagcatatttttccttttgagtgcttcaccttttcttgtgtattggcttgtaccgttgttgactagcaaatatcttgttgcaggagtacaaggagaagccagattatagtcgctgtgtcgccatagtcgcatctgcagctttaagagaaatgataaagccaggagctttagctattgcatcacccattgtagttggtaagtcagtaatatctactcgtttttctttacttactgtattgaaagtttgaaaccacaacattgtgaccaaaaacaaacctcttgttctctctttcaggtttggtgtttcgaatcttgggttactacacaggacaacctctgctcggagcaaaagttgtagcttctatgctcatgtttgcaacagtttgtggta

SEQ ID NO: 6547 - DNA, 541 bp, Arabidopsis thaliana columbia
agtttaaaatcttgaaggaaagacaaaacaccaacgaggaaattaacagaaccattcttcagtggagtttgtctcagcggttctgaagagtctcgattgcctttttccacactgaagctctctgttttgcgtcttcaaatgataaaaccttctttggctgcacaaatgcaagaagaggtcacaatttcagtttcatcatctttgatctttggtggatagaagaatagggaaatgatgagtaccgtgcaaatcttgaaatgtgaagggctagtgactacaacgttgaggtcattcgagttatcagaccatataatgtttcctttcacaactagttttgacgggtcgacatagatcagcttgggtttgttggtgagtattagctgcaccttcttgctcgttattttctgaagcttcttcaccgctgatatcatcagaaccgattctcctggctctaaaaactgttgcctgtttacaaatatcacaagaaaaaaattagcagattgtctaactgaagtatagttttaggagcttttgacaaggt

SEQ ID NO: 6548 - DNA, 395 bp, Arabidopsis thaliana
tgttgtgcatgtgaaatagtgtggaagtacgacatgaaagtagattcggtactacaagtgacaaaagaggattacgagagctgtatcacagcatttgcctggaggcgacacaatgatggtaagtctaaaggggaacttgacaatgcgggccctgacctctacattgcggatgctgttggaaaccgtgctactcgcatagttaatactcatcggagccgagctgaaacctacaccggtaccagaggttgtgataagcagcggttggccgcgttccaatgtcggcggacagtccccaccgaatgatcatttatttgactttgagtcttcaaatcccattttttatgttttctagtgtctgtttgttctttatgcggggacaggattcgaacctgtaa

SEQ ID NO: 6549 - DNA, 464 bp, Arabidopsis thaliana
tatagacccgtggtataccgcgggttaaaatctagtatatactaaaactgttgggtttttttttttatatataaattaacaaaatttatatatgctgcaaaacgagacctggttatatttggttatgagttgaaatagcaagttacctgagcaccaaggagtttcatggaaagtacattaaaggattgtttctctatatcagcagctcccatgaaaacagtacactccaaggagagctttgcacatgcagccgctgtggcgactccatgttgtccggctccagtggccgccaccacacggctgcaaccaagccgccgggaaatcatggcctgagcgagacacttattgattttgtgagacccacagtggctaagatcttcccgtttcaagtatatctctggtccaccttcgatggttggaactatgttcttgtagtgttcggttagacgttcggcgaagtagag

SEQ ID NO: 6550 - DNA, 502 bp, Arabidopsis thaliana columbia
tggccttcgagcctgtatcgaacaatggacatttggcttatatcctgcgtgcatcaagtatcttatgtcagcatttgatgttcctgaggtaaataatgtactgtgttctgtctctgttttgattaaccaaagatcccatttgaaacatcaacctgagtactttaacatcaggtgatggcggttacccggaccaacatttgcaaacatggaatggaatcgctatcccgaagcggactagttatctattatgcttctgttttcctttacttttgggtcttctcaactcctgtcgtgtctatggtatttggaagctacttgtatagctgcatcaactggttccacatacactttgatgaagctttctcttcactccgcattgccaattacaattctttcacccggttccacatcctagaagatggagatattgaagttttcacgctcgcagttgataaggtaagaaaaaactctacttgagaccgatgctacctgataatgctgc

SEQ ID NO: 6551 - DNA, 566 bp, Arabidopsis thaliana
gtatcagatagcgcatgtgaaatagtgtggaagtacgacatgaaagtagattcggtactacaagtgacaaaagaagattacgagagctgtaacacagcaaatcccttgaagcaatacaatgatggaaacactaaggttgcgcttgacaaatctggcccttacttcttcattagtggtgctcctggtaactgcgctaaaggcgaaaagattacccttgttgttttggctgaacgcaaatccggtggtggcagcagcagcggtgacgctcctaaggtttctcctgttagtcctacggctcaaactccagctccagctcccggtccagctgcagcccataacgctgcggtggggttgaaggttgcaagcggttggttcttgaccgcagtcgtggttggtttggctatggcttagagcttagaggggtttggtcgagagaatgtagtttttattgagttcactttttagcaagatttagttttatttttccagattgttgacgtttcttttgtcccttagttttcattataaaagactctctttctgttttttgttatgtgtttgggata

SEQ ID NO: 6552 - DNA, 580 bp, Arabidopsis thaliana columbia
  unsure (1)..(580): unsure at all n locations
ggcttcttggctatgctattacccgttgagcttagttaagaactggctaagattgtactcttctgtgtactgtgattgatcccacagttcttctaagtttcctagaattgccttcattccttttccagttccagcaatctgatcattatcctctgatcccttcttcgaagacccaccaccctacaataaagaccgattattgaggattatcaatcttcttctttcgttagagaattgctattaaataagatgaatagcatacctttttagacgtttcagctgaagcaaacaagtcaagcaactgatcagtgttcattgtcttcatactcgcattctcagcattgattaccgtattggcaaccgacactttgaatttttggagactcatcactttctcttcaagtgtgccacgcattatcagacggtgtacatttacaactctcttctgtcccaatctatgcgctcagtccatcgcctgccagagtttgtcagctctatattagcaaactcaaataataatacactatccaagtgtgtgcgatactantntaaatctttcgatcaaaacgaaagagatgtg

SEQ ID NO: 6553 - DNA, 520 bp, Arabidopsis thaliana columbia
gtaaacgccattggtccatcaaaatgaaccagcttccctccagtttcacctccagcttcagcttcccctcctttctcagtctttgcggctacagctccaggtccagcctctccgcccttggctttggtttcattggctttcttcctcagcaagcaacatagaacacaaacaaggataagcataactatgaggagtgctccagacgcaatgaggatgatgtctttggtactcagattcctgtgggatggtttcctttctttttcaggagacggtgaaggaagagtaggacatggtgtcgaaacgctgtatccgcaaagcagtgagttcccgacaaaagaagaggaattgaacttttgggacaagagagtaggaacaggaccagataagttgttataagagacattgaagaagttcaggctttccaggtcagaaatggaaataggaatctctccggtgagtttgttttgagacaaatccaaatgtataagagaagaaatgtccctagggtttcagggatatg

SEQ ID NO: 6554 - DNA, 642 bp, Arabidopsis thaliana
caaacaaagctctttatacaaacttgagctaaccagaacattcctctaggaaacaataaaacgatatactccacaaacctgaacaatgcggctagcatcaaactcaaacccttcactggatacagaagaatcataaagtcgactacactgatctaatctctgactttcacttctatgctccaatatcttctctctacagataacacaaagaatcaataaccatcaacggcatcaaaaagattctaaatttattgattctttaagatttcaaaatctgaacaagaacaattcaacaaaataacagtaagcactaaagcaaagcctatggagaaaaaggaaacgaatttaggcgtttaagtaaaagcatactcaatctgaagcaagagtttctgagaatcgggatgaagatcggcccacttagtactgtaattcgccggagctttatcgttggtgaacaaatacaactgttgttgtacttgctgctgctgttgctgatttagctgttgctgctgctgctggaactgttgcggctgaaacaacgacgtttgctgttgttctgcggttcgagaagatggaattggttgctgtgggtgcgatcgagagatggaattggttctcggctgcgatcgagagatgaatggt

SEQ ID NO: 6555 - DNA, 503 bp, Arabidopsis thaliana columbia
  unsure (1)..(503): unsure at all n locations
nnnnnnnnnnnnnnnnnnnnnnctaaagcccggataccgactatctgctgactatctccaacgatgcgtggtttggtaaatctattggtccatggcaacacttccagatggcgcgaatgcgtgcgctggagctggcgcgcccactgttgcgcacagcaacaacggcattacggcggtgattggcccgcaggtcgagattcaggcgatgatcccgcagttcacccgcgaggtgttaaccactaacgtgacgccgaccaccggactcacaccatacgcacgtaccggcaactggccgctgtgggtgctgacggcattgtttggttttgctgctgtgttgatgagtctgcgtcacggacgtaaataatcccttcttatcgtgccggaatacatcccatatttcggcacgctcaccggatgcggcatcagtgcattatccggataacaatattctcctatccaactttggcacatctattgctttgttatcaaggcaaccctgaaac

SEQ ID NO: 6556 - DNA, 1512 bp, Arabidopsis thaliana
ccccatgtacttgtccttggatcgctctttttccttagcagcctcaacgtcacgtttgtgttctctatctttttcctcccccttcactgatctagataaattttcttcactaccaagtgattctgcagcaagtgtaccaggcagtgttatttctattcctataacgtacgaaaaaaaagagaaaagtatactcatagacaagaagctaggagactgctgcctacttttgctcataacaccagcaaggtgctggaaaccatctgcacaaaaaggatgatgatcagaaacagctagataacttattaagtaaaacgacagtatgcaatcttatataccaatactctcacaacgctcaaagaactgattgaactcatccatgagatcagggaattttcaagcacatcggaaacctggatgaaagaaagtaacgtaaggacaaaattttacccctataagtatcaacacatgcagacctaccaaattctgcagatctttcctttggataattccattgctaaacatattgagacacttcaagaatgcttgataatcatcttggctgcataatctctccttgactttctcacaaaacaaaaatgcttggttgtacatgcctaacacaataaaaggacatacaaaaaatatgatattgtaagtatcagaaaacagaaaagactggttgcacttgaacatacctgttgactagaaaattagaaaactgaaattgtggagccttaaaaacagaaaagttgttggttctccatataaataaaagtcgcttactttttagattgtttttctcagaatgtgaagcaggaccagaataagcttcaaacccctccattcttctcgaggacttccttttctctgaaaaatgttgcaagttatcttgctctgcttctccatcttccaaatcacggcttctcctttctctattatccttatcaacacgtttcctctgatctctgtgcatcttaaccattgatttatcatcattaaggtcagaacggtcaacactgtgatcacgatcaccccgagaagcaacagttctttctcgtcggctgatcctgatgatgaaaaatgtatcagcacagaaaagagagtcctgaaaacaatatagtagaaccaggaagaaacgtaaccgataccataccttctccataaacattcgacgcacaagaggagggcctgatccccggtcatcataccgttgggcttgactacgaagtaactgggcttctgtatgaggcgccaacgagtctggtaaaaacctagtgaactcttcaagcaaatccgagtggtcctcaaaaagagtagacacctaaataaacagatattagaggtataaaatatcgagaattatcgacgtgaaagtatacgagagatataatcacttcaatgtgacattacctcattgtaaacctcagtgatgtccttattatccttccgatacatatttaagatttccagaaacgacttatagacaagttcattaagtcgagctcggtaccg

SEQ ID NO: 6557 - DNA, 310 bp, Arabidopsis thaliana columbia
cgcctaagaagattcgatctggatgaggcaagtccaaggactgcgtcttggaccgcggagattggagccctagccaggatcatcgcttcttcttctagcttcactacgtcactgggcctggagacgcatttggatgctgcttcttcacgagttagaatgaattttagctgttgtgtcatcgtctctgtctgatgtacgattgtgtttggagtttatatgtttaaagatatgacataagatgagaagtggaagcaagcctagagttggttaaccatttagagaggtgtgttgtgtctgtttgcttattgtc

SEQ ID NO: 6558 - DNA, 501 bp, Arabidopsis thaliana
tcattgatgatgacacccgagacgttgagcgttgccgtggtaatgaccaggccgatcaactgcggcgccacatgcttccagatgatgcgttgacggctcgctccgactgactccgccgcgatgacgtactcctgctcgcggatcgccagcgtctgggaccggaccagtcgcgacatcagcggccaggacacgaggctgagcgcaccggcgacgagcgccagcggcctgcccctccaaactggtcggtcaccgctggaccgaagatcgcagcgaccaggattgccagcaagagcccggggaatgcgaagagcacatcggcgatgcgggtgatgacgaagtcgactttgccgccgaaatatcctgaggccaggccgaggggcacgccgatgacgagatcgagcaactcgacgtaggccgccaccagtaacgacacgcgcaggccgtggatgagccgggccagggtgtccgtcccaggttgtccgtgccgaagggatgggtagg

SEQ ID NO: 6559 - DNA, 1297 bp, Arabidopsis thaliana
tctttttatgcaattttaaggttttgagttatctattatttgtcatgattctacaaaatgcgtggctctttggttctgtcaatgtcaccttccgttgaatattaattgtacaaaagtatttgtggtatttaattaggactctacaaatcgtgttatgtgacttgacttggattattcgctacctaacggtcctcacccactcaaaaaggaccaaagattctctacatacacatatatgatggtgatagtagttataattcacatgatgattaaatgttttagtcacaatacctcataaatatgccatgttccttgttgtaagtcgtaacttacaccttccatgacatcaattaattaagttgttacaaaaaaatatcaaaatactgtaataggaaaataattattatgaaaacattatttttttccctttcaaaatcttctgcatgacaaagatcgagtctttcgtacaggagttggagtaggtgttgtaacacaaaaatctggcgtacagacatatcctttctccgaaataccctttccgctaaacagctccgacaagtggtttccaatatcttcagggttatatcggacattccactggccttccgttcccgcgaacataacggcatttctatgagcgttgtaaaaatcgcggtaaaccggtaacagttttctcccgatcgaaattctcatctcgtccaacagcttcggatctagtacgatgcactcactctgtgcctcgcacgtgctctcgaaagtctcgttgaactttttgaattgcatcatcgcttcttcgggcgacatctccaccgcctccgaagtactaatcgccggacacatcgacgccaatggaccccatgccaaccgctcgtagcttcttgcgaactgtctaactttctctgagtttttcgctatccaatcgttgccgagaacatgcttcacgttcgtggatcgagcacgtgagacaacgtgttggagattgttggctaagaagagatactgcattgagaagtccttgtacatttcagctttgccgtcgattttacagaggaggacgagaatcatccacgcgaatcgtgcttttagctccgacactggagattcttcagattctgagacattgaagtaagatttaggaagcaatgctttagcggaagatgatgatgatgatccttgagtatattaatgagagcgttactgtattccgcgagtcgagagatgtgattcatggcggagatagtcatcggatgaactcctcacacgaacactgtcttggacgagctttacgtatttgaga

SEQ ID NO: 6560 - DNA, 537 bp, Arabidopsis thaliana columbia
tcataagatcctttttatcgaaataaaaaaggaaacaaatccaatcatagcaagctttttcttttatttaataaacaaaaataaaaagcttcccgaaatggttaaaatccagaaccactaaagtcaaccaaatttgtcaaattcatccacgtcatcagttccatctataaaacgctcacgccattcgtcaagtcccaaaacaagagtccaccatgaaactcacaaacgctctcttcttcttcttccttatctgtctcctctctttatcgtcagcttcatcgaacaagcctcagctttcaaatggctcgaccatcttattcacgacgatagggagacccactttcgaattcgacatctttactctccccacgagccaccgtccaccgtcacccgccgatgagcaccgtctcaccgatggcaaatctattaacttcaacggctatttcgcttctccttctacggcgttaatctcacttctacccgaaagaactcagattcaaccacaagacgtgcatctcatctacgtcactgagagag

SEQ ID NO: 6561 - DNA, 645 bp, Arabidopsis thaliana
atgaagtctttgtaatgtccgtccataatcatgatttggtcgtgatttgttcccctatgtgtatgtacttgtggactttggatagtttttaaccgcattagctttttatgatatctctacaaaatgtgtaaatcatccttgagctatatgggtaagaatagttttttttttcctaatgagaaaagaagcctgagaaatgagagctcacgtgggggaaaaataaatgagaagtgtaaccaaaaaaaaaaaaaaagtaaacagatcctaaccctttgcacatcctatattaactgctaaaaacgtactcgtatagatcaaacgagatcgtcttcaagataatcatacacggagatactaagtttgtcctcctcctccatattcgccatggaagatctctcttcacaaccaccactcccagacacagcaccatggaatccggcgtccacggccatgccggcgtcggaagcagctttttggatggacttaggagatatattggaggcgagggaggttgtaagtaagtgagggaagttaaaagattcgtcgtcgagggaagatggtcggtgcaagcagtaaaaagcgacgtcgtgggctacggcagcgcattctgcggtggagaaagagcgtaccagagacgttgacgag

SEQ ID NO: 6562 - DNA, 519 bp, Arabidopsis thaliana
cataagaattatagcaagcaaaaataatacttaaagggttatacctttattgaatacattcccaataattttgctaaaggagcaaagacctgcaaagtctcccctgcaatgctggactggacgaaactcacaaattcattagttatcccaaatgaaacatagagctggagctatgggcaacaaatctcaactacttgaaagaatcacctgcttatggggaggcatgtggcagagagttcgcatattatgcaaccggtcagctagtttgacaataatgacgcggacctggattgaagcagttagacatgctgataaatatataaccacaccagctaatacaaaatcttaaaagactgaaacctcgtctgtcatcgccagaaacatctgccgcaaatcatctgcttttacatcttgtattgtttcactttccgttttacactttaactttcccagttttgacacctaatagggaaaaaaacttttataaataatgaacttcatcgcacaggaagcgtggag

SEQ ID NO: 6563 - DNA, 582 bp, Arabidopsis thaliana
cctgttgaagtagcacaagtcaaaatcttttccactgttccaaacattgggatgagtgccttctcgtcttacataagtacatgtcttggttttgcagatagagaccatgaatcaggatttaagccgttctgctattgcagtttttgctggaaccagcagtgaagagaatgttaatcaaatgactcagccgagtaatggtgattcttttcttgccaaaaagctgacttcagaaagtacacatcgaggagccgcctacttaaggagtaggttgcctatgctgcctcttctagaccttcataaggatcatgatgcagacagccttccgtcgcccacaagggaaacaacaccaagtttacctgtaaatggtcgccatacaatggttagaccaggttttcccgttggtagagagagccaaacgactgagggtgccaaagtctattcatatgagagtgatgcccgtaaagcagtttctactaccagcaaaaatttggtcttaattcagtgtttaagacagatgaccttccaagcccaaccctcatcaggagaacttaatgatggcaatggagacgttggtggagaggt

SEQ ID NO: 6564 - DNA, 352 bp, Arabidopsis thaliana
tgatccatcatgaggtcgatcttgttagggaagcggatgggggccggtgaaaaaaaaaaaaaacttttgattccctcttcttctaaaagccatgaaaccgattcaatctccttctggagtagcttcacctatgaagaaccgtttacgcaaacgtcctgacctaagcttaccactcccacaccgcgacgtcgctctcgccgtacctctccctctcccacctccttcttcctcttcatccgctccggcgtcttcctccgcgatctcaaccaacatctccgccgctaaaagcttatccgagctagaacgagtgaaccgaatcggaagcggacgcggaggaacgggttttcaaagt

SEQ ID NO: 6565 - DNA, 884 bp, Arabidopsis thaliana
caaatcatttcttttatcattaaaattcatacatattcattctctattataaataacgatcttcttttacgttatgcaaggtttttgctacaaagaagaaatagctagagggaaatactgctcaccgagcactgcgtacccttgtacaccgggaaaagactactacggccgcggtccaatccaaatcacatggaactacaattacggtgcagctggaaagttcctcggactccctctcttgactgatccagacatggtggctcgtagcccccaagttgcctttcagtgtgccatgtggttctggaacctaaatgttcgtccagtcttggaccaaggctttggagccaccactaggaagatcaatggtggtgaatgcaacggtaggcgtcctgcagccgtgcagagcagagtaaactattacttggagttctgcaggacgcttgggatcactcctggagcaaatcttagttgctaaagatgttaaaatgtggttcgtatgacacggtttcatagtataagtgtggtcgttcacgtgtgagtttataactaaaggtgtcgaataaaaaagattatgcggtgtatcctaatgtaccaatgtgttgcttgaatcggttgtcacagaatgaagtatatcaggctatcagccaatccattataaacgcatttactaaatttcaaccttttttctggttaatggttatccaattttacagaggatagtgtttgaattttttccctgggaacaaattacataagctgaaacttcagagaaaattctttacgaatgaaagaaaaagtgtgaacaaatggtaaattttataaaagattatttgtctaagtggttccttctagtgattctcgattcaccatttcgtcagacactt

SEQ ID NO: 6566 - DNA, 541 bp, Arabidopsis thaliana
gatcctcccaagcatcaggatccctcatcacagcataaacgttaacaacgactgacgtgttctctggtacatagaaccctctgatcctacacccttcttttgtgaaccttaagaagaaaggccccggcgggtgcagtcttatcgtttccttaaccacagcttgcaaataagggagctttggtaaatccgtttcttgaatcaaccttgactttcctaccacgctatcgatttctcctctcagtctctcaagaacgttagggttgttaatgatctctgccattgcccattgtattgtctgcacttggttttcagtgcctgcaaataaaagatcctgcaattgcaaaacgttatcttaggcggatcagattttaatctcaatgaaacaaactgatgggagaaacatttaccgcaataattgacttgatatggttccttgtgatcttatactctgcattttcatcccgataagctgccaacaatgcgtccatcaagtccgtacgttgatgatgcacgtccagtttcttttcgtgtccacaagaat

SEQ ID NO: 6567 - DNA, 546 bp, Arabidopsis thaliana columbia
gggctaacgaaaaatacatgcctttaatttacttctaagtatagtaacggacctactattagggaccataacaattggtttcggaaatccttcatatcaaacacatgttcaaccaaaaccatcaaatgctcaaacattacacctaacattttgtgttctctctctgtgaattattttgaaagcttgaaaaaaagaagtactgattcgaagaaaagaaaatgtagatatatgtgattaccaaaaagaaaaataccaataaattagaagttactatattacgcgggaatttatcaaaaaaaaagatttgttgtttactatgtttttcttgacaatcagttacatcgcgtccatctagttgaaggtttgcaagataatactgtaacagtgtcacttgttaactgggctctgccttatgcacagcggtatatctttactcttcatcatgagaagtatcccaaacaaaaaagacagtccatagtcaagtcaaacgtctacaagtctttgttgttgataagttacctataggaatgtcatacgcaatatggc

SEQ ID NO: 6568 - DNA, 301 bp, Arabidopsis thaliana
tgaagcatatcatgaatggttttcagctcaaacacacatgcaaaatgatgaaaaacatttgaagatcacgaaatggtgtccaccgttgcctggtgaattgaagtgtaatattggttttgcctggtcaaaacaacatcacttttcgggtgcatcttgggtggtacgtgattcacaaggaaaagtcttattgcatagtcgcagatcttttaatgaggtacattctccttactctgctaagataagaagctgggaatgggcattagaatctatgactcatcatcactttgatagagtcattttt

SEQ ID NO: 6569 - DNA, 1202 bp, Arabidopsis thaliana
gatattatagcgtaggaagtcttggagtaactggagatttcgaaactgttgaagaagtgagggtaaagaactgcacttttacaaaaacacagaacggtgtccgaatcaagacataccaggttgtccattaatcttctttttttattatacatcattagttcttggtcttattcagcattttcacaaactaaatctgtttttttttgttggcgtgaatgttttgtagaacggatcgggatatgctcggaaaatctcattcgaggatatcaacatggttgcctcagagaaccctattatcatagaccagacttaccacaatggaggtacgaacggaggaataagcaagtcatctagtagctatcagaactgtcatttaacagcaaaacaacggactccgtctggtaatgggaaaggcgtgaaagtgactgacgtgcgttacgctagaatccgtgggtcatctgcaagcgatcaagacattacattgaactgcgatgcagacttgggatgctcagatatagtgatggacaatgtgaatatggtttcagcgacatttggtcacaagttgttttcttcctgcaaaaatgctcatgggtctttatttgcttcaaaagtggattgtctgaaacattaagtatgcctttcttgtgaaatcctttccttcaagaaccaagaaagaaaatggagtcttctcaatttttttcttagaagagaaccgtttttcctcgagttttttttttaaagtagaaaacgtctaatttgttcttattattggctgaataaatgtttcagtttgttacttttactattgcaataaatcctgcagaaaattgggttttggggtcatatcatctaagaaagactgaaactctgaggttgctttgaatcaaaacaaagttgggattttaacctctgcaaaaaatgagattatggagaagaatagaaaggttcaaacgctctttgactgtgtaacagagagattgggaaagatgttcattaagaaccatggagcagctagtgtaaattagctacattactctatcaagaactgaaaactgaaaaagaggtactaatcaaatccataactggagtccttaagttgattgaatcattgacaaaagaacaatgattggttcatgattatcaaaccaacatattagaacacaatcaaacaaggctccaagtttgaagttttattgcaagtt

SEQ ID NO: 6570 - DNA, 599 bp, Arabidopsis thaliana columbia
tgaaaccatctttcttagccctttggaccggttttcatgggaggaggaggcatgtttgaagaaattgggtgttttgatccaaatgctccggcagaaatgactgctgagagcagtttctctccgtccgagccaccaccgacgatcacggtcatcggtagcaacagtaacagcaactgcagtctagaagatctctctgcattccacctcagcccacaagactcttctctacctgcctcagcctcagcttatgctcatcagcttcacattaatgctactcctaattgtgatcatcaattccagagttcaatgcaccaaaccctccaagatccatcgtatgcgcaacagtcgaatcattgggacaatggttaccaagattttgtgaatttgggtcctaatcataccactcctgacctactcagtctcttgcaattgccaagatcctcacttccacctttcgcaaaccctagcattcaagacattatcatgacaacatcttcctctgtcgccgcctatgacccgctcttccatctgaatttcctctgcagcctctaatgggagttcatgggagtggataagatcaactgagctaacaaggagtg

SEQ ID NO: 6571 - DNA, 557 bp, Arabidopsis thaliana columbia
tcgaaatgtcgatcagctcttctactaacaacaactccagaatcctcatccaaagttgcaaaatttgactgcataatgacacattgatcaaaacctataaacaacaaagaataatacacaagtaaaagcaaaatcaaaaaccttgaaagctatgtcaccaggtgacatagctaatcctgcacccatagattcaaacgcgccacgtccacggtaatacactcttggatcataacccattagagaaagatgagcagtgtcactaccacaacctaatccaacttcaactggatccattaaaccattgattccagctgaagcaattgcatcaaggttaggtatttctgctgcttgcaatggtgttttgtaacctaatcttggtattgatacatctcccaaaccatcaattagtataaaggcaactcttttttgaacttcttccatttgctacaagtgggttctgttccaattggtaaagaggaaattacaagtctgagactttaagaattatcaatgattcacataacgatcgatctcttattacaaagcaatgtagagat

SEQ ID NO: 6572 - DNA, 238 bp, Arabidopsis thaliana columbia
cacacaaaaatggtcatggcatctacattctaaagtgctcaaaatgattaggaaaagaaatgaaactattaattctgttaaaaggatattaccaaacgatgccacaagcacctctgccaataggcctaatcggtggcttatactttgcggggagttcaaagatatgcccaaatagattgtactggatgtatctgccgtcatggctgagagtccccggaatatcgatagtcgtcttgag

SEQ ID NO: 6573 - DNA, 553 bp, Arabidopsis thaliana
cttttcccctgagattccatctgttagagagaataggaaaaagagaccataatctttggacggatgggtttgtaagccggccaatgagagtgagagcgttttcttttattagctcgaaagtgtccagctcagtgggatacgttcttcaatggctacagaacgcgactttaatacggtggggtaagtggaagccagacagcactaaccagctcaataaatgttcttggtgaaaattatcaaggcttaacagggttaatacggttaacaggtttagacagggttttcgcgaacagttataggtttcagtgaaagagaagactacctggatgatagaaaactctaaatgggagcatggaaggacagcaaggggtaagagcaagcaaggagcagggaggaaacatcaccggagcacctcaaaaccatgtcggaggacaccatacttggttaatgaccgttggagattgctaaaaccagtggggggaacggtaataactggttaatagatctcgttaatagcaggagacatccttctaatatccaacaatgggaaacg

SEQ ID NO: 6574 - DNA, 608 bp, Arabidopsis thaliana columbia
tgaagaaagtttgcaagacattctattctcttgttaataattactgtgggcatgtagctataaacttatttggttttcttataagagcatgccagactttgtgctcatgatgcatttattaagcaaaagaactattactttttcaggtcttacccaagacggatgcagggcagaagcatcagctgttctctttacgagtgtcaaatctgcttgtgccgctgttgcaaaattacatcaaacagaagtaaagggaaatctcatttgggctcgtcagcttggtggggaggtgaacatcatttacttttcaccactgtagctctattgggaagttaaccgattagcatgtgaatcagttcctaatttattggtattttatttggaggcagggttcaaaggctcagaagtggaaacttattatccgaaatcttcctttccaggttcttaaaactcgaatttttttttgttatctctacaatttcattaataaatgcgttgcttctcaaggatttttctgaattttgcaggctaaacctagtgatattaaagtggtcttttcagcagtagggtttgtctgggatgtttttatcctaaaaattttgaaactgggt

SEQ ID NO: 6575 - DNA, 491 bp, Arabidopsis thaliana columbia
aaactgcgacatccggttagaagccagaccatcaagggacatgttgggatcaacttgtgtatttcttcgggaatcaatgggccgattgtctattgcaccagtaggctcccccattgcatcataggacctgtctggtaacaggttaactggtacgttactgctctctagctcagaccacaacacaccaaacggatgcagcttattctcatgctgcttttgagtagcagccttagtggattcaacaggaatagcagactggccagaaacttccataaaagcatcatgcatacttgtagaggattttactgacgcataaccagaaactccagctcttcctgggaatacaatttctgatttagaaaaaaaagtacaaataaggttgtttagttatgatgaacacagaagagattaatatgaacttgaaagcttctatacatgtatatagaccccaaagaaagacaagtgttctccacacaaatgcgcacgaaata

SEQ ID NO: 6576 - DNA, 519 bp, Arabidopsis thaliana columbia
cattcctccacatgtgaacttagtgatctgtagagcaagaggcctatacccaagattacaacctttcaaagtgtcgtgtgaaggaacaagttggtatgttgcttccaagtgattaccactctccaagtaattgagagaagagagagtgcacgaggccgttgcctttatcaaggggactccatcgccttgcgtacaatctaattggagtgtctggtcgctcgtccgtcggtgaagttttccggcgagagggtaataatatacaagggcattagagagggcgagttgaataaaagaagccggatggtagttggtgtgatctcgaacgtatgggtttggggagaagacgcataggatgtccaggattacttcgttgttaggatcgttgtcaatggtagagagagacaaagtgacatcaggtgttggctttgagggtttccaagaaccacttctgacttctcaacgacaaagggacatgaattgtcgcttcttggcattgtgtgttgtgtgtgaaatgagtag

SEQ ID NO: 6577 - DNA, 591 bp, Arabidopsis thaliana columbia
tcgactctagatcactcacgagagcgatgatggttgatctcgccaaggcattcaaggatatggactccgacgaatcggtccaggtcgtgattttcaccggatcaggtcgatctttctgctctggcgttgatttgactgcggcggagtctgttttcaaaggagacgtgaaggatccggaaaccgacccggttgtgcagatggagcggttacgtaaaccgatcatcggagctattaacggttttgccatcaccgccgggtttgaactcgccttggcctgtgatattttggtcgcttctagaggagctaagttcatggatactcacgccaggttgatttcttctcttacgacgtcgtttgcatagttatcaatagcactggtatctagcaattaggtcaaatatagttgcagattttagctttggatcatagaaaatcatgttgtttcaagctctactcaattcaacatcttaaaattcaatctcatttgtttatgctctcaaaattttgttgccttgagatgaatgtttttgatgatatgaatgtgaatccctgttttgtgtctgaaggtttgggatattccttcatggggtt

SEQ ID NO: 6578 - DNA, 570 bp, Arabidopsis thaliana columbia
gttagttaagtttccgaccgaaaccgagccggaaataaccgttgacgtccctttcaagccattaacattgaagcatgacgagatccctagctttcttcacccttcctctccgctgtcctctataggaggtaccattttagagcagatcaagcgacttcacaagcctttctctgttctcatcgaaacttttcaagaacttgaaaaagataccattgaccacatgtcccagctctgccctcaagtcaacttcaaccccatcggtccgctttttactatggctaaaaccataaggtctgacatcaagggagacatctccaagccagatagtgactgcatagagtggcttgactcgagagaaccatcctccgttgtttacatctcttttgggactttggctttcttgaagcaaaaccagatcgacgagattgctcacggcattctcaactccgggttgtcctgcttatgggttttgcggcccccttagaaggcttagccatagaaccgcatgtcttgcctctagagcttgaagagaaagggaagattgtggaatggtgtcacaagagaaagttt

SEQ ID NO: 6579 - DNA, 577 bp, Arabidopsis thaliana columbia
tatttcttcaaaaggagattggaaagactcaatgacgattgtttcaatgccagcatgtgcgctgagatctttccttctcccaatctcaccaagagataacagggcaagatgttgttttgcctgcacgagaaaacatcagtacaaaaataagcctttaagtagctgtagatctactaaggaagataaagcctgaatctaattccctaatggctctcaaactaacaaaaattcaaagtgcttactgaatttgtgccgctgtcatctttaaggatttccatgagcattttaactgtagacgaacaattcttatcacccgctgcgagacaaagaaccgccacacactgtgcaattgaatatagtgcttgctttgggacacctccagactgaggagaaggcttagcacaagatagcaatgattccagcaaggtgtagaaactcgtatttgcatgatacaccagagcttcaaagaatttttgcagatcctgtgacaaacatccaagaaatcattgccttctaatctttaaggtcaggcaaagtatataacaattccatcagtaacaaaaaatttaccaaaagt

SEQ ID NO: 6580 - DNA, 537 bp, Arabidopsis thaliana columbia
  unsure (1)..(537): unsure at all n locations
nnnnnnnnnnnnnnnnnnnnnnctaaagacactcccatcttccctgcggtcgctgcctgcaaaaaccgccgccctggcaaagactggtcacggttgccgactatgcgccgccgttaagtccgcttatccaccagcttaaattttcccggcgcagtgaaatcgccagcgccctgtcacgtctgttactattggaagtcttacacgctcgtcgcaccaccgggttgcaattgccggatcgcatcgtcagcgttccgttatggcagcggcgtcactggcgtcggggattttatcagagcgatttgctgtgtcagccgttatcacgctggttgcactgccaatgggatagcgacgcgtcacacgtacacgggccactgcgactcagcattttctcaatgctcggctgcgcaacgcagacctgaaaaatgcctttcgtcttgaattgcacgtgcaaggtcgccatatggtgattctggatgatgtcgctaccaacggaagtaccgtcgcagagacagcgcagttgcttttacgcaatcgtgc

SEQ ID NO: 6581 - DNA, 535 bp, Arabidopsis thaliana columbia
  unsure (1)..(535): unsure at all n locations
nnnnnnnnnnnnnnnnnnnnnnctaaagttccatttccagatagttgcggtaatccagcagttcttcaccgatggtctgcggcgtgcgctgccccatatcaatctgcgggttaagacgttgatacagtttcgccagcgcttccgagaaggtcaaacggttgctgttaaacagatcctgatgctgctcgtgctgttcagagagcacatccagtagcatggcgtgcgtttcaccacgttcacgttgagacgcacgctgttcacctgaccaaacgatacgttctgcaacccctggttgagcatacggatacggttctgctcgcgctgaatggttttgcgaatgatgttcgccacgctgcgggaactgatcgccagtttctgttcacgggaggttaattcttcggtcagacggctaagttcaatctccatctgttcgatagcttccaccggatcatcggtacgaataatatcctgacgaatacgttcacgcagatgctgataaaccgccacgaagaactgaattttacgctccggacgt

SEQ ID NO: 6582 - DNA, 584 bp, Arabidopsis thaliana columbia
cgtgacacaccctgtggtggggcacaaaccagaaccctccacgatcatggggaggttatagccatcaacaaggctgacatcataaaagtctagagacccggaaataccgagagtgaactcggctagtgtggctggcggttcagctccggatccattacattccatctcccctgagccgcaatctccggtggatcagctcgtggtactactagaaccatcaaagttgcagccagtacggccccaaaagcgaccagaccaacctgcaggtgctcggaaagtgcgagaggtatgtttggagagctcgaatccagtggaatcgagtttgggactacctgaaccggataaaatccctggccacagtgggaaatcgcatttgttaactagcgtgaacgttgtacacttaacacctttagggaaaacaaaaacagaggaaaaaacaaaacgagcttcagtagaatttgaggaagagtgaaaaactgagatgaagaaacgtaaaaaatcgctgaccatcacggagcagcaagaggataaatcaagaacagaggcgtaacgtgggagatggagactgacagagctatgagaag

SEQ ID NO: 6583 - DNA, 487 bp, Arabidopsis thaliana columbia
gaagcctcggcgaagaggagatgatgaagaatcttccggagttggtaatggcggtggctcgggttttccggcggtctctgtcggaaataagaagaataagtatcagagaatggactccgacgcggaggaatcgcagaatcatcgtgaagcagaggctagaaacagtagaaccagaaaatacgttatggcttgtgccttttttgcatccttgaacaatgttcttctcggctacggtcggttttacttatataatcggattcttcttcttcttctttactttgttgacttacaaaaaggtatgtgtgctctgtttttggtatttgtcagatgttggggtaatgagcggtgcggtgttgttcatacagcaggatctcaaaataacggaggtgcagacggaagtgctcattggtagccttagcatcatctcactctttggcagcttagccggcgcgagaacctctgactctatcgggagaaaatggaccat

SEQ ID NO: 6584 - DNA, 535 bp, Arabidopsis thaliana columbia
caataaaaagaagacaatactagagaaagaaaaagagatctaaagagtaaaaaatgtcttatggccaagaagagacgatatcttatggcggagaggaagagctattaatatctagcaaagtatctggtcaagaagaagaaatatgtcgtttgtctcatccatctcatcctcacaccctctcccgtcgatatggtgaacaccctccgtctggttgttttgcaagctcagactccacattcataaggcattctctttatttctattttttctgtaccacatgtgatctagagttcgatcagtattgctacttgcggccaaggaagatgacacacccttatcacccacaacatcctctcattttcagtgttcaagaccgtcaaaccggcatcatacatgattccgatatacattcctacgacgtatcatcaataatacctgaggatagttctattcttggtaactgcaattggtgtggaaatgatttaagaagttttgactttttctatgaatatgacatgtcagctaactctagtgg

SEQ ID NO: 6585 - DNA, 530 bp, Arabidopsis thaliana columbia
cgtatcgaggatgcaaagaacgcaacatttgctgctatcgaggaaggcatagttccaggtggtggtgctgctttggtgcatctctccactgttattcccgccattaaggagacttttgaggatgctgatgaacgtttgggagctgacatagtacaaaaggtagcatttagtttttcggttcagtatttgttctgtaaccaattgtgactagttatcttataagggtttatgttttgagttcaggcattgctgtcaccagctgctcttattgctcagaacgctggagttgaaggagaagttgttgtggaaaagattatgttcagcgattgggagaatgggtacaacgcaatgactgatacatatgagaatctgttcgaagctggagtgattgatccggctaaagtgacaagatgtgcgctacagaacgctgcttccgtagcaggaatggtactgaccactcaggccattgttgttgacaaccgaaacccaaggctcctgctgctgctgctcctgaggggctcatggtgtaa

SEQ ID NO: 6586 - DNA, 588 bp, Arabidopsis thaliana
gattttaatttttctataaattattatagttgttgcgtgctgactcggtcgtgtaagagagaagaatgattatttagaaagaaagtgggcgatttgtccttaaattaatccgtgtttttctccaattgactctatatttagatgattttatggagagcacgtagttccctttttatgtaacaaaacgtgtttgatgatcttttctagaaagttatatcaataaaaggagtagagagagacacgtattaaaagttttaaacattgattcttattgcaatgagtatccagagagagagagagagcttttacataatatatatgaccggtccaagtcatgttgaagctagacactctctgttctcactaacggatcggagagcaaatgcttagacttcattttcaaaatggcactagctgggttaagtcctttaggacaagtggccgtacagttcttgattgctctgcatcgtatatactttggtttcactctcagttattgcctgtagcctctcttctctgtattcatcgcggctgcgtcaaaccagaatataaatgaacagtgataccaagtttttgagagactggctt

SEQ ID NO: 6587 - DNA, 872 bp, Arabidopsis thaliana
ctctccaaatttgatcgtaaaaaagattcctatcttcttcaccattcttttcttgaaaaagaatcatgggcttatcttatagcggcgccggagttattatcgccggagttatcttgaatgattttatcaaatcagttcgttcttttcttgatattcgtcgtttgtttggttcggcatcttcagggagcactatcatcgacaagattccgatggacgatatgcttccggcaacaaagttcgaggatatatcatcaagggttaatccgccggagagctgccggatatgccaagatgagttcgacggcggtgacgaagtccggtgtttgaggaattgcgtacatgtttatcacaagacgtgtattgaccgttggatccaagacgataagatgacgtgtcctttgtgtaggaccccgatcgttcctgatttctatttttttcgtttgtaaattagaaaagctaaatgtttcattaatcagattttttttcagcaaatagatatcaatcgttcactaataaaaactaattttttgtctagtttatttatttagttacttcccataattcatttccgtttaaaaattatggttatcatagtcctggacgttcggttatccattcgatttcggttatattcattcagttatcggtttgttgttctaaaggtattcattcagtttggtttcgattctttcggttttcagatatttttttgattattttcaagtatttttattattttatatatattctcaagtatttttaattatttactttagaaataactaatacttttaaaattttgattgatgtttcggatattttcggtttgtatcaattcggtttcggttatttcagttatagaatttagtatg

SEQ ID NO: 6588 - DNA, 959 bp, Arabidopsis thaliana
cataaaattattccgcacaaagaaaactttccaattttgagaatcaattcatcaatggcaagttgaacacagaacaattttttttgttggtaaatgtgaacagagaacatatcacatcaagagaatacatttctagaatttacatatttctctgaacagaaattttagtattcgtaccttattaattcggttaaccaccattagacaatttggatataggacaatatattgccacatatatcatcctagctagaaaacttattaaccaaccatcaataacgttcttcaacaactaattaacaagtatctaacacataccaacagatcttcaaatatatttcccctccgatcatgttaatttcaaagaatcaggaacgccataattccaaacgcgattagaccggagagcttcaccaccataaaactttttccggcggccgctccgaattgctcatcaacggggtagagatttcccggcggacccgtgatgtacaagaaattagccggcggagcggtgggcagtaggaactgactttcttaggcggaggcggtggaagagccgggggtggaggacatgcaggtggtggcggagacggtggtggaggagatggcggaggagggttttggatgcagcttggagagcactttatgggatcgacctcatcgagctttcttgcttctaaagaagcatctgatgatgatgaaccgttgatgagtgttggacacgtcagcaaggcgatcatcatcacggtgaatatgacgtcggatccccggcggtgagaatttcccggcatgttgtgaacttgtgatcggcgttttttgattttgatcaaagagaaaatcaaaaacagagttttgtatatatggtgagcttaaagagttgaaaattaagaggagacgtgaaaatgaattgagaggtgatgatgaatgcgttctcgttacgtaagtcaagtgcatgg

SEQ ID NO: 6589 - DNA, 588 bp, Arabidopsis thaliana
aatttgttcacattggtgaccttcataactccctgttatggaaataccaaaacgagacaagttataagaaagttctcatgcaaagaaatatatataatcaaaacagcaaaaaggctttcagttttcgcaagtaatcttctatttcaataaaagttttatctatataagtacactcatctatcctaatgaacaatcttatccttcggattataaaatccttcaaaataatcacatagaacggaacaaactattaaagctcgacaactctcaagctgcgtcttcaaccttgactaaacatttccaaagaggcttaaattatgagagaaatctcgcatcaattatgattggccactcagaatctttaagcaatataaatcaaacaaaactgaatgataaccgacctgggcgatgtgcatccttcctgatggttcaaaaccatcgtagcagataggagcaggcttcttggctagaagattcttcagctcatcctcttgtatgcattcctcaccaatactcctcacaatcttgtatttcatctcggcctcctcgctcatcctgaagtaataacgtcctaatcagctaaaccac

SEQ ID NO: 6590 - DNA, 748 bp, Arabidopsis thaliana columbia
atcataacagagcaacatcaacacttgcgcacaccggcttgaccaagggatttaacatgttggagcatgtttggacagagttacaggaatggcggttaatgacgaggttgctgggaaaatgtggagttatggtctacaagtcgaaatgaacaatttggggattgaaattgaagtgatattgctgcaagagcttgttgaagaagcagtcttcgatcttatctgatgaaacaacgtatatacgttaatataagcttttgtaataatgaaacatatatagatgatataatctaagaaagagtttaacctacatatacattttacattaatctgtttatgatgtccaattcaatttttagttttgttttcttcattataaattgaatcgaaacgttatagtggaaatgctaacttcaaactgttcacaggattgtttgtacaagcaaacacacaaacgaagatgcttatgccgtttgtgtaaacacaatacagcactgttttgagtaaatgtttatgcacactcgagaagttgcaaagagcaaaacatagagaaagagagcttcacagagaccatatggacacatgcagttttagaaacatgattatttggcttcatcaacctttcgggttcaccggtggactctggttcaaaccatactgcaaaaggaaattttcaaaacgaaacagtttttatcatcagcagattcacaaaggcattatccaatccgtaaagtatcaggaacctgaaaaa

SEQ ID NO: 6591 - DNA, 717 bp, Arabidopsis thaliana
gtaaattctgacattcaaagagccaggtgttctgcatatcctttttgagctcatcattaaatctccatcgattgtcatatctgaatgtagagtagcccttccatttgcggtctcctgtgtgcactaagaggggccgatgatctgatccaatccactctaaaagctgtacataagctttggggtatatatctaatcagtccgctgaagccacaacacgatcaatcctagtttggatagcatgtgaatatcgttgcccagcccatgtatatttaccccccatcgttttaatattatgtagtccagaaacagagagcatccttctaaacagattgaacgaagcttcactcctcttaggacctcccatcttttcatcattactcttaacatcattaaagtcaccgagtactaaccttggtttgcttctgtacattcccatatcagcctaaaagatcattttctcccacatagcgttgcgatgacgttgatttgggtctccatagatgtaggtgagaaaaaaggatggactaccaggcttggatatgtacatgtccgtgtagtttaaggagggtgtatgcacaaagtcaatatttacagtgttgtccaaaaattagccagtcctccactaagaccgtctgatggaagccaaaattgtgaggaaagcgaggtcattaacagactattacatatgtaaaccgttttcagtttagtgaggacata

SEQ ID NO: 6592 - DNA, 620 bp, Arabidopsis thaliana columbia
tagtaacggtattttgatgaactaccgttcaaagtctttgactttcctaaaaatttcaggaatctcattctcatccgtatattatcatcacctattttagctttgaatttaactataaataaaatgtttgaaacacaacaacggaaacaaaattaattaagaaagaccttctttgttcacaatatggccaaaatgacaataacacacatgaagtttcttcaactgttgttatctttagtgctctttgtattctcaatgtcaaatgcaatgccaatctcagacgtacataatttttgcaaggaaacgtttgaagtagaattctgcatgaaatacattgggtcggaccaacgtctcgtagccgcacgcgacttcagtgacatgcttttaattccggtaacgttatttaatgtgacaattttgattagtgatatgtcagattagttgatcacatatattaccaaaaaaggcaagatatttgttcagtgttggtaaaattagggataatagtatagattagttgaaaattttcacacaccagttcttgtaagattacatggcgccaaaatactaaatagaagttatagaaatctgtggtttattcatattctacaaaagaagta

SEQ ID NO: 6593 - DNA, 160 bp, Arabidopsis thaliana
acaaatcaaacgagagatctcaatcatgagacttgttcgtcatccaaacatcgttgagttaaaagaagtcatggctacaaaaacaaagatcttctttatcatggaatacgttaaaagccgtgaacttttccccaagatcggtaaagggaagccttaagga

SEQ ID NO: 6594 - DNA, 465 bp, Arabidopsis thaliana
taatcaagtctcaaaagttaatcttatcattatccataaaccccaggtgacagggagatgtgagccagttactcaacaaacctcataatgcagtggttacaagaagttgtctggaaactattgtgacaacttaaaatattatcatcaatattcagctaatagactcttaaggataaaaattgaagagatgcacacaaaccttgccagcgcgtctagcaccacagcggcaatccctctgttgtcacttctagcagatttctgctgattatcgcttttcgtagtataatcatcatagaaagccctcgctacaagcctcaccagcctaaaaatcatagtgaagcaacatagaaaatgcaaaaacaattgttaagggcactatgtgaacatatacacgaagattctcgacaaaaagtatcgctatgtctgtgattgactagcaccgataagttctgtggtatagagatt

SEQ ID NO: 6595 - DNA, 1400 bp, Arabidopsis thaliana
catatacctgagcaaggcatttacttaagcgcttacttgacccttccaagtcatagcaatagtataaactcaatgggttttgttcatatccaacgcttggtggtattgtcaatagaaatctgcaccacgaaaaaattacagattcatcaaaactacttcctctatcacaattacaatttctgaactgataaagattcattcacctaacaatttcattacaaaaacaaccaaactacactgttagagagcaaaacataaccataaaaccaaacagaaactaaaaaaaacactcaattttgcaaatctaactaactcctgatcaacagaatctttcaaatcttgtttgttcctcaaaaacattacgcattataaagtttcagttctaggtatcaaaatccagattcttccgatcttggacgagtcaacaaacttacattggcccggtggtacgagaaacacggcgagcttcgtcggcggagaaatgatccggcggtgtgttaatagctttgtcgaggtcaaagagtgcgtaacgaacggaataacggaaagagtggcggacaggacggagacggtcgtgccagactgtgccttcgtagaaagagacattaggatcgacggcggcgcgtgaaggaaggagacggtggagaaggaagcgaaacgggaggagaagagagaagaagatggaagtgattgaagtgtagatgattgaacagaggagaaagagcaattccatatctctacctctgtctctctatctctatctgatctttttcaaaaatcagagattgacattgatgacccttcaaatgcagaggtttggtatatttatgatttaatgccacgtttaacgataagtattaatttaacgagtaatttacttttattatttttgaatctaataatgccgttttaaaatgctataagttagtattaatttagaatttgtctcatagaggccattgttatcttcagtgacagtatattattgtgttgtgtggacccaaaagccaaaaaggattgttttatttaatgttgcaaccagttattatcatagggtatttatcgtataatcgtggctgttgcgtggacgttactaaaccactgtatataatatgtatttgcatatggataaataattaaatcatctctcaaatttataaaaatttgcattatgagaattcacagaactaaaactcgtagaatgaaaactgcatactagaaaatcagataataatttttttaaaaaaaaatcagataataaaataaataactgcatacatttgattggtaaattttttataatcgcattaaaataatattttaccatatatgtgttacaaatcagagtataaaatatacaaaacaatatattggtagagactagagagactcaatgtaaa

SEQ ID NO: 6596 - DNA, 620 bp, Arabidopsis thaliana columbia
cttttcatgcaaattttcaaagttgaatcgcatcaaacggcgtcgcaggagcttgatcacacgaaattacaagcttttaaaaccacgaagctcgaacccagaattgaaaagagtgttgccatagacgaaagctatcggagatcttttcctgaatatctttgaaatcgaaacccacgcatttttattttcttttggtgaacaaattggtttcagtttgtgtatcttgatttcagtttcaaagaaaagatatcaaatgcgaaaagttttcagaagaaacgatgattgggctttgcatcttttggtcaatttcgtttgggcagagaggagaaagaagatagaacagaacgcgcacacatttatttttttgttgaaattgaaaacccaatcacatgttgccacatcgacggttctctcaaattctcaaaactctctccagaaagccgactctcttgatttttatcagttttaatttatttttattgtcattaaacaagagagcccaacaattttttgattacatcctctcgttggagatggtcttatagcttgtaatcaaaattcaaaacgttcattaattaccactttaccagtgaacatttcacacgaaaaagagttgtggt

SEQ ID NO: 6597 - DNA, 644 bp, Arabidopsis thaliana
cctatgatcttcaagctatatttcgagcttggatggtattttctagactatggaattaaaatttgtcaatatagcattacaaacggtggcttattatacgtggacttattggttgcaggtatggccaaaagaagcccgtatttgcgtacagattgatggcacgtgggactattgaagaaaaaatatataaacgtcaggtattgaaaggcataaaacaatgttgaattttgctgtttctttccttcaaagagacattcatgaatcagatctgttaatatgattaggtaaccaaggaagggctagctgcgagagtagtggatagacaacaagtgcacaggactatctccaaagaagagatgttacatctttttgaatttgacgatgatgatgaaaaatctgaagccgtaactgagataagcaagcaaaatgaagcgggacatagcaatctggtggagcaagcaatcttgtggacaaagaaggccactttatctcgtgttggtggcgacaaattgatggagaacttactacagagacacggccccaagtaagtttcacaagcgtaaccatattcacatcagtacctaaaacgtttggttttttatgctacttcgtttgtacactatatgtccttttcactagctgga

SEQ ID NO: 6598 - DNA, 610 bp, Arabidopsis thaliana columbia
cctttaaatcatacacacagacatagggatacggaacagaaagtggtgaacttactcatattttctagagagtatccgcaacacaaacaaagccccataaatttgttgattttgcaagttgtacttcacccaatccagaagacgtggccattgttctgggtagtcagcataaataattgtcttgagagactctccaagttgtgatctggataagaaaattaggggaaaaaaaaattatggttgttgttgaggcttatagaagatgctattgggaccaaggtaatgagaaaaaaatactaacttaaaaaaaaatcatcttctatctgccgttttttaatatctagaacctaaggataatgtagagacacattcaaagatgtatatataaaagaagaggactatcagcttgaagacaatctatcagacaagatgatgagcaatttgtaggcatgattagccatacaggttacaaatattttcataaaatcgcttaaaatcagaccacgtcagacagagttcagcaaaccaaatgacttgaatgataatccaaaagctatctggcaaatttacatgagtaaggttggaccttgggtgacatagacgagaatat

SEQ ID NO: 6599 - DNA, 491 bp, Arabidopsis thaliana
cccaaaaaaactcacatatataaatcacctatgcgtctggtttccaagtccaaagtatgtagccaaagtcgccatctgttcaaacaaaggccacaggaaaacagaataaggaaccatcaaaaccgccaaattcgaattccatcaagcaaattcaaaatacacagatgaatatcaatcatgactctttgagtatacgagaagaaaccatctcaaaacaataaacaagtcaggaccagagagcaaaattgttaccttcatatcaccagctcttctcccaaacctttgagtaagcaaagccaaggagtcaatggtgccctttggctctggtggatctcgtccaatctcagcaaatgcttctcttatccttggacaatcgaacttcaatatgttatgacctgcccatatccttcctacaataaccattaaaccacaacatcaacacacttgaacaaaacacgctccaaagttaacaactttgagctcgaattgtg

SEQ ID NO: 6600 - DNA, 472 bp, Arabidopsis thaliana columbia
ctaaaccttttaacatccttccgcattactatcacgagaacacttccatggaattgctctgcaatcttcatggctggaaactccgcgaatctccaagaagagtctttgatgctgccttgttcagtaacgagatcgatatgctcactctccgttggaatgagttaaatccttacattactcagtttgtgcttctcgaatctaactcaactttcaccggactgtcaaaacagttggctttcgcagacaacagggagaagaatttcaaattcgttgagccaaggctgacttatgggaacgttggaggaaggttcaagaaaggcgaaaacccctttgtggaggaatcattccaaaggcttgcacttgaccagttgatcaagctcgcaggtataagagaagatgatcttttgataatgtcggatgtcgatgagatccgagcggccataccatcaatctgcttagatggtgtgacggg

SEQ ID NO: 6601 - DNA, 565 bp, Arabidopsis thaliana columbia
atcgccttcatcctaaaagacatgatagtttcccttgagtaagatagtaatgtatagatctcacttaagttaagatcatggattctacgaccgcgttgtagttgcatcatcaactcattactgacatactctttattcttcttacaactctttatcaacttttcattaaccttatttgtcttctcatttagacataattcaatatccatctctttcttaatatgctcatacctcggtaaagcaaagaaatcatctagaaggccacgagcctctcaactgatggccagaccattagctcagcttcattaggactgaaaacgattgtacaagcctttatatcacacaatatggatagctccctcacttttttaactaaccctaccctccttttccttaaacttattgctcttgtgttgtcattctctatccatgcaagtttcaccttctttcttgtcatctatgtgattttaatctctctcttttacaattaaaattgttgctgggtatgtcatcgtgatgaaagaaccatgctggaaaatggaaatcatttatatagagttgcaat

SEQ ID NO: 6602 - DNA, 530 bp, Arabidopsis thaliana columbia
tctaggatttctcttgaagatcagtgcattaggacagaagaagttgcgggaaatctttaccgatcttgctacttgtttttacaggttacagatgctaaaccattgatcaaagaagcacttcaggctgctgttggacttcccgtggacagggatgtcccggttatcggtttcatagggagattggaggagcagaagggttctgatattctagtggaagctatttccaagttcatggggctcaatgttcagatggttatccttgtgagtacactaagcagtgaacttgtgatcataacgtctttaggatcacaaagttattgattcttgtctgatgtttttcacaggggactggaaagaagaagatggaggctcagattcttgaactagaagagaagtcccagggaaggcggttggagtggcgaaattcaacgtgccattggctcatatgatcactgctggagctgacttcatcattgtcccaaggaggtttgagccgtgtggtctcatcagctgcacgcaatgagatatgg

SEQ ID NO: 6603 - DNA, 455 bp, Arabidopsis thaliana columbia
tagtactctgtcacccaaaacgagcatctcatcaattgtatacgtactttagtaattaagttaacaaaatattttgttcacatcacaaatttgttgttttgggttcgccaagaaaagagttatccacttcgacaggcacaattgacaactatagacgacgtatgttattaaaaatctcacattttatttcacggaacttaatcaacaaatttcatatttatacctcacatcgcaggataaaatcaatagaaagcaaaacaaatctttgctattaaattttcaaaagagaaatttcaaacataagacaataagtccaagaccaaaccctagtccgactttcttctcaccggagcctgacttatccgacggtgacgctgccttcttagtggagccggagtcatcggtaaccccaccggatttagatttaggggcaggagcaatcggcgaaacgttgt

SEQ ID NO: 6604 - DNA, 640 bp, Arabidopsis thaliana columbia
ttactccacggatcaaaagcacatgcttcaaaatttcagaacacaaaaatcaaaacttgtgtagaaattcatgatgcagacgaaaagaatcagactaaaaaccctttaaaaaatgacatttctcaatttctctaaatcaaataacctagaaagagtttcaaaattggttacctcaaaagcagtgagatcttctttgtagaaatcagaaacagtgtgattagcagtgactaactccaagttataacagaacttgctctcataaagacagcttctaatgctgttccaatgcttagcgttgttcacacgcctctgcaaccaatcagagtaagcctcgagcctatactccttataagcttttccttggatagtttcgccggagcctttactagtgacaacgaaggcaaagatggtgaaacagaggacgatgaggattaagaagaacatcacaaagagataggaccagagaagccacgtcactctgcaacaagatccaacgactccagcgattgcgattatcatgaggaaacaccgagagcgatcatgggtttgtcgaggaactctcgcattgcgtcgtggctttaaggctgagcagattccggttgagagtatgggaccgagagaaggagacagagaagtgagt

SEQ ID NO: 6605 - DNA, 551 bp, Arabidopsis thaliana
ttaacataaaaataaataaaatataacatttcaacaaagaaatttgcttatgaaaaatacaaaatccagttaatttttcagaaaaatacaaatttgcttataaatatattaccactagtttatgtgattttaaaagaaagaaatgcagcttaccaaacgcaacgtgaaaatttgagaaacccatactcaaaaaagattaaatgacaaaatcaccctcagcaaaatcatgaaacaacaacactaacattttcaccaaccccaccgtctactccggtgaattgtctatatgaactcctccgatacaactcctgtttccttcaggccaaagcctaaaattcacacaaccaaaaaaaccaaccttttttttccacctaaatctttgaatatcacaatatttactatttacaatggcgccacaagaacaagcagtttctcaggtgatggagaaacagagcaacaacaacaacagtgacgtcattttccgatcaaagttaccggatatttacatcccgaaccgactatctctccacgactacatcttccaaaacatc

SEQ ID NO: 6606 - DNA, 754 bp, Arabidopsis thaliana
ccacaaagatccaacgaatccagcctctagcaactcctcacgcacaggaggcgtctgtgaagcacttaaccgtgtctgaatcgatctctgtggaggaatccaagatttcacgatctgagaagacgatgcctggatctgagctcctaaccattctttggcttgagaaatcgattgggagataagatccagactcgagatgtgtttttgctcaaatatcagcttattcctacaattccacaaattccacaaaatccaagggaagagaagtccttgtccaattccaaatggtgggaggttgataaggaatcgagatgcttctaagcccatcttcatactggtaattcgggaagccaatagagtggtcctgaatagtgcttgttcccaagtccgaagagcaaaagggcacaggaagaacagatgaaggcacgattcatcctcaccacaatgagggcaattagcaagagggttgatgtttcgaatcctcaggttttcgccaacgggaagagggttcttcatagatttccagagaagaaatttcaattttggaaggcattttaagttccaaatctccttattccaactgaactccaatggaggatctggaggttggggtccttgtttagcgagacagcagctgcgtgatagccagtctttgtcgaataatcaccggacttagtgagtaccaagcataacgttctcgagcaccaagtttactaggtctcagagaaaggatatccttttcatagctgggaag

SEQ ID NO: 6607 - DNA, 607 bp, Arabidopsis thaliana columbia
atcccctcagataatgtctgtttccaatattaaaaacccatcaacgcaaaagaaacagaaaaggttctcttcggctgcggtaacatctaagaatctttttcatcaaacacccattagctagaagcctagaagatttacacgtacaaaccttgaaaccattatatgaacgtggttgactattaaaattagaacagtgtggccatgcttttcctccagtttagtgatctccgcgttgtcggtagcggaggcgtgaagctcagaccaaacatctccttcatagctctaccttgctccacaaacctaaccagtttcgctacaacggctgcgctttcaaccgcatgagttatgtcattgggtttatccagagctggttcgctagctgcaaccgccgacgtttcgagttcacagcaatcccaaacttctggtaaagtctcttcctttcctctccagtaaacctcttcccgacaagcttgcttagcatccgtctctccctatgaagcgccttcagcgtacagcaaaaccggaaaagcagttaacaaaacattagttgtttgctgcggatacaaatgcaaacgctaaaagtacttacgttgaagctattgtgagt

SEQ ID NO: 6608 - DNA, 569 bp, Arabidopsis thaliana
aatccaaaaataaacaaaaacaaattatattgccgaattaaaggaagaaatagtaattgaaaattttcaagtttagtgtatatcacgtcagaaatatttaatactacaccatatatttagctaaaagacactttttccatgaaaatgatcggacacgaaaacgcaataatcttccttaattcgatataaagtatgttataaacaaaagtaacgtatgaataatctgtatatgtgaagttattataaggacctgatagattgaagctgaatcttctgacgctcctcctcggagacggcggcaaaagcagcggcggcgttttggttgatcggtgtggtaggagcagaacgtttcttctgtaacgaatgaagctcatcgatggttgtggcattcaccgtcggaccactatcgtcgtggcagactccgctacctctctttgctgctccggtcgttatcttcggcatcaccggtcctttagggaaactaaaccctccgtcaccgttagtagcatttccgttaccggccgacatctttttcctgtaacacaacacaaaaaaaagacagagttacg

SEQ ID NO: 6609 - DNA, 534 bp, Arabidopsis thaliana
gtagtagcagtatggtgttaaggactgaccacctcacctgcgagtccgctttcttctgtgtgaaccccaaactcttcaccaaaccatctaactgttccatcaacaccacaaaaccataaagcatatttacataatcagaagagtttttaaggggtaaaagaaaagagaccttgctgatatcgtcaaggcctccttcagcataaccatacaggagatattctgttgctacaccagccagagcaatgcatgagaatctgttcagcatctggttttggaatagcaaacacagtttcttgttaggctgaagattttaaaaaggtttagaacttttttatgggaagtataagaaaacataccgtagcggagacttttccagaattaacctgcattgtcaagttgggaaaaaagtgttagaagcttggatttgaatgagtttctgcttcttcagaggatgtgaaagaagaaagagaggttatgtacttcttcaaggaattcatagtctacaaaagctgagccagcttgaatgttgagaga

SEQ ID NO: 6610 - DNA, 560 bp, Arabidopsis thaliana
attttgtgcactcctctgactgtttcacttagtttcggtttagaagaagaagccagaaagaagtatgcaacgtcttcaagatcccaggattgatctagctgagctaaaagtgcatatagtgaagaaggttggggttgaaagatctacaaggtatttttactacttgggcaggtttctgagtcagaagcttactaagagtgagtttgataagtcatgtttccgtcttttggggagagagaatctttctcttcacaataagttgattcgttccatcttgagaaatgcatctctggctaagtccccaccatcagttcaccaatccggtcaccctggcaaatctttggtgcttgggaaagaagatggacctgaagaaagcagatctctaaaccctgaccatattaggaatgatcttgctttgtccaatggggtgttaccaaggttaggcctggaacatgtgacgacaggacaatcagagataagccttgtccgctagggtcaaacggaaaggttttgggtccttttgcttatcaagacctggtcgatacctgatgaaagagcag

SEQ ID NO: 6611 - DNA, 1579 bp, Arabidopsis thaliana
aagttatttttaactctcctaaaaaatactggggtaactaatctgttcacattctaagattaaagtactcgtacctacctactttgttatttttatcaccaatctgaacatattcgataaaaaagcgtttgtctatgtattgttaaaccagtcatagccacataatcggtttataagatttttcattataatttgtgtttgtcatctaacaaaataacaacatttattgttggtctgatttagtgcaaattacaaaaaacaatttcaaaaagttggctataatcaattatagtgaccctcgatttatatatattggatgggagtttgaaaaatcgcttttaaaaacaaatcttattattattaatattattatagctttttcacaatatgatgatagtttctatattgaaaacattttgtatatgtatttttttaatataccttcgagtggcaccacacttatttctaatatacaaaatatgaatgatgatggtgaagatttggagagttatcaagacaaaaactcagaagtagtaatttcgtcagcccttggaaggtgcaaaatcataacatctgtctaatagtttttttttttgttgctaagtcttgactcttctcgattataacatgggtgaattaaggcaataaccatttatgataaaatatttaaggatatagcactataacttgcgaaattaaaagaataacgtatggactttatcaatgacgattttaacctcttttgtcaaaaatttgacgacattttagtagtgataacgtggtggttacgatggtggcagtgatgatgttgtgatggtggtggtgactttgtgatggtgatgacatggggatgatggtggtgccgtggtgtcggcgatatccatgataaagagtaacggtgtggacgtgtggtggttttaggtagtgacgacgtagtggttacgatggtggcggtgatgacgttgtggtggtgacggtgactttgtggtggtgatggtggtggtgctgacgttgtgatgatggtggtgacttagctttgtgatggtgatgacatagggatgatggtgatttcatggggatgatggtggtgccgtggtggttgcgatggtgatggtgagggactaagggcatgatgatggtggtgccgtggtgtcggtgatatccgtgataaatagtaacggtctggtggttttagtagtgacgacgtggtgataatagagtagctaggtgtaaataaccggttctatgtaattagtcggtttagcttggtttagttattataccatacgtgtatataagagaaacaattgtacacattattattaagatgaataaaactttccctttctataacaaactctctctcatcgtttcttcatcgtgaaatggtatcagagccatcgagctcaattttttcttgattttgttcgatttcttcttcttttgagctagttttcttcgtttcttcacgatccaatggttcctggaattcgtgttactcgaaaatcagctcgctcgaaggtgtcgacgggttctgttgctcggaaatcatcaaagtccaccggtgttctcgattctg

SEQ ID NO: 6612 - DNA, 449 bp, Arabidopsis thaliana
ttcaaaaagaatatgctctaaagaccacgcccatatcgtgagtgataaagataacgcccatcgacatctctttgttgcaatactttgattaattgcaggatctgcgcctgaatagtgacatccagcgcggtggttggctcatcggcaatcagcaccgccgggcgcaatgacagcgccatcgcaatcatcactcgctggcgcatcccgccagagagttgatgcggataacgtgaaagaatggtttgtgcctcaggaatgcgtacctgatccagcatccgcttcgcctcgaccatcgcttcttcacgactggcgttctgatgcagacgaattgattcggcaatgctgttcacccacagtaaataccgggttcagcgatgtcatcggctcctgaaatatcatcgccatatccgcaccgcgaacatggcgcatttgtgcagcgttctgctcgc

SEQ ID NO: 6613 - DNA, 581 bp, Arabidopsis thaliana
tacagtagttcgttccatcgccaacacttttgttttgacgatgagccaaaaaaaagaagctctgtttctcaaaccctctgcgctaatccgaaggttctgacttttaatatattacatgaaaaaaactattaaacaaatttatttctccaaaattgtaaattgtgataatgatgtttcagtgccttttttttctaaatcaaatatcaaataaaatcggaaaaaaccattaattattacagataaatctatgtataaaaaatgagaaggaagtaaaaataatcaggtacgggagagagcacggacagcttcgtcagagtaaggatgaataaaagcactgttcatttgccaaactgtaaacgacgccgtaaccgtcgcatcaagagcattattgaacaagaagagcttggctgctccatagattgcagttgttggatagactcttgatgttatacatgttcttccccttgtccgaatgcttctactatcgaatgatcccctattgaaaatacaaaaacataatgtaatgagttaatggaattagtacatcaaagtatataaggttaatatatgattcagttatt

SEQ ID NO: 6614 - DNA, 1335 bp, Arabidopsis thaliana
tagaggcaaattgttacgtgatgttgctgttgctatgaggagaacgaaattctctgaattgaagaaaaacgatacatatttatagatattgttgtgttgttgtgtcgccggttaacagacgcatgttttgtcgaagcaaggtcagaaccccaattcagatgagccaacttcttcttttatgggatttgggccagagtttaggtttgttgttactgggactgacgagcttaggaaaatccctaatagatatgggccttattctgatctccttgtttttggactagtgtttatttcccaaggtgtattgggcctgatgagaccaacaaaattcttaatggagatggcccagcttctgctttcctggtttgtgggccagttttagtgaccctgccaattataacatgaaacagatgttataatggaaatttgcatttataacatacaaaaatattacaattaggtaactaaccaaaataaatagtccaatgatattgtgtgtatttcctatattttagacataagtgaccttaagataaaaccaatcaactcgccggtaccgattacaacgtcgtcaccaccacaaagtcaccaccaccatcaccaccaccatcaccgccatcatcatcaccgccatcgtaatcacctttcacgatgaagaaacgatgagagagagtttgttatagaaagggaaagttttattcatcttaataataatgtgtacaattgtttctcttatatacacgtatggtataataactaaaccaagctaaaccgactaattacatagaaccggttatttacacctagctactctattagtccccctcaagatgagaatacaaagatgttttggatactcatcttggacaataaatgagcaaattgataagggaagagtggtttagtaaggatatcagcaacctgatctttagtcttgacatgaagcagcttcaactgaccattatccagcttctcacgaacggtgtgacaatcgatttcgatgtgtttcgttcgttcgtgaaacactgggttagtggctatatacacagcggcggtactgtcagagtataaaataggcacacctgaatgaacacgcaaagccaataacagtgtagacagccacgccatttcacaagaagccaaagccaatgctcgatactctgcctctgcagacgaccgtgagacagtaggctgtttcttggagcgccaggatatcagagaggaaccaacaaacatagtgaaacctgtggttgatcgacgactatctgggcaagtaccccaatccgcatcagtatagccttttaaagtcagatcatcctcagcagaataaaatca

SEQ ID NO: 6615 - DNA, 503 bp, Arabidopsis thaliana columbia
  unsure (1)..(503): unsure at all n locations
tgtggttagtagatgacgattcctctgcttttccagtaagttttttgtaatctttcctcttctcaagattgctacttgtttaattcctcccttatggatcttgtcgctttcagattcgtggacatcgttttgttcgattgatgtttcgttttactctactctgacttggaacaatggctgctaagagatctatctactgtcttcttcttcttcctctgctcttgtctttactgatctggattccttcgatctccttagctgctactaaccctgatgatggtaagcacttatttttgcttctaaattacattttgtctcactgaattttagagtgagatctgtgcttattggttgaggagttttagattttgttcatgagtttctgagaattaatcagcattgttgtaattgtgaatcagttgctgcaattaacggattattcgctgcacttggagcacctgntcttcctggttggattgcttctggtggagacccatgtggtg

SEQ ID NO: 6616 - DNA, 558 bp, Arabidopsis thaliana
attataacacgtacaatcttcaaaagggattagtgtcaataaattgactaactatataccatcccgaatccttagcatgactaaagagcctcatagactctcagttccagatttctctctctttaacttttgcttctgttgataatttaaccaccctggttgagaaaactgaacagcggcggttcggatcaagtttaccagctcgtcgtctagctcatcgagctcacctgagtcacgaagctgatgataaataggagctgcatgattagcagcagcttccaccagtttccacatcgagaaactcgcagctaattcgattgttttgatagataactctctagcggattccaagcaagagagaatcacatgagcgcaatcgttttgaagttcttccataatccaccattcagaaagcgagtatatctccacataagcttgaagctcatccagctttgcctcagtgtccatgttgtccacttgcaaccgatggaggctttggcaactcatcagagtagaaccactcacaagttttgttaccccagccagctcacaggacgt

SEQ ID NO: 6617 - DNA, 543 bp, Arabidopsis thaliana columbia
gttcacgtgcaagttgattcatatccctaatccttttcaccacaacggataatccagtggtcatcaccgccttgtaagctgatccaaggctaccgttgccaagcacctcggctgcagccttcatcagatcgggtaaaccgaaggaacctttgtcggtattcaccataataatgtcacccataccaccgcctagagctcctcctcctcctccgttaccacctttaccaatattcgacacacctttcttggtggaacgtcatccgagtgcccaccgcgcttcctgcttgaatctgtagaccttttggcggtcgtggatgaagactcggatatcctgacttccacaacatcgttttcacggttgttggcgagcattctaaagtcagggttcttcttcttatttcgcctctttataacgccaacaataataaagaacaggagaagaagcgatatcgacaccatgattgcgtttattgcggccttgttcgaggtttctggtaccgaggaggatggtttcgacgggggttgccttcttgcggatcgttt

SEQ ID NO: 6618 - DNA, 610 bp, Arabidopsis thaliana columbia
cgtaacacaactacacacacacatcccatttcatctatagtatatatttctataactatatatattataaagctaattatattactatatatagggcttaagatttacacgtagaaaatagctaggatggtttgttggttaaaaggaggtatgagaaagattggtagtggaattaggtggagaaaccaacaagtcagaagcagtccagagtctctgagctttgagattgcatgacccggatttagatgacctagcttcgttgcagtcggagaagtacttgccacacacgttcctcaatcttggacttgttgccacgtaacatgtcgtagctgctgcctgaggaacagacttcaatagcttggatgtcaagaaaaacactaaatcagtgacgacgccttctcgatctcttgtgagacgggttttcacgataccaggatgaacacaattggccgtcacattcgcatccattttctgcatatatattgtagtttattattagaaatgaggagataaattgttactcctaccaaatagttaaatttgtataataacgtacatggagaagccgtgatagctcaacagtgtggagcacgttggcgagcttggagag

SEQ ID NO: 6619 - DNA, 449 bp, Arabidopsis thaliana columbia
tagagctagaggatccctgttggatcttgttgtttggttggagttatttggaaagggactttgcttatcgctaatgttggtgattctcgtgctgtgcttggttccatgggtagtaataataataggtcaaacaagattgtagctgagcaactgactagtgatcacaatgctgctttggaagaagttagacaagagcttaggtcgttgcatcctgatgattcacatatcgttgtccttaaacatggcgtgtggcgcatcaaaggcatcattcaggtttgcaaagctctctaatcacatatttaaatgcctgtgacactatgataagaacacagctatgaaactgctattattctggttccaagtcactaaacaagagagacttgatcaatgattagctctttgcacaagtagacagacccttcgtgtcatcttggcttatcaaactataa

SEQ ID NO: 6620 - DNA, 402 bp, Arabidopsis thaliana columbia
ggaatccctaaaagttctgagtttcttctgaagttcactgctctattagctcttacctctaaatttcttgtgatttttgtttgtgctttctcaggtgtctggtctccatcttgatgatgagttaaattctaagaagacaatgtcattgccctcatctccccatgcttacaggtgtcaaacatttggacgaagagggccttcagaatttgccgtgaaggatacatggaataaagtggttgagtcttccacattgcagaatcagcctttattaccctatcaagaatgggacattgactttctcagagctgactgttggaactcgggtggggattggtaagccgctctaaatttactactcggtgcaaatcttcttttaatcacggacgcatgatccttctgaga

SEQ ID NO: 6621 - DNA, 638 bp, Arabidopsis thaliana columbia
  unsure (1)..(638): unsure at all n locations
gatcatgcctatgaattagttcacactatgcatatgacagtaacatatgaacataatttggtttcaggagcgaatgtcgtgaaaatgtacatatttttgcctcgcttaaagataacaaggtgcactgaaatagatcacatcgacggtttattctgtagaccgaatgatcaatcttttaaaaaccataaacgctgaaagtactcggacaatttgaaaaacaagacgtcgcttacaaaacaaagccttttttccccactttttttgttccaagtctcaggctttgaatttgttcaaattccaaaaacaaagttttacttaagccttcagataacaacatagtatagaatctcataagcattaagactaaaactcaagatctctgactcaaagactaataactctggaacaagaatctctccctatctctctcatgtccagaatccagaatccttttccgtgtctcttccagaacacctcagaatttgaaatctttcttcttcttcccttccttgtcatgcattttcctcttcctactattctgctgcacatgctgttaaacattccccaagntaacgtttgattatcatccgcattcatatcaatagtgttgaaaaaatagagatataatataagaaagc

SEQ ID NO: 6622 - DNA, 401 bp, Arabidopsis thaliana columbia
gatccccgctcttttacaacatgactttcaaactcttcctgggtccaatcttcatcatcttcattgttaaagtcacccccaagaacaacaacctcaagcttcagggaagcttctggtccaactgttacaggacgacccgtgtttgcatcaatcaatacaacatggatagtagcaccttgctctccttccactcttcctccagtgaataaagggagagataatctagacttgaaatgcagctgcaagttccggccatctggacctccaattcgtttcggagaaaatacagcactgataaaaacagttgcaagtctcaggatatacactatctagtttcatggtcattaatgtatcccattgaacacaggtgttaccttgtagtaagcctagtacggactaat

SEQ ID NO: 6623 - DNA, 114 bp, Arabidopsis thaliana columbia
gtgcatacctgtcggcataccacgtccatggtcttgaaccgttaaactgccatctttattgatggtcacatcaatacggtcaccaaatccagacaaggcctcatcaactgcatt

SEQ ID NO: 6624 - DNA, 628 bp, Arabidopsis thaliana columbia
aagtgataatccaacgcgatatgtttcatccgagaatgaaacaccggattggcacatagataagttgctcccacattgtcacaatagatgaccggtggatgtgacaattgaataccaagttctgtcaataaggaacaaatccattgtagctcagatgaagtgtttgccactgacctgtattcagcttcggtagatgagcgcacaacacctttctgctttttagaggaccaagagatgggatgatgaccgagataaacaatgtagccattagtggagacatagtcatcggtatcgccggcccaatccgcatcagagtatgcgtgtaatgataatgtgttgcctttcttaagaaatatgccatgatccggagttccagctaagtatcgcagaacacgtttcagggcattccaatggtcatctgtcggcatatgcatatattgtgacagacggttgaccgcataagagagatcaggacgagtgaatgctagatattgtaaactgcccactatgcctctgtattctgtcgggtcaggcagtttggtacaggagtgcaatgtcaactttggtgatgttgcattggtgttcgaccggcttgcggttacatattggtcgacgagagacaagtgtg

SEQ ID NO: 6625 - DNA, 624 bp, Arabidopsis thaliana columbia
ctactaccaacaacaacaataacctctcacgcttcctctttcgattctctactcttcctcattgcgctgcatcgtcttcttcttcatcttccaatctcgagtcttattacgctaatctcattttgagctctcacggagatagtaataaacctaatcggaagtggtcttctcatcagtttcgtcttcttctaactgatccaaatttgcttattagagtcctcaatatgattcgggtcaaacccgaaatcgcgtttcggtttttcaattggatacagagacagagcgatgtgaagcagtcaaggcaagcttttgctgcgatgttggagattttagctgagaatgatttgatgagtgaagcttatttggttgctgagaggagtattgatcttggtatgcacgaaattgatgatcttttgattgatgggagctttgataagttgattgctctcaagcttttagatctgttgttgtgggtttacactaagaaatctatggcggagaagtttttgttgagttttgagaagatgattaggaaagggtttttacctagtgttagaaattgtaacatagttttgaaggttcttagggatcaaggatgatgaataaggcttcagcggtttatga

SEQ ID NO: 6626 - DNA, 398 bp, Arabidopsis thaliana columbia
gatgatcaattacatcttcatgaactcttattttgtgaagttagtcatagagtgtatgcaaatttagaaaacaagcatgagaattgatagaacttggaacataaaagacagagagataccctcctagtgagcagcatcttcctcctcgcagaacttggtgtatgcctttggactcatcagagattccaactccgctgggccaactgggtttcactttgatcatccaaccatctccacaggggcttgagtggatctacacatcacacaattgccaaatcattgcttatatgttgtcacatgagtggtaacttacttaatctccttaagacttcaaagctgtaccaagccaggtgagtctgtgagcttcatgtcatgctcaatgatttcacctgagattg

SEQ ID NO: 6627 - DNA, 800 bp, Arabidopsis thaliana
ctctcgcaatcccatatgtagaacatgttatctttctccacctcatttctcctgtttcaaatgtaagaatttgatgaccaaatggataagctatgaacaataccatgaattgcttgtcaaaccggatcaaacccaaaaaagctgaacgcctatctgtaactttgcagataaggttagtttgcataccgtcccattatagggttacgtagatattgtgacaggcactccatagtatttacccttctctttgatccacataccataggaatagatcaccagatgcatagccacatgaaatttgtcggtccctactaggatagtctgtattttgttttggagagaactttatatgaaatttggcagctgatacaagaaacgagaacaacagtgtagagggaagaccagcggcgacgtcttctaggatttggaggaggatagctttctccccaaggttaaaagttttttccaacaacaaggtttttttttatcaatcctaattgagtgttctctctctcttgagtgtttctttccaagcaccctgatgatttagtgaatagattctcaaaatactaattttcatgctcaaattttgggttttttaaaattatgtgcagtaaaagtaaaaatttattccttctgtatccttatctagtttggtcatgagaatatatttctttttttttggacacaagattggtgagaatatgtttgttatatgattccaaatgaaaaagattaatcacgtagaccttatatagatcaatattagttctatttttggtcaaaattaggaatatgac

SEQ ID NO: 6628 - DNA, 578 bp, Arabidopsis thaliana
ttttcctaattccttctggaggtctatcaaaaatcagcctctgtagaaaataaaatgaaaacatcatcataaaaaatgacagcaagagcagaataagataaattttaaaattataacatgtgttgtacttgtatgcatagataggcaaataatggacactagatttacctgctcagagctggccatggatccatgacaggcaagtaacaaaactttgttcgggtctcctagaagagaatgagcttcaagctgattcttcaaggagtttatatcgtcccaaccggtcatgaataccaaaacagcaccaggtctctctcctttaacgatgtgacagagtacattttcaatgaggttaaagcctattgaatcaggactccagcatgacaaagaatctctagtacgaaagttgtatcctttgaagtctgcagcttcaagagcatcctgctcacacattcagaagaagaatacttttacgcaaataatctgagaagatacaatgtatgtagtgtaatataacataacttcttctgtacctctactgcagaggatattagggattttctttttttgaactgagc

SEQ ID NO: 6629 - DNA, 554 bp, Arabidopsis thaliana
tcctcctggtcaccctcacaagattcatatctcttcgtcttggtttttcaggtgaatctctatgtggatcattctcagattatggatctcgagtgcctccgtggtcgtcatctgggtaaagatcaccaatctgttctcagttcctcctacttcttgttttaaagtagtagctctcgcactacatctagtgttgtgtgaatttcctatatatgtattatgtcgtatgtgtctgatgttatgtgcttctttgatgctgtaagaatgcaaatgttttgagaataatgtgatatgcgatttttcggtgatcacataatatcttggtccatctcctaagttaagtctctcagaattgatacaacctagtatagtaataatcgtaagccttggttgttctcgtatgtcttatattattaagagttttactcactgaaacacgtgagcaataaaataagctgttcattatcctttaagttatgacccaagatatcaattctgtaccatgctttgtactattttgatagaacctctctgtaatatcttttgaaaatagagaa

SEQ ID NO: 6630 - DNA, 427 bp, Arabidopsis thaliana
acgctgactcagcccaccccgacgagctagatgaagagttcgacacttttcctacttcccgaccatctgacatagtcaggatgaggtaagccaggtcgaggagtattgctggtaggattcagacagtggtaggtgatctagcaactcaaggagaaacgccttactctctgctaagctcgcgtgatccgcgtgcaacagcgctcttcgtcatgttctgcgtgattgccgcagtcattctctatgtgacacctttccaggttgcggctctttgtattggaatcgatgctctgagacatccgaggttcagatacaaactaccatccgttcctctgaatctcttcagaaggcttcctgcaagaactgattgcatgctctgacctgcaaaaactgcctccaataccgaagagaacttctagaagacgtgtag

SEQ ID NO: 6631 - DNA, 507 bp, Arabidopsis thaliana
tgcatcactatgcaatctttttagtttcctaagaattagaattagctttatgactccttaaaatcttctgatttgtaccaaactagttgtgattcaatccaaagtttgtttctttgtgtcagtctcagtcgtttaaagtaaaagaagaaacaaaagcatgagactttttttttttttttggtaacaaagcatgagactaaacatcacaagactcaatttctccagcttcctccttcagatcgcccctgaccaccgtaacctccgtctccataaccaccttcacgacgatcacctccataaccaccaccgtatccacctccaccgccacggttgtaaccaccttgatcacgtctacctctgtaaccaccacttccgtaaccaccaaccataccaccgcgagtaccactaccacgagcctgagcctagttaacagtaatgttacgaccatcaagttcttgaccattcattctatcgatcgcagtcctcatggaatcctcatctttaaaa

SEQ ID NO: 6632 - DNA, 614 bp, Arabidopsis thaliana columbia
caggacgaaacagaagcttatagaaagtggtctcatttgtcagagctggaagagtcatttctaaagcaaaagtcaaagctgcattggcttgacgtgggggataaaaacaacaaaacgtttttcaatgcagctaagttacgggagtcaataaacacaatctgggaaatacaatgtgaggatggaacaattgcatctagtcaagatgaaataaagaaggaagcagagcattttttctcggatttcttaggccatgtacctttggattatgaagaaatgactgctgagactttggaacattgtctacctttcaaatgtactgaggctcaacagataatgcttgaaaaggaagtcactgctgcagaagttaggcaggttctctttgcaatgccagcgaacaaagctcccggtccagacggctatacgagtgaattttttaaatcggcatggttagtcattggcgatgatttcacgactgcgattcaatctttcttcattaagggttccttccaaaaggtataaacacaacgatccttgctctgattccaaaaacagaagatgcaaaataatgacagattatcgatcgatatcttgttgtaacgtctctacaaggttat

SEQ ID NO: 6633 - DNA, 583 bp, Arabidopsis thaliana columbia
tggcgctccctcttctttggacaggcttgtatatcaccacagtgacaaacttagtcctgaaccgatgcgagaaaccgagtgctacaacagatcttggggcgtctcggttctcgatatagaggtggttcaggacaacattctgtggcgcataagccagttccatgctaccctgattgcctaatagagagtgttgaaggtgtggcggtactgctggaggatctcttgtcgtcatcttcggttgaggaatacacattgttgtaacttgaaaccggtgatacaggtacttcaaatcccacaaccgttgtgtcctcctatgtttaagaaaacgataaaagattgaaaaatcgagcgggagactggaaattactcgattagttggttgaaggcaaaaaggtgttttagctggcttacatgatcatcaggattttgactgttcatcttggataagattgccacctagtgcctgaaacaaaatataatcataactaaaccgcaatagcatgcaaagtaaacaatcaaaatgaatgtaggtccaccagctcaagtgccattcaaactaatctaagagaaagaggtgtttcat

SEQ ID NO: 6634 - DNA, 590 bp, Arabidopsis thaliana columbia
atgtcaccagagatcataacaatcacatgagaagattaaagagtaaagccgaaattagattgaaataaggggctaccgtcctcgacaaaggcagagcattctcatgtttcccttacaaaaatgagtaacttttcccaaaaagggttcaacaaaagacgtaagaaaccaaacaaagaagaaacaaaaacagaacgttttatttaattaaagcaaatgatcaaactcaggtcatcttctcctcgtcacaaagaagaccactttgcttctaaaagctccatttagtagggttccacaggtttgcggaagttgactccagcgtaaattgcctctgatcccaactcctcctcaatacgcaaaagctgttgagaaacaagacacatattagacaatgtactctggttgtcaaacataaagtctttactagtggtctgagatgttaaacctggttgtacttggcaagacgctcggatctgcaaggagcaccggttttgatttgccctgtatagacagaaagatcaaatgagagtccgcaaaagatatagcatgagattgctagttaaatgcttgcaatggtttcacttacagtggac

SEQ ID NO: 6635 - DNA, 554 bp, Arabidopsis thaliana columbia
cccaaaataaaaaatattcgtcaacataagtaaagttgttgttgagtttcttctaaatgcaatccagcatttaaaacaaaaataaatataaatgtttaataaaaattaccctttattatatttctttaaaaagacaaaagaaaaaaagaagaagcaaaatttaactaaatgtctaaaacaaaagcaaatctatagttgttcacaataagtgtgtgtatatatatatataatcttcatatatcatatcttatcaccacagaaaaatcaatccatggctcctcctaccaagagaacaagagtagaaatggcagaatcatcaaataagaggatgaaacctagtgaaacggttcctgaagatgtgttggaactcatgatgtctacgtatcttcccgtccaatctctgttaacaactcgtgtgttgtccaaaagatttcgcgagaccgaggtacgttctcttgacctcgatttcagtggaatatattctagaagacgtcgtaaagtagaagttgttggcatcatcgaaaaagtgttcaatcaacataaaggatcagaga

SEQ ID NO: 6636 - DNA, 559 bp, Arabidopsis thaliana columbia
  unsure (1)..(559): unsure at all n locations
nnnnnnnnnnnnnnnnnnnnnntaaagtataagccaggtcggtcggcgcatcagcaacttattggctatcgccagcagaaagccgaacaacaccagcagccagctccattcgccactaaagtctgccagcgtcatgatcccctgcgttagtgccggtagtggggtgttgaaggtcttatagatagcggcaaactccggcagaacaaaatgcagcattgccacaaccaccatgattgccatcgctaaaatgatgatgggataacgtaacgctgatttcactttgtcggtcaactgacgctgggctttttgctgacgcgccagttcaaagcagcattcatccagcttaccggtcagttcacccgtgcggatcatcgcctgatagagcggcggaaatacctctgaccagggtaataaggcattggaaaaagcaatgccctgttcgagatcgtgcgccacggattgcagcaacgcttgccattgcttactgggatgctgttccgcagcagagcagcccttcagaaagcgttaacctgctttgagtagcgtcccagttgatgaa

SEQ ID NO: 6637 - DNA, 631 bp, Arabidopsis thaliana
gctctgcccaagagcaaaacagcctctgtcgcggacataagcgagaaaacgctaatctccaaacttgagccgcaaattcacaggaaaaaaggagatggtctctggactcagtctcaatagtgcataagcaacaatcgaaagactggatatggccccaagaggcaagcctttgacgagttgggagtctatccaactgactaatccacatgttgaaggcatgcttaggaacagcacccttgaaccaaacagcctttgcccagtccaattccggtgctcttggtctaatagcatcccaagtccttgccgaagagaaccttgacaaacaacaccgccaacaacccaatcaaaggagtcttcaattgtagcaggagagggggtcatgatggtagagatgtgttcatggatggcttgagctggagcagaccgagatagggggagcttccagccattaacaccaagagcctcaaccaccctagcgttaagagggatgcgaagtgatctggagccataatcacccataacctttatcagcgggccaagggaagtcgaactgtcatgccagaagtgagctatgcggccattacccaagttgcatttaacaaactgctccgccaaaggtctaaggaacaag

SEQ ID NO: 6638 - DNA, 601 bp, Arabidopsis thaliana columbia
tctatcaatccaaatatgtgctatccaaacttcaaatactaccgatcagcttgtctctggataaacaacataaccaaagattacctagttgtttggcccatctataacaaatgtttttttacaaagaaaggtgatgacacatggcgattcgctcccgcttgtcacattcggatgaaagatcaaattatctataatcacaaagatcacaaggtttaccagtatgcttcctatggctttatctatgtttgggatttctctagtgatatccctcatgtagataagcatctaccagctgttagcttcatttctggccgtgagattggtgacaagaacaaatactataggataagtcatcagatggtgatgtcattgtctggagaagttgtggtggtaaaaataatgcactactacgacctctcaagatggcgttttcgcatcttcgagttaaacctctgacgcagagatgggtaaaagtcgattctttaggtgatgcggctataatcttggacatgggtacactgttgtcgctaaagatatccagggatcaagaaaaacccatttatttcagtggcgtcaacacccttacggatccgaatgtaga

SEQ ID NO: 6639 - DNA, 599 bp, Arabidopsis thaliana columbia
cacaagatggttagtgattttgttttgaagttgcatgttttggtctttgatacttattagtgacgttttttggttcttcctgattctgcagatatgctgtatgtgtttgcgaatttgtctcggaatgtcaatttcattgaacatatgaagctcaccgggtggaaactgtaagtagtaaccgctaaagtagcaactcattatcttgaaatagtgaataagatgtgcttctcatggtcttttgcaggaaccaaagggccaaatcaatcattgttgatcccggtctttacctatcgaagaaaaccgaaattgcttggactactcaacaccgttcacttcccacatctttcacgctgttcacaggttagctagcatcttcattttggtagttcatacacaggtcttatggttatggatgaaagaaagatggtttatctgccttgtcttgaatcttgcaggctcggcgtgggtagttctgactcggtcttttcttgaatactcaatcttgggatgggacaattttccgaggacgatcttgatgtactacccaactttgtatcctctcagaaggatctttcaacactgatatgtacactgaagag

SEQ ID NO: 6640 - DNA, 515 bp, Arabidopsis thaliana
aggatccccgcatgcattatatcaagaagacaaaattagaaattaacagaccaataaagcttaggtggagttgactccgggacaatgtcatcatcattggcaactttccttccgattggagcaaaaccaccaaagaggacccaaaatgcaccagaatctgattctgtatctaattttccgtcatctgttatagcaggaaagtatgaatatagataagtttccacacacaaaacctattctttaagtattaaaacactgttcattgacttaaaggaaactgaggaagaaggtgcaattggcttaccaacaatcgcaacatcacaagttccttcgtgatacttgtcttttaaatactgaacgacttccaaagctttggctctctcctgaatgtttgaatttgcaccattgaactgatagatcttttcctcggtgtccaagataaatacatcatcatgattcagtgatgagcgggcaaaaggaacctgcaaataagaggaacagaagataaagttgat

SEQ ID NO: 6641 - DNA, 464 bp, Arabidopsis thaliana
aaaacaaacgtaacaatcagaatattaaatttggatatataatctttaataatttagtgacattagtccacgttattatgcttttaaactaatgtagcaatcaaagtaattgataattacattaacaaaaaataaacgatgcgatcggatgatgaataaacacaaatatagacatatagtaagaaagttttttacctcccaaatacgaagcttggagtagttgataacgtaataggccattgaataaccggttttgttttccggtggataaaccggttcaatctcacggatgatgcatccctgagccaacaggatttgacggtgttcctcaggcacgtccgggagaatcgcaaccacaagaggataagcagatttcaccttacgaagtcccttggctagaccaactacacccatccagtagtctttgtttccagcaaggaaagtgacgtaagcccttttcacac

SEQ ID NO: 6642 - DNA, 523 bp, Arabidopsis thaliana columbia
ttttttttattcaacattgattacgcaattacgtagttaatcaccttaatgttagccagcagtagatagccctccaacagagaattgaaagaaattacggtgaagagcacgcgcaatagaatgagcaatgctagtcttaccaaccccgggaggacccgcaagacaaattatcttccattagtaactcaattctaaggacatgatttttctatatagaatcaagaaacagtatatagagagaccaaccttgtggagtgcctctaagtttttcaacagcaatgtgttctattattctttctttcacattagataagccataatgatcctcgtcaagaatcttttctgcagtcatgacatcacaattctcaccactgcaaccaacattaatcaaattttacaaataattttcatgatacttcttcaagcacatgagcatagtgtatatgatttgaaccaaatcagcaaaacctgtaatttcccaggggaatacggtcaccactcaaggtagttgcgagcgatagta

SEQ ID NO: 6643 - DNA, 764 bp, Arabidopsis thaliana
tcgattctagagaatccctctaggtcgaacgtggtagagcttctagacgactgccctctaacatttcaacaacttttctcattggtggacgatcagatggattggtttgtatacaccacaaacccactaatgtcattctcttcactatcttctcttcttcttcttcttcgattatatgatcttctaatagtctcatggtttctttcctctcaagatcctcatagacccaatcaggaaagtacattgaacttttatcggtcgcagaagtttcaacttcttctcttttcgttgccccaatcatctcaagaaccaccattccataactatacacatctgacttatgcgaaactcctccatagttcttggaaaacatttcaggagcaatgtaccctactgtccctctcgcgtctaacattgatatgatactttctttctttttgcatagcttagcaagaccgaaatccgaaatcttcgggcataagtcttcgtctatgagtatattctgtggctttatatcgaaatgcacaatcttggatacacaactattgtgcaagtactcgagcccacgagcaacacctaccgcgatgttgtataatgttttccactctatctttgttgacatattctcggatataaacttgtcaagggatccattcggcatgaactcgtagataatagctctctggctcccttcatagcaaaatccaaaaagagaaacgatgttaacatgagaagctctactcatgctaactagttcattgatg

SEQ ID NO: 6644 - DNA, 608 bp, Arabidopsis thaliana columbia
ctcattagcctttcaaacttttcagtgtcacagactcggagtagggttacgattcgagacaagcttctgactcaactcaccaacatgtttgaaccataaaagggaccaaacgttaaggtcaaaagaaggctaggaaacacaaatagattttattttttctcgataatgggaaacacaaatagataaaactttatgtatttgattttttgaactaatatatgttttaaagtaaaataatatgtatcataattatggaaaaatttacaaattccacaccacgcaacaaaggggtgttacaatgtatcacaaatttcacaatcaatcgatcaatcctacgaatatatagtttcctaaaaaaagacctaagacaatgtcttgaggacaaatcataattatgaagaagaagtcggaattaaatttatagaaactcctcgacaaactcgccgaaatcgaagttgccattacaagactcgacggcgttaacaacgtcttggaaaacggagaggctgcaagggaccaccaacataaccttctgctcgaaacagagaaactcgtcgtgagacttgtcgaggagcatcatgaagagaggatgattcaagtagcttgtt

SEQ ID NO: 6645 - DNA, 549 bp, Arabidopsis thaliana
agttatttgttccttaaatgggttttgtatccaccttacgttgtcttctgatttctatgcaggtaataagaaaacttggtggtactgtgaccttggatggcacaacgagcacgcatattgtcaccggaaaagtcaggaaaactctgaatctctgcactgctctttgctctgggttagtctcaaatatacaggcatcatattagccattgtgaacttatgcgtaaaatcataggaatgacgcggtttatggtccatcatacttgcttgcagggcgtggatagtatcaccaagttggttaaaagaaagtgtccgagaaggaagatttgctagtaagatgagatataattatctatctctgatgggtacttactaatgaattatgatgctgacactatttttgtttaatagatgaagcttcacacatactgcatgacgaagactaccagttgaaatatgatactgatctaaacagcacagttcttagagcgaaagctagaccagtctcgttgctagaaggatatgacatatgcgttggacgtacattgactg

SEQ ID NO: 6646 - DNA, 415 bp, Arabidopsis thaliana
tcgactacctattctaacctcatcaataaatataatcgatggagcttccttcttggcccgtgcaaaaagatcccttacacgtgaggcacccataccgacatacagctctacaaactcacttgcagagcaacttatgaaggggacttcagcttccccagcaacagcctttgcaagaagggttttccctgttccgggaagaccaacctggaaaagaaaggagtcaaaggcatatcattctaaaggagagctcttgtaaccaaacgttaaaccatgatatatacgtaatataagaataaagtgaaatcaaatgataaaactcaccaataggacaccacgcggaggacgtgcacctagacggacatacttttcaggattcctaagaaattcctgcatttgattaccgatgtgtaaaaga

SEQ ID NO: 6647 - DNA, 566 bp, Arabidopsis thaliana
ttcttcactctcctcttctctttctctctcttctcctcctcaatccactccaccacatcctctcactctctctcctcatctccctcctcctcctctcttccaccaccagtcctcgccgcacttctccactacacttcctcatcaccaccaaacacatctatgtcctttcttgaactctccaccatctccaacatcattcactctcatggcccagcttgtaacctcttaatctttggactaactcacgaatctcttctctggagatctatcaacttccaaggccgtactgttttcgttgatgagagtccttactctgtttctaaattcgaacagagtaaccctggagttgaagcttacgaggttgtttactcaactaaagtctctcaagctaagaagcttcttggttattacaagacccgacccgagtgtagacccgttcagaatcttttgttctctgattgtaaattgggtattaacgatttgcctaattttgtttatgagattgattgggatgtgattttgattgatgggcctcgtgggtatgcttctgatcctccgggaaggat

SEQ ID NO: 6648 - DNA, 556 bp, Arabidopsis thaliana columbia
taatttcatctctatgttgtgctcttgctaggatgtgagtgcatccctttcgaaaagatatccagaactgtatagagagggaatacgtaactcatttttcaaatggagagttgtagcagtatgggctacttctgctgtgtatcagtctcttgtctgctatctctttgtgacaacctcatctttcggtgctgtaaattcatcaggcaaagtatttggcctctgggatgttagcacaatggtcttcacatgtctggtgattgctgtgaatgtgcgcattcttttgatgagcaattccattaccagatggcattatatcacagtcggtgggagtattcttgcatggctcgtttttgctttcgtatactgcgggattatgacaccacatgataggaatgtacgcagacagcttacatcttcggttttctgattttttgtcttagtttttttcaacttggcaaatctgatttccttcttttcttgtctctgcaggaaaatgtctactttgtcatatatgttctgatgagtacattctatttctacttcacattgttgcttg

SEQ ID NO: 6649 - DNA, 534 bp, Arabidopsis thaliana
cattaatcgtgacagaaatttgcagtttactggaatcaagatatgttgttacattacaccatttatggattaaaaacattctcaataaaaattacaaacaatctcttgttttctatctcatatattgtcttcttcttcagcctcactagaacaaaacaacacatttataaagacaacaaaattttcatttttggcacctcgagcagatcagtctgaaacttatccggaatctattgtgcttttgctgcttcatgcactaacattcgaaagcacctcgttactctctagactggcctcctcggtttcggtttcttctacggaaggaggagacacagtgggtttctctctctctgaagccaaatttagcctcagcgctcgtccttcaacttcctaaaaaccaaaactagtgagtctcaaaacccaaaccacccaaccaaacaagaagggagaagaagccttaccacgccattcattgtagccaaagcagactgaacattttccgctgactcgaacgagatgaaccaaaccgcctag

SEQ ID NO: 6650 - DNA, 540 bp, Arabidopsis thaliana
tcatctataaatataattgacggagcctccttcttggctcgtgcaaatagatcccttacgcgtgaggcacccatgccaacatacagctctacaaactcacttgcagagaacttatgaatggaacatcagattccccagcaacagcttttgcaagaagggttttccctgttccaggaagaccgacctaccaaaacagggaaataaagccataaattctaaagatagtaaccaaacattgcgcataaaccacctaagaaatggccataagttgtaactacattattaaactcaccagtaggacaccacgaggaggacgagcacctagacgaacatacctatcaggattcttgagaaattcctgcaacagttaaaccaagtgtaagagaaattaacaagagcatgaacacaaagcaattacagaaacatttgacaatcatttcagcaaagtgcagacatatataaggataaatgaacctccacaatctcttccagctcttcctttgcttcatcaacaccagcaacatctgcaaaagtgattgt

SEQ ID NO: 6651 - DNA, 567 bp, Arabidopsis thaliana
aatctattagaatgttgttcgtagtaattgaaatccaaaagctaaatgacaattgagtaacctggatcatttcagagggatcatagatttgagtccggatgataaccaatcgatctaatagatcaatagggactccatgggggctgggcatatcaatccctctgcaaataaagtaaatcacagtaccaagttaacaaaaactcacaagatttccaaaggaaaatgtctatcaaggtctagcgctcttctcaccttacgttgcaaacacctctatttgttgcaaatatcactatcggagataatgagctctcaagagcacggttcaagtatgagaagcactccatatcaagcatatgaacctgaggttttataattaaacaaaggtattcttactgctcctgagtcctgagcaagatcaatagtggaatgaaaaaaaactttatttgggaaaatcctcatcaataaatagaactcctggaacaagctctgcacaccttcatctatatatcggttcacaacctacaatggcatataaaaatattagacattgcaaaagagaaagtagat

SEQ ID NO: 6652 - DNA, 545 bp, Arabidopsis thaliana
taatcgtttggtaacccggaaaaatagaacaaaaccccaagaaacgaagagttcatgatgaacagagaatacataaggaaattatatgtgaaacaacattagtcccttaccagattgtgcgcttcatcaaaaataaggacactattagtccagttgactttcaaaaactttctatacccattgctgatcaagtagttgtaaggtgcaaatatgatgtccacgtccttgtgaagctctcttgtgatataataagggcatctgaaaaatacaaatatagtacacagatggaaaaagccaggaacgtaagaaacgaaaatatttgttgaagtagcaaaaaaaatagaggaacctacggtccagaatcttttccaatattgaccaaatcctcaatgtcaacaggttcgtcgccaatatgagggttatgcttcaaataatctacaaaagattaaaggacagggaaaaatagtaaccataattcataaagaagaaggatttataaatggtcgtttgatgatggctgtgtacatggaaggcgattgaaatgg

SEQ ID NO: 6653 - DNA, 552 bp, Arabidopsis thaliana columbia
tgacatatcaaaaacactaacacaatcccatgtactacattatcatttgtattttacttatagaagaaaataactttttatttaaaaattgtatggtaaaaataaagattagttccctaataactatataaccccccttattcggtcgttttagctgtatttaacttttaaacccaaagacagacaaaaatcaatcaaccaaggaagtagtacaacaacaagagtcaaaacccaacaactctctatctagcacaaaagcctgacttttacaaagacaagccttttcaacacactactgatcttgagaatcctctcttcaaagccatggcgttagaactatggcaaactctcaaagaagcaatccatgcttacacaggtctttctcctgttgtcttcttcactgctctagctctcgccttcggcatttaccaagtcatctcaggctggtttgctcgccgttcgatgatgttaacgacatcagagagctagatccttggctcaagaggaggagcaccgattcctagcctgttaagtcggtgagatacggaggag

SEQ ID NO: 6654 - DNA, 494 bp, Arabidopsis thaliana columbia
tctatatatgtatgattagatatggtacggaacaatcactcacacacaaaatacactctagatataaaggattagatacgtaacatatcctttttttggttactagtgtttctgtaatttggatatcaaattttaacatcaagcaaatcatcatccgtacgtactcattcatacttttgtaacagatataaagatctatctaagttatcgatcaatgatcttaagatatctacatttatagagatgtttcgttttccggtatgtcttgtaggagttccacttgagaatctgaagccatcagatgagcagcatcaacgtgcggtggtgaatgaggttgactttttccgatcagcggtgatgagagatagggtttcactgtgaagaacaaaatattatcgccgatgagactcatagggttcatgtcaaaagggagaattcacgtgttgatgatcatgacgatcgttctactgatcacatcaatgtaagcagatggt

SEQ ID NO: 6655 - DNA, 539 bp, Arabidopsis thaliana
cattgggtttcacggatcaacttatttcaggctgtactctctaggagcatatttcactcgggttactcctacaagaatagaagcgatagggggcaaggtaggcacaaagtgggatgatggagtcgaccaggcaggttttacaaagatacatgtacgaagtggtcaagaaggcatacaattcatcaagtttgagtatgttgacaagaatgggcgtctgagagatgggtcaatccatggttctatttacagaagaggttccccacacgtggtatgtactacatatcatggagaaatagtaaaaattctgtttattcaattgcatgagtataatgctaaatcttagacgtaaacattgttttacagtttgagattagacatgttgacaaagaatatctggtatcggtagagggttactatgacggtgatggcgactgtgcggtcattcaagcacttcgattcagaaccaacgtcaagacttcacaacttatgggacccaaaccgggtaagaagtttagacttgcagccagtggaatgaagat

SEQ ID NO: 6656 - DNA, 573 bp, Arabidopsis thaliana
agagattccactatctctgctttctcatcccaactaacgcaagaagagccacgagcagcttgccctatgagaaggactaaactggaaattatcatgagcatcttcggtttcacattcagaaaggactgaagcaatagtgcaagagcctggtgtcaagctggatgaaacgaacacccctttcggtctttctccagtcttcagtgaagaagttgcagttgaaaggcattcattgtagcctgaaccacttctggactcaaaagagcgagaatgatgatcttgaaaatcatatcttttttccatgtcactggttgaggtggttctggtagaagaggtttgtccactgaagctaaatgaagcaaatgtcttcctggagtgaactatgtctgagttaattattctttaggtgcacggaaacttaaatatgccaacaatatctatcatttacctggcattctggttagccaaggaggccaaacgtgacatacatcgactccttgacgaagtttttttcttctgtccatgccagaaaacagatatatatgtgtcaagtaaaagagaattctcagaaaatgg

SEQ ID NO: 6657 - DNA, 465 bp, Arabidopsis thaliana columbia
ctatatatatatataatatcaatgaattggtaatcaataccataatgatacaatgaaagtctaactgaatcttcttacaagaaaacaaaaagcatatactatttgagagatcttaaaagaaacaagacaaaacgctgaacaatcaccactcaaggggcaagagtaagacataaacattgttgtgaccaaattcctggccaaaagaatgaaccaaaacttacatctgagactaagcaatcaaatccaagaacgcgaagatctcacaaggcttatatattagatgtctctcaagacgggccaaccttttctaatgatctcattaactctagagtcgatatgtttctggattctaggcgggcagagctcggctgcgtaaccgtttaagttttgtggctagagctgatctctcaagctcttcttctaccatgtttccaattagctgaataagaaatggaatgttgtttc

SEQ ID NO: 6658 - DNA, 1195 bp, Arabidopsis thaliana
tgtatctactgtgtagaagcgaggaagaacttgatgaagctgtcacagagaatggtgaaaactttctgtctgaacataatcaattcacacggacaagcaccaacaaaggacacagttaaaatcgtaagcaggaaagtttgcggtggtcttgttccttgtgcccgtgtcagtcacgcttctcccttattctcatcaacaagtctttgatcttctccgcgacaatcaacgtctctctcaggtaaagaaagtaaaaccagaatcttcttcctctgttcttttgatccaaagattctgaaaatcgattctctgcagctggagatcttgttcatgggtagttcatttcaagaagttgctcatatcgctaatggctcacatcttggaaatagcatctctcttcttcggatcaatgttagtgattgattcaaaatcccaacaaaaaaaaaaatcgaattttgattttaaaacttaaaaagtttggtttttgaattacaggtggagagcaattcatcgcataatgtagagttgatgcttcaagaaacatgcaccgataactccgggagtctcctggtgtactctaccgtcgaccccgtcgctgttcagctcgccatgaacggcgaagatccttctgaaataccacttttgcccgttggattctctgttgttccagtgaatccatccgatggtgtcgagggcagttccgtcagttcgccttcgtgcttgctcactgttgcaatacaggtcttggggagcaacgtcaccaccgaaagactcgatctttccaccgtctccgtcatcaatcaccgtatttgcgccactgtcaaccgtatcacttccgcgctcgtcaacgacgtcggtaattaagagaagatttggagggtattttggtaaataatcgcagctaaaaaaacttattatttgttgaggtaaattcgatccgatacaaagggtaaaaactggaatttaccactaaatcttttggggagtcaagaacgcaccaaggcatgatttgttgaaccggggtttatccggtttaccaactgcttgattggttcgggtattgacttccaacttggttaaacgaaaacgttttatattatggttttgttcaaaacaaagctagtttaatgctaattacgaaaatctacttatggtttattattcgtattgaatccttgtaaaataatgtacaactagg

SEQ ID NO: 6659 - DNA, 541 bp, Arabidopsis thaliana columbia
ggtgataatagcttgttttgaaaagtatgttttgtattggtgttaatagcttgttcgacttacttccaatgtctgtgtcaagcttcttgtggcttcctctgcaaacccaagtcgctgttgaatcttgtccttaaccgccatcttctttctctcgatctcttcttctcgggcttgaaagtttcgccatatctcttcttcttggttctcctccattggtatcttgcttttagtcgaagttgtagctcctgagttggtactgttcatgttcttgtttgttcgtttcggtttctctgctccaaacacttaaactctatttatctgctttcagtctgttttctttctttctttttttgggcttttgcttttgcttcaaccttcttaaaggagattgctttgccgtgacaccattccaaaacaaagcaagtcccgccaaaggaaaagtaaagaagaaggtttttctcgaaataccttaaagaataataggcacttggtattcgatgatggggttgtgctatatgtcaccaacttgggtgggatttta

SEQ ID NO: 6660 - DNA, 602 bp, Arabidopsis thaliana columbia
agtttgcgtgtgttattgggtcagggttggagtatgggaaggtgcaaaatgggtggctaagataagggatagtacgtgccacgactgctcccgagctgtgattctgaaaacaaatatgaacggagggcattttggtgaaggtggtcgctatgctcaatgcgaagagactgcctttgattatgcttttcttctcaaagttatgggtcatcacaacaatagataaaagcatcacatcatctttggtttagcatcaaatgattttataatagtctttcactttaaggttaagagattgctagcctttgatctcgctctctcaacaaaaaaggaagatcaaatcggaaaaaaatgatgcaataacttgaaaccacaagagatcatatttgataggttacatgaatgatgcagaagatgatacaaactcagaaccacaaaaaaacgcagaatctactaaccaaagtttatcttaacgagtactataggaacccctagaagccgaacaatgtacacgatacaaggaatctgtcaatacatttatatatccagcgccgtggacctgagagagaaatgtccagtgtttcaccgcttgtgagaatgtcaga

SEQ ID NO: 6661 - DNA, 411 bp, Arabidopsis thaliana columbia
cattgaccttattacccaacaaatcccattcaaaaacaaccaaaccgttctcttcaaagactcaatctatcacaaacctaacaaccttcacctccgtctctacaaacccatttccgcctccaaccgtaccgctctccctgtcgtggtcttcttccacggcgggggcttctgcttcgggtcacgttcttggcctcactttcacaacttctgtctaactcttgcatcgtcccttaacgcccttgtcgtctcacctgactaccggttagcacccgaacaccgcctcccggctgcctttgaggatgctgaggcggtgcttacatggctctgggaccaagctgtttccgatggtgtgaaccactggtttgaagatggaacagacgttgactttgacagggtttttgttgttggtga

SEQ ID NO: 6662 - DNA, 553 bp, Arabidopsis thaliana columbia
tagctcgaaaatccaccaatccctgagaattatagatatgccgtttcaggaatcgcaacgcaatcaagtaaatgcagtagatagatgagacaaagtaggaaatacctttaagatagagagctcgtcttcttcgttccagatccggttgctcggaggagaagccatttttgtgttgtgcttcgtcttcttctttttcttcttcttcgtttcttcttctgttgctgtttcggaagcagtacgttttgaagtacgcttctgtggagggttatcgtcagagtcgtcaccaccaccaccaggtgaagagaaacctagctccgtcggagtcgccattgtcaatttgcttacttttatacttcacaattctagcctgattggctggcatgcagagaaaagccttaatcaggatatcaattacactaaatcgactagcgataacaacttttcatgaaattcaaacttacgccagaaaaaaaaaacagactcttgagagaacaaaaatgtggttccaagtttcagagcgacttcttgagtgaagaagaagagattccgagtt

SEQ ID NO: 6663 - DNA, 608 bp, Arabidopsis thaliana
ctagtaacggccgccagtgtgctctaaagggtataatcacttatcaccgcacgcctctccccttttcgccagatttcccctggggagggctgcttccccccttgcagtcggtctcggaaacctgacctgagcttggcaacaagtgtcttcgaattagttgacaatgggctcgagggtgttaccactgctcaaagttagacagatatactccgatttggtagatcaagcttgtgaggaacgaggaaaatggttttgacttacgcaacaatgttggcccaaccaatcaaacgccagtgcttctcaattcttcgactaatggcaatcttctcgccaacctcagtacaggctgggctagtcaagctcagcttagcagcatcagccttgacaccgaccaccttcgcaccggtagctgtagagccgatattaaccatgagaacctcgttcttagccagcttggcgaccttggcctgcttgccgtcggcagtcttgacacccaaaagtcggcgcacgaaaaagtaattgacctctagctctgtgtagatagcgggaaggcgccacggtgaccgaggacgaaaccaaccaggcgatcggcacgggaaagagtaggg

SEQ ID NO: 6664 - DNA, 1540 bp, Arabidopsis thaliana
  unsure (1)..(1540): unsure at all n locations
tcctcccgtcggcactgcaaaagtattcctctccggcggatccaccaagttgtaccttttcggatccttctccgggtcaaaattcccaaatcctcttcccactacgaagaaattgtgtccgtgtacatgtaaaggatgattctcgatgtttaagaaactcgttccctgaaacacgatctctaatctcgatccgaattcgacttcgaaaagcttcgtaccgaattctgtgttcatgttttccgataccggatctactcccgtgaaatcgaatctgttcggtggtttctctgggaaatcgagtgagaaaactcctttgctctgtttcttatagtagctttcgaggatcgatatcggaggtctgacaaatgagatgttgttcattgatgcgaagaatctcttccctgcgtaaccgtcgcaggtctgatttaacggacaatcctggagattgagacttatcgtggtgatcactcgcttgtctatcttcgtcgggactttacatggatacttcgctgatcccagacttttgatgctatcggagaatttcgtcgcgaatttcgtatccagcatattcgggagagctacgactgtcgacattgccgttaatcgccgtctccgccgtgtgtttacggaattttccggtttggttttaccggtgtaacggatgaatcctacggtggttgagttgttgaaaggaaagacggaagtgacgtaaggagttgcggcgatgagaaattcaccgccggagagttggtcggcgcggagaagaagggtggtggtttgaccgggagcgatcatgattgctttggtatgaaccggtttggtgtaaaccgcgtcgacttcgactacagttagcgtgtgattcgctacagcgacgaagagctcgttgtttagagctgcattgattatgcggaggatgtaggtttttccggcgtctacggtcgccgtgaaagtatctgcagacgatcataatcagtgagaaacgaaccaaattgggccggaattgaatcgatccggtttggaacttaaatcatcggttaagcgaaataaactggacctttggtagaacatggataaagtgggccgggaagcccgttaagggtgtaagcgtcggaaactttagccccagctccggtcttcatcatcgctttctcaacattgtccacgtcatcattccaccattcacctacataatccaatttcacatattctattcaatctacatcgtgcaattaaaactagttaaaaatgatataagcactttttgtcactggcttggtgtttttttacatatggaggagttgaaccagcttagttttaagatcgcataatcgtgattctaaatttcgtatacatatatgtttgaagggaaatgaaaaaaacaagaaaagaaagaaaagaagttatattttttaccaagtataatgggaatttcggattggatatggctgccggaaaagggataaggctgccgcggatagatgatganagcgccgtagacggaggctcgttgccatgagtgatgagcatccaaaggagtgtg

SEQ ID NO: 6665 - DNA, 570 bp, Arabidopsis thaliana columbia
gctaaaatttgcttttataagaaaattacgcctatgcttcttgatagcactgacagaatcccgacaaagctacgatcctccaatgattatatttatctttccatttgaactccttggctcttcatcatttgctgaccttgaccttttagttattggagtttgattttcggcggtgactcttgcttcatgatacttctttacaaaactttcaatatcaaattttgcgagatcaccattctccctaactccgccaaatgtatttttaatacgctgcaatccttcgtcatgtgcttgttcactctatggatgtcgcaatatgaaatttcatctcaagtccacgttgtgggttttctctttccttggaatggtcttccgacattgttgttggatgggttgactccgaacctctttgatcctcgattatctcttggttcaaacttctttggaggaaaagtaaccactggcttaacttgcttagtccttttatcaaagctttccttctcatcctccacttccatccacttgttagctcgaaatagtgcatctaggattgtgggcggtttatggact

SEQ ID NO: 6666 - DNA, 468 bp, Arabidopsis thaliana columbia
tgcagtgattggtctcattatggcaacttacgtttcaccgtgttttactccttcggattctcggttactaactgttcttagaaagaatgttttaccggagaatcatttaggcaggttgaactccattagaacgattgacagtaagacacaccgagttgttgttggcgctcagacctctgactcttctccaatcagacactctccactgtattccctaaaggcaagctcaagcccctttcttgacccttcacgcggccctctctatgcttagaggtgaagggattagtacaatagttaatgcaagacaggagacgtcttctggatgtgttgtcgaggattttgaagagtgatctgctgggagtcactataatgaggtgaggcttaaggttattggtgtgggaggtggtggatcacatgctgtgaatggtatgatagagagtgaaatgtcaggtgtggagttatggattg

SEQ ID NO: 6667 - DNA, 623 bp, Arabidopsis thaliana columbia
aatatttaccttgaaaccatatcagcaaagaagcagagattagtgaaaaatgtgggaacaaaccaaatttgtaactaaatgaagatgctttatgttacgttattacatgctgaagctacgagagatcagaggatattgttatctcatttgaattgtggaaaacaaaattaccgattatttatttgtgtacaacctttttaaatcaccctgcttgagaccctatgagccaagaatcagagattaggaataaaaagaaaagaaaaaatagatgaaggcgaagttgagtccaaagaagctgtctttgttacactacatgatcagaaatggatgtgaatttgtatggcaatgatcaagatagtgagtatacagaagtaaataatggcgtggaccaaaatcgaaatcccgcttgtgctcatgttcccgaattccatcactcttgtccttgccggtagctgaaatagcaatcctggtgagagtaggatgaacagagccactgctacaatcacaggtccccagtctgcactcatatctcaacaaaatctgttttttgaaatgagtttttgtataccaggttcttgtgttttggtggcaggtgataatggaagatgatactgagaatggag

SEQ ID NO: 6668 - DNA, 637 bp, Arabidopsis thaliana columbia
agcaacaaaaataaacaaaaaataacaggtatacgcttcatggctcctgagatgagctgaagcagctcgctgggaagtccacttggtaccgacgatgtttatcaacaatgaaagccatgaatgtagcaaacatcatgatacatataatcgatatgtatgcacagaggaaggtgagcactgagagatagctatttgcgtcatatgaacttgggaatatagtgctgtatgatgctaaagcagcgatacttaaagccgccactgaaccgtaaagtaacttccacttggggagtccaattgtgatgattattatcacatatagagatgatacgaaggcaaatccgttgaggccaataaagaaaaaggcatagatgaacggcatagtcatctgcccagccatgtgaccatacctgccatcatttgtatcctgccaaaatccgccgggaggactgagaccagcctggtatgtagctgttactatcagtatagccaccacaagtattgcattgcgtgggtcactagcgtttatagacctgtctttagtcatgctcaaattgctcagcccaagagagagttccgtctcaataacgaaagatttctgtcaaatatccgcaagagtcgttgtggaccacaaaatggc

SEQ ID NO: 6669 - DNA, 551 bp, Arabidopsis thaliana columbia
cccatttctaagcatggaaataaataaaggcattgcttggccatacgaaccgatgagccttcttgcctcccttttgccttttgcaatacctagtagacgagctgttgtgagttctttatcttgcggtgaagatgttttcgcatgaagttgctctatgagctgagcaactgtagccattgccttctctgggtcgtccatttccatttttgcatcgactttcctgcacatttgaggcaacgacttccattgttatttctcaggacaacagaaaggataatgttgaaatactattcataaatagaaagtgcctacccagactgcaaagaagataatgtttcctcctcctgcgttccaggaagaaaggccttcaacatcgcttttagcttcagcctctggtttcctagaatagaagaaaccaatattcaaacttaccaaacattcaaactatctttgcacttacactggacgaagtgaaactactactctgaatggccaaaaaaaaaagaaacctcacagttttttgttataaaaactcaaagatttcatctttt

SEQ ID NO: 6670 - DNA, 608 bp, Arabidopsis thaliana
ttcggctttatcattgcaggtattaatgttcctttaggggctgcattacttgtggagggattatttgcatctccctgtaacgtcaacttctttttaacaggtggttttctgctattattgttcttctctgcacattgaggggcagttgacgcagaggaagttcttcttctttgtgagttttgaatcacacatttgtttcttttacttgattttacaccagtgagcgtcagagggcttctattttgagctctgttcaaaggagggcgagctcgtttcttttttgctggcacatttgaggatgtagggagctctgctgggtgaattgggagatctgaatgctctccagttttggtctgaacttgatcaacagaggctctcaagtagtcttggtttgcttttgtgaccgcctctatcatttgagctgcagtctcagccataagatctctcgcttctctttaaacaaccctgcgttttcgtgttgcgctctctgttggatcagcacaactggtatattgaagtgtacctctcgcagttcccccataacttcttcagtagtaggactggcaaaaggtggagggggggggggggggggtacctctgcttttggg

SEQ ID NO: 6671 - DNA, 402 bp, Arabidopsis thaliana columbia
gctagtttcttcagcgataattcgatacacattccttccagtttcaatcaactcaatcaaatcaacataagcattctcatattcgtcaaacttcacacaagaaacactcaaacagcctgtgatcaacccttccttatgcaaattaagtagtgcctcacatatttgcataccaattattcctaaacgtaaagtctcatcttcgaggctatcaaactcctccaacgaaaatccaatgagcttttcaccactaaatacaaaacaccattcttcaaatcaccccacaagccaaaaactttagaaacacctctctgtttaacagagatgatcgcatcaagctcatctctttcctcctctcgcatacccacagacaactcatcatcctctggacataactatacttga

SEQ ID NO: 6672 - DNA, 552 bp, Arabidopsis thaliana columbia
agctttatatcttcctgtacaaccatccattcacatatctacacacacacacaaaaaaaaaaacattttaccacttcgcagagttttcacaatcgaattcaaaattgagagaaatttcacgaacctcaagagcgtgtttatagcgtttgatcttacgaagctctctaacgatacgattaagttcgtatttgcgaacggaatggccttcttctttccatttacggatagtaacaacggcgctgcgtttcgtatacacaaggcttagtaatctccctcctagagtgtctcttcctccaactaccgtttcttttttgttggccgattctcctccttttcctcctccgctgcgaggcttcaccacgggtgccgtcgccgtgtccacagtcgcggcggcggcggcggagaaaaggcggtgaatggaggctagggttggccgggcagagcgaaccaacatgtttttattcatttttgtttagtttactgagctctctctctctctctgctgtttgagtaatttgctaagtgagtgtgtttgagctattcgtttgttgg

SEQ ID NO: 6673 - DNA, 504 bp, Arabidopsis thaliana
acctgataccaactctggcatcattgttctagctgaaggtcgtttgatgaacttgggatgcgccactggacacccgagtttcgtgatgtcgtgctcattcaccaaccaggtgattgcacagcttgagctctggaacgagaagtcaagcgggaagtatgagaagaaggtctatgttttgcctaaacacttggatgagaaggtagctgcacttcacttaggcaagcttggtgcaagactcaccaagcttaccaaggaccaatctgactatgtcagcatacccgttgaaggtccttacaagcctgttcactacaggtactgagaggataaaagagccaagctttggttcttcgtttggttttctgattaagccgtttattggcaattgtttgagtcggattgggtctggtttggtcggagaaatatgagatattggtcttctgatgcgtgtgaccaaatattggtatgaataaggggtttgttttgattatgagaagctgttttttg

SEQ ID NO: 6674 - DNA, 557 bp, Arabidopsis thaliana
ttctaatgctagctcatcctcttcatctcaagcttttatcaaccaacgattgttctatcacagttctagacaatttcaaatacaacagcatcgacggtgatttagtaggtgtcatcggagattcatgggttttaaaaccagaccctgtttctgttacgtggcactctatcaaaggagttcaagaagattctcaccaagagatcatctctgctctaatcaaagacgttaacgctttagattcatcagctgaggtcaccaactcttcgtatttctacgcgaaattgatcgcgagggcggcgaggttagctttaatagctgaagaagtttgttatctggatgttattccacagattagaacttacttgaagaacatgatcgagccgtggcttaatggaagtttcggaccaaatggtttcttgtatgatccaaaatggggaggtgtgattactaagctaggatctagagattcaggagcagattttgggtttgggatttcaatgatcatcattatcatttaggttactttgtttatgcgattgctgtgcttgcagagattg

SEQ ID NO: 6675 - DNA, 523 bp, Arabidopsis thaliana
caaaaaatgaaacaactgtcgagaaaagtgacaagcaatgctcatggacaagactcttcctacttcttgggatgggaagaatacgagaagaacccttacgacgaaatcaagaaccctaatgggattattcaaatgggtcttgccgaaaatcaggtaactataactacgagttttcgaccaatcgaccaatctttaattattgtatatttttgggtgtttaatacgatgtttttaatatgcatgcagctatgttttgatctcatagagacatggttagctaagaatccggacgcagccggactaaaaaaggacggccaatccattttcaaagagcttgctctctttcaagactatcatggcctacccgaattcaagaaagtaagtaattaattttttttcaccttcataagtaactcgatcaagaagcgagtaactaacttaatagggtttatttatctataggctttggcagagtttatggaggaaatcagaggaaatcgagtaacatttgatccaagcaaga

SEQ ID NO: 6676 - DNA, 564 bp, Arabidopsis thaliana
acagattttaactgttcatggataaaatcaactagttcctggcttgacatacaatccctgaggaagataatatgaattcaaattatcatcaagaaactaacttatacttagaaaatgacacaattttgtgacttttctcttaccatattccatcgcaagcaacaacaagaaagtcatcatcatcacataggtcaatctgatgagagaaaacaataacaagtcagctcaaatataagataaaactcaagcagaaaatactagaagaagttagattcttacagtgtttatatctggatcagcagtaaccatttgcttttcagatggtaaaaacttattctgcttgaactccatatcacctataaagaggcagaaacgatgcttctatcaagattacatgtcaaataagaatctttaaggcatgaaagtgtaagagaaaaaaaaaaggcttaccaatggctcttgtcagattcaagcttccattgattctccagcgtgaataaagccccagctttcaatatcctttgtttttcacttcaagatcaggcttgtgatctttagaaagat

SEQ ID NO: 6677 - DNA, 491 bp, Arabidopsis thaliana
tggtgatgaatttttcaacacgcttatatcaagttgtccaattcttgaagacttggttgtgaaacaaatcctcaacgacaatttggccattgtgactgttagagtgccttctctaaagaggttagtcttgaaccaagaagtaaaaaacgttgttaaaagcatagctaatgggtttgtgataaacactcctgctttggagtgcatgaatattgttgatttttcgaccgggtgtaacattgttgagagtgatatgcctaacattgtgaaggcaaaagttgacatttttcatccacgaactgagcaacttttgggttctacaactttagccaagtatcttcatctctgcttaccaacctcaaaggtatgttatttattagcttgctataatatgattattggtctctaatccagactaattaaatcaaacattgcttgtgtaattgtaattatactttctcttatccagaatgtgtcgtatcatgctggtaata

SEQ ID NO: 6678 - DNA, 546 bp, Arabidopsis thaliana
ttctatgaagttattgcttgttcttggactacttgtttgttcgattgcgttcgcggtagtagccataatcaaagctagatcattgaaaaaggcgagtgagtcacgggcttggaggttaacagctttccagagactagacttcacgtgtgacgatgtcttggattctctcaaagaagacaacattataggcaaaggaggagctggtattgtctataaaggcgtaatgcctaatggtgatctagtcgcggttaaaagactcgctgcaatgtctcgtggatcttcccatgatcacggcttcaacgcagagattcaaaccttaggaaggataagacacagacacatagtgaggcttctcggattttgctcaaaccacgagacgaatctacttgtctatgagtacatgcctaatggtagtctcggtgaggtgcttcacggtaagaaaggaggacacttgcattgggacacacgttacaagattgctcttgaagctgctaaaggactctgttaccttcatcacgattgttctccattgatcgtcacagagat

SEQ ID NO: 6679 - DNA, 773 bp, Arabidopsis thaliana
tcttgattacgatgcagcctcgttgatttagacttgtctgatgtttgagaatctccacggttatgatacatgatattcaactgcagattttgagcactcatagatagcctttttctctctacaattttgtggacactgataactcaatgaatgaccttattctagactgctttaggaattgatttcttatggctaatagacactttctgaattttaaatcaagttgcttatggcagggtttctggcgtggaaatgttccagctttacttatggttgtgccttatacatccatacaatttgcagtcttacataaggtgaagtcttttgccgctggttcatcaaaggccggtacatcactaactttgaataaatctgttagtgacatgtattatatatccaaggtgtgatctgtacactttaaaacgcttaggttcatgtaaatttaactcctttaaatgagctgtttatggcgacatgacttggctttatataattcatctacatatcaaaccccttgaaaattacacaaaccacaaaagagagaacattccacaatgtttcagaaagttaaaagatagattttagcatgttgtttttgacaggaattctgaattctgatcttctgcagaaaatcatgctcaactgagcccttatctttcttacatcagtggggcactagcagggtgtgcagcaacagttggatcgtatccgtttgacctattgcggactgtattggcgtccagggtgagcaaaggacaatatttctcagtaaa

SEQ ID NO: 6680 - DNA, 987 bp, Arabidopsis thaliana
ccttgtttcttattttctactaggaagacaaatattacgcagagcttgtgtctgagtctgtcgttgtctttccatcttcctagtccctatatatagagtctttcatgcttcgttgcaggcctacttatcttctttctatgtctttttttactctctcccttatttatacatttattaattaagctactaattataatatttgttaaaacttataataatttttcttaatcgcaggtttgcaccacgtggcacgctgtctctcgctccgaccatctatggcaactactatctcgccaagtttgggcaagaacacatttgatgcacgacacgtggcgggacgagttcatctaccgtcatcggacggctagaaacttccggacgcgtactcacacctacttcactctccaatttgacccgtctgatgtggacgagcctgatagtctctcttgccgttgtctcaccctctcagacctctacttagccgcagggttcgccgacggaaccgtccggctttttcttttaaacaaccgactccacgtcaggaccttacggccacctctacgtgaccgctttggtagattctcacgagccgtctcaggcattgttatctccgactcaaggctcacgttcgctacgatggacggagacatccacgtggcggaaatagacggtgttggtcacacacgcacggcttacgcaggagatatagttaacgacggtgcgttggtagatttcactggctgtggacgttggtgggtcggtcttttcgcgggtgtgccaggtcgtgcctttcacatatgggactgtaacagcgaagagacaacattcgtcggtggtacactcaccgaccctgaagctgtcatgggatggcacacgttaacagagctaacaacgtcccttggccgtctcagaatctccggtaacgagacggcggtacgatgcacgagatggagaatcatggtgatcgatctaagaaccaaggagtga

SEQ ID NO: 6681 - DNA, 520 bp, Arabidopsis thaliana columbia
atggagcaaaacattatattaaaaatcaatattttcacaaaatgaaacttatgagcacaaaatgtttataatttgtattttgtgacttattgcagctgaggctagtggactaccgtacattccaccgtatctccaaagcttacggacgaatgattcggtagatttcaagagaggtgcaaattttgcggtggctggagcaacagcgaacgaatttagcttctttaaaaacagaggtctttcagtaacattgttgacaaacaagacactggatattcaacttgattggttcaagaagttgaaaccttctctgtgtaaaaccaagccaggtaagaaaataaaagaatgtatcgtaattttattttgatatttgattgattttcaattattttatttatgttgaaacttcaaaagtttaaaacaaaacctctgatgatagtttgcacatttatttttgaatatactttatgaaaactatataagagtttgtaagaatataatatttggcagaaactctgtagat

SEQ ID NO: 6682 - DNA, 567 bp, Arabidopsis thaliana columbia
ggtaagagaaactgttacgacataaggcctcagcaagggaaaggtttcaagtatctgattagaactcgttttatgtacgggaactatgatggttttagtaaaacacctgagtttgatctctatattggagccaatctttgggaatctgttgttcttatcaatgaaacggctataatgaccaaagaaatcatttatacacctccatcagaccatattcatgtgtgtcttgttgataaaaacagaggaactccttttctctctgtcttggaaataagatttttgaagaacgatacatatgacactccttatgaagcgcttatgcttggtcgaagatgggatttcggcacagcgaccaatcttcaaatcaggtgaaaacatgtcttattcttttgttgttatattctccctgctaaatgtaatcgttttgtaggtacaaagatgatttctatgatcgcatatggatgccttataagtctccgtaccagaaaactttgaatacatccctcaccatcgatgaaactaaccacaacggtttcagacctgctagtatagtcatgagatctgcga

SEQ ID NO: 6683 - DNA, 457 bp, Arabidopsis thaliana columbia
cagcgagttgcactgtattctaatcccgagaatgaagtatcgatgatgacctttgctccaaacttagcacaagtagacaacagtatatccatctcctcattgctgtacaccaagcctgtagggtaaccgttggtccagatataccaacccacggcttcttcacagactcgagtgcattcgttagagtcttttctgtcagcttaaagccatcactagactcggtagggatattcacgacattagcttgtaaaaatttggcagcagcaacataatttccatttgtaccagcaggtatacaaagcgttccatcttcttgagcacaacgaattaccagtttactgtgtattgctagtgagccatcatcatatgcaaagcctgtgctgcttatggctggaacccataattgctcacacgaactgcttaatacttgggttgatacaacttcggcttcagatat

SEQ ID NO: 6684 - DNA, 476 bp, Arabidopsis thaliana columbia
actacttgtggatgggtctcactaactttgctccactcctcggcgcattaatctccgacgcctacattggccgtttcaagaccatcgcttacgcatccctcttctcaattctagtacgttctctctatatctatttttcatttcaaacaattatacaaacgttcacatgattataagcttaaaatggagtactgaataactatatcaacccacaaaaaattggtcgtgataagacctaatgttgacaaatgaacaaggtaaatatttggttttcaatttctatacataatgcagaaaaaaataagacggcaaatatatcactaagctatagagtgtagactaaaacagcaaaaatgccatttgttttaatctttctcaaagtttagctagctaactttttccattagcaaataccatttcttattaatgaacttacgtaacacattggagttgtgagacttgtgacaaataattgt

SEQ ID NO: 6685 - DNA, 559 bp, Arabidopsis thaliana columbia
ttcggaagttttcgtaactgaagcctgatgatatggtcctcaatctttcgtggtctcctgcaagagaaagcacttgtggttaccattcactcttttatttttctgcaagacttactggtgtctctagttcctgaatgattcagctttaagtttttcccattatagctgagatgagccaaacactccatgaaatctattgaactagagaaataaaagaaggtcaacaaagcttcaagtgctcaccttgatgttctaccctttcgctagagtccaggaaattttcagcatcagccaataggaacggtgatccctcgtagctctccagaatatctggtattaacaaacaatttacgtataaaaaaaaagaaaaacaacgaatcctaaattctcaatgccaaaactgcagttgctgtgcgagtttatgcacaagtgtctgcttaatatgtgtgcgaaggaaaaagggagaccatgtatgaaaataatacctgaactctgggaaaaatcagctgtcagatcagagaggctgaagttctgaggaatttgtcctacgagccaaatg

SEQ ID NO: 6686 - DNA, 556 bp, Arabidopsis thaliana columbia
cttctcaatatatgttaaacttgattccagttagattgttttggtttttatacaagagatttggcctatggctgtggagtaatgagttatactttgttttttatgactcggtttaagaatctcttgcataaaactgacgaagcagactcttttttgacaaaaaaaagtatcacaacagagtaaaatcaagacctagacgaaaagcgaaaaatgacaaaagccacaagagttgtggtaagcaaaatgtttgggaaccgctcgaatcttttaaagcatttggacatccatgagtccggcggcaaatgatgtgtagaagggtatgtcacaatctttggagcagaatccgaatgtcgaagtggaaccatattctctacgaaatgagataaaacacgaatgtctgcagcgataaaatggacttagtttgtttctggattatatttgaacagcctcttttcactgtcatggaagaaaagattcccttgcttagaaactgtcactggtctacaccacgacctccatatccaagggtgaagagctctagggaataacaaaatga

SEQ ID NO: 6687 - DNA, 477 bp, Arabidopsis thaliana columbia
aatgagtaatgtggcggcggcggtggttgtggtgagctgtagtagtaaggggctggtggtggtggggatgcatattgaggcggtgacggcaagtaaggtataggggaaggagggggagtgccgtaaattggagattgcgggggttgtgatggagatggttgcggtggatagtatgtttgcggcggaggaggtggcggtggcgggaagggagaatatgtctgaggcggtggtggaggtattgatggggaaggtgagaaagttgggggaggaggaggtggtggggatggaggagagtaccctgtaaacggcgggggaggagggtacctgtagacggcgggggaggagagtaaaccggagtaggtgttgacggcggaggagacgatggagtcgtgcctacaatgggaggactaggaataacaggctggtaaaggaggactaggttacgacggcggagaagggcctgtgaacggtggacta

SEQ ID NO: 6688 - DNA, 540 bp, Arabidopsis thaliana columbia
caaataatacctcatcttgcggagaacactagacatctcctctctcttcctcttagctctcttgtgagtacccaacttcctcttagcaaccttaagagcacgcttgtctttcccaaccttgagaagctcagtgattctcttctcataaggagccattccagctacttccctaatcagttttcttatgaatatggtcctcttgctcgttttctaaacaaaaatatcaaaacaaaactcttgagaaatgaattaccaaagtcagtgaaatgaaactcttgtgaaacagagagtaaaaaaacaccaacttaacagtctaactcttgctcaaaacaagaccattttcaactcaaaactcgacattttcattaaaactaatgtagtcaatattacagtaactgatatacacatttctaagcttagctccttaaataccataagtcgagctcaaaatgtagcccacaaaagccttatctaataaagcaataaactttgtaatcagagggaagaaagattgataccactttgcgagaattgggacga

SEQ ID NO: 6689 - DNA, 619 bp, Arabidopsis thaliana columbia
ccggctttactattcaagcaacacttagcagcatacgttgagaaaacatatggaatgatccgagacaaattaaagaaagagataaatccattactaaatctctgtatccatgttagtacatcattcatcaagttaatatggaactcatcttaaagttttgctaatcgcgtatgttaataatgtgttatatgtgagatgtaacaggcaccaagaccaacaagagccaaaaccttgcgagatgtgactaaaagcatccacttgaccacaattgccaagcaacaagcatcatatgtacagtggcagaacattgtcaacaagcttgaacataccttgacttttatggcagagaaccatgtaaaacaatgcactttcgaagatttccagctcaagcttaaatttgtcttttcctgtttcttgactgagccttaatgatctccaggtcccatctatgatcacaagaaaactcttccatcaggttttctcgtacatcaatgtgcagctctttaataggtacaaaaatatatcgcataggacacaagtacctatgtttggttatgacgtagcttgacttgtaaagtttacttctggcagtttgttgcttcgccgagagtgttgtcag

SEQ ID NO: 6690 - DNA, 404 bp, Arabidopsis thaliana columbia
tgaatctgtgactaacgcatgagcttaacaataaccaggtttatcgggacagattcactaactccagtgggaaacacaatggactttgcagtcttaagatgaagagtggtgggtactacagctgagatacctgactcgaccgtgttcgtgctgcatgctcagcgacgtcaacatggctcccgactcgatatccggagaaatcccccacacgcgtggatcactcccgacgctcaacacactgaatctctcggacaataagtggtctgggagcatcccagagagtttgtcgtctttaaggcttagcttcatgatctgtctaacatcagattatcaggtcgtatactctgagtttgtcacatataatggtagcttcaatggcaatccaggcctctgtagcacgacga

SEQ ID NO: 6691 - DNA, 769 bp, Arabidopsis thaliana
tataaagtacctagtggcctactatgtttgccaagtattagcccattcaacatgaccaagaatgagtccggagtatgcagctcctctgctgacaatacttccagatctgtaacacccaatttgtagcactgtttccagaaaattcattcaaacacagatttgcattaatcgaccatatgagcaaaaaaaatagcaaaccataccatagcaaccaatgggccttcctcttcatctgttgtgacatgagtcattaaagccaagttcttgacaagcccacaagattcgccttctggggtatcacatgtgcatagcatgccccactagaacaaatcacaataccaaaaattagattaaatgatacttctaacaaaagcagtagttttctttacaaatttcagcactgataaagaaagtatcattacctggctgggttgcaatgatctaggcccacttacttttctggacttttcaaattgtggcgaaattttcgtgataaaccccatgctcccgataaaagataaccttgttaagacctatatgaaaagatttctttgagagtaatgtagcatgaaggaggatacagacttacacacagatgtatatagagactgacctgtgtcatgccttttctatgcattctgaaccttttaatatcgaagtttccagttgaaagggttctttctagtccgagagaaatactgtaacgactgtctttattaagacactataagcacaccacaaaaaaagaaaaaatgaaagttttaccaag

SEQ ID NO: 6692 - DNA, 1244 bp, Arabidopsis thaliana
tcccctgtataatcaataccgttgtcgtttatcggttcagcaccatcgaagaaggcgtagttgagtgggaaatcatcattcccatagagacttaagaaagggtagatgttaattgtgatgggagcattgttcttgccaagaaagtcaacaatctgagtcatttgaccgatgatatcgggacggaatcttcctgcagatggaacgggattgcttgctggtgaatcgtatacatccgcgtttaaagggactgttgctttgacagagtttcctagtccggcttcatttaaagcgttttgaatgttcgcaagtgcagggaatgtgaggtttatgaacgatccattgtatgatttgaggaatggctcattcccaacagctacaaacctgaaacacatccacaagtgattagcttcactgagacatgtaaacacatttttctctaaacatgttctgcattttgacagtactgttaaaagatttgacttttatagatataaatacattttagtggaaacaggttctgcatttgacagtagtgttaaaagatatttgatttcataatcagacaacacatgatttcaccagacattgaaaatcaaccctaaacatccaatcttcagaaacaaacatatatagctagacacattttgtctatagacataactcactcatggttatgcatttggcaatgtcataaactaaacaaccatgggtttatgaggtttcgacaaacaaacacaaagaatgttaattttgacgtttagacaaacactacaaccaatcaataacaataacattgagacagaacagagaggaagagagacaaactcacgtgatattgacaccaccatcgaagttataacgagtgacattcttacgaacccaatctttggctcggtcgtaactagtcataaccttaagctgatcattgggaatagcgaccatcacttcaagacccgatccagcgagtgcacccatggttgtctcgtccgcatcaaaaagcttaactttgttgatgttattgtccttaagcatctgaaccactttctttggaggtagcttatgtgtagccattgttccccagttgacacctagcccatctaccataacaatacccatgattccaaatcctacgacgaaggccaacagattcatcgtcctgagaaacaatgaaatggcttaccaggtgttttcacccaaattcaaacccttaacttgtacactcgtaaaatctcacttaaacccct

SEQ ID NO: 6693 - DNA, 573 bp, Arabidopsis thaliana
gatttggtgaccagaacaacttatctcttgagtggttcaacctctatctctctctctttctgccatgaaaatgcaaagccaaatgtaatagttagagagggagaaaccaagaactgaaagaccatgacttccaacagaagcaacctcctgttctcattagtcctcttccactttctttttgtccccacacaactccaagctcttaacactgatggtgttcttctgcttactttcaaatactccatcctcactgaccctctctctgttctacgcaattggaactatgatgatgcaacaccatgcttgtggacaggtgtcacatgtacagagcttgggaagcctaacacaccagacatgttcagagtcacaagcttggtacttcccaacaaacaccttttgggttccatcactccggacttgttctcgattccatatctaaggatcttggatctgtctagcaatttcttcaacgggtcactcccggactcggtgttcacgccactgagcttcagagtatctcccttggaagcaacaatctctctggtgatttgccaagagtgtcacagtgtgact

SEQ ID NO: 6694 - DNA, 506 bp, Arabidopsis thaliana
ctaaaggacagccagagcgccacgaaactgatcccagcagcagttgaaggtggtctgcatcagattgaaacagcttctggcgcggtactgaaagcacgcagcattatcgtggcgaccggtgcaaaatggcgcaacatgaacgttccgggcgaagatcagtatcgcaccaaaggcgtgacctactgcccgcactgcgacggcccgctgtttaaaggtaaacgcgtaggtatgatcggcggcggtaactccggcgtggaagcggcaattgacctggcgggtatcgttgagcacgtaacgctgctggaatttgcgccagaaatgaaagccgaccaggttctgcaggacaaactgcgcagcctgaaaaacgtcgacattattctgaatgcgcaaaccacggaagtgaaaggcgacggcagcaaagtcgttggtctggaatatggagatagtgtcagcggcgatattcacaacatcgaactggccggtattttcgccagattggtctgctg

SEQ ID NO: 6695 - DNA, 300 bp, Arabidopsis thaliana
cattgttttcaagactcggcaactccacaatatctcctagctcccccgaaagcatagatgatgaggacgaggacgaagatgaggatgaggatgaggctgaggacgatgaggatgaccacttttcgatcttctcagtatcacacctagtttgcaacggcgttgagtcatcctgaagatggaatggtacagttttgaaatccattagagcggcttcggcggctgcggcctggatatcctgttggctgagcgagactggtcttggcagaaaatccgcgagctcagggaagttaaggattgcgg

SEQ ID NO: 6696 - DNA, 462 bp, Arabidopsis thaliana
gaaaccatgactcagttcacttgttcgtcttgcaagatggtagggaaattgttttgcatttttatctctatctatgtaataaaactatgtacctttctaagtgtaatgttatatctgcagtcattaaacaaattgtgtaactcgttattatatatctcactgtggagtttcgtgatctttcgactgcgaattctcagctgaactttggccatctttgagtttcttactgctcttctccttaagcatctccttaatctctgcttctctcttatcaacaactttgatcaaatccttgaaactcactgctctcaaacttttccctctagaagaaccagcctcctcgctcctcgcctgtacttcatcactctcttctggtcttaaccgttggtattgccagaaaactttccagcagaagagtgtgagtgccatgaaccaaacgacgccacatattaggaagagtcc

SEQ ID NO: 6697 - DNA, 480 bp, Arabidopsis thaliana
aactcgaggtcgaggaacacattgttgctgttcaaatctctgtgaacgtatggaggatcagcgaagttgtgtagatagtttagccctgttgctatatccaaagcgatttgtagtttttgtgtcaagcttagtaacgatttcgtcgtgtggatccattcacttaagcttccgtttgaagcgtgttcgtagactaagtaccaatctccttcatggaaacagaatccagagagacggatgatgttaagatggtttagtttagacaataagttgacttcctccgatgcgtttccttcgattttcttgatcattgcgccatcgccgttgatttttccgatgtaccctgatcctccaatcgagctagacgatgtgaaatcgcttgtagctgattgcagctcgtgaaatttgtaaacttttaaggattctaccaccatacctgacaaaccatctagcggatcgaattcttgatcagacatcggtggt

SEQ ID NO: 6698 - DNA, 1023 bp, Arabidopsis thaliana columbia
ataaattgttcacctcggtaccatagctgctacaaccctacatagatacatactttcattttattttatttatggtgggaaacaaacaagtattcttcagaactaagcagtaccatgacagaacaggaacctaactcctaaaataacaatgaagaggaaaaatgaacttgtgctgaatttactggttcattatttgtatacaatcatatattattgatcttgatctagaacacaaatttcaaacaccaaaacgaaactgcaaagagctacctcaaggttatagatgccaattttcccatcaactgaagatgctgatataactccaggcatctttggataccaatgaacatcaaaattccagttttgaccagtaggtaactcagccacaatctgacataattggaccaaaaattccattaatttagataaagtactagttaactgacaagcatatgcaagctaacaacaaggctatatcaaatctattgtctcttcacctttcctgtctttgtgttccaacaaatagttcggttgtctttcccacaggtaagtagatacaagctgtcacttggacaccactccattgcaatcacacctgttgtataacaagtatcaccactctgtttcaaccaatgcaagggtacattctatatagtaaaagagatggagatacctctttggtgaccaacaaatgtgcgaacaggtgattgtagataccttatgtccaaaagctgacagaaaacatctttagagaccaatgaaaagagccaaatttgattgaacttgaaaaaataaagaggaatatgatctgatttacgtcacattcggtgaactatcttcatctgaagcaaccaacatctgattaaaatgaacaggatcccattgcaaaactgagcacctaacggcagttttcaagctgttgattgataatggctagatcaggttttgataagagatcacagaggatttctaatataacacactaaagataaatcaggatcgcaaaacttactctgttataat

SEQ ID NO: 6699 - DNA, 505 bp, Arabidopsis thaliana
tgcaatatcaaaatgtaatgaattcatcaatcattgtatagatctttcatgagagaatgcttgagttaatttggtatgttgtttggtggtgaaaggtatgataatgggagcatcagcatcatcagtttggtacaatgtacgagttcgtcatccgacaaaagaattaccaatcttagattatgatcttgctcttctctttcaaccaatgcttcttctcggtatcactgttggtgtttctctcagtgttgtgttcccttattggctcattactgtcctcatcatcattcttttcgtcggtacttcttcgagatctttttttaaaggcattgagatgtggaaggaagagacattgttaaaggttagttttatcttccatcataagttgtggcttttatgttgtgtgagtgtgatactgaatgttttatgtggcttttcgtaaacagaacgaaatggcgctcgaacgagctaattatggttaattcccgagggagaacgtgtgtaaagc

SEQ ID NO: 6700 - DNA, 899 bp, Arabidopsis thaliana
cctgatccaagcctagctagatgcatgtcgatctttcattcgttgtagtgacgttaatactcaaaatcggcataacgtaaacaatatttttttttacctaattgaaagaaaatataatttgaaatacatccgttttgtcatttacatacttcacaagcaccgaatcttatccaaatgtattcaaaataaatccaagaataaaaccagatacataagtaaaatgaatctttagtcataacttagatttgcgaatgggcttccatctcccaaacgagtcgaaacaagcacaagtacggacaataacttattttcaatattttccacaaacccctcaattatttctttattctaattttggacaaaaactattcaaattagtcatttttttgaagttacatctttttccttctgacaatccaaaaatcacacaaaaaaaaattagtcgaaaaactttttaactagtcacagagcgaggagagagagagagaaccttttttttcctctataaaaagctgagccacttcctctgtttcccacaaagcagcttctgcaacctattcgttggttggttaatagaagctctctttctctgtctgtctttctctctcagagaaatggctcttcttctagtttcttcttcctcctcctatgccctcagagtcaccattttcttgtctttcttcttctttctctgcaatggcttctcttaccctactacttcttctcttttcaacacccatcagcatcgtcaccacttggccaagcacaactacaaagatgctctcactaaatcaatcctcttctttgaaggccaaaggtcagggaaacttccttctaaccagagaatgagttggagaagagactctggtctctctgatggctctgctcttcatgtaatt

SEQ ID NO: 6701 - DNA, 542 bp, Arabidopsis thaliana
tgaggttgttcgatccatggccagtgttcttcaagagagaatggaaacgttgttggccgtttctcaccggattcgccgttaccgggttctcatcaccaagctcaccgctggactcactggtaagtctcttcagatctgaccaatcgtcatcggaaatgaaagagctaatcctcaattgatccgtatttgtggaatcggatcggatatattgatgtattgtgtctcagtattgattgttggatcgctggttgtgaaacctaattagtaaatgtattgactcattttgcagaggaagacgccaagaactccaagtttgtccaacaacacaggcggtaatgtctttctctttcgatcatatcaatgttaaatttcgatttggaagctgaattcaaatctgtatgtgatttctctgcatctgttaattgaatcttattaagtcacctacttcattcagatggcttagaattttattgtaattcatgattttgatatctggttttcccaatagcctgtacaaaatctcaatgtgtaatgtttgattt

SEQ ID NO: 6702 - DNA, 559 bp, Arabidopsis thaliana
  unsure (1)..(559): unsure at all n locations
caactgaaattcaactccacttccaataaaatgaaatgcttacctcgacataatctactcgtcctgcagatccaacaacttgttgaatgatcatatccttaagctctgcacaattggttttcccttctgcaacagaagctttagccatggccagtgacctacttatagacaaaagcctaccatatcataacaanacaacagaaacaaagtaagccatccttgatccttgttcacataccagaacataaaggagttgttactttaccctttgcctttcttcatctgaaagacgcacatttctcgaactcatcgcaagtccatctttttctctagctatatctgatcctacaatctcaataccaaaattaagatctcgaacctacataacaaacacagcaacatcaggcttaccattctctacaatctctataccagcaagaaattgtgcaaaatgttaccaattctcaccattctctgtataatccccattgttgataatctttcttccaaacagagcaacatcaggctcaacaatattaaaaagcttagtaacaatagt

SEQ ID NO: 6703 - DNA, 794 bp, Arabidopsis thaliana
ttttctttagatagttggaagtaatccgagtttgagctaggggtaggtgaaaatactcgtttcaaaactgccactaaaagcaattaaacaatctggatcctctatccagattgcatataactctatctacaaaatgacagtgttactactcaaaccaactaaaatgtcatgattcatacacgacaagccaaatatgttaaaaaaaaagcagtaaaatctttttatttctttattgacgaagtctgtaacaaaatccatacacacaaatcccaaaaggccacatcataaattcacaatcatccttattaattattatcacaactacccccacaagctcccaaatcttttacatttccaccccttaactatttgcaacggaacattgcctcctaaccactccagctgaaccagtcttgacattgatccgacccattttctccattgacttggcaaactcagagaagaaactccccaccgaacccgtcaagatccggtttatgtttgaaagtgttgtggggttagtggtgagagcagagtctgattgaaacagacctctacgcttgagtacgagctggtaataacttagatcaaatgttttgcggctccctggatccatctctacgatggtcttgttatcgttgaggctaggacattttctagacttgagattggctgcgtactcgctgtccaaagccggatcttggcctccacgacccgtaaaattgtagagacggtttgtgaaagacgagcagtgagatacacgaatagtgtgagcccctgtttatacacatata

SEQ ID NO: 6704 - DNA, 550 bp, Arabidopsis thaliana columbia
  unsure (1)..(550): unsure at all n locations
cacctcagaagtaggactgtcgtcttcataacgtttgtataagtaccttttcttaggcttgctagtgcaagcgcatgcgtttccacatctataagtaactttgtgcagaagaccctgaaagcatagcaaatgattttgacatgtataaacgtgcaaaaaacattgtgtgcactaatttgccaaaagcttcaatatacctttatagctaaaggttgtagatttggagatttcaaaagcagacgaggcaatgcctgccaaccgttttccttgtcactctcaatagatagatgaatgagtttgtcgaagaccggcatggtataacagcggtagtaaaacgcctgatttatagtcaaagtcagaaaccagatatagatagaaatgagacaatggtaactagcaagaataagagacctcaagagaactggacgagaggtgaagggtcttgacatttcttatcgcagaaaccagatttgtaacctcaccaaaatcaaaagtgttagttacncccacaatctaagatccagtctagcttcggcaagcgaatcaagat

SEQ ID NO: 6705 - DNA, 592 bp, Arabidopsis thaliana
tttgtctctgtggtgcctgatgatttcatagagatcgtactcggcataatcaaaggcaagatacagagacatgtctgcaaaattgatgtggacattcacaagcttcacgacgttctcatgggaaatctctctaagcaacatgatctcgcggatagcagtcggggaaactccatctccatctttggactgcttaaacttcttgatagcaataggtcttttaggcggagtcttggttctagccaagaaaacaagaccataagtgccttcaccaatcttaccaacgagattgtactgttgcagccactctggtttctcactagtgctgtttgagctgttggatctactggaactcccatctcccattgctttttagtattattctctacctcaatgtccttaccatgtgaatcggaaaaggggtagagtctaacaaaacaaaacaatcttggtttcctctttgtagtctcctgaaatttgaacaaaactttggaaaatcagccaaaggaatcaaaccgtacatgtaatctatctagattctagactcaatcaagtgatccagaaaacttacaagcaagaaacttcacagaaaaag

SEQ ID NO: 6706 - DNA, 627 bp, Arabidopsis thaliana columbia
tagtccctctagaagcaggactctagatagaaggtcaacagaaacattacctaaacagtcagatcagaaaccagctaaagtcttatcagaaagagctaggagcatttcaccatttcgccgactcagcttcagcattggaaagtccagtaaaaactccaacaccgaagatgctaagactcctccacacttaagcacagcacttatttcatcacgagctggtttagacaatccatctgcctcttctttcagtgacagctcttcttttgataaaaccagtgcagcaaacagaggcaggtctagtccattgagaaggttactcgatcctttaataaaaccaaaatcaagccactcatgtagatctcctgagccatcactaaaggaagcaccttcaagtcaaccatcttcgtcatcctttctgtcgagaaatggaaaatcttcaactgttcaggctctatttcgtgtgacatctaagaatgatcaaccactcttcacttttgcggttgaaaaggaacaaagtattacagcagctacaataagaaaacagactctcccagagaaggaagactatggacacaagtatactttttcactgttcaagaagtacagaagaaaatgcaaatggatgac

SEQ ID NO: 6707 - DNA, 922 bp, Arabidopsis thaliana
cgtatcttctaatcaataattcaacaaaccaaacctcttcccaatcccaacagcttcatcgttttatcttccaatcaaagcagctcaaatcaagctcgcaaagatgatgcacatgaccttctactggggaatcaaagccacaattctcttcgatttctggaaaactgactcatggcttagttacatcctcactttaatcgcttgcttcgtcttctccgctttctatcaatacctcgagaatcgccgcatccaattcaaatccctttcttcctcccgtcgtgctcctccaccagctcgctcttcctccggcgtctccgcgcctcttatccctaaatccggtaccagatccgccgctaaagctgcttcggttcttcttttcggcgtcaacgcagcgatcggttacttgctgatgcttgcagctatgtctttcaacggaggtgttttcatcgcgattgtcgtcggattaaccgccggatacgctgtttttagatctgatgacggcggtgctgataccgccacggatgatccatgtccatgtgcttgataatgattgataataaaatcaaaatcggaaaaatctcaaaaaaggtgtgtttgataattgatgtttgtattgttgtttgtttctgtatgattagttgctttgtaacaaaataatccaatctaaatgtgtttcttgagtatatgcaaatctgaattcttatgatttagccagaattcttcagctacaagcaaaaatttcaacacttgcaatgtccattgttacatggtatggtttaatgttatcacattcagtgacatagatagagataagtagatctagcagatggtagattcgccatgaatatagtcgagtatagcaatgagaccgacgatgaaagattggtccacatttggtttgacaattacatgatacagatcc

SEQ ID NO: 6708 - DNA, 601 bp, Arabidopsis thaliana columbia
  unsure (1)..(601): unsure at all n locations
cctctagcctaacaagagagagcccttatctgacccatccaatcttcaacatgtatgttaccttctttaaatcttggttccttcattgccctgtggcttattgttaagtacctcacatttactttcccttttttcttacatttggttaggtaccacacggagcatgagttgcttaggtacatccacaagttacaaaataaagatctatcattgtgccacagcatgattccacttggatcttgtacgatgaaattgaatgccaccactgaaatgatgccagtcacatggccaagtttcaccaacatgcacccttttgctcctgttgaacaagcccaaggttatcaggtgaggccacatatttgatttacctgactagaaatttaactacgtactgaattttttgtttgacaacttataggaaatgtttacgaatttgggtgagctcttatgtacgatcactggattcgactctttctcattgcaacctaatgccggtgctgctggcgagtacgccgggctcatggttatccgtgcatatcatatggtaagcatacctgtagtttcttgtttccaatatgaantcgcacttcaacaaatttgg

SEQ ID NO: 6709 - DNA, 562 bp, Arabidopsis thaliana columbia
cttaggaatttttcaaaatttgataaatgagaggctcgacaccttacataaacgtaaatatttcgctaatattgctctatagtagactagtagtggcatccatttcttttttcctaggaaatgaagttagattttagacgttgaccagatgaaatataaacagagatcgtactacacaaaagctcattttttcctttttgggttagagcgataaataaacataaaagaaaagattagtatggagatacacagattcatgaaacgtatggttcacgtattactattgttactagcgattcatgcgcatatccaagccgttgcttcaatcacaaatacttctgtctcagccgtccatctgaaacctaattccatcttaggtaacaaaacgtgttgtaagatagatttccgggtttggcagcgggagttcgaagcagcggtggtggcggtggaggaggtagtggtggtggtggaggtggcagcagtggtcgaggcggcaacagcggtaaagggggcagtagaggatcttctaatagcggcgcgcgtgcagcagtggaaatggtaa

SEQ ID NO: 6710 - DNA, 346 bp, Arabidopsis thaliana columbia
tgcaaaatcttcagtgacatccagaagaatcatggaaactggacggagatccgaccacttggtaatactcctttctctcagtgatctatgcattgtcttgtagaactaataccttagacactaatgaccatggttgcctttcgcgcggtattcagcatccggtttcccggtggtggtaccaccagccagataattccatcagctcgccggacttctctaccactcacgaaaagagctacaaaccaagccgttgcagcttacaacccaatagttgggatcttgcagaatgtcaagtctccagaatattccattcatgagccacaagttgatcagattgccatttttc

SEQ ID NO: 6711 - DNA, 611 bp, Arabidopsis thaliana columbia
tgaggtttaaataatatttcttctaggattatctcatctctctctttcatggatagtacagagttaaaatcaagtgcaaaaaggggcaattatctcagcttaaaaaagtgatgaacaagaatttaattccttcctctttctcaagataacctcaaagagatcttcttatgaaacatatgctttagctatctttaaccctttttcccttctctctttctatttctccctcatacctttgtttattctgatgaagttgtgagcactgaaagaaaagaagagaggagaagagagatatgcacaagaagaattaaacttagggacacaaaacaacatgacttggtgcaatgaccgtagcgatgttcagaccgttgaaagaatcattccctccccgggggcggctgagtcccccgtagcctcacttccggtctcttgtcacaaaacttgcccttcttgtggccataacttcaagtttcacgaacaggttcttgtttctctttctacctatatcaagtgtaaactttagatgatattggatatttgaatataatatatcaatatgtaatgtaggctgggatcatgacttgccgggacttctgctggagttaatttga

SEQ ID NO: 6712 - DNA, 542 bp, Arabidopsis thaliana columbia
cactacagaacttgctaaagctagtcatgtaaaataaaaaactttacttttcttatcctacccattgaatctgcatcgccacaaactatcaatccctcactcaaaattttgaactttaatacccaaatcgagaagacctacacacaaccacagctcaaacaatccaagatcacacgatcttctctagaatatcccgaatagcaaaacagatcaagtgagagaacagaaccctacaatctcaaaccggaaaaaaagggtttaaaagagacattacatgatggggacactagtggagatctcaggccagaattggtcaaccaaattgttgaggttagagagcgcatgaagcttcaaaacaggatgaggctcgttgagcattgctagtaatcctccagcggcactaaccatgggtgtcgccattgatggagacactacatcgacatcgacatacgacctaagagacagctaatcagatgacgaaagattcgaactttcgatgagactcgtcttgcatctctctactggatttgcagaagagtgtt

SEQ ID NO: 6713 - DNA, 772 bp, Arabidopsis thaliana columbia
ttgcatgttgaaccatcacaccaagtgaattcccactcggataacaaaacaagcgtaatgtctcagaactcagctcttgagaagaacaacagtcattcccatcctcatcccgtggttgatgatgtcatacatgttattcgccacagcagtttccgagtagggagcgaccagccggtcatggaaagtgttgaagtcggtgtccaaaacgtcgatatggggaaactcataaacgttgtgagagatgaaatggaagtgagaaaaggagccactccctcagaatcacccaccacaagatcgatcatctcagagcctgactcaagaaccgagcctcgtcctaaagaaccagaccccatcaccaattactcagaaacaaagagctttaactcctgctcggattcttcaccagctgagaccagaactaactcattcgtgcctgaagaggaaacaactccgactccacctgttaaagagacgttggacatcaagtcgttcagacagagagcagaagcgcttgaaggtctattggaactatctgcggatttgctggaacagagcaggctcgaagagctagccattgtgttgcagccgtttgggaagaacaaagtttcgcctcgagaaaccgctatttggttggccaagagtttgaaaggaatgatgatcgaagacatcaataataataatagcagtggcagctccaggaattgttcatgaaggtaaattatcatacaagcatttgcaaccaaactctcttctgtgttactttttttctcta

SEQ ID NO: 6714 - DNA, 936 bp, Arabidopsis thaliana
taaaggccaggattttgttggttgaatggtggaccgtctcattaaggttcttattcaggacctggaccagggaagaagaatgacgctggtatgaaaaagataccggacgatgggacaggaggattggattctgttgatcttattgaactaaacgacttcggcaacaaccatatcaagaaaactcgagaaaacaggattggtaaagaatggtatccgctgcttctcgattatttccagtctagacaaaccgaagacatgggattcttttacgctgtcgaattggatgtcaataatggaagttgcatgagcattttctgggcggatagccgagcaagatttgcttgcagtcagtttggtgattccgttgttttcgatacttcatacagaaaaggaagctactctgttccgtttgctactatcatcggttttaaccatcataggcaacccgtacttcttggttgtgctatggttgctgacgagtctaaagaggctttcttatggttgttccagacatggcttcgtgccatgtcgggtcgtcgtcctagatccattgtagctgatcaagatttgcctatccagcaagctttggtccaagtctttcccggggcacatcatcggtactcagcttggcaaattagggaaaaagagcgggaaaacctcataccgtttccaagcgagtttaagtatgaatatgagaaatgtatataccagactcagacaatagtcgagtttgactcagtttggagcgctctcatcaacaaatatggtcttagagacgatgtttggctcagagaaatctacgaacaacgagagaattgggttcccgcgtatctaagagcaagtttcttcgctggaatcccaataaacggaaccattgagcccttttttggtgcttcacttgacgctctaacgcctctcagagaattcatttctcga

SEQ ID NO: 6715 - DNA, 524 bp, Arabidopsis thaliana
ccttatttctatttttgcttcagaattttttttcattttatttttggtcaaaaaggttattaatttccttttcaatttgtacgaatttaaacggtgacgtttttgtttaaattatcaaacaaatcaaaacaaaatcaataaaatctaatctctcatcatgaggcatctttgactgctctttaattcactaaaaaagtctaaaaccctaaccattgccctttttcaaacgaagaagaagaagacgaaacgctaccatcatctacacacacacacccaactacttttttccatcgccggcctgtacaaatgtcgactacccgtaggatccgcggcgagaatcggttttataacccacctccgatgagaaaacttcaacaagagcgtgagaagaagagacttgaagcggaggagatagagaaagagaagaagaaggcaaaggagattctcgatcgaaagattatagtcgaggagaaggagattaagcaacctgaggagtgctcgacctctgattgctctgtgccgag

SEQ ID NO: 6716 - DNA, 551 bp, Arabidopsis thaliana columbia
tatgcattcgcatattaaatctctttaccccacaacaatcattagctcatcataataaactaacactaatagttaaataatgatgtcactaatgcaatttcctcttaattgtatgattaggtggtcgaaaatcgccaaacatcttccaggaagaacggacaacgagatcaaaaatttctggaggacaagaattcaaaaatacatcaagcaatcggatgtaacaacaacatcgtccgttggatctcatcatagctcagagatcaacgatcaagctgcaagcacgtcgagccataatgtcttttgtacacaagatcaagcgatggagacttattctcctacaccgacatcatatcaacatagcaatatggaattcaactatggtaactattcggccgcggcagtgacggcaaccgtggattatccagtaccgatgaccgttgatgatcaaaccggtgaaaactattggggcatggatgatatttggtcatcaatgcatttattgaatggtaattgattgatcggtggacaagacatggaatattaattgagta

SEQ ID NO: 6717 - DNA, 572 bp, Arabidopsis thaliana columbia
ctatataacatctatgcatctggtggcagatggaacgatgctgcgagagtgagaaagaagatgaaggaaagtggagtgaagaaggaacctgcttgcagttgggtagagattgagaatgcaatccacatgtttgtggcaaatgatgaacgtcatccacagagggaggagattgctcggaagtgggaagaggttttagcaaagatcaaggagttgggatatgtgccagacactagccatgtaatagtccatgtggatcaacaggagagggaagtgaatttacaatatcatagtgagaaaattgcgttggcgtttgcgcttctcaacactcctcctggatcaactatacacatcaagaagaacatccgtgtttgtggggattgccatacagcaataaagttggcgtcaaaggtggttgggagagaaatcattgtgagagatactaatcggttccacattttaaggatggtaattgttcttgcaaggattattggtagtaccactgaagaagtcaagtggcttctgctggtgtgtggagaaaggccagtcgttgagaacaatggttgcactgtagc

SEQ ID NO: 6718 - DNA, 506 bp, Arabidopsis thaliana columbia
  unsure (1)..(506): unsure at all n locations
nnnnnnnnnnnnnnnnnnctaaagatcaccaagtgaaatgaaacgaaaggcaagtgaaagcgacaacgcccgacgtcaagttcatcagactaaggattgagttatgccagaaaattacacccctgctgccgccgcaaccggtacatggactgaagaagagatccgccatcagcctcgcgcatggatccgttcactcaccaacatcgacgcgctacgttccgcgctcaataacttccttgaaccgttactgcgcaaagagaatctgcggatcatcctgaccggagccggaacgtcggcatttatcggtgacatcatcgcgccgtggctcgccagccataccggtaaaaacttcagcgccgtaccgaccaccgatctggtcaccaatccgatggactacctgaacccagctcatccgctgctgttgatctccttcggtcgatccggcaacagcctggaaagcgtcgcagccgtggaactggcaaatcaatttgtaccggaatgctatc

SEQ ID NO: 6719 - DNA, 580 bp, Arabidopsis thaliana columbia
cccaaactttaagagcatcctccttgtattcatcttctatgctcgtatcgattaatttcatcatcatttctctgttcgtctccttgctcacgctccaaacccacatgactatgtcattgttctcgccgaaatctgtctctaacggcttcttccctgtcaccaactccattaacaccaccccgaagctgtacacgtcgctcttctcgttcactttggtagtatatgcatattctgtgaacaacaaagaaatgatatgcaatttacaggtgttataaaactgtggattgaaatggaagaatttaaagtttgataagcaagaaacctaaagatatgttgacctaatgtcatatggctattcagaagaaaacctgaagattctacataccgggggcaatgtaaccaagagttcctttgacaagaggagccgagaaatctcgttgaaccgaatcagcctgaatgattttagccaatccaaaatcagcaatccttggtctccattcctcatcaagcaatatattgctggacttcacgtctcgatgtatcccggccgatctacccatggtgaagatctccagccttt

SEQ ID NO: 6720 - DNA, 534 bp, Arabidopsis thaliana columbia
tcaatcttacaacaataattcatgtcattgtctaaactcgacaccattacggtgagggaatgattcatgagattcttggaccataaaacggtgacgtttcgaaagaaccctgccacatgagcttggtaaccgcacgtcacggtactatgaggtgaaggcgatgcagccgacttgagttgtgccacggtctttggattgtccgttatttttgcagcaaatgccgtaggttggcttccgatagacggcattcgaaatgacaacatctttattacaaacctcaatgggttcaaagttaaaaaaaaactaatcaactaaaagaatgacaaacactttgttcttatttttttgcataagaattttgccaaaatgttgatcttcctctattgtaaaaaatggattaggcaagatagttcaacttttcctatatgtttagtaataaactgacaaaagtttgagttcgtttgattcaatggggaattggtttttcgagttttggcaagagacagagagagagacagacaaactgagagatta

SEQ ID NO: 6721 - DNA, 604 bp, Arabidopsis thaliana
cagctcgagggcagagaaacataaatgctggtgttagtcataatctacttcaagttccccgttatgtcacatgctctctgttcaaaactaacttccatacgtctaatcaaatccaatgctaaagctagttattcacaattttgaaggtacatagttcctacacagaccatactatgaaaggaaactcaatgaggcttagagtcagagatcaaaagatcattaatcaacaatagcaacgagtttttacatccaagtatccaacagaaatctgtaaaacataatcagacccggagaatctgcagcttgttagagaaggcaatggcaacccaatcaggctgagaagatgaccactgaagctgctcaacctcagcgccggctgtgtaagctagaatcggatccagaccaccttcaacatgctgtcccatggaagatatatcccaaatcaacgcctgagaatcatctccagcggacgagatatgggaagagctatgaggagccaagctatagcattgacactagcctgatgtcgctgaagctcacgacaggaagagccggaaaccgaatatcaacacaacaattttagcactgcccatgataacagtag

SEQ ID NO: 6722 - DNA, 475 bp, Arabidopsis thaliana
cggtttagcgcacacacggcaggttcgagtgatcttcgagtcagcaatccaaaagtgatagaaacggtggttgtgagatgtctgttgtggaaatattaccgctttgctgcatttaatatggaaactgatgttgcaagtggaacaatgatagccatactttttaatttccagcttgcaggctaggcacttggatccacttacaaatgaaagcggaaggtagtgatcaggatgaattggatgacagaatctcatttgcctgttaacttccagacacaatggatgatatacatctttacacaccacacatgaaacaagtgagctttcattgatcagacgatacacaaatgttgaaagcctaagcgatgacatatgtatggtcttgtcttttccacacaccacctcttcacatatatcgcaagccatggagtatgactttgagaccattatttgatccaacaaatgctctttttgaatg

SEQ ID NO: 6723 - DNA, 975 bp, Arabidopsis thaliana
ccctcactcacatcactcagagttctcagtctgaaacataacaatctctctggtccaatcccaaacctctcgaacctcacagctttaaagcttctctttttatcaaacaaccaattctccggtaacttccccacttcaatcacttcactcactcgtctctaccgtcttgatctctctttcaacaacttctccggccagattccaccggatttaaccgatttaacccatctcctcactctccggttagaatcaaaccggttctccggtcaaataccgaacatcaacctctccgatttacaagacttcaacgtctccggtaacaactttaacggtcagataccaaattcattgtctcaattccctgaatcagtctttacacaaaacccatctctctgtggagctccattgctgaaatgcacgaaactctctagtgacccgactaaaccgggtcgacccgatgaagcaaaggcttctcctttaaacaagccggaaactgtaccttcatctccaacttcaattcacggcggcgacaaaagcaacaacacatcaagaatcagcaccatctcacttatagctatcatcctcggagactttattatcttaagctttgtctctcttcttctctactactgtttctggagacaatacgcagtgaacaagaagaaacactcgaagattcttgaaggagaaaagattgtctactcatcaaatccttacccaacatcaacgcaaaacaacaacaatcagaatcaacaagttggtgataagggtaaaatggtctttttcgaaggaactagacgttttgagttagaagatcttctccgagcatcggcggagatgttagggaaaggaggattcgggacggcgtacaaggcggttcttgaggacggcaatgaggttgcggtgaagcggttaaaagatgcggtgacggtggccggaaaaaaagagtttgagcaacagatggaggttttagga

SEQ ID NO: 6724 - DNA, 191 bp, Arabidopsis thaliana
ccttattatgattaatctgtgaggcgaaacaatagcagcaactacatatgtatcatttagctctgtgagagtcgcggcttcgtttagctgcagcaataacatgcattcataagtcgttgcccggaaagaacctttctctagtgcatgacctccgactagtgtcgtgcatccagctgaagtaccatcttctg

SEQ ID NO: 6725 - DNA, 1398 bp, Arabidopsis thaliana
cattgagagactggtagctggtttgatttgccactgaataacgagagtttattaagttgagttttaagcggaatcgattgaataaccaaaactcttgttgcaggtgagcaacaaaatggatccctttgagctggttaagctagtagaaatcctgaatcctaataacaagcctggaagaatcactgtaattgtgagaatgggtgccgagaacatgagagttaagcttccccacctgatcagagcagtccgcagatcaggccagattgtgacatgggtctgcgatccaatgcatggaaacaccatcaaagcaccttgcggtcttaaaacacgtgcctttgactcaatactggtacacactttataagctaaacctctcataagcgtaacatagatttgccataacagagatttaaacttcctgtctttttctacaggctgaagtccgagcattccttgatgtgcacgagcaagaaggaagccacgcgggcggtatccatctcgagatgacaggtcagaacgtgacagaatgcattggagggtcccgcactgtgacctacgatgacctcagttctcgctaccacacacactgtgacccaaggctgaacgcgtcacagtctcttgaacttgccttcattgttgcagaacggctcaggaagagaagaacgggtagccagcgtgtgtcttgagtccggttcttcccttttatacactttttgattccaaacaaatcttttctctttgtcctgtgactgtgagttggtgtctttatgacctaagttaaaagccccaaaagcctctctaggaggagtaaacctgtttctgctgtggacagaccatgtcatgtcattgttctttatgttaactttaatgtcaaaccgtgtcacttacactagtgtatatttctttttacatatctacacgaacatgaaacttgtcttctagttagtactaaagattgatcttcgtctttcggctattcgtaaactagaaatgaacaaatctttagaaaacgatcttccaaaatggcccattagctcagttggttagagcgtcgtgctaataacgcgaaggtcgcaggttcgaaacctgcatgggccatttttcataatatctttttttttcttctgagtttcgtcgtaaataaacaatccgacgccgacggttttgggaccccccactaatcaatatcgtgtcccgctcacttaacccaaaatatgatcccctacgtacctctttaactctgcttctggtgctcccaacaaccatacttcgtctcgatttccatcacgtgttctacacttctctttattccacgtgtcatgatcttggctcatagtcactctcaattaccaaagactctcacacactagatcatacaataacacaacaatttaaatc

SEQ ID NO: 6726 - DNA, 535 bp, Arabidopsis thaliana
tgttatctactcttggtcaaaggttggtattacttaaatctcagaaatactgattttttttaacagacatgagagtactttctgtggataaacatgtgttaataattaccctattttctcagtagaatcaagggattattcgatagaatacccaactctcctgaaccacctttacccactagtccaagtttgtagatgcactctttattgtaatctcttactctagctaacttgactactatatgtcatggagatagtaagcctctgagagtctgaggtctctttatgtcttataagcttaaaaaatgaaaacctgagtaataacttcgtacatgttaggaacaacttcccatttcaccacagtgaatgtcaatttgttcattcttggatcttgagctcaacagaaatttgatattcttgattatttctctttgaaagggcgcaacgtttgcagagattatacaaatgactgacatattcgaaggtagtacatcagaagtgctagaagactcgacgagtttttgaaccaggtaat

SEQ ID NO: 6727 - DNA, 489 bp, Arabidopsis thaliana
agttgtagaggctgttgagataagagtcaaggtcatcgaggtgactgcaaaagtcatagaagcgattggttatggaacagtgatattaccaacagcgaaacggcttcagatggtaaaactatggcttcctattgtaagaaacacaaagcctcttgttgactcaccggttagagaagatgaggagaatgatactgtgagatataaaatcgacggagagatatggcaagctttagaatcttcctttgtatcgataattctggcattgccatctgcagaccaagctgagatattgactgaatggttaagcaagaatgggttgtatccggatttaacagaagctttcgaggtttggtgttacagatcgaaagtcgcgaagagaagattgggtttagtcgggggtgaagaggagaacggcatgtcttaactcatttgttgagctctgaacctagagagaagaccattctgttttttgtattgtttgtgtgtgta

SEQ ID NO: 6728 - DNA, 211 bp, Arabidopsis thaliana
tggtcatgatacagacgcaccgtcattgacggaaggctccagtaactgatcgcgggcgcagtctgttctattgtcaccagggtagtgtatcgggtcgattccacaatcgtcagccgatattgtgcgtttgccacctgatagcttacagtttcgccgggtgcgtcattgcgcggtaacaaacggcgcaattgtgaaaagttcatctcgcaca

SEQ ID NO: 6729 - DNA, 1027 bp, Arabidopsis thaliana
tcttgccatcgtaggccgaaaggtgaactccgatagcggctcttcctgatggatccatattgttggaccagcttgcatcccactccactgcctttgcagtcgaacaagccacggtggcacctccaggaaccgttagtctcgcagagttcttagaaaaaaccgtacacggaagtttgtgaattagttaacgcaaaacgaataggagattctgttacatcatggagacttataagactctcacctgcgggaagaacctttcaaagatcattctgtagtagtaagcttctttagtgtttggagtgttgtgagggaagatatgccccgcgttcgacatcatcttgtcattgaccttaaaacagaacagaatcattagatctgaacatgaatccaaatgttatattttagctaattaggggagatatgaaattttttatgtgtacattttgagcagcgtgatctttcaggccatcgatccaactgtagccaacaccatcactgaactgttctttctgtctgtagagaatgtgttttggtagataaggacgttcttcgtcgtcaaaggctctccttagaacccatttctcgatccttccttcctctggcttgatctagaaaaacccatatagaaaatttgttcaacgttaacttgtgaaggaaggtattgagtttgtgatgtgagttttgtagttaccatcttggattcagggtcgagagacatagctgtgttgatgaagtctttgtcaaggaaaggaacacgtgcctctagtccaaaggcagaggtagatttgttggctcttagacagtcatacttgtgaagagccttgatctgcaagttatcaccgaacaatcatatcaagataagtaaaaaaaattgatgatgtcttatttggtggttgaattgaataccttgcgacaagtttcttggtgaactctttcttgttaggtgcttgtggaaatagaggtaccctccaaagatctcgtccgcaccttcgccggagagaaccatcttgaccctagagacttgatt

SEQ ID NO: 6730 - DNA, 353 bp, Arabidopsis thaliana columbia
tgtcctgaaatgtatgttgtagtatgatccaaacgtaggttacaaattctattgtactaaccatcatatgagagaattgaggattatagtataagggttgagaactcactgtgatcgaacaagaggtgtgtatatagtattaggtaatctgttttcacctaaaaccattacacctccaccgtcttgatctccactgagacagagcgagaaaacctgtggagcaaggcgttgagcataaagctgggaaagtaccgataatcgccccttgcctaacccaaggatgccatgtactgttgtctctgaatgcgatataagtccagtctgtaagttgctacacctgtttgtcagtagaa

SEQ ID NO: 6731 - DNA, 376 bp, Arabidopsis thaliana columbia
tcccatagaagccctaaaccattgacagtcattgattcagaaccgcgtctggggacattcctcttggtctgaaggaacgtcagtttctcaagcagtccggtctcagctgtggcaatggctgaaccataggtatagagtccgaggaatacatgccagggacgagtcgtacgtcgtttgcgtccgtagttatcctctatgccagaagctcatgaatccagtcacccactgcatcacaacgtcattttgctaatcaatcttcaaaactagtacaatcccactcaactatgaaggtcctatatcataggttgaagtgacagtaatgaatgggtctcattaagaaatcgtttcatagtctcttaaagggaatcttgtcagc

SEQ ID NO: 6732 - DNA, 571 bp, Arabidopsis thaliana
tcaaggtatgaagaaatacctgaccaactgatccaaaacggtacatgacatgctctcctgacccatccgagtttggtgacgaccaattggaatcaaacgctactccacttacctgagagcaaccattccgacatgagtcaagtgctgtgtaagttaaataaaagaaatcttattgacatcaagaaccttacccacgaattatgtccctcaccccacgccacaactttccgatcctccatactccacacttgaactaaatcatcttcacctccagtcaaaatgtactttccatccatactgtcagtgtcaatacaatcacaatgtcaataaacagtatcatacgggggtgatatgctcacaacactggtatctatttaagacaacttttgtaaattcaattataagaaaagttgccaaaggaattataacccatcacctccaagaacagcacagcagagcaccataataactttttccaccacatactagcttctgggttaagaagtcgaaaatgcgaagatagcctgtgaatggtaaaaagtttctgcttagtaaagacatcatagagaag

SEQ ID NO: 6733 - DNA, 468 bp, Arabidopsis thaliana
tgataggatcaagtgagagaagagtaggattcttgaactctaacggtagttttagtaatagaagacatttatcttctactcataacaagcttgagaccataatctggccaggtgggtctgctcaaagtccgaaagggactagtctaatagatagcgatagaaaaaagctgagggtcttggttacatctagcaatagattcccaagactgatgaaagtggagactgatccagtaacaaatgaattaattgttgaagggttctgtatagaagtctttcgcgcttcgattagtcctttcaactatgaagttgagtatataccttggctcaatggaagtaactacgacaatcttgcatatgcacttcatagccaggtactaaccatgtcttacttaagtgttttatattataacaagtatatttctatttttaattgatttgtgttgcacccacagaaagacaaatatgatg

SEQ ID NO: 6734 - DNA, 476 bp, Arabidopsis thaliana columbia
ggttttaactccaattttacgaagcttgtcaacatcttcatggggtctagcaataaaggagagcatacagtaagaacacgaggaaagtaccacatatccaaaacaaaatcatcatttgagagaaggatataaaagtgaacctgtaagcaggatccaacaattagatctggacgaataaagttgtagttcattcctaactcgtgcctgtaagttagaactgaaatgaaagacacatgagaatgaatcagtgactgaaatacataattaaggagaacaagaagataagtttgtcaataaacaagcaaaagatataagattccttggtagacagatgaacaaaactaatcaagatgaaagatgaaaaacaagagtagaatacaatccaatgagctaaatcaatatttccaatatgagacaaaaaatggtggacatcattagagttccaatctaaggacatgtataggtatgatgaaaca

SEQ ID NO: 6735 - DNA, 650 bp, Arabidopsis thaliana
tagtaggaggaatatagcttgtaattttgtaataataattggtcaaacaaaagtggcaatagcatagcaaagaaatcttcaacagacaaatgattaataagaacgaaccagatcaacaattgatggaaaccttcgtcccacaaaaaccccctaggaaaaaaaggtcggcttggaacagctgtgtacagctcggctggccaatacagcaagaaattatcccgacttccaggctgcaatagaaggtatcaattgtgtggttctgtgagaggtccaagctagtttgcagatgggaggaacataaataggatgaaaaaataatacataagatgctggatggaaataaactcgcctgagtgcttttaggaacataaatttttgattggccatagaagtaaccaatgcccccaagcatgtttgcaattgcagtccttccaacccccaatgtttctgaatcatgctggaaccagaggaaactgagattgagaccctcaatcttttatgaacatggatttgaatagatgcaaagtattagctatatgtacgttatgacaactaggagctgacaacatatgtacgccattgagaacagaatagcacataagcagagagagactaatctatgtgaaggagatctgagaggtgagaatgaa

SEQ ID NO: 6736 - DNA, 676 bp, Arabidopsis thaliana columbia
  unsure (1)..(676): unsure at all n locations
aaaaatcatttcttgacacctactctccttataaatcataggtcttcctcttccccaacaacacttctcacatttcataaaaagtgagacaaattaaagacagagagagatccaagaacatgaactacacggtggatgatcagaacatggcttttatctctcaactgtaccctgatgtctacactcagatagtacaaccaggtttgtccttttttgtaattagtttgttcgaaatttcatacctttttatttaaaagttcgacaaaacccaaaattcatggattttcttataaaaatagaagtgggttttgtttttagttttaatttgtccgaagttctttatcccctcacaaattttgtggaagaagttatatataagaattcaagtggattatgttatgtgcatgagtctttacacaaaagaaaaaaagttctcgactaatacgcataagcctagttaaaatcttggtatcatctacgtgcatgtgaagtgtgaacacacatcaagaacaatctaaactttatttaagatgtttctgcttttggtcagtaggagaagtgaagcagccgaagcggaggaggaagaagccaaaggatctgtggcttngcagatggaggcacggtttgtttagaaagagagctgctgatgaacagtgacatgttgagagagtttggg

SEQ ID NO: 6737 - DNA, 567 bp, Arabidopsis thaliana columbia
ccattagattcattttcaaggtcctcttcctcatccgtgtagtcctcagatccctgtgagccatcatcgtcatcatcatactcttcatcatcagatccctcctctgtcccactaccactctcttctgagtcagagtacaggccgggtgacaaggaaccttcctgcagacatagaccatttatgatgctagaagtcagtgtctgaaaataagcacacaggtacaactaagataagaaccaaagttgtcctttcacagtgcctccaaggttttcactatactactgtaataaagagcggattactatgcagagaggtaaacatcgattctgatcatgtgactaaggcggctcttaatcaataagagaagtaaaatcttactccaaatatactttcatattcttctaataatgttatcactatagcctgagcatggttcgctgcagcagctgcttgcagaagttgcatagaaccatcaccgccgacatcaaaatcattttcaatttcacagtcaccagccagaaggggtcgaagaagtaaaggtgcgatcaagctgcaccggcgtttgtg

SEQ ID NO: 6738 - DNA, 584 bp, Arabidopsis thaliana columbia
cgattccaagtaagaacaagaatagagcaagcatcatagaaagacatggaatcgcatatcctaaagcccagctcagattctcttggacataatttgtgaccagacgagtggtcaatatgccgattgatatagcaaaatacaaccagttaaagtaagaactcttggctttggactcatttgggtcttgttcatcaaactgatctgctccaaaggctcgaagacataccttgaagcctccttctcccaaagcaattaggtagagagcacaaaagaagattattactttgacctgagagacgcacgactcacgtgtttcttgatcattacaaagagaaggaatcgttgctgaaaacgtaagcagcccaagtccctaaaattcaggatcacatcacataaattatattaaaggtttttccaaaactatcccgcgttttttattaggtcaaagattttcaagatcttgattcacatttgatttttgtagtagaacaaaaaagtatcagattaaacctatataataatatgaatagtttggtatgcacgtatggtttctgttcaatttggattgggggtttagcgcatat

SEQ ID NO: 6739 - DNA, 576 bp, Arabidopsis thaliana columbia
taaaaatccaccgcttacagatttctcagtgatttctctcataagcgatgcgtattggccaccgaatccaatctcaaaatccaccacgtgaacaaacggagaagacgactgcgagctcaacgaatcgagtatcgcttgattcgccgtgaaatgagagaagagagggatcggagaaatcccggaatattccttaatcgctcggatcctctgaacaatctcggaccaagaagataaccggattggattccggtttgatccggttaaaaacgaaccgagagcttccttaaagtaaaacgcagctctctgtaacggtctacccgccggagatctcaagcgttgattaagccgtgataaaaccacctgagcgagttgtaactcgtccgattcaacacaatccacgactcggatgagatcttcaatgaaatcaaatcctccattgtcgacactatcaagagaattaaaaccgtacccagttgtttggttctgaccaggataaacatcggaagacgattcgaaatccgacggttgaatctgatcgggaaagccagggagatttgaatcgacggcgtaaagagg

SEQ ID NO: 6740 - DNA, 617 bp, Arabidopsis thaliana
tttctacttccttgttgttgggatcttgtcttttactcctctggcgccatataccgctgtgagcgccattgttccgctgacgttcgtcattctcgctactatgtttaaagagggtgtagaagattggcgccggaaacagcaggtactttgactgattgattttgtctgagtggttgttgtttgattagagtttgcttagatgatcttaataggatggtctgtgtctagacattgtttgataacttgttacgaaatctggagttctatgttggattaagctacattacacagaactggattaagctaaattgttacgaatagttgtcttgcttctgcattcggttggatcactttattattcatttgttgatcgaaaaacttctcattatttggaaattttcattcttttaggatattgaagtgaataacagaaaagttagagtgcaccgaggcaatgggaattttgatcttagggaatggaagacactaagagttggggatatattgaaggtagagaaaaacgagttttttccggcagaccttgtcctgctttcttctagctacgaggatgctgtttgctatgtagagacaatgaaccttgacggggaaacaaatct

SEQ ID NO: 6741 - DNA, 537 bp, Arabidopsis thaliana columbia
aaattggagcaaacttagggtgagatgtttcttcctgtccctttcactttctttgctgtccaacttcatctgttggtcaagccttggagacctctttactgcttcaggtttctgtttgaacaaacactaacatctaagtttgtgtgaaggatttggtcccttgcatcctggtgacatttgacaaggagcaggtcgtgatttggagaggtaaagactataagccacccaaagaagatgatgaatattcgtccttcattcatcgtgaatcttccatagactctgatgtcgatttaagttgtagcagaggggctcaagattctcctgacgagacaacctaggatgatttagtactcttgatcccagatgtatagttataatgtgagagtattttgtggtaatgtacttaattgtctcgctaaggagcactagatagttcgaaggaaatgctgattacatcttttctgtgttgcttctcctacaagtaatgatgtgttacagaacccccaaacttgaagctacatttttacaggagattga

SEQ ID NO: 6742 - DNA, 549 bp, Arabidopsis thaliana columbia
aatggatcaccgggatttcagctggatccgccttagggtttctctattggtcctctggttcttctgattccatctctggtttgtttggtgggagtaatttattgtccttcgctgatagttcaacgccttctgtttgtggtgtaaaagtcggcgatctgaaaccgagatcgtttattccgaaattgtcgttgcctggttacagctctggattcatcttcggaggttcggtgatcttcttcttcgttctttaatttcattgattctgttttttctctcaaatgagctaactttgattggttttgaaaacagatgcgtatagaaggaagatcttcttcaattacgagaaacgtttgagattacaaagtcctcctgaaaaggtgcattttaaaaccaatgtgtttttgttttccttaagctttctatttcgattattgtaattgattgattgtgaattctctgtttctgcttagttgttgttatgaattcataagattatattttgttcatttgatctggttgataagatttgttcatagccaagtaatttgt

SEQ ID NO: 6743 - DNA, 586 bp, Arabidopsis thaliana columbia
  unsure (1)..(586): unsure at all n locations
gcaataagtacctccgtacatagaataaataggtaaggacatagcggatcttcttgtcttaaacctctcccggtactatcaagcctagaggttgtccattaataagaacccgatattggactgttgttatacaccacattatccatgaaatccatttttcgcagaaacccattttccttaataattcctcaatgaatttccattccaccatgtcgtaagctttactcataacagttttaatggccataaatttccctttacatgatgtgttagtcctaagcccatgaaacatctcctgagctataagaatattatctgagattaggcatccttccacaaaagcagattgtgtttccaaaataaggtttggcaaaaccgtttttaatctttgacaaaggatttttgaaataactttataaccaacattacaaagactaataggccgtaattcggtcatccgagtcggtcgctccgttttgggaataagacatatatttgtcgtattcaacgtttacaaatactccgctttgagaaatgattttacanaaacatcggatcatctaaatggtacccatgctttttgaaa

SEQ ID NO: 6744 - DNA, 645 bp, Arabidopsis thaliana columbia
aggtttgactcccaattatatgtctctagttcttttcttttttgttggaatggtaagtgccttatttaacttcattgtctccacatactacacgtttgcagcttcttttagttgctttgatcacgatgactgtcttttgccgaacaacaatgcatcacaacactattgatgatggcaacatatatcttgggtcactttacttttccatggtcatcaatctccttaaacggattcaccgaggttccaatgctagtagccaaacttcccgttctttataagcacagagacttgcatttttacccaagctgggcttatacattaccttcctggcttttgagtaccctacttcaataatagaatctgccacatgggtggcagtaacatattatacaattggatatgatcctttgttctcaaggtacattcttgtaaaaagttgaattgggaaaggatttggttgcataaaaaagttaactatgaacttctctaatcttcaggtttcttcagcagttcttgctgtatttctctctgcatcagatgtcgttgggtcttttccgcgtaatgggttctttaggccgacatatgatagttgcaatacgtttgggtctttgcaatgcttgtggtcatgactcttggaggattata

SEQ ID NO: 6745 - DNA, 618 bp, Arabidopsis thaliana columbia
caacttaaaaggaactgcgccaccatttctactacgactcaaagtcctcaactccagaaaacatacaaacaacacttgagacgcagattgttcatactaaaaccatacgcgacaccaacccgatcgtgtttaggctgcctctgcaaacccgacctgttcgttaccaaagtcaaatacggtgtggtatttgcccatgaacacatctcccaagatcctgttacatttttaccaccgttcttagggttagaaaaagaaagcaagaagaaattgtgctacagagtaatagattcaatggtttaccagagaggtccacgaggtggagcaacgtcaagagcaataaaaccactgatgcactgtgccacaggtccctcaccaactttcagaacatactgctcacatcataccagtacaacagattagtagatggtcatattcactacataatatgaatgttgtctttaaatagttcactatcatacctcttctggagcaagatcaaatactttgcctccaatggtaagtgaaacagtgggcattgttgacagttgtgcacagtcaactgcagactctcccattgggctggggaggcgttcacatagctgttaagaaaaccacagt

SEQ ID NO: 6746 - DNA, 641 bp, Arabidopsis thaliana
caaagagcttagaaaggaaagaagtcaaatatggtgcaagaaaacctgggtatattcatgaagtatatccctgtgccttgctagtttttgagtaaccgatgttgtgggtgcagcagatgcagcacatctactcatggaatcattaatatccaacaacttctcaagcaacgattgaatttccatctccatagacttccatgatctccccgatccaacggttggagacccagtgtcaacataccctgaaaccaaaacacatttcaatactttctcataattcataacaagatcagtatctgatacatacaacaatgcaattcttaaaaactgaaagctaatgcaaaacagtaagcttaacacacaaaaattcttcttaccttagtcattcacagaaaaataattttgacaggaatctgagagaaacattaccaattttaactttactctaccaaacaccacacatgaattaagcattgggaagcataacatagactgagcaaacaatggcgatcaaattcaattcggtgaagagatcatatccaacattgattcctagatctatatcacattacagactactaacccccacattcagatagtagacataacagcaacattcaaagcaatggaaataacaaaga

SEQ ID NO: 6747 - DNA, 517 bp, Arabidopsis thaliana columbia
gggtgccatggcttcggctactttctctgtggccaaaccatctcttcaggttttgtttcatcttcctaaccacattatctgattgcccttcacacaagttttatcatcatctcataaatactctcatgttttactttttcagggtttttctgagttctcaggacttcgaaactcctctgctcttccctttgccaagagatcttcttccgatgagtttgtttccttcgtcagtttccaaacttctgcagtgagttcctttttcacccactcctctctattgctcctgtgttatatatcttatggtgcaatcttgtaaactcaagagctgtttcttgtgtctaatgccaccattgtagatctatccatgatgatcaaggctgcatggcatgatcagccatgattaaccatatacgtgttttttttctgtctctgtgttgtagatgagaagcaaatggtggatacaggaaaggggtgaccgaggccaagataaaggtagccatcaatgggtcgggtagga

SEQ ID NO: 6748 - DNA, 437 bp, Arabidopsis thaliana
gttgccacggttcggacagtaaattcaacctgttcaacagtagccgtatcgatgccatcaacatcaccgaagtgcgcgacaaagcggagggcgaataatgcagatcctcaaagtgatcggcctgttgatggagtatccggacgagctgttgtgggaatgcaaggaggacgcgctggcgttgatccgccgcgacgcgccgatgcttacggatttcacccacaacctgcttaacgcgccgctgctggataaacaggccgaatggtgcgaagtgtttgaccgcgggcgcaccacgtcgctgctgctgttcgaacatgttcatgccgagtcccgcgatcgcggccaggcaatggtggacctgctggcggagtatgaaaaggtcggcctgcagctggattgtcgggaactgcccgattatctaccgctgtatctggagtatg

SEQ ID NO: 6749 - DNA, 560 bp, Arabidopsis thaliana columbia
tatcataaagttttagattctaaaaatatttatatttttaacccgcataaattttgtatttaaccaaaaatttccctaaggttttcttttaacaatttgtccattagaaaaaataaaagacaataaatagtgtttctcctcgatgaagacaaaactccaatactaagaataaaaaaaataaaaaccaaaaagcaaaagggataacacaaaacccctttcaccttcccaattccaccaccacacagacaaagcacaccgaaaatggcggtttcttctggaacattctccactttcctctgcatcaaaacgacatctttccgcaacccatcaactcctctgtcctctctccggttcgcctctcacccggcggctaaactacgcttggttcgagcggtaacatctgcgacggaatcttcagagccaaccgcaaccaataagagagtgccacgcggtatcatgaaacctagaccagtttcacagagatgcaagacatcgtcgaacttcctgaaatcgctcgcacacaagctcttaagcgtatttgggcttcatcaaagaacatg

SEQ ID NO: 6750 - DNA, 596 bp, Arabidopsis thaliana columbia
tatgttttatttttataatcataaaaaaatctgtaactgtaaacttgttaatgcaaaacgaaaaaagagtatcgaaattattaatcaggattctgtttttttttaggattttgtttttatccagatacaagatattgtagccacatatcccatatagtgattatctcttaacgtatctcaaaagtttttgcatttttctttacttcatattttgtttttgtaagatcaatcagtttttatgaagagaaaatggagataacaatatcccaattgtgctctcgagttaagttttcatcatcatcatcatcatcatcacttttctgtttctatggaaacagtaatagaaacaacctaaatggagctgtttcagtaaactgcttgagagagaatgagcagatcagtaatattagcttcattgcgaagaaaccaagaagtcatgcaccggtggtgagaacaacacgcgcctccttggatgagaatcaatcccaacttccggagagaacggtggctcgcaaaccagttggtcagaggctatttttttgttctctaggtttaatacaatgagctctttaactttttgagcttgaaagcttttt

SEQ ID NO: 6751 - DNA, 529 bp, Arabidopsis thaliana columbia
gcatttaatctcgactcaattgctctacgagctctctccttgtttcaaactcggtttcgaggccgcgaatctcgccattctcgacgccgccgataacaacgacggtggaatgatgataccgcacgttatcgatttcgatatcggagaaggtggacaatacgttaaccttctccgtacattatccacgcgccggaatggtaaaagtcagagtcagaattctccggtggttaagatcaccgccgtggcgaacaacgtttacggatgtttagtcgatgacggtggagaagagaggttaaaagccgtcggagatttgttgagccaactcggtgatcgactcggtatctccgtaagtttcaacgtggtgacgagtttacgactcggtgatctgaatcgtgaatctctcgggtgtgatccgacgagactttggctgtgaacttagctttcaagctttatcgtgttccgacgaaagcgtatcacggagaaccaagagacgacttaccggcgcgtgaagggacttaaacgcgcgtgg

SEQ ID NO: 6752 - DNA, 813 bp, Arabidopsis thaliana
tgttttcaaaaacatcattcgaaacagtatctcaaatgggttattgtgttcctcttcgaaagtctccaacttcacatatggttttctcttctttcttcctttcgtttctcttagtcttctctatactctcttcacaaacggccgtagcattcatcggaacatatggtgtaaactacggtcgcatagcggataatcttccgtctcctgacgcggtagaactctccttaaatcagcaaagattagaaacacccgtatctacgatgctgaccactctgtactcacggcgttccgcgggaccgggattgaaatcatcgttggcttaggcaacgagtttctcaaagacattagtgtaggagaagaccgagccatgaactggattaaagaaaacgtcgagcctttcatacgaggcggtactaaaattagcggtatcgcggtgggtaacgagattttaggtggcaccgatatcgggctttgggaagctctcttacccgcagccaagaacgtttactccgctcttcgccgtctcggtcttcacaatgtcgtcgaggtacattaccttaatcttgcataccaaacatgtcgctaaaaccatgacatctcgaatttgcttattttgtttggaaaaagtttttttaaaagattgcacgtttaaccaacgttaaatctcataaatacattatttttttccgagtaaagttgagaattttcttacagacaaaatgatcaatcatttttttgtacccaaaatgattcagtttaaatatataaatctattaacctagtaacagaagtttgtattaatgatatgaccat

SEQ ID NO: 6753 - DNA, 390 bp, Arabidopsis thaliana columbia
gatggggatgatcatgatccaacattacgattaaatggaaagagttgatgaaccataccatcaccattcttgtcgaataacctgaaagattccctgtattctgtaatctgatcgtcagtgagcttatccgccattgtgtgatatgttttctgtgatgactgaaagtagagtttgtgagacgatttgtactacgaaccagtacttgaagccttagataatagtacccgaattatctgaaatgacggctatatcctcaaacttttccacgttcacgcaatttctacgcatgatcgttatcggccatgtcagcttatcctttcaagtgtgagtcgcctcctgtgactggcaattacttggtaggacctgctaccaactatgtttgcacccgtc

SEQ ID NO: 6754 - DNA, 613 bp, Arabidopsis thaliana
caaaccttaaatctgttggaagcagaataaggaattattaaggaatttcctctggctcggtggccgaactctggaggtacttctaatcctggtaagagagcccacccgctaacaaacgattgctgaattatcgctcgtcgtgcttctgcatccaatttgaagcagttagcgaaatatagctctgcatttggagtgtttaaatggccatttaaactctctagtgaatcacaatcgtctgcttgtagaattttcagcgaacgaggaagctctggcagtgacacgagtcttttgcagcctgatagacaaaggtcgtgtagattatgaagacctttgatgcaatcttctgtaatccactcaataccactgttgcttatatttatatggcttacactcacggggagctctgtgtagaagatcttgagatttacacttccacttatcttaatagtctgaagaccagagcaatgcgtaagtgatgcaggcaattcctctagagttgtacctgttacttggacgtcctctatgctggtggggatatctgggaatcttctcaatcttgagcatttattcatgttgaggaaggtaagagatgtcaagttgatgagagatggaa

SEQ ID NO: 6755 - DNA, 414 bp, Arabidopsis thaliana columbia
aatctcccttgctttatactcaggtgagtcaccatctcatcacaatagattctcactgtcaattctctctcgctttctgtttaacgtgtatatttatggttccaggagatgtgaaatctgcaaccgggcttcaaacatacttgttatcaagggatcattcgaatttgaagtcagagttccaagccggagatgggaagggttcgtaagttaagcttttgttaacccaaatcgtttactttatcattttaatgtatcttgtatggcagataactgtaagctgcattgaaaatgtgcctgttgcgactgtggttcttggcgaacatctccatttgagtgtcggcgatgacttattgagcaagaggaacgcatgagccgtccctccggttttgtttgatttattgtggtaacttggga

SEQ ID NO: 6756 - DNA, 555 bp, Arabidopsis thaliana columbia
ctgcaatcgcttattgagtggattccgatttggtatacggtgaaacttgtgttcgtggcttggctagttcttcctcagtttcaaggcgcacgttttatctacaaccgtgttgttagagaacagttcaagaaacacggcgtcctccgctccacccactccaagcccaccaagcccaacatcctccactccattttcccccaccgggtaaattttttatctttttggttttgagattcataaagcaaaaaaaaaaagtaaaagtaaccattagttttagtattctttggtgggtcaaagaacgaatctttgtttataaagattaataatgcattgaatatagtcctaggaaacgtaagagtgtgcctaattctctaacgtagcgaccatgagcgtataacaagtgttttgtatacttttgttaattctttaattcgtttttaaattaattgtgaattttaaaatgtgatataggagggcacgaggccacagtcactgaatcagaagggtggagcagcagaagaagcctgctagtattattgtaatggtcttggtggt

SEQ ID NO: 6757 - DNA, 403 bp, Arabidopsis thaliana
cacacaaaatattagaactctcttttcaatacaaacctgaaattagttagacaattagcaaacaattttgacaaaagaagttacctgaatgattccagcatgatctcctcgagagtaatcggtatctccagaggaccaagtccctggccagtgagaaccatctgacaatccaagtagccttaggaactataacaatatcttgtggattgtatcccatcatcatttccatctgtatctacttagcccttagctcttagtgcacgttataagcatcagaccttctccttatcgcttcaggcaatgagttgattctgaccttaaactcatcatattctctcttcactctcctcctttccctcactaaatccagcctgactttgttcttgagaaagttacgcttctg

SEQ ID NO: 6758 - DNA, 645 bp, Arabidopsis thaliana columbia
tttttccttttaaacgtcacatgtttaaacaattttcactaacccgttatttacacatgtaagagaaaaaaagatagccaaaaggacttatagtgttatctatttaaaaactaaacttgtggtgtctacctaattaacccatctttgtacgtaccaatatcgctttcttcaattattagtaatatataaatataaatgtttgtagtagctgccggtcattttttctttctctctctcctccctaagcaaaactaaaacaagctatggctggtatgcttcccggagttgagtgtgcaaggaggcggcgcttccacggtggtgctcctccgattgaatcctcgaacacagcttctgtggcggctgcggcgggacacgtctggacacggcgaccatcgttctctctttacactaccaatcatgagagccaccaggcccatgtctccttctcggtaatgaaatgaataaattattatacagaaaagagaacaaaattaatatatagttgtgttttatgttttatgaagttttttttcttaaaataatatttcgtaaaagtatttcggtttgagagtttggaatcttataattttgtaaaattataggagagaagtgttaggaataatcttatggagaagcaacgatgag

SEQ ID NO: 6759 - DNA, 580 bp, Arabidopsis thaliana columbia
taaaatccccaaaacctcttttttccccaattcttcaaaaaaacctctcctttatctccggaaaaattcactcactgttgcttttgattcatatcacaacacactacactctaatggctcgtgcgacggaatttcaaggctcattcctgagtcgaatcagcatccgccgtaatcagatcgtctccatggatgtcaatcacgagcaagagctcgaagaactcgagtatttccagaaacacgtagccgaacgtttctcggatttaatcacatctccatctccgcctccttcctcctcctcttccgccgtctctcagccgtctgatccgattctctcgatcccttggttacagaatcttctagatgtttttatgtcctgtgaagcagagttcaaggcggtgttgagcacgacccagatctcgaaatcgccgtctttagaaagggttttgccggaaatgcttgatcggattttaaaggcgttagatttatgtaacgccgtcgttaacgggattgattccgttagacagagccgacgttttgcggagatagctgtcacggcgcttaacaacggccgttatgtgac

SEQ ID NO: 6760 - DNA, 872 bp, Arabidopsis thaliana
  unsure (1)..(872): unsure at all n locations
taatctgccatgttgctagagcgtatccaaatctcgttttctgtctaatacttttgagattttattctaaatgacatagaagcatgagttgagctagttaaacttaaacctatagttccttttgaattttgattcttaactaaatgtatcttcaaattatatttcttggaaaaaaaattaagattggttgaactattcggttttaatacggtattatatgttttttttttccttttataaatctgttttcttgttttattataaagtgcagtacttaacaaacgaattagacatcactaattttttaaaagacgcataaataatgcatgttctttgtaacaaatcgatgaaatcactaaattccaaaacaaaaaaacgggtcgataactcaaaaagaagatctcgtactaaatagtcaagcaaaattattcatagatgtcaatccctttaatcaacggccgcggtgagggcaaaaagtgacgacataattagctttagaacatgtcgcaatgctagttgggtcatcgtaggcgtatgagtaagccttagggcaagctaccttgaagatcttagagtaagccgttggcttgcatgactgtgggttaccgaacaagccggtacagcaatagcgtggtgagttaaacgcagagcatgcgcttttacaggctactacctgtgtcccgtcacgtgaacggacttgtagaccaaccgggcacatccggttcaggtcgcttacgcaaccagcgtaggtacactttcccgtacccttcaccggcattatcgacatcgccaagttatatctaacatcatttgattacaagataattaattaatattatgtgagtagcaatatgtgtanactattgatgtta

SEQ ID NO: 6761 - DNA, 495 bp, Arabidopsis thaliana columbia
ccattacttgaacaatttcgctacaagtaatgagtgcaagaatatatttcaatttttcatctccaaacaacaggaatagtcttatctgaacaaactgttttttttttcaactccaatggtaatttgacaagaaaaaaaagtcatgcaaccttgaggcaggaacatttttgcttcatgaaaatagttcaaagagaagctaaaacataaggaggagattaatattgcatatgtcagcttatcaagtctgaagaaagagtgataaaatgggaagtacgcacctgaccagtctgaggattaagtaagacaagatcacatatacagttgatcagcttgacacgcccaaaccatcccaagagaccaaattcagaaactttattcaccattgcgccaagttggacaaagacctgcacattacctgagcaattaataaagcagatccctggaaagaaccaaataatcaccttaaacaggagagatagtacctgaaaactttct

SEQ ID NO: 6762 - DNA, 501 bp, Arabidopsis thaliana
catgcctctcatctttaagactgactccctcgataacgtcaatgattctgtgaattgatttgctgatattacactccatatccagtctatcctccacagtaagagtcttagtctcctgatggtttgtagaaaagcttgaatggtttacacttgacagagcttttctgatatcttcaagtacttcatcagtgtttctctgcgtgatatgcttatgctccattaccgctttcaagactatatgaagagattgaggtaacgaatctgacttgatatcatctttgggagatgcatcaggattcaatgaataaactgttccagaagttttagttgcttctgatgaattctgattagattcgttctctaccggaccagtagctgaaatagaatcagaagaacaaataggagaacttccaggtcggttatcgattgtactagcaaccattgcaagcttctccatttcagcaaaatcatccattagtttcatctctgcagctttagggg

SEQ ID NO: 6763 - DNA, 756 bp, Arabidopsis thaliana
taccatttaaagccataacatacctatgataatcgatgattaatcgggggaaaaaaactaattgcaaacacctatgaaaaggcctttttattaatgaaacaaagaaaaaaactcagaaaatagtactactaatccaccactgtttataaataaaccggtgatatttaaaccaaatgcaaaaaccataaccggacaatgagaaagtactgatgatgaaaactactcaaatgtgtaaaaaaagcaagaaaggttcgtaaaatcagaaatttaaaagtaacgataatttgagctaaaaataaccaaaactttggtggccttttccttttgggtccaactggtcctcaagctttgccactggctgctggtgggttaagctcatcccaagcttcaatccaagtgaccatagcatctgcaagcttgtcaaagtaaggatcaatggggcttagcttctccttcaccaacttggacagctccatgtagcattgttgaactgtcacagcttctttcgtgagctttgcgctctggaagaaaggaatgatatcctcctgccagaagattcccttgtactccttcttcaagttcacaaacgggttgctggctttgctgtggtaaatgtagggcaaacctgtcttcactcccaatcccaaatggtcacagatcacctgaagaacataagagggagatcagtaaacaaattaacatttaaattcattttgaagcaacgagtggaatggggaaagtaagtaccttgataca

SEQ ID NO: 6764 - DNA, 472 bp, Arabidopsis thaliana columbia
tccaatatcctgtaaaacccagagttgtgtgtagtatccctacctgtgttactctcctggagtaaaagcagacttgagtgctacttaataatgattttctcttatatttagcgttgaacttttcatgattcttcaacatttatttttctagatatgtcgagttgaggacattcttgtgagaggacttgtgaaaggaagcataattcaaatccacagggcgagaacggtagtagttactgatgatggcttgataactgcatctggatttggtacattaattatgaaaactcacccttctattcccctttcagcatattcctatagctgtttgccttttcactacagtgggattctcgcttagtcattttgaggaccattctgtgtattcaggaagattaatgtggtttctgattctatacataaattcctttggcaggttgcagtgctgggttggggaagggactttattcaa

SEQ ID NO: 6765 - DNA, 454 bp, Arabidopsis thaliana columbia
aaaggccaaggacagccctccgacgaaagaagcaggacaatggaacttttccattgactttttgtcgaccccaaattttgacctttaagtactttttcgggcattttcgtgatttgggctatattacggacccaaaattacttgttcaagcattgttttcgaattttttcatgcatcaaagctcgttaagactagatggtgtatccctacatagcgggtgggacccacggcgaatggttcatcaagtcttcaaaaaagaatatatacgattgcattgcatgtactaacggatgctatcatgcgcagctgatgatgccacaggtacacacgtccgctaccgttacttaacggtgtgaatacaggggattcgtctacggaacagtcaaggagcgtaaaaacggtgtcgtcatggaaagaaaacggagcgtcccaatccaacccgaatccatggctg

SEQ ID NO: 6766 - DNA, 1726 bp, Arabidopsis thaliana
tgaaaaatagggtttcttttcttttatttgtcaacttgaaaaaaggttttacttttgattttattttttcacaataatgatttcaaaaatcttctgatgcaaatgcttttattcatttagctataaaagcctttttgtatgctttttttctctttttaggtgtatggtggagtgagtctggctgttagcgttgatgtcaagccaaaccgcaaaatccatttggcaaagatgggaatgaacctaatggaagtggggtttacacttgtcactctctcacccattctatgttccactctttttcttctctcatgtttgcgcaaagatactaattcggggttgttcctttttcacttattgaaagtgtatatctttcaaaacattcagaaattttgtgggttagtgttcactaaaatctttggttaattatcaagtcatccaaatattacaagtaccaaatattaggacaagtctttaattttcacaccttttttcttacctatatgagagaagttttgttgtaagagtgaatgtgtttcctcgttagtggagtatgatgaactatgcaacttcaaggcagcacatcggacattttggggtctacaagattatcatcgtagatttttaacgcgccatttagaacttctcagtctcatttgggtgatgaaaatgccttccaaggcataatcattttttgttgacattttggtactttctcatgaagttgatgcatatgattatacttggaagttggaacatatatatatttaaaataataaaggtcgtctgttccaggcttattgcatccgcaaattcatgagtacaatcctttttgaacagagaacatcgaaagaaaatcatacgaaagattttacaatcgtttgagaattaacaaaaatcattaacttatatagtttccaaaattcaaaagttcaaaacgcattacgaaatcgaccgaaaacaaaaatacaaatcgataaaacttaggtgcaagtttcacgggaaattccgagcctggaatttggaacgtcgatgagaactcggtggttctgttgctgcatactagcgatgacgttaaggacagagttaacgttgaccggagctgcagccatggcgaggcagctgaggttacctgcggacgtgtggatgagaaggttgtctggaggcagagtcacgttcattccggcgaacataaacgtcaccgacgggaacacgacggagccggagtagcatgtgtcgaaacctcctagtgaagttgcgtttgcgttcttaacacgtctcctgaactcgtttctcaccgccacgtaagctggttcgactagccttgtgtagaccgtccctgcgtacattcaaaagtgttttgtaattaaaaatcaaatttcttttctaaaatataatttttatatgaaaatttggattggccatttttgttttgattgtaaaatcatttttagtccagaaatatcacgtgttacgtgtgagagagcagagcaattaggttacttccatcgcacgacttttcagttctcaagcgaaaaataaaaaatattaaggagggttgagaagtccatacccgagtcaaagatggtgccggctccggtggccggatcaaaggcgagtgcacttgtaggaatatccacaattttgtttccgacacgaatcccaaccaagttaacatagtaaagcgatgatcttctagggttctttaacaatggagtggtcttgatcc

SEQ ID NO: 6767 - DNA, 579 bp, Arabidopsis thaliana
ggagatgaaccattcttctctagtatctgcaaaaatggcgacacgctcttccgtcttgtgcccaatctgaactaacccagaggcaaaatcacacactgcttcgagagtcttcccaaaagtgagccactcgtagtcacctaaatgcagtttctcgaacgtttttccatcctcactagtctcaatctctctagagatcagctttcgggtgccaaggaaaaccctatcactgtgagcattacacgatatctcaaagagctctggaagcgttgagatatgttcccaatgggaactaacaggctcagtaaacctgtgattcctaatagcataacctggttcaccaccaacatcaacaacaacacctcttttcttttctttcttagatttctgaaccagaaacgtcaaagccaatggcacaataacaccagcagcataaggaatcatctttcactaaacccccaaacaaagaattatatggctaataaaacacgtccacctcctgcaaccaaaaccccatcacaatattaataacataaatcaatttcaataaaaccaactttaattcacgcgttagttgtatgt

SEQ ID NO: 6768 - DNA, 597 bp, Arabidopsis thaliana columbia
cgccagtgtgctccaaatccaaacaacaagaacctacagtatcttgtaatcgccacaaaaccattaataaccgatcccgttggctccaaatcaccatcatgattcacaatctgttcttccaaaaactcgatctcgctacgacaactcttcgaatctctaatccccaatttctcaacaaagaacattctcagatcaacagaactcggaatcttaccgttctcaaacccatcaagaaacgaatagaatgattcacgtaatgactcatcgttcttatcgatatacaatctcgctttccttgactgtctctgcaacaactcgatttgctctctaatgtcatcgcttagaccaagatcattgacaggtaaaacatccaaaagagtcgaaatttcttgattcaaatcatggaaatacccagaaatcgaagggttttgtaacaagagccataacttactagattgagcgcagtaatcaacaaggatcttggaacgatagagaagaagataaagctctttgagacaaagcaaagctgttgattcagaaacagagcttttgcttcttcttcttgctcttgttcttgttgttgttgaccccaatttg

SEQ ID NO: 6769 - DNA, 460 bp, Arabidopsis thaliana columbia
tcgtaatcattactacataccaaggcgaagaatcgtcttctctagagtagtagacatgttttgcttgggcagccagaatgtatggatcttgaagataagcagtttggtttaaatagagattgactagagtgaatccgtcttcttctttgactccattccctttgttagcccaatgacacttgaatataggaacttggaacatgtgatagtccaacatgatgatctcctttatcactccaaagtatgacactatatcagcctgctgtctagtatcctttgcacttgatctacacattgaaaatgcttcatatgtaaccccactgttttgagttttcttcttcatgtcgtctgtgtgaaatctgtgtccattaatgacaaaccccttgtatgattgagcaatctgccttggtccaaaggccaaccatctcggttgggttgaagtccctttgagtttgtaggt

SEQ ID NO: 6770 - DNA, 556 bp, Arabidopsis thaliana
ctcattgaatcaataaatgcgagtctaattcataagagtttaagcagagcataatacaaagaaagacaacaaaattagttccaatttaggaaagttttaagttcccactcattaggaataaacaattggatattttgacttgagaaaacataaaataatcctggttcttgattcaatatataatggagctttcttttttcaagattgcaagtttcagagatagatagttaattaccaacggaagccattctctgtatcttgccggaacccggaggtcgaccacggccgcgtttataagagttgttgggagtaatggtcgaaacaaaggaagacgacagagccaaagaaacagagccgtcttgaccgtatatacataggccgtcctctctttcgtttcatcggagtttcaatgggaggtggaggaggagcaatcatattaacgccgatatgatgaggaagagctccggctcctccggctgctgttgccagagaaggatcaccgtgtaaagaaggagatccgaaaccagtggagcctgacccgaatggagagttttga

SEQ ID NO: 6771 - DNA, 497 bp, Arabidopsis thaliana
gtcatatattcagagggagtgtatcacttgccttgattatcatcattcttttggtgattttactcctggtttctgaggaaaactcgcttcatgattctctttttgatgtataacgtcagttttcatcttcttcaggtatttatatgctctccacagcttttagtattcatttttttttggctatgtcttctactatttagtaagtttatgatccaaagtttttgaatctcaagatattatagtctggttttgtgatgcattttggtttcctattcagtttgtaactctgcaaagggaaaatgggttgaagaccggaagagaccattgtattctggttttgaatgtaaacaatggtcatcttccatgtggaatgggcagacccgatttctcatttgatgccagaaggttgcaacatgccacagtttgacagattcagtttctttatacgtatacatgaattgttgtgttgcgttcatctaaacctgcgtattggtaga

SEQ ID NO: 6772 - DNA, 494 bp, Arabidopsis thaliana
gtctacattgtcaaagattatcacatgagaagaaaaactgtcctagagtgcagtcggcccctgtaagcaccaaaacatccaaccctttacctgttgcttctctaccagtgtcacagtccaactcaagaaactactacactccagctgacaactttgtagccccaaagtctcccctcacactctggacggagaatccaccctcaccaagtggccaactctaataaaaggaaagcgtctcctcgggatgacaggtctcattcaatctcagaaaccagattccctgggtcagggaggactgaacatagattaaatgcgggaagatacaatgaaggtacaagaagctctcacatcgcttcacctcaactcaccaggagggaaccaagactgtcaactcaccaaaatctccaatggagagaaaaatcaaacttcctcaacgggttttcaggcagcaacttctgactcttccagagcgaggagccacctctagagagaaa

SEQ ID NO: 6773 - DNA, 1021 bp, Arabidopsis thaliana
atcattcttccccttaaccttcacaaacctatctttctcaacccctaaatcgaaacaaccaacacattccttgctaagtttcttacctttcaagcaatcaaaactcttgcaaccaagtccactccaattaacactcttgttactaacagatctccataacgaatcaggagacttactcaaatcttgcttctgcaccgttttcgccaaacaccgtctccgcggcaacggctcacaagcacgaagaatcaacttctggccaagactccaatcatcaggacatctatcaaacaccttatatgacatatactgagaaagcaaatccgtagatttcccacaagaatgtccaacggaagacaccatttcagtgatcccggtacgcgaatctttccctaaaggaagctgatgacgctggaggaacaatttgagctcaggaacaatgttaggtcgagagatatcaatagattcgtaaccaagcatctgtttctccatctgagcaagcttgcgttgagacgaatcgatttctcggagaatcaaagagagatgttgagaaacgagtgagatattgttggagctgtggagaagtggcgagtttgcttgggaatgagaggagaacgcgtataaggcgaagagatttgtggtgacgacggagaagagcatgaggaggttcacggcggatgaacaaattgatgttcgtcggaatctggctgttccatcgccgatctttaaagatacagatcccatcttcaatgcagtgaaaagagaagaagcagagctcaagctaaggtttgaggtctcactatataacttggatcttcttcattggatctgcaagaaatttcagattccagcttgatttaacaaaaaaaaactaagagtacttcgatttgaagaatcattcagatctagcagaaagattcaacaatagaattgcgaagaacagaaacaaaatcaaggttcatgagaattgcattcctgtgatttcagcagaagagacttggtgaagtttctggagagtgaaaga

SEQ ID NO: 6774 - DNA, 655 bp, Arabidopsis thaliana columbia
taaaagaaaaatgaaattaggtttgtacctccaacgagcggacgacggaggaagccagatgacggaaacttcttcgtgaccaaagcaccgtatagagtcattggacttacggccagacaagatttggtcgtgtgttcttagtacttctcttgcagcttctggtgaagttatgacgactgagtttagacatccaaacttaagactcatgattggtccataaatttttgcgaggtcagcgaatgagctgtgcgggtttttaccgacttggtgaatgtttccgataatcggtaatcgtggaggtccaggaggcagcgtggcggctcggccagaactccgtcgggatcttgcggttgtcgagatgaggaaacatgatgagataaagcaaaagaggagaaacagagcttgccctgagatgatgtccatctgtgtttgctcaaatgactaagcaaaatcatctaaacatatcttctcgtttttttgtcatctgaaatatatcataacatagatttccatatatgttgttgataaaaaagaattgtgtacaaaactttcgcttacatagcaatcgtaagtttccaaattttacaaaaagaattgtgttaacagtacaaaagcaaagatcggtttctgttaacagcgctatctgagtgagatg

SEQ ID NO: 6775 - DNA, 1149 bp, Arabidopsis thaliana
cttctcagaaaatattttgatatattaacttctttgatgcggatttgttcaggggaagttgcctgactcattccatctaatccaacacacggaggcccaacgttttgttggtaaatgcttggaaactgtgtcaagaagattgcctgcaaaggagctcttagcggacccattccttgccgcaactgatgagagagatttggcgcctctttttagattgccgcaacaattggcaatccagaatttggctgcaaatggaacggtggtagagcatctgccgtcaacgactgatccaactagaacaacagatatgtcaataacaggaaagatgaactcagaagaccacaccatcttccttcaagtacagattctagatggcgatggtaagttaaagttctacttactacaaatgtcttgcctggtttgattggaacatgaaatttgttgcgttgctagaaacttgctcagctgaaccgggctacaggatttgtagcacctttagtattagctattcatcataagatagaaatggacgattgtaaccttagcttctgatttttgtaaaactttgttagaagaatcaccaatggaaaatgtttttatgaatctgtttggctgtggcacaggtcacatgaggaacattcagttcccgttcaacattttaagtgacacacctctagaagtagctttggagatggtgaaggagcttgagatcactgattgggatcctttggagatcgctgcaatgatagaaaatgagatatctttgctcgtccccaactggagggccaatgactcttctatccggcacgaaagctttggtcatgaagatgatgaggacaatggcgacacagagggaagaacgcgccttttctcctctgcttcttcctctcacgactctcctgtagcagttagagagaacaatgacgattctagtaacgatgtgatcccagatatggatgatggcaatagaagctctaacaggttgctgaattcttcaacataccactactcacctgccattgatgatgatcaaaatcagcaacaacggagacgagtaaggctacaacagaaaatgagatcgctggtggacacgagaacacaggtgctacaccgatcgctcatggagttgatcacaagcgtcgtgggcgt

SEQ ID NO: 6776 - DNA, 843 bp, Arabidopsis thaliana
gatccccgactcatcacctgtaaaggaaattttgagaaggccgattcaaaccgtcctgcgcagtatctgtaaaaccaaaaggttaagataggctgagggagaagcagagctgttacttttgcaaatttctttgtgctgagcagacccatcatcagaagctgtgatattattagacatatgatcaaacgtctatgcacgtcaggccagtatctagccccgctctcatatttctggtcgtagacattaataaccttgcagcagtagataagacatattaacattattgcatatattgcaggtatgctttagaagaacactatgatatttttagcttttaaggtacctgatgccgaaaaacaacgtatgcgaaagcaaagaagacgataatgaatggaaggagaattggcgcaacagcagcgtatacgaggcctagcaagaaatagaactgaatccgtggttcagatgttgcaaagtccagatgacctggatccattgcttgctgcctgtcttgttctgtcttaaccaaaaacgtgtttttcaggtgaaagatgactaatggaaccactctgagtatctcagctgctatgccagcccaaccatcgaccatgatatatgtgatgaaaaatgtggccttcattgggattgacacaccaactgttttcgggatcctaagtaaaaagagaaagaagaggaggtcaatagatgttctcatgtgttatcggtcggaaattctcaccaagtacttactcggttggtggttgccaaggaaagatttaagctgctgaaacgctgtcccggtaatgatgcttcaagaaagacattgacaataatgaacagaaatac

SEQ ID NO: 6777 - DNA, 514 bp, Arabidopsis thaliana columbia
cttcctcatttaaaaaataaatcaagaaattttcatttgttctagttgttgggacgagtcaatgggagtggttctcatgtaaatctagacgtgcttctaactttatttattgcttcagataaccaataaagctaagttttgatgccatgaaatttgattatatagctataatatatctggactataccacaactacgagtatgtcatttgaatcatatcaaacaaacatagatacaaaagaataagagtaacactgaaaactctcacataatgaaaaaatatatatttataaattacaaagatccaaaaagaaaagagatttgaattgggaatctcgttaacggaaacgacaaactcagagaccggacctgaacggcactttcgtcgccggaagccatcttccaccgtcgatgaaaggtttcccgtaaacctattcgcttccttcgtactaagaaacctcaaacccttccacttaaccctattcttcgtcgatgcaccaggaccggtattctta

SEQ ID NO: 6778 - DNA, 514 bp, Arabidopsis thaliana columbia
ctagtacactgtgtatagtttcggtgtttctctttgcgtagatattgattaccttctgggaattacttctctcgtattgaattatatggcccaatttcgaaagcttttgtttttacaatcttctcaggaacacttagctgaatctatacaacacaagtgttacagagtttatatacatggatcgaagacagcacgattatgctgcttcttctgggttaccttatgctcagcaacagcagcaacaaggtcctaactttcaacagcaacaacaaccacaattcggatttcatccgcaacatcctcagtatccatcaccaatgaatgcttctggtttcattcctcctcatccttctatgcagcagttcccttaccagcatcctatgcatcagcagcagcaaccgcagcatcttcctcatcctcctcacccacagatgtttggtcaacagcaacctcaggctttccttcctcacttacctccacatcaccttcctccgccattccctggaccgtatga

SEQ ID NO: 6779 - DNA, 1010 bp, Arabidopsis thaliana
ggagatatcttctcacctgaaatagattataattaagtacacatagaaaatctaactcattcatacaaaagatcatgatactgcacaaagtagcctctttctttgtcttgtctcatttctaatttgttggagggttttctttgacaagtctaacatagtactgcacaaagtagcctccaccgagactatacaaataaactgctagacatagactagtattcttgtgaaacagtaaagccatcaaaatagagtaaatgagactaacctccacggttaataagctctttgatccgacccaccagatgcaaatacccatcggtatcaaagtaaccgatatcaccagtgtggaaccacccaaactcgaaacctgccttgttggcttctgggttattcttgtaacccttggtcacatttggacctcttatacaaacctctcctttgttatttggctcttggatctcgcctttctcattaaggatcgccatttcttgacctaccggtttcccaacagacccaggcttgtgtggaccttcctctggtaaggggtttgagctcatcaaatgtgttgcctctgtcattgcataggcctcgagcaccggtgctccaaacgcttcctcaagcctggacaatatcacctaacaaaaaccaagacaaaataagtcattaagttattgaaagccaaagcaatccaacgttttacaaaacactgtgcattacaaacgcctcaacaattgactggaaacaagagcattaccggagccaaagaagcactgcaactcctgatgaaccggagtttaggatattccgtctcagggtggctcgcgtggcggtccaatatgatctgatgaatggtcggcacagcagtataccatgtagcgttatacttcttcatatctggccaaaatgttgttgctgagaatctaccagcagctggaagagttacagcagcaccagctccaagcgagctaagcaaccagctaacaatccatgaacatggaacagagggagac

SEQ ID NO: 6780 - DNA, 530 bp, Arabidopsis thaliana
taatatttgagatttatctgaaaaattagttgctataataattcgtaatatatcttatcatggacacgaaggaggattgaatcgcaattcatacaatgttggcaaattcttaaatttaatgaatcagtaggggtatattaattgagttatgtcttatgtgtaatttgttttacacacttaacaagttcatcacgcggggaccaaaaacgaaaaaactacaagcagttagcaaacttttgtaatgaacagcaaagcatcctaatcattaacacaacaggttcggtacaatgccttaaccggttcggtctttcattcatgtgttcaaacaccggttgttaacctaaccgaaaacataataaatacatacaaccaataaatcgtaccaaaaactaaagtccctagtaatctaagaagacgataaatagttaaatacactcttgacatgttctagagcaagctatcggctctagacggcaaccgtctaaagaagctaagccctcgcgacggaagtatcctcctaaaccgaggag

SEQ ID NO: 6781 - DNA, 731 bp, Arabidopsis thaliana
tttatgtgtcatagaaaagaaggagtcattcattcgtgtgtgatgtgacctgtaacaaggcccctcaagattcattgttctactctttaatcataaaattagcaaaaacaaattccatcttttttttactctttttcactctatgcattgcaacaacaagtacaagaaacaaacacaaccaaacagtagtacagtactctaacttaacattactatcttttaagtgacttttccttttcattgtaactcaaatatatttatagaaaaaacagcttagcatttttgttttttttgatgaaaacagcttagcatttattagacgagaatccaatgagagaatttgccaaatcgaaagtgacacgtgtcccttgttgctgcacgtttccgataatcgctagtgaactcgccgtcggtgcaaatgccaaacaaaatgtccccaccgagtcaaccggaatcatgtagttcttcgccggcaaagccaacatcttcccgccggggaaatgaaaagccacggtcgggacttctaccgtcgtcttagccgaaaggttataacacgtgtcaaacatcgccaccccggctgctttttccaagtccaacgttcctttcacgaacgagtctctaagcgagttatagatttcggtctggagacgagtcacggcggttcctgagtcgatgatgatcccacgctgcctgactcgtccatctcgaaagaagactgaggaatctgaagc

SEQ ID NO: 6782 - DNA, 469 bp, Arabidopsis thaliana
ccaactttaacatttaactatcacaatatgttttcttttcttatcttcttgttggaggcttttcaggtggttattgctaccgtggtctccatagtcttcttagtgttcgcgggtctaacactggtaggttcagccacggcattaaccataacaacaccgctttttattatattcagtccgattcttgtaccagccacgatagccactgctgtcataaccacaggattcaccacgggtggcgcactcggagcgatggccgttgctctcatcaggtggttcattaagtgaaattttgtaaaactatagtcatttttgttttatgaaaaacttgttcaattctctttttttttctctattctatctttgattcttttcacatattctaattcatttattttaaagaattagtgtaccctgtgtactcttaatggtcttattagttcttctttgtcttgtcttctagcttcgt

SEQ ID NO: 6783 - DNA, 546 bp, Arabidopsis thaliana
gagttctgtttttttttttggagggatagaattgatggtatataccagatcacttttcctaggacatctgatgcaaccagcacaattcacccataagatatcacttcctgtatcaacttgaacatggaagtctcttgatggagttccgagtccgattttagcgaagtataaactgaaattaaaaacaacaaacataaagaacaagaatcaacattttaccgtagaagacacaagaagaagaccatttcataatgagtcaagaaccaatcaaagagttgagaatctcaatagattcaaaagctttgttttttcttcagattccacatttaaaaaagacaaaaaaaatccgactttttgttaaaaaattcccaaaattacaggttctggtaaatggcgattcgaacccaatagactcaggctggctatcgccgccgagaggaatatcgatggcggagaggagtcttgagtgacggtggacgtagtgagctctgagagctccaagatcttttactctttttccggcgaacttgcttcgaacttcaaata

SEQ ID NO: 6784 - DNA, 647 bp, Arabidopsis thaliana
tttcttgtcgctggggttgtcttcattccccttggagtgatctgcttatttgcttctcagggagtatgtgcatcatgctattgtttttctgccttttctaatggtttattttccagcttcggttttgtggttttattgaggatatgtttcattcatacttgaaggtagtcgagattgttgatcgatatgacacagactgtattccaacatcttctagaaacaacatggtcgcttacatacagggtgaaggagataagatctgtaagagaacaataacggtacatgtcttcttctatggcaatttagttccttctatgattgtgtatattagctgttcttctaggtatggctctttctaaagcctttcatttttttcaggtgacaaaagctatgaagcatcctgtctatgtatactaccaacttgagaatttctaccaaaaccatagacggtactttgccttatctgcttagtaatagttatcgcttttgcctgttacttccctgcattaatacagttactcctctggttgattgtatatgattaggtatgtgaacagtcgagacgatgcacaactaaggaagtcgaaaagaagagcatgatgtgaagccatgtgcacctgaggataatgtgggtggagaacaattgt

SEQ ID NO: 6785 - DNA, 584 bp, Arabidopsis thaliana columbia
cagattatgtgatttattatgtaatttaatatgtggtccagtcataaaatcgattcgtttgctaaactccactagatttctcctttgtaaagtttcacgttacatattgattcatcatgaatcaattactatgggtttagtccatttacgcttcttgcggttgttcagtcaacctttcccaaatcaaattatggtacttataagaaatcttttggtaccaaaagagtagacaagtttggatggtattaggagatacaaataccaaatattttcacgcttcaactaaacaaaggcgggctaggaacagaataattggtatcctcgatcaaaatagagtgtgggttgataatgaagaaggtatcgagaaagtcgccgtgagctactttgataacttcttttcttcctcggtttcgagagatcccactaatgtccttaaagatgtccatgttgcggttatccaaggatgaacgaggctctaaccaaggaggttacagaagaggaggtgaaaagagctttattctcattaaacccgggaaaagcaccaggatcagacgggatgatggcacttttttaccacgtttttg

SEQ ID NO: 6786 - DNA, 1033 bp, Arabidopsis thaliana
tattcatataatacatattaataaggaagtgagaaagaaataagaaaagctatagatagaaatccagtgaaagaaagttttcaactacacctctttaaatataccatcttcagttctatcccaaaaaggccgcctcccacaaagtaatatatacgtaatcacaccaatgctccatacatctgattcaggccctgatctgcgctttaatacctcaggagccacataataggcgctaccaacaatgtcatggaaccttttccctgtgaaggattgagttgtttatcacagaaatcaacagaatacgctcttaacacttactttgcttgtgtggattttgatagctagtactaacctggtttgataaaatccgataaaccaaaatccgtagcctttagaggcgaatctagttgagctgatttgaacaaaaagttctgcaagaaattggaggaggagcaaaagcagaagatttattattagaaacaaaaagcacatcctaagaggtataagcaagagaatgtacctctggtttcatatctctatgtacaagaccgtgtagatgacattctcctgcaactttgagcatctgcctaacgacaacggctgcatctttctcggagtaccgattacctttcctgaaaaataaaaaaaggaaagcatcaataatgagaaggtaggttctttcttacgattccaccggtaatagattaaagagtagtgagagatgctgactaacttggataatatcctatccagcaattcgcctccttcgcacaacctagaagaaaggcaagagtaaaatgtgaatgccaccgatacatgaaggatagactataagaaatgaggaaaggagactcactccataacaatatagacgtaatcgtcatcctcaaaggcattgtgaaactgaacaacattctcgtggccagagagagcaataagaatctgaacctcacgcttgacatcctcaacagcaataggaagaacgatctgtgagcaaaacatggtgatgagtgcctcaaagcagagcagagga

SEQ ID NO: 6787 - DNA, 554 bp, Arabidopsis thaliana columbia
cgactttgaaacgtgattatgtaggttatatacatattgttatatcgcttcaaattaataataaaaatttgagacattgatgttaaggaatgaaggagaaacaatttccacagttaaggaaattaatatattatgttaagccttaatcttagccatacatatatatttagatggatactatatatataaagaaagaaagagcatttaaaagggaaatcttagcatccatttctaaccatattatgaagaaataataaacaatatcaacagcttatagcatccatcagtattgcataagtcattcttgtcttctcaacaaaaaaataaaagaaaagaaaagtttcttgagtgaaatgggaattgcgacgtcgactatggcggcgaagttagcattcttcccaccaaatccgccgtcgtacacggtggtgactgaagaatctacggggaagatgatgatttctacgaacctgccgcattacctaagagatgagaacatcgaagtggtgaagataaggacaaaaagagggaatgagattgtggccatgtatgtgaag

SEQ ID NO: 6788 - DNA, 358 bp, Arabidopsis thaliana columbia
acctcgtgtttactcttgcctcagagtcaagctagaagtagaatgatgaagaggaaattcacagatgaaacaccttcctattgggataacctctggggcaatcagattgaataccagaaaagcggtaaaattgatgatagtaaactctccttcctctttggctaatgatcatacagcattagatatttactcacctcggtgtatgtcatgtgacagaggaagaagtacaagatcgagcacagcgagcctgcgcagcagccaggagatggagggaatactcacgaagaggcgtggataagcgcccaccgttaaattcgcagactccgcctccagaggagacacctgaaaccatagacag

SEQ ID NO: 6789 - DNA, 2316 bp, Arabidopsis thaliana
ttggctattggaactaatacaaaccatataaatttgtccaggccttgtatccaaaaagtactcttcattttgcctccttggatttctttcgaagcacctattttaggttgtttcaaccgtaaacgtgaattgcaacacgacaattaatctttgagcttcttacaagaaagaaaagatggtccaaaaacatgacaactcaaaaacaaaaacaaaaaagcaaaggtgacgtgacgtaaatctctacttactcccattgttttgcatgtatagacccctaacaaccatttaataataaagtatgagccaaagaactccatcaaaacaaatctcagtcattgaaatttaacatctatcccaaaatgttttcttttctcatcctccaagtgtcggaggtttttcaggtggttattgctgccgtggtctctatagtcttcttagtgttagcgggtctaacactggcaggttcagccacggcattaaccataaccacaccgctttttatcatattcagtccgattctcgtaccagccacgatagccactgctgtcataaccacaggactcaccgctggtggcgcactcggaacgatggccgccgcttctctcctcaggtgcttcattaagtgaaatttttaaaaactaaagacttttgtgttttataaaaaaacttgtttaattctcttttgtctatctctgattcttttgacatactacctcatttatttttaagagtatcgtacactgtacacattaatgttctagtattaatcttttaatgtttcgtcttctaacttttgagttgtctattctatcacaacccatgtttacctttttttgaaacatgatatatcattagaacaactgccaacgtgattaataagaagcgttacaatttgatttcaatttataattaacctttgtacacacttatgtagcctgcgacgtaggttcgggcgtaggagatttgggggacttaggagatttgggggaggtaggagatttgggggaagatttggaaaaccagggggtggaggattaggaggtggaggtttacctggaggattaggaggattaggaggtggaggtttacctggaggacttggaggattaggaggaggcgaaaatccgttagctaaaatctcaaaaatgttcggaccaggggctgcaggggccgcaagtggagatgcacctcccgctgaaactgcacctgccgctggagctgcaccagccgctggagctgaaccggctgcaccacccacatggtaaaggaaataagtcaagttgttccaacatgtagcatatatatatatacgtttatgctcgtatgtaatctcaaagctgcttatactgaaataaagaaacacaagactacaattttattattttctagtataaatcatataacgtgatgaataaccgggaacttataaacaatgtaccgagaacaaagagagtatattgtacggtcgattcttagggcacctctattggtgtctcaaatatcactcaaaacataaattaatagtaaactttaaagacaccatatcgttttggatctaaaatgtctatgcagagacacaaacttctactattcaaagacactccttttttttcttttcttttttaaatgtattttaaaaacatctcattttttcaaccaatagagatgctcttaggtttttttttggtgggatgagggggcaatgcaccctacaaaaatttattaaaatagaaaataaaattacaatcgaactctacgagaatatgcagaccctcttgcgtcctcagacaaacaaagcgacaaatcgtctggacaaaaatcatataaatgcaaacctaaagaaagcggaaaagcatagttggctaatccatcagcgaggtgattaccttccctatacacatgtgaaactcggactgtccagtccttcgaaagaaagccatagcacaatcgtactaggaaagacaaaggatgcgtatcacttatccccgtcttgagaaatcccactactatctcagagtccacctctaattccaacttcagtatctgtctctcccacgcaatacagagcccgtaataaaccccctataactccgcaagtggagctgaacataccccgatattcagcgcgaacgccttgaatccagcgtccctctctatctctcaggactcccccgctgctgctaaccctgggttgcctcgtgaagcaccgtccgtgttgagcttaacccaatctgcaggtggcggttccaagcaatcagtctctctactctggtaattgcttcagtacctccaacaccggagcatgtgcttgataga

SEQ ID NO: 6790 - DNA, 573 bp, Arabidopsis thaliana
tgagtggattgatgagttttggtgaattagaagaccaatttggtcagatttcagacactactatggaagagaagataccatttctgcaaatgcttcaatgcatagaacacccttttacaacaacagaaccaaatcagtttctccaatcacttctccagatccaaaccctagaatcaaagagctgtcttaacccttgaaacaaacatcaaaagagatccgggtcaaacagatgacccggaaaaggatccaagaacagaaaacggagcagtaacggtcaaagaaaaaagaaaacggaaacgtacaagagctccaaagaacaaagacgaagttgaaaaccaaaggatgactcacattgccgtcgaacgtaatcgaagacgacaaatgaacgaacacttaaactctctccgatctctcatgcctccttcgtttcttcaacgggtaacaaaatgttttaagggttcattaaacaagaacgtaatttttttttcttttcaagaacgtaatttagctttaacaagaaaccgtttttgtttctctagggtgacaagcttcgattgtaggaggggcaataga

SEQ ID NO: 6791 - DNA, 631 bp, Arabidopsis thaliana columbia
ccatctctttccactcctctttcccgctttctcttcctatccttagaaacttccttcccatgagtttcagttttaacagtttcggtatgctgattcttttcaatatgtcttccctcccgatatcgcccctcccctaatccagaaccgagtgacactcttttattggtcctagggatttcctgctcgcatctttcagtagacgacactttcgtttgctggttattctcatggaaacatccttgcccacttcttccctcaccgaaatcagaatcgcgggcttctgttcttccatcattagttaagacgtcgtgttcatgagtagttgcaactgttttgttttgctggttcttctcactgtatctcctcttctcttttgttttgataccaacagcaaaactgtgcggttgtgctttttcatggtttatatcatcgcatcttctctgtcgctttctttccccaccaacatcaatactgtgcgcttctggtgcttgatgatttttctcattacctcttcttacccttccctttcttccctcacctgcattagaaatgcacgcatatgaaatttcataattcttctcattaaatcttcctcgctgctttcttcccttatccgaggggatcctctaga

SEQ ID NO: 6792 - DNA, 595 bp, Arabidopsis thaliana
caattatttcatcaaagaagtcaaattttttttgtttgaacttcaattaatagaaaccggttacaacaatgccaaacggccaaatgaaacagagcaacaacaaacaacatacatacaacgacaaagaagtcaattcttgatcagtcgagaaagcttggggacttcaatgtctatgtaatcctggtaagttaaaggctcgaacttgggaggattatcgccgctggtgagttcgggaaatggctcacaaccatatcataaggaggcttgatatgaaccaccgacgacatcctcgttttctttttatccatcaaggctctatgcaacacattgttgtaccttccgttgctcatcttctacaaatcccaaaacaaatctcatctaaaatttttagtcaaactataaacattatttttggaaaaaaagaaaagaaaaatgaaacctataataactcatatgacttaccatgatctgatctccgatgatgataataaccgcgggatatatataatctacatcgagccagcggtcttccttgaacacttgaagtccgaaatttcattgggaatgagaagtgtgagtccattgaaatcagtgt

SEQ ID NO: 6793 - DNA, 533 bp, Arabidopsis thaliana
tgaagattccttaattttcctcaaaaagtcaaaaattgctagttacataagactatttataataatgcttaaactagtggaaattgaaactgatagtttaagagatgattaagaaaattaccttgagattgaaagagtagatgacaaagtcaaaggaagaagagatagtgagatgtagaatcgcaagctttagttcttcaatcgagacaatagcttttaagatctgtcgtgatcctcgcatacaccgaacttttaagctcacatggttctgtatcaccgtagcctccacttctgtcgtatctccaccgccgaatctcgccgtaaatccattttccgacgtcgtagaacgctagaaatagaagagttagtgcatgcaagagacgaagatgaagaacacgacgccgttttaggagtttcatcagttccatcctttcgtttctcagcttctagagattgcaagagttgctctagttccttgatgaaatctattgcccctcctacaatcgaagcttggtcacctagagaacaaaaac

SEQ ID NO: 6794 - DNA, 450 bp, Arabidopsis thaliana
gatgggatctgttccattagtgcttgtatgatcacatgaagtccgaaaatttcattgggaatgagaagtgtgagtccattgaaatcagtgtgggcttttattcccatgacccaatctggctctggacacggccggtaatagttgatcttcataagataaccagcactatcgtcccccgaatgctaacttcaacatctcacgttgtaaacctagctaacccttcggatagcaaaccgaggatctcttccgctagctgctttgcatgctttgcaaactcctcagtcacctctctgacccaaaatcgcagcggttaatgtttttagttagcacgttgtttaatttgggtaaatgcataaatgaaatacgtacatgatttccatatatcatagcacaaattaaacggtaaattataaaaaaaaaaaaaatgtttgatccatctgtatatatata

SEQ ID NO: 6795 - DNA, 736 bp, Arabidopsis thaliana
tgaaatatatatttaacgtcatggatctagtgatttaagatttttgatttggcaaattaatccaaaaaccaaaccggttcactttcagttcgatgtctaaaaaaatcacttggtgaactatcatttggattgtggtatatatgcttacactatgtgactcggattccatagaatagagtagttgtggaacgcggctgttggatcgaaccaaaggtagaattgttgctctctatcacccttgccttgagtgtaaacattagtgtgaacaatgtatggatctccactaacattccccaaaaactcgaaatctatctcgtcccatgttaatccttgagacttcaactacacaccaaaaagtcctcaaaatgtatcattcaatataacattaggtaacagatttatatgtatgtctagctaattaagaagggcttacgtagaaggtggtcacggtcccggctgaatttcccgggacaagtttgatctgcatatcaacttttccgtacaaatactcggctttcgattgaaaccctgaacccgaagattgatcaagaccgagatttagaagagtaccattgttcaaaatatttcctctaccatcaccccaggttatgtcaatgtcttggttgaaatctttaccgtgtacaacaagcaatatgcttaaaccaagaaagagagatattgacataaccaaaagtgtactagaaaccattataagttttgaaggttttaggtgggt

SEQ ID NO: 6796 - DNA, 544 bp, Arabidopsis thaliana
atcctccaggggattcagatcattctccttgtatggtgtttacttcttctctggtggctaggagcaagaaagcttttaaatacttctcctttctttcatcgcatccaaggtttaaagctgttattaatgatgcctggcaggttgaggtgtctattgggtctaagttgtttacttttgctcagaggatgagagttgtcaaggcagcttgtaggaaattgaacagagaagggttcggtaacatccaacaaagaacaaaggattctctagaggagttggaaagagttcaagctgctttgatgagtgctccatctgatggtttattcagggaggaatttcaagctagaaagtcttggaatttctttgctaaagctcaagagtctttctataggcagaagtctagaatcagatggatgaaggatggggaagcctgtacggccttcttttttaagtcggtgattgctaatcaaggaagaaactgcatcaaactgttaaggagtgatgatggtgagaggatcgagaatgtggatcagataaaagatatgtt

SEQ ID NO: 6797 - DNA, 463 bp, Arabidopsis thaliana
atagatgtagacacggaagctgcgtggtttcattgcggagggagaaaagctccttgcagatcgcacaaactaggcccttcattacatgctcctctgcaatgataacccttggaagattcctgacgcatgagacagatgcaggtggtgcacctcttctttgaattgtcagactcagcaagttgctcaagcagttcatcaaagcctctctcatcaagataatccccaacatttgcagcatagggggagaagtccaaatcctccaaaccagtgaagatgttgcgagataacgaatgcctcctctctataattctttgacgaaagcttctctctaactcaggtgaatcaaaccgagtcatggagctgtagctctcacttggacttgccaaatagtttctatagcgtgttcctgcaaccccagaaggacccgctccttcctcccattccctgtcttcttcgtctgagt

SEQ ID NO: 6798 - DNA, 1221 bp, Arabidopsis thaliana
actgaacgcatggaggtaaaattggggagcaaggtctagatctggagaaagagaagaaaccagaagaagagctcaaaaactgtgcgtgtctgaggacgaaagtgaataagatacgacaacagatccattcaggtggaatggtttttacctttgttgaaggtgcgtttgtgactgccctcagggaggggcattgggttttactagatgaagtgaacttagccccaccagagatattgggcaggctgattggtgttcttgaaggagtgagaggatcactttgtttagctgagagaggggatgtaatgggcattcccagacatttgaatttccgtttgtttgcttgtatgaatccagccacagatgctggtaagcgagacttgccattctcattccgaagcagatttacagagtatgctgtggatgatgacatatgtgatgatgacctggagatattcgtgagacgatttttaggtggacgtggatctgacagtaagttagtagccaacattgtttggttttacaaagaagctaaaaggttatctgaagaaagcttgcaggatggtgctaatcagaagccacagtacagcttaaggtctctataccgtgcgctagaatatgcgataaaagcagaagctattggtggttttcagaaagcattatatgatggattttccatgtttttcctctccttattggatgcttccagtgctaagatcgtggaaccgataataaagcgtatctccggggaaaatatccgaagccaaccacttcaaagatacttgggagaattaaaaggcagttctgataaatttgttggcagttatgttaagacgaagagtgtaattgatcatcttaatcatttggcgcatgcagtttttattaaaagatatcctgtgctcttacaaggaccaacatccagtggaaaaacaagccttgtcaaatatcttgcagcaataagtggaaacaaatttgtaagaatcaataatcatgagcagactgatatccaagagtatttaggttcctatatgactgattcttcagggaagcttgtatttcacgaaggagcgttggtgaaggctgtcaggggtgggcattggattgtcttagatgaacttaatttggctccatctgatgtcttagaggcactaaacaggctgcttgatgacaatagggagctttttgtgcctgagctgagtgaacaatccagcgcacctaatttta

SEQ ID NO: 6799 - DNA, 486 bp, Arabidopsis thaliana
tctgataacaaccaaactcaagaacctggaagttgaacggagtagcagcacaaagaacaagttcatatgtaaacgcgcacacagctatactggaaataagactttaaaaaagaggagataagaacacacctgagtcaataatcttatcacttcctagaatagacatagctttggcaattgaagactctttcaaagggacagatttccccgaggccgtcctgaacattggcaaagtttcagctgtatccacttgtctcatttggggaattgagcaatttgtgttccgcaaatctaaagtgtagccaagaacatggaacattcaaaagattttcaggaaaccattttcaccaacattaagtaacaattcaagggaattcagaaacaaatgactagtcaagggaattcaatactgtcacataaagtacctgagtaagtaccttctctgctaaaatggatttggctttagcaatcgaagactctttaaga

SEQ ID NO: 6800 - DNA, 1057 bp, Arabidopsis thaliana
tattattaaaacacaaagaaaaaaggatactccaccaaataagtttccttttcctggtaggaatccgagttgtgtaattgtaactagaaaaacaaaagccctaacttttctataaatactctacgcatcaccacagatctctcattcacaaatctctcatacttctccaaaatcacacaaactgattaaacccttttctagagaaatttctgtagatcaagaaatacatcaatggcagtctccgataataccttttcaatgtcgaccatgttcaatgctttaccaaaccctacagaaacctccggttacattcctccttctggattcgccccacgcgcctccgccacgcccttgcacgcagctctgttcaacctaatgactgacggcgatggtgtgtcttactttaaagagatgatctcaaagtcagacaaaacagagcttcagaggatggcctcgttgcttacgtctgactccgattacttcatgtcgatcgtcacaaccaagttcggctcgagacgcgtgcagaagctcctcggcaaatcagatgacgtggacgccttcttctgtgccgctatcttgcgccgcttcctccacatcacgaccgacaaatacgcatcctacgtgacgatacgagccatggtcgttttcgacaaggtgatgaaaaaggcattgtacgagcgcattctctaccacgctctcgacctagcgtgtgaccagcacggctgcatcgcgctcaatgatatcataaccgacgctgacgatccttactacagagatcagctactagaattggtcgcatccaacgctctccggctaagcaacgatgcttcagggaactttgtggtccaacatgtgcttacactgtatgactcgcgttgcattcacaacatcgccgttaatctttatggtcagtgcattgagctatcgtttaagaagtatggaagctacatcgtggagaagcttttggaggtggaggagtctatggttgtggtggttgtggagcttttgggttgcgatggagacaggttgatgaggctggcgaggaatgagtttggga

SEQ ID NO: 6801 - DNA, 687 bp, Arabidopsis thaliana
gggaatgctgacattaatactttcgataacaaaaagaaaatacactcattaaacagaacaaacctcagaaacagaatttaattaaaaacccacaaaatgaatctaagatagtttgctttacaattcaaaaacccgtctctgtgattcaaaatccctaaatccagagatcgaactctcgatcatgttatcgaatcatctccagaacgggatcgaatccgataacctactctggtctcgtgtccctgaatccgatgatacttccaccgacgatattactctactcaactctcaccgtgacggtgacggaggtgtcaatagtctcgattacgaagtcatcgagaattacgcttatagagaagaacaagctcatcgaggaaagctttatgttggttactacgttgctgtcaaatggttcttctctttactcatcgggatcggtacttgttgttcttcttcttcttcgattattgttggttgcttacttcttcgtagattttccagaatccgatcttgtttttgatttcttcgtaggaactggattagctgctgtgttcatcaatctctctgttgagaatttcgctggatggaaatttgctcttacttttgctattattcagaagtcgtattttgctgggtttattgtttatcttctcatcaatttagtcttagtgttttctctgcgtatat

SEQ ID NO: 6802 - DNA, 580 bp, Arabidopsis thaliana
ctggtcgacaaatatttacataatggcttgtatgatttgaactacaagccaaaaaacttcaaaagggtgtaatctttttgaagatggatgttggtcttcatttcttggccagtaatttcttcgggagcttatcgaggggcgttgatttaagtaaaaatagcctcgcagctcgctctcgcaatgtccctctgcatttcagaccgcgtgactgaagctcagtcttcaatctctccatccccaaaacctccatatctgtggctgctttgaactcagcaaagttaagcggttcaacaggtttgcaacacactctttctttcgcagttcctcctctctttacgacaaaatcatcgtttccacttgatttctccaccttttcaagttgatccattgcatcagcaacagcaaaatcatccatcttctcttcgttaattctttgaacaaccgtgatctctcccttaactacatctgaactttggtgcactacaaagtcgttctcaccatcatgggatccatccaaaacagagcctgagctttcatcagtatccttatgatctgaatcaacttgaccaccaacaacaga

SEQ ID NO: 6803 - DNA, 1338 bp, Arabidopsis thaliana
caataatagctgcggattttacctttgctctgccggacaagtgtatcctgttctcttggagagagttcatcaggtgcggaacatgaagacctgacgatataaacagcaactcaaattattcagatggccagtctcagtgagtcaaaaatctataattatcccatatgtgtagtctaagttatttcggaaaaaaatgcgcaatgttctgtggtaactagcctaggttaaacacatgaacatgcaacctcgtttacctgccaggatccaagagattatcagagcacgaccactttggtggaagaagaatatccaccggcacgtgtcgccatttcccacaagcatcacactgcacccattgctcttgttccctgagaattcatggatcacatatcagaaccaaataatcagatgttcattacttcaaatctttcgatcattccaagggtgcttaattcttctgatcctatcattacatagtacatgaggcctcaccctgtttgacgtgagacaaaaagggtcctcttcccgaaaactggtggttcctgggtagcagcaaatacatgatttcagaaaatacagtgaaaagttcccagctgtttttgataactaaacagttaacagtaactcacgtcatattcttcaaaatcttgattttccagcgtaaagatgctgggtttggtggattggggaggccgcaacagctcctgtgcctcctcccaagttattttcagttccagaacatctacgctatcaatgagcagacgcttgctcttagtcccaatgttccgaacccgtttcctagcagaagttaaggacgactgaagaaataagttatcctttgccatgtcctcagacttctctagtttagaccaattgatgtcaccacatcccggattcaagctgttggaaaacatgttcagattgggttcactgcttcccttgaacatctgaagaaacacggaaaaatatttcactgaaagaatcagtacgagagcaccagaaaaggattctttaattcaatacacttcacagtggcagttacttatgcctaagggggcaactctcagcttattatgcatttacctgtgtcgctgtagagttcgtcgctttacggtatcccattacgagttttccttcaggttctgtacggctgaatgttactgcagagaacatggaaaatccaagacatcagacctaactagaaagtacggtcatctcttcgtggaatgtattcactgtcctcatgattggaacgctttagtgcaatgtttcatttaccataccagggtgggtttatcatatgttatgaatgtagttacgaaacaaaaggatttgaaa

SEQ ID NO: 6804 - DNA, 1394 bp, Arabidopsis thaliana columbia
  unsure (1)..(1394): unsure at all n locations
atcccacgaacaaccccggacctgaacttgccaagttgacatcacgattgacaaacgagctcttagaaacgccggagacaataacctctggcctcttccttccttgtattttgaggtggcacggcattagtcctggcgatgccgatgcttggtttttttagctacaaagcatggtttataaagttgtctgtattccagtttggctcttattaagttagttactctatttacgtgtcctttttcaaaactctaatgtataaagttatgattttacgggcaactctttacttttgagtaaaaaaaacagagcaggttttagtactgaattttgggtaacgtagttgaaaatttgatttcggacgataatgtaaaattgatgaaatacatcaaaatgactacattaatccttttgacacaatatgaataatcaattttaattaatattattattacttgtaaaacagtataaatatggctcattatttcacagattctcaacactctctcattctccacaatttacgatggcacaccagctccgttttgccgccgcaagagaacccatctcagaagagtatccggcggttgctcttcctcatccacgttgcatctccgtcgcgtttcctcctccgagattcacaccatctccgtcgcctttaactaattactcattcttggccgcattaactcctcaagaactggagatgcgtttgcaaattgcaatggatgtccgtaatgactaataacgaagatcatgttgcggctccgtttgaagagatgatctcgaagttagaccaaagaaagcttcaaacgatggcgtcattgctgacatcagatcccgattacttcttgatgatcgcaagaaacatgaacggctccaaacgcattcagaaacttctcggaaaaacagatgacgtggacgctttattcgccgccgctatcttgcgccgcttcctccacatcatcaccgacaagtacgcgtcgtacgtggtgagacgggggatgacagttttcgataagaagaagaaaaaagcaatgtacgagcacattctccactacgcgagccacatagcgcgtgataaacacggtaacctcgcgctcaacgacatcataaccgacgcggtacagaaccaagccctttgacgtaatcgcgcacaaactctttgtactaagcaacgatgcttatggggacttttgtgatacaccgcgtgctttaactgaatgactttgcgtacgagaacnnaacatcgtcgttagtctacgtggccactttgttgatctctcgtntcagaaatatggaagctacgttgtggatgtacttttggagacgaaggagtcaatggttgtggtggtggaggagcttatggaatgtgaaggagatatgttgatgaggt

SEQ ID NO: 6805 - DNA, 499 bp, Arabidopsis thaliana
ctatcataaaacaacatcgaacgttttaagttaaaaaccatcaaaatctgcaaaacggctgcattgtgaaaagaagttgttttcagttgtttctgttgacgtttacctgaactgtagatggatatagcgaccattgtcacgtgaaagctcctgccctggtgagatactgatacctacccaactatttggaaacggcgcatgattcacaatgttgcgtagaagatcagcaagaataagctggagcttgactctgtcaccattgagaggcagagttttgatctcctcggcgacttcaacccttagttgtgagttcctctctctcaatataatcatcacttggctaatgattgtgtccaagatgttttcaagtcgaaactcttctgtttccaattgcaacttgctgatctcataaaagaaaacatttgtttttcagattcaaaatgtaaaaacttcagtaggtgaagattcaaaacgttatgctttacccttcctcaatgct

SEQ ID NO: 6806 - DNA, 829 bp, Arabidopsis thaliana
gagacattgacaagtggaatggctattgactgtaactagctacaagcgatatcgtggtacattaaccggttaaatcgtatagttcccgttcccggttaagcgtggtttccaccatcacatcattccatgaatcaattggaccaggtaagcaccaatgcagacaatcattctgaacattgctcttattcttaactccagcaaaaggatttggatgccggtatggtcccggatgcccgtctggacggagaagagacattccagtcgtgtctaatagcctgatgttggaacctaagccaaaacctttcccaaatttctgaaacacctcaagctcaacatcacgcatcacatcatctacagttttcatatttgcttggccttctttaaacggcatcgttctgttgcaatacccaccagtgttccactctccgttttcgaaatggtcaggcgttgttgttcgaaacagaaccagcggtttgtgggttgagtttaggacgaagtcacggagaaggtttagggttttgcggtaggagtaatcatagccgagatcagttaggttgtttcttccttggcagtaatgacagcccgtgactacgttgttttcatggaaaattgttgttttaagaaaccatttgcctccagagataacaacgtagtcgaatttcgggtattggacagtccatttgtggtcaagctggtcgaggtaaagctgaatatccgagttgctagatgtttcggatttgagaaggataggagaccaaatgactgatagtgtgaagttgtgagaagggaatctccatatcttggatctgaactccttatcgtgatagat

SEQ ID NO: 6807 - DNA, 544 bp, Arabidopsis thaliana
cccccttcttctttgtctcaaaattggttgcaccctgttttcttgagcttccgtggggaagatgtccgcaaaggcttgctcagtcacattcagaaggagtttcaaagaaacggaatcacaccgttcattgataatgagatgaagagaggaggatccattggtcctgagctcttacaggctattagaggatctaagatcgcgatcatcttgctttcgaggaactatggttcttcgaagtggtgtcttgatgaattggtggagattatgaaatgcagagaagagttgggtcaaacagtgatgaccgttttttatgatgtggatccatctgatgtgaggaagcagaagggagattttgggaaggtttttaaaaaaacttgtgttggaagaccagaggagatggtacagagatggaagcaagctttgaccagcgctgcaaatatactcggggaggattctcgcaactggtagttttcctctctaatgcataatttgtgtcatacttttcttgtatatatgtatgattatatgaactccaaatatgata

SEQ ID NO: 6808 - DNA, 496 bp, Arabidopsis thaliana
aaataactatcaatatgatgaaggttgatcaagattattcgtgtagtataccgcctggatttaggtttcatccgacagatgaagaacttgtcggatattatctcaagaagaaaatcgcctcccagaggattgatctcgacgttatcagagaaattgatctttacaagatcgaaccatgggatctacaaggtatattatatatctatctctctctatctgtctctcttatatcttctcgataccaatgtttattcatgtgatcaatcgttcatataatataattggttccgtcttttatatgtgcaatttatgaattatgtgcccgagtgaccctacatataaggctacatctagagaggtcaagttttagaagttagggttaatttatgaattatgatttaaacgataccacctacacatgtaagcaactatactgtgtagctcgaaagagtaatatgtaacctaaatgtgatacgtgtagagagatgtaggatag

SEQ ID NO: 6809 - DNA, 548 bp, Arabidopsis thaliana columbia
tgtttatctgacaaagattttggtttgatgtggcaggatcagttaaggcgtgaaagcaaaaagagccaaagtggtggtatcccattcatgtacgttcttttggtcggactcatcggtctaattttgggatacattatgaagaggacataaaccacccaccttgaaattaatccctcacccgccacgaaggaaaaaaaaaagacttttaactcttttcagtcggacatttttttctcttctgtatttgtcaatttcgccttaaaaaggtgtcctagaagatttgtgtttcgtaactcagtttgctatgtttttttcaacttttgtaatccaaatgactttgcgttggttctttctccactaattctcttatatttcttaacttcattttccatctcaaaccttcctccgtgtctgcattagtcagtgtatgtatatgtttgttccaaatgcttttctcttcctttaccacataatttcttacatcaatattgaacagagatgaactacaacggcaatgtttcatgcttatgttttttactgatgaggaa

SEQ ID NO: 6810 - DNA, 503 bp, Arabidopsis thaliana columbia
aatgaatcatcaaaatcactaaacgttgaacccatatctttgatactagaacttgttaactcatcttcaatgttcatagtttcaccacccaagaacaacatatcattgaagatatcatcattttcacagaaaatttgatccattggttggtcaaatattgacatctctggtggtgattcattgaaatagttgtcatgaaacggagtatccaaaggaaatgaatcgtctgattcacctaaaccggtattaaacccggtatgccaccatggtgcatttgaaacccccggttcgggtttagctgatttaaacggttgttgtacttgttgaatctcttctgaccggtgattgagaaccgaagtaggagatgagagatgttgtaaatcttcttcagttgattcagaactcgatgttgttggtgttggcgtcgtcataataaccggtttctcctcaataaccggttccgggtcttcttcttcttcctcttcttgaggcggtatggagaa

SEQ ID NO: 6811 - DNA, 548 bp, Arabidopsis thaliana
taactttcttgaactcatcaaatgtgacttggtcaatttcacattcttctgagcttccaggccattgtagaccaatttgaatctctctgaacctgttgaatgtctcctcgacttgcttcataggatgaccttgaaggtaatggattatagtctgagagataaaacgacattggtcacaacaataagtaaaaaaatggaattaaggattactatgtatatgacttgcctgatatagaggacgtcttgcatctgttatgacttcatcctctaaacacttacattttgaagcctcttccatgtttccctattacaaagaaataaatttattataaagatggtgaaaaaaattcatatatatgagaaaggaaattcagaaagcaaaccaagtagatcaacatctccacaagcaacatctcaatctcataagcctcatgacctttcccttcttttcttgctttctccaatgcctttttcaatagctcagctccttttgcttcttttccactcatttccatttttacaatgtctctctgcatgagggagaagaa

SEQ ID NO: 6812 - DNA, 868 bp, Arabidopsis thaliana
  unsure (1)..(868): unsure at all n locations
tgcgaattagtctccgagtgtcgaagtcagttttcaccccttgagttatgttatagacatcgaagttgagatatttagcaatagcagcaacaagactagtcttcccggcccccggtagaccatgcagcaagtaatatctcatccaatgtcgcccaactcttttgtagaaatcttccttgctgatgaacaggtcaatatcgtcgatgagtctacgcttgaggtcttccttcataacaatcgtttcaaagcttgaatggtggtcaaggatcttggtttcccaagtgtcacagcagtgagagtatgtatgcatctcgaggattctcttcttgctcttgatctcctttgccttgctctccacgaaaggtatgtaagagtcgaagacaaatctctatgcttttcgtcaaatctcagctcgaagcattgcttagggatgtttccaatattatttttatccacgaaaatcctccacttgagcttggccccttggtatatatcatcgaactcacgttcttccacgaagtcaaggttgattttgtcgaaaagataagcctgagtggcgccatggatcacgttgatccttccgttctcagaagtctcttcgatgataaccgtgacttgattatcatggtgagtcagcgaaggagggccgacaagataccggaggtaagagatgatcaagtattgtatcggacgagttattgcttgaaccattgatttgatcaacttgagcatcatgatatattgattgattctattcgacggaagtatgagtctttaatccaaaaaaacagaggaaattgttttatcagaaagaagaaactgcctgtggtcggctacaaacaaagnaacgaagaagaagcgattaggg

SEQ ID NO: 6813 - DNA, 582 bp, Arabidopsis thaliana
ccatgcattccaaccactcggttctagaaacccgtctatgtaagtttgcatgacaacggttctagaatattccttccatggtcgaccaagataagtcttcactgtatagttgctcgtagccaaatcatctgccggtcttatagtacaaccatgaattgccgtcccagtgttttggttcggatcagtacgaccttgagccgtaacctcgttcgattgacctttgcgaggttgacgtggatacaaattacagttttgtaataccactgcagcgttaccaaatataaaatcaacagtaccatagacatcacattcacgataaaactgtctgagagaatgtgtgtataacgtgtcttgataggcttcaaaactacaactgtagaaaacagacaagtccccaccactcctcaatgccacagcttggcctttggttggtcctgcgtattgcggattgttatgtttacccaataaagttgggcctgatagactgccatttgtgacaaaacgtagagttagttaattattagaattaaacaaaaaaactgataattggcctatgaacaaaatatttgtaagaggaaaaaa

SEQ ID NO: 6814 - DNA, 1202 bp, Arabidopsis thaliana
cctaggcatttgcagcaagaaggatttgaggtaacttatttacctgtgaaaactgatggattggttgatttagagatgttgagagaagctattaggccagacacagggctagtttctattatggctgtgaacaatgagattggtgtggttcaacctatggaggagattggtatgatttgcaaagagcataatgttccgtttcatactgatgctgctcaagctattgggaagatacctgttgatgttaagaagtggaatgttgctttgatgtctatgagtgctcacaagatctatggaccgaaaggtgttggtgctttgtatgtgaggaggaggccgagaatcaggcttgagccgttgatgaatggtggaggtcaggagaggggattgcgtagtggtacgggggctacgcagcagattgttgggttcggggctgcttgtgagttggctatgaaggagatggagtatgatgagaagtggattaaggggttacaggagaggttgctgaatggggttagagagaagcttgatggtgttgtggtgaatggttcaatggatagtcgatatgtagggaatttgaatttgtcgtttgcttatgttgaaggagagagtttgttgatgggattgaaggaagttgcagtgtctagtggaagtgcttgtactagtgcgagtttggaccttcttatgtgttgagagctttgggtgtggatgaagacatggctcacacttcgattaggtttgggattggtaggtttaccacgaaggaagagattgataaagcggtcgagcttacggttaaacaagttgagaagttgagggaaatgagcccgctttatgaaatggttaaagaaggtatcgatatcaagaacattcaatggtctcaacactgattcaacagttccactcaaactgtgcgggacaagagggaatctccagtctgtggtcagccggggtatatgagagccatactgagatgtgagtatgaacgatgatatgatcctgtgttcttactatgttctgttggtaagttatctatctatattgctttctagagagaattgcatgtgagagtttcttgtgtggttttgtaataaaacagaaacaaaggttcatttctggttagattgtgatatcctttgaaattgaatgattaatttttaggtgttgtgagcttagcttttttagctacggtaatggtgaagttt

SEQ ID NO: 6815 - DNA, 319 bp, Arabidopsis thaliana
ccctgtttttttcggttttggcttggatttggcatcggtcggtgactaccctttatccgcaaccatcatgtctgaatatgcgaacaagaagactcgcggagctttgtctctgcggtttttgctatgcaagggttcggaatcatggctggtggtattttcgctattataatttcctctgcttttgaagctaagtttccatccccggcctatgcggatgatgccttgggatccacgattcctcaagctgatttggtatctcggataatcccgatgtctcgtgctatccctgctgctatgaccgtattactcaaggctcgaa

SEQ ID NO: 6816 - DNA, 770 bp, Arabidopsis thaliana columbia
tcttcgttttcgtggtatttgctatgttgaagaattaggaactggtgtttcttcagaatttttgtcttgaagatttggtgtggtttcatcttgacttcctagggaaaacccacgttgaaaatttgccggatgagcccattgtgaagaattcggtgaagagccccattgtgaaacatttgattatgagtcccattgttgatcactattccactgtggagcaactggtggtgagttccattgtggaacatttgatggtgaactccagtttggatcatttgatgataaaccccattgtgtcccacttggaggtgtaccccattttggtgcatgttgttttgttctccattctaaaatatttggtgatgaccccattgcggaacatttgatggtgaactccatcgcggacgagttgatgatgaacccactgcggaccatttgatggtgatcttcagtttggactatttgacgatgaaccccaactatgagcatttggttgtgtgcccattgttgacacttggttatgaactccattgtggtccatttgaaagattaccccattgtggtgcacttggtggagtaccccattgtggagcatttggtggtgtaccccatgaattaccatcacaataaggactcttgtaaggaaaaccaccagacattgaactgccataaggaaaacaagcagaacttggagtcccaaaatgatgacccgtgtttaagcgctttccgacaggttcatcatcacatctatatcctcatagaacttgtaa

SEQ ID NO: 6817 - DNA, 911 bp, Arabidopsis thaliana
atctctaaccatggaaggacttgaatatcgacaacaaagtagaaaaaagaagcgaacaagtcaaaaatgacttcaaagacataacatcaattcacattttgatatataacaaagcttatcctattatcgcctttatttatctttgtaatgaactcctaaagcacttgggaaaacaagtagagagaataaaagaaatgaaaatagagctagtattcattccctctccggcaattagtcatctcatggcgacggtagagatggcggacgaactagttgataaaaacgacaacctctctatcaccgtaatcatcatatcttttagttctaaaaatacatccatgatcacctctcttacatccaacaaccgcctccggtacgaaataatctccggagagatcaacaaccaacggagctcaaagcaactgattcccacatccaaagtctaaagccactggtgagagacgcggttgctaaactcgtagattccactctaccagacgcgcctcgtcttgcgggattcgttgttgacatgtactgcacgtcgatgatcgatgtcgctaacgaatttggcgtccctagttacttgttttacacctctaacgctggatttcttggacttttgcttcacattcagttcatgtacgatgcagaggatatctatgacatgagcgaattagaagactctgacgtagagttggtggttccgagtttgactagtccttatccgttgaaatgtcttccttacattttcaaatcaaaagagtggctcactttttttgtaactcaagcgagaagattcagagaaactaagggcattttggtaaacacggttcctgacttggaacctcaagcgttgacgtttctttccaatggtaacattccacgtgcttacccagtaggaccattgttgc

SEQ ID NO: 6818 - DNA, 857 bp, Arabidopsis thaliana
tcatatatcttctcttcctggaatactggcttgcctacataatctgaaagctttgattcatcaatcatatacttgtcaaccgtgtcagctacctctgctctctgctcagtcgttgagtgtgttagatccccagttgccaagtcatctgtcaagacagtggagccgtctgcagaggtctctggagagtccaaatcagtcttggccaaagatttagtgtcttcagtgtcagtagtaacatcatcagaaattctaggcacttcggtggatgccgctttgcgaacaagtttaagagcaatctgtaagaaaatcaatcaattcagatcctcggggtccaagtaagaagtttggaatgttcagtgtacttgtaaacaaacttaccttacgaaaaatcttctcaatctgcttctggagatttctaactcctgcttctctgcagtaatgttctatcaaggaaagaaaagctgcatcgctcacatcaacctggaaagaggtacaaacaacttgagcaaaatcttttataacattcaaaccgtaataaaataaagaaaacagcaaatagttgtgagtgagacctgttcaggcttaatgccacaatctctgcgtgcggttttctccaaatagtctctagcgatatgcattttctcatcagtaatgtaccctgagagagtgatcacctccattctgtctagcagaggacccggaatggtatctgtcacgtttgctgtgcatacaaataaaacctgcaagaaatttaattagacctaagttccaacacaaacttcctattatgaaaccaatactcagatcggatcaatggcttccggttttcttcaatttggtggatacaaagaaagaaa

SEQ ID NO: 6819 - DNA, 529 bp, Arabidopsis thaliana
caacaactacaaattcgttgaactttcaaagactgctcatagttatgggaaacaagtgtttcctctctcttttttttttcctttaggtaaattcctcaaagatcaacgtacatagacgtgatgtagttcttcagattaccattgagtcgggtaaatccatcttcattgtcgtagcaaatgttaattgcacgtaaagtgtcgaggactgcttttagaacctgatgtggcacattgattggcttcaaaaactcctcattcatcatcttatcaccgtccgcaaccatttgatgaagctttctaaaggcttcttcttcggtaactccatattgcttcttataacagttgatcgaatcgtcattatatcctctcctcatgtcatcctaatcatgtcacatgttaagtttgattatcaaataacaacaaatatatgattatcgaaaaaataaataaaagtgggaatacatttccctaccttatagcaaacaaatcattcccagtcgtgcttttgtagacattgctctacgagttt

SEQ ID NO: 6820 - DNA, 550 bp, Arabidopsis thaliana
gttgctctcttgcaatggagaggaccgatgctttatctttctgttcaaaaaatttagtcattacattagctcaaatatacattagaagaagaaacttatcaaattttgaaaacattaattaacagaaatcatagtatatacatgaaaaaaaaaatctcacataccttagttccgggaggtaggagagatctcaatgcttgaaagctctcattaagcttctctcgccgtttcctctccgatatcatatgttgcagttgcgttgcgcttggcccgctagtataacgtccaccccctccacttccaccgcttccctcgccgtgtgtagtagcgttttccctagtaaaacgctctctctggttaatgttaagcctattgtagaaggacatcgctcttgtcatcatactttgcttccgaacactcggaagcggggctctaccgcggtcactaatcatggagtaatatctcttaaaagcggtggctcttcctttacgctgcggcgaggaagaagttgacggaggacttgatggccccgtaaaaccgctaagattgc

SEQ ID NO: 6821 - DNA, 522 bp, Arabidopsis thaliana
  unsure (1)..(522): unsure at all n locations
tcatagacataacatgctcgaacgtagcagtctcaggatcaaaattcggccatagatagttctccaaatactgactcacttccagaatcataactcgctgaagtggaacaggtttacgaccactagttaccttaagctccgtcacataaatctccttcacaacctccggatcgaacggtttctcagggagcttacctccagtcttaatccagctctcctcagcgattttcgttaacctatcttgctgaatctccgataaagtgatggagctcggcaaattagatccaggctttgactctagaggcttctcagcaggatggctaggtaactccaatggatactccgccactctgtgcgcnttgaagtcgtacgtgccagttccatagaacttcgtccatctctcacgcgaaacttcttgctcagagagaagtgaaatcaacacatacagcaaacgaagaggttcagagaagggatttagagtgaagaagagtaagatttttagggcttaagcggaggtgagag

SEQ ID NO: 6822 - DNA, 566 bp, Arabidopsis thaliana
cgacgagtcctttgtctccctagatgatgaagttattgtcgaagcttcttcacatgaagatgatgaacagatatcggacttttataattctgatttggttgatcccatcgtacttcctcacatcaaagctattgcaaacgccatgtttgcttgcgagtatgatcaaccattctgtgaagctttcatcggcgttcaaagagaagctctggaggagtatatggttactctcgaaatggaaagattcagctgcgttgatgttctcagaatggactgggaggatttgaatggtgcaatgagaaaatggacaaaggttgttaagatcattactcaggtctatctcgccagtgaaaaacagctatgtgatcagattttgggagactttgagtcaatttctacagcttgcttcattgaaatctcaaaagatgcaattctatcactcctcaactttggagaagctgtggtgctgagatcttgcaagccagaaatgcttgagcgcttccttagtatgtatgaggtttcagcagagattctcgtggatgtcgataacctcttccgcgatgaaacag

SEQ ID NO: 6823 - DNA, 545 bp, Arabidopsis thaliana
tgattgattcaaatataaagaaagaagtgtttcccatagtgacttgcctcgctgactccaactccatagttgagatattccatggaagaatactctggcttatacaatgtactcgccgataaattaatatactgaccatacgcctgatcaaagaaaaatgcaaacgttacggttattcatgcagaatctttgttatagaagagtaactatcagaatttactaggctacctacttgttgaatgagtatgttccatgtcacggaacctgacttctccatcatcatctgatccattataggtttcaatctctccaccaagataacacagcaaagcctaacggcttcacaactgctctcggatgtcgtgctaccagcagtgaaacctccttggatcatacctagtgtatcggactgaactacacgtattctatccaagagcttttcgtttccttcgcatttaaccataccgagaccataagcaaccatctgttgtactttagtccacaatccttgccctatctcaattcctccaactcaactacaacag

SEQ ID NO: 6824 - DNA, 703 bp, Arabidopsis thaliana
attttcaggatttgcatcactaaacgatcatgtagaacaaagaatagaagagtttgatcaagaggccgagaagacaaatcgattgttggctagaattgctgatgatgcatctgccaatcttaaagagctcgagtctcactattactcttctgctcagagattgactctagacatctgatattagaatgcctggagacaccagaggaaacagataaaacaattggttcataaaccagaggaaacggccatcgaaggatatgcagtttgaagtcatggacaacgttttggactatcctttcccacattgatcatatttcctctctcaattcgcatattacttagcaatcttaaatgttccagtctgatgaacaagcgtttgatgttttcatcaatcattagtgatttttttgctgttatcctcttgtatgttttgataattacgtgaaattacattctcttaacctgcaaagtgtatatcgtccaagtaaaaccttcttgatttaattcgcgttgaaccaaatttaattatattccacttttggattgaaactatcaaattcaaattagcttgacttatgaaacaagagcgacccctcgaggttagtggacttttatgaaacgcgaccgactcttcaaggcccaaagaaaaagagaatattcggcgggataggggtacgtttgtaatttggcaaacgatgttatg

SEQ ID NO: 6825 - DNA, 1102 bp, Arabidopsis thaliana
ctgcaaggttagtaacttcctgcaaaaacctaacttgactccacaagatcactcagagtccaataaccttatttcctgttcattaaattgtccccaaccataccttttggaatcatcttattcaggctccgggtacagttaggagtgaacatgccagctcaagcccaccacaaactcggccaagacaacgaggaatcaggaacggtcgagctctttgaagtatatgatgtggttgtatacatgggcatcattgacatcctccaagagtacaacatgaagaagaaagtggaacatacttgcaaatctatgaaatatgatccaatgacaatttcagccatcgagcctacactttactctaaacgattcatcgatttcctccttaaggtattcccagaaaaagcatagagagagagagatatcaacggaccattgatcttcctaaagatgaaaggttccatgatttgactcgaccgataatattctttcctgttcataagccataaaaagactctgagggatttggctcgtaatcttctttcgcccttatgtacactaacatttaggatcttatatacttgaaaaagttttcgtatatgattattattgagtagatttgtgccactcttaaaatccaaacaagtgcatcagtaatagattagatgataaaataagttgatcaaaacaaaggatcaataccagtataaaaatcatcatcaaagtgaagaatatcatcctcgttctctaaccaacttgcagaaccagaagtttcgccgccttcaaattcgtgagtttgattcgtctttgtctcgtcgttgcgagtctgaagaacttcctcctcctgatgatgaagaatctctaaacctccatctctttgagtactcttcacggcatcatttaatcggcatctcacattgttcaacatcctcgaaacagcatcgaccgcctctattaactcctcaacgtgctccgatacgtcaaaacgtttgtctcccaccaaaaccctaaccctgacctgttgtcttggtttgccgtaagaggaggatggtcataaagcagagaggagacaacgttatcgacagaggaatgaccgaagagtagaaag

SEQ ID NO: 6826 - DNA, 1282 bp, Arabidopsis thaliana
acgggttagctaactatgcgttctctttgctattgggctttatgcttttgtttttgttcctcttgttgttgattcgctgtttagtgatgacgttattgagtctgcgcgccctcgtcgagtatactcgtttttgtagtttgttttaattttcaataaaatgggagactagtctcccctcttctaccaaaaaaatgtagatggtctatggtacattgaaagccgaagcagtgccgaattagtatttacgagtgccatactcaaagcttaaaaacatgctttttcatataacacacgttctatttcccggcgtctccatctccgtctctatctaatctcgtcatgcgtcgatctcgtaagctacttcagattccggccatcacgcagctccaggttagttttgatttatgtgaaactacaaatcggtgtgttgtgccttgaatggaattgatttctgggtttagattgagaatttctacggtttaggaaacgttatttaggtcatacgaatctgttgtttgtagaagatacgacgaatcaaatccagtcacgtgaaacagagctagtattgatctttaactctgctctattatcaaattgattgagtcgatctgaaattcacagattaccatatttgcacactatgttttgtgactaatttcagaagaaaatgttattagagagtagaaaatggattcctcaatctttgttctgcaacacagtttctcatactgcaaacaaatggcatgataacatggtagtaggttttaatttaactcttgctttttccttgcagttgtgtgatttgtggttaatacaaagatgacaacaatcgaaaactcaaaagtcttctccttccagttctgctactaccgcgtactcttaagcagtcttcggcatcgtttaaaaggtggggaaggagacatccgtttgtacaatatggacttccgatgatatctctcacagtatttggagccctcggacttggccaactccttcaaggcaggtcagttctttcttgattgtaaactaagctctgaatctataaatgcctggggatatgtcaatgattttgtttagaattcaccacatatggtttatttggttagttcagtaaggatattgcaaaggtaaaagatgactaagaatgggagattatagaaacaagaaaggcgctttcaagaacaggacctgttgatgcttataaacctaaaaacacatccatcgaagatgagctcaaggtaacaaaggatataccctcaattagactgcataaaagctttga

SEQ ID NO: 6827 - DNA, 1639 bp, Arabidopsis thaliana
aatgaaaagcagattggtattaaccttgttagagtagattgtccagttggtgaaaagttcagagagcattgagccaaggaggccaaaaagagcaccagaagctccaacagagatactgtttctgataaacaacgacgacaatacactccctccaattcctgataataggtatataactccgattctaactgaaaatttcaagaaaccaagattcagatttctagcaacagaataacacaactagaagaatgaagactaaatccacccaaattgcataccaaaaccaaattgctgctcgagacgaataccaatgaaaacaaggcttaacatattggctccgagatgaataacacccgcgtgtaaccatatacatgtcaagagacgccaaccttccttcttctccacaactttgctccactcaagtgctcctaacttctccaatcttcaagtatatatcaaccaaaacacaatcatatcaaaatcttgtatctcaaactctcaatcacataacttcatcatttcaacatctcaagatccagtaaatttcgatttagtaaccgacaaacttgagaaacagaaccaaaacgtgattctctagtatttagaaccctaaatcaacatcgatacaaaatttagaaaacgtacgtgtgagaagatggaccaaagagaggattagttcggagaggctcaaaggagagtctaccgagaaacttggcgacacagtgacctctgagacggtgagactcgaaatgattcggacagttattaacgaacatcgccacgacgaaaaccgcaacgttagccacaacgaacatcggaacaagccacgacgtccaccgcgacgacaacgcgttatcgccaaattcagtagacgacgacaaggctaccggcagaggcggtggtccgattcgattccgatcaccgcctctgcttccgattcctcgatctttcgccgacattctgttctccagatcatcatctccgacagccatagtgatctctctcttctctgtctgtaatttgtttattgttttttttgttttggttggtttttttttttttttggattgaaggcggtaagaagagttaaaccttgagagtgggtgagaaagtgggtttctgttaaccaattaaatctttccacgtgtaaatgtataataccggtttttgtggtacgtgttacggtgtaccgtggtctattgcacactgtatcgtaacggagctaacgtgcgctggatttccaaatttgctttaagagcatctccatcggcaaaagtggtagagagtatctcaaaaagtaaataaattaatattttaattaaattaatatattttaattagtttgaagtaaatgaactattaattgaatgacaactctcaataaatgctgagaatagtctctcttgccagtttctccacttttctcttcttctctcatactttttctctttttaattattatttaattgatgagtatctcaatcagatattccgatggagatggtcttacaagtgttaccgagacgtaccaattggcgaactcatataacttgtgctgttgtgcgaatgtgttttgattagtgaggggtcttgggccaaaaaacatggctggtttttaagcgcaattgcaaggatgaat

SEQ ID NO: 6828 - DNA, 1006 bp, Arabidopsis thaliana
ttccacctaaaaccaaaactctacccagatttcatgggaaaagaagactaccaaacttacaagtcgaacaaaatcttgggtcggctttacagacgggtaaaagaggtttatgatgaagatgcagaagcttcctcagaagaaagcacagacccaagtgccatcccttatgacgctgttcttgaaataccgggatttgaagatttgatccctgaggcatggggtcacaaatgtttgtacgacgggcaactcattggtcttcttgggcaatacaaggtgcagaaagaggaagagattgtgacgggtcacatctggtccatgcccaaatacacaagcaagaaacaaggcgaactgaaagaaagactgaagcattcttataattcccttaaaaaggagttcaggaaagtatttgaggaaacaatccctgaccatgaaaatctcagcgaggaggaaaaaaacatcttgtatgagaagaaggcttcagcttggtatcatgtaacttaccatcccgagtgggtgaagaagtctttagagctgcaagatccagatgagtccagtcatgcggcgatgctgagttttgcttggattgcagctgattatcttgcaagaatcaaaatccggtcacgggaaatgggaagtatcgactcagccaagcctgttgattctttggctaagtttcttgctcagcgtctctaaaaggttatgtttaatgccgtaaccgacctctgccatgtatctgtggatttttttgtgtgacgaaacatcttgtctttgcaaaaactgcttgctgttcaggatttgtatagctcaactgcttgccattgtttgtgtaatgtattctactatattatcgtcaaatatgctcttattatcttcaaaacaaatttgatttgctcttattatacttgatgtaggttaactggtttgattaagatgaatcaaatgagagtcttgagacttttataatcagaatgtgagatacataaaatgtacttattatatgattagg

SEQ ID NO: 6829 - DNA, 1191 bp, Arabidopsis thaliana
caatgtctaaagagtgtgggaacagcaaatcctcttattttgttcgacgagattgataaggtagctagcttgttagtatttgaattggctttttgttttttctattcaaacatatatatatccagttacgcttttgcaataatttgtctgctgttccttggcagcttggtaggtgccacactggcgacccagccagtgcgttgttggaggttatggatccagagcagaatgcaaaatttttagaccactttctcaatgttactattgacttatcaaaggtttttttactcttttgccatggcggttttttctactctttgcaattttttgatccatcacggttcaggaaaactctgtgtattgatattcatgatatgcagttttgtgtttgacgtaaggtctaaactaatttattgcaggttttatttgtatgcactgcaaatgtgatagaaatgattccgggtcctctgctagacagaatggaggtgattgatctctctgggtatgttactgatgagaaaatgcatattgctagagactatttggtgaaaaagacatgcagagattgcggcattaagcctgaacatgttgatttgagtgatgcagctcttctttccttgatagaaaattattgtagagaagcaggagttagaaatctccaaaagcagattgagaagatttaccgtaaggtaagttgctacaaagtcgcaatgtcgcatgtttcttgaatctcaaactatttactagaatcagcagaatctaaaatcatttgacctttttggcaggttgctcttgaactagtacgccaaggagcagtttcttttgatgttactgacactaaagatactaaatctttggcgcagatcgattctgatgttgagagagctacctcggcggttacgctggagagtaaagcggctagggtgaatgaagtaaggaataaagctatgatggggattcgtttgccaaattacaaacatacccctatcccgccgactattctctttttctttgggccttgaagagtcggtcgcgtttcataaaagatacgggaagatttggaacggaggttcatcgtcgccgtcgcctgaggagggtgacaagataaagagccgaacgacgtcgtttagttttagattttttttttcagctctgcggtctgtttagatccggtatactttccggtttgtg

SEQ ID NO: 6830 - DNA, 903 bp, Arabidopsis thaliana columbia
tcaaagtggataattttttattttttcttaatactacttcaagtcttcaatagcattataaacccttttttaactcaaaatttaattcagtaattagaggcggggtttcatggaaaattgacaatgatgcccctctgagcacctgctatttacacggccatacgacatgtttaagagcaattgctgatttgcttcaatatttagctgatgtgaagaagaaagaagactcgtgtagtctcgaattgtgtaaggtaatgaactaatgattgcatcgatttgtaaagtcagaaagaaagatgatcttttgtctttgatttatattggtcctttaaggatatgataccaaagaaaggataggctttgaccatgctgtgtaaaagaaagcttcatttgaagtttgcatttggcactgatacttaaacatagttcttatatcagatggattacatactccacattgcacatttgacttcgactaaagatctgaatcagatttgaaggaaaaaagagtggtattgaataggcacaagagttccaactagtgaaatctcataaaatcaaatctaacaatgttcccatatggaggtgatataaaacacctgaggtttaaattacatacgggagatcagaagagggacagaagcaggagcttcctcttccatctcatgttcgagctctccatagcgctcaagcacacgcatcctgcagtcttcagctgccagcactccggttgaataagcaccgtgcactgatcccgggtagcttgagctagtggcttccccgcaaagaatagattatccaatggcactctcagtctctcatagaggtcgtgaggtttgtcacaatgtcatagctatatgatccaatgaattgatgtctgatcccaccttgatacaaataatt

SEQ ID NO: 6831 - DNA, 737 bp, Arabidopsis thaliana
gatcaaaattttcgcaggtgagatctgaagcaaagaaggttcacaatctgttctttgatctattaaagatgtctttcccagacacagatttccgggaagcaaggaatgctctttccttttctggctcagccccaactttggtgtctacaccaaccccaagaggagcaggaattagccaaggcaagaggcaaaagttagtaaacgagccggaaaccgagccaagctctcctcagagatctcaacaacgtgagaactcaaggatcagagtacagataccgcagaaagaaacaaagcttggggggacaacaagccacactgatgaatccccaatattagctcatccaggggaattagtaatctgcaagaaaaagaggaaagaccgagagaagtctggtccgaaaacccgaactggtggctccagcagcccagtttcaccacctccagcaatgattggtcgtggtcttagaagtcctgtgtctggtggagttcaagggaaacaaggctagcacaacagcagcggtggcaaaccaacccactcatccaaacaacagcggtgcggccggtgatctgtgggatgggcaaatccggtgaagaggttaaggacagattctggtaaaagacggcctagccatttatagagggacccttgttggttcatgagaggattaaggctcttttgcttatatcaatgtgaaacaatttacagtgaactgtgacttagtaacaaataatctgta

SEQ ID NO: 6832 - DNA, 940 bp, Arabidopsis thaliana
gggaaagagcccgagaacggaagaaagtgaacctcctggataccagctcgtgcctacagaaaacggttgaccataagcgccaaagaaataaacagaaaacaaaggaagcttaataaatcttagaatgcagttcagtgaaaccaaatacatctttaggatctgccagcatcccgactatagcagcatctatagcatcttggttctctagtctggaggctcgagctgccatcaggacaacagtatctgcatccactcctttcatgaaaacttcaatcagatttttgtcaacagtaagtttattcaatgtcaaagtgcccgtcttgtcactgcaaagaacgtccatgccagccatttcctcaatcgccgtcattctcttagtgatagctccctgctgagatagtctgtgggagccaattgccatggtcacagacagaactgtaggcatggcaattggaattccaccaatgagaagcacaagaaggttatcaatcccagggcggtatgctcggtgttgaatagggtacatcacgacaatctcaatgagcatccccacagcaatagagcagatgcaaaagttcccaattgcagttaaaacctgtgcacatgtttgaataaattcaaaaataatattggtttgttccagttgaacaaagtccatgatagttgaagcgagttcaaaaatgagaatgtgggtgtgttaaacaagaatcgctagtaaagggaatgaaataacacatacctgttggaaatgaccaatttggtttgtcgtatcaacaaggtgagcagcctttccaaaaaaggtatggacgccagttgcgataacaactgcttcgatctctccttgtttgcatgtagaaccggaatagacaccatctccagaacttttggttactggtagagattcaccagtaagagcagactacacagcaatttcttaaaa

SEQ ID NO: 6833 - DNA, 705 bp, Arabidopsis thaliana
cctttcaatattttgttgcttctacttgatctggattctgctgattttgtgggtttgcttattactaacttatcgcattttttatatttagttttctcctttattggcattcttgctttgttttgccgttagaggggggttgtgttactttgcgggtttctctagtttctattctcagaaagcatttctttgctagatttctgtggttggggggaactttttagttaggtaaattttgcatgttttggccaaagtttagttctttgtgttgtcagtcactgtcaaggagcttgtaattatttttttggatatttggtttatcgcattctggttgactcttgtggcatcatgtttcttttgttactgtcccaatttcactcttcctttttgtatgcaagtatgtgactttaagctccttcaagaaagtttcctgattttggtgtttttgctcataactggatggtttgtttatgggacattgttaagtaggaagttaagcccctgtttggcgagtgccctttgttggggttttaaagacaaatttttgaatgtaacaggttggatgtctatatccatgattatctggttaaaagagatttgaaagctacagctcaggctttccaagctgaaggaaaagtgtcatcggattcagttggtaagaaacacaatcttctgaagctttttggctactattctttataaaga

SEQ ID NO: 6834 - DNA, 604 bp, Arabidopsis thaliana
tatgttgatggaaatttaaaactaatcctaaaaactatattatacgttttttagtgatgtaagaagtgagttatattatacacaggatcaatatataattgatacatacctgaagaacaaagaacgacgcccatgagagggaagcgaggagtaggaagacggcagccttaagatagtcagccgtcggggcgaagaggcggccgtgaggtgagaccggaagaaattaatgaaaggacctttgtagaatatcatcaatatggatccaaccactgtcactaacgtccccatcacttttaccaggcatcttacttttctcatctccactttctccatcctttaaaacaaatatttacataaaacacacacatcaatattcataatttatgacatcgatcgtcatacactaattgtactactatacatctacttttgaattggtgcatatccacgtaccaaaatataataaaacgtatcgtgtttctttggttaaatgaatatatgtaaataataacaaagttgctttttgtatgtacctgaaaagtgtgcaaggataatggtattgcagcacgatgttgctacggcggggaaacgttggtgatgtgag

SEQ ID NO: 6835 - DNA, 533 bp, Arabidopsis thaliana
cagaatccgagtgggagagaaaagaaacccttccaccttcgaattggcccttccatggcaatgtacatctcgaagacctcaaggtgagtcaaagaaaccaaaacagccttgtgttaaaactcacctttactgttcaaacttgtgaaggatgatgtgtgttgtaaacaacaggtgcgctacagaccgaacactccacttgtgctcaaggggatcactcttgacatcaaaggaggagagaaggttggtgtggttggacggacgggaagcgggaaatcgacattgatccaagtcttgttcaggcttgtagaaccatcaggagggaagataatcatagacgggattgatataagcactctagggctacatgatctcaggtcaagattcggaatcattccgcaagaacctgtcctctttgaaggaaccgtgagaagcaacatcgacccgacagagcaatactctgacgaagaaatctggaaggtgatgataaacatgttttgcccttgatcttctaagctaaaaccatttgttcatat

SEQ ID NO: 6836 - DNA, 520 bp, Arabidopsis thaliana
acgcagcaacgtgcagcttgtggtttaggcttggttatattgcagatgacttgccagctggcgatagcgtaggttgtggcttggagaccgctagggtcagggaacggggtcgcgtccacccgaataggtggtccgcatttgtacgtcggattcactataccatcaatcttccagtttcgaggaggaaagaatgctgttctgttctgatcaggtggtaccttgtaaacctaaaccaaacatcaaaaccggtttagttgtctttagacctaaatttagtcaccaaacactataaatggtaagttttgggggaaaacctgtaactggaaaatggctttggatttagaaggatccatgtgagtgggcaaaagagtgccattcttgcagcagaaaggcaatttaccggtgacattatcgtctttacgctcagctggtaaatctttgattattggtttcttctggcaattagcaacctgagagaaatcaagatccccgtagaactgtcccgccttgctgcttaagc

SEQ ID NO: 6837 - DNA, 539 bp, Arabidopsis thaliana
aattgatctttttgttatttgtgaaagtggcatgatgaaataaaggacgaaccgcgtaggcagaagcgagaaggttcatgtcaaaaccgatgttcaaagcagaaggattgtgttccattacgaaggctagggctaaagactgtaacgttcccatgaaacacaccattgttgacattgagagatgggctgagtatttcttcaaagtcgcagcctatttaacaaaatataaaagcctaattcgttaaatctatatttttatatattacgaaaacagtgaaaaaaaattccaatcatattattattttagatatagttaacccaattatttttttaaaaattatataacatgaaaaattagaaacaacatcccagtaacattattaatactatatctaaaatttcaaattttttatattacttttacgtacccctacatggtttggtgcataaactatattttcctatgttgatggaaatttgaactaatcctaaaaactatattatacgttttttagtgatgcacgaagtgagttatatta

SEQ ID NO: 6838 - DNA, 822 bp, Arabidopsis thaliana
cttccttctttgtaaagtaagagcccagcaatagtatgataaaataagctattgagcctaataacgataagcccaattaaggcccgtatacatgttattatctcaggcccatacataattacaaaaaaagttagggacgtaagaacaaataaaaatgagaaattatctggaaaagctgaatcaaatgtacagacacatgagactgagaatctaactttaggcttctctaattatgattcatcagagactttaattaattaggtttcaaatttctaataaagaagaagagtcaaagtgattaaattaaatggtcacagcttttatttattaagctctgtttcatttctgctgcgggagagagaaagagagagagacaatgccgttggtgaggttcaagatacggaacgagctaagcttaggtgggccggagattcaacgtagcgcctccgtggaagatgaggaacctaaggcgattctcggcgctgttgaagtagctggactcatcggtattcttcgtcagttaggcgatctcgctgagtatgttctcgttttcgactgttgcatacatacagaagattgaaattttgatacttgtagctgattttgtaggttttgaagttgtttcgtgtgattaggatgagttttagctcatcaattttatctttagtttgagtattaggggtttcagtaacatgctatataatgtgattttcttcaaggcttagggcttttcgcaaaagttttgatatttgagcttagttcgtagacttagtaacgaattaattggcctcgagtcagtgtaagtcctagtcattgaatgat

SEQ ID NO: 6839 - DNA, 611 bp, Arabidopsis thaliana
ctctagaggacagtgtgctctaaaggcccgcgattatcgctgcctggcagcgggagatattgatggtgcttatgtctgggcaccggcggttaacgccctggaaaaagacggcaaggtgttgaccgattctgaacaggtcgggcagtggggcgcgccaacgctggacgtctgggtggtgcgcaaagattttgccgagaaacatcctgaggtcgtgaaagcgttcgctaaaagcgccatcgatgctcagcaaccgtacattgctaacccagacgtgtggctgaaacagccggaaaacatcagcaaactggcgcgtttaagcggcgtgcctgaaggtgacgttccggggctggtgaaggggaatacctatctgacgccgcagcaacaaacggcagaactgaccggaccggtgaacaaagcgatcatcgacaccgcgcagtttttgaaagagcagggcaaggtcccggctgtagcgaatgattacagccagtacgttacctcgcgcttcgtgcaataaaaggaggcgcagatgctgcaaatctctcatctttacgccgattatggcggcaaaccggcactggaagatatcaacctgacgctggaaagcgctttag

SEQ ID NO: 6840 - DNA, 1277 bp, Arabidopsis thaliana
  unsure (1)..(1277): unsure at all n locations
agtcgtattatcatcatttatgactacgaaatgactgacttgtaagtcgttatcgcctgttttcttgtagtgtcaaggattgatttggatatagttccatagatccacatcttgaccaatccatcatgttgtttccacactttgtcagtgtcattggtagagacagaagtaccatcaaggtggccaaggactccaaaattggtacaatgagtttcgaataactccctccaagcttggtagttaaacttattcatatcaagagtgataggaatataggctaaagggtttttcgtttgaggaggaaggtgtaggagtcctattgaaatggatgagaagagaattgaggatgtatgaagaagaatagaaagatgaatgaaagcggagataggatcgatcgctttagcttggtggctatgtcaagcgtctaataccatgtaagaatgtagaactccatcgagaactctattcatgagacaatgcttatatatctttacaagatgattggtctccaagactctatgcatattctccaagtctatacatatttgatattgtcgatatatagaaatattctatatttttatattctaagatattatttcgtatctgaatgatattatctaatactccccctaattctaagtgggagatggtcggacgcttagactggttctaaaatcaacaaacaaggatgatgggagacccttagtgaacacatcatcaaactattgtgcagacgggacatgaagaacacgaacatgaccaattgcaacattcttacgaagaaaatgtatatcaatttccatgtgtttggttcgttgatgttgaactcgatttgatgataggtaaatggcagaaatgttatcacaataatcaatggttgcacgaggtagcaggatcttcatctccaataatagagtttgcagccatgtagtctctgagacggcgttggcgactcctctatattcagcttcagcacttgagcgagagatggtaacttgtcgcttggaagaccatgagataaggttgtctccaagaaaaacacaataaccagaagtcgaacgtctcgtaaagggaaaaccgcccagtcagcatcagagtaagcaattagaccactagtcgtggagcgataaatatgaagaccatgtttgatggtgcctttaaggtacacagaatacggttcagtgccagaaattgagnagcacgcggataatggatgaataggcgatatctgatgacagagcgcaatattaggacggatgaatgttagatattgt

SEQ ID NO: 6841 - DNA, 522 bp, Arabidopsis thaliana
cttcacgatggtgacagagaccatgataccaatcatccatttctcctctgtgctattcatatgaataccactctgtaacaaaaaacagaattggttaaatacattaattaaccgatgaaagcagttacctgaaaatatgtaaagtaccttggcaactagttgccttcctgactctagcaaaacttgcagtccaagagttgccatcacggaagcaaacacaatgataccctgtaaatttacattatcagttctattttcttgtgagacaagtaagttccaaacaaaggggttaagagatcaaaacagaagaagcataccacaggttgcatccggcgctttccgataggatagtgaaactggtttggttttctcatggcattagctgtaaaccagaggataaaaccagacaagagatccaaaagagagtccaaagttgaagcaatcacagccatggatctactctccatagaggcataaacttttgctacaaaaagcaccaaatttgttgcgttcgatatgtga

SEQ ID NO: 6842 - DNA, 644 bp, Arabidopsis thaliana
  unsure (1)..(644): unsure at all n locations
tgagttacagatacaagttatttagaagcgcctaatctcctttggtggtttgaaattgataggatgagtttctggagttgcattctcatcttctttccacatctttatcgtcttatcagcctcgcatgttactaatcttgaacctgtattatcataacacgctgcatatatacccgcttcactctccagggaacctgccatatgcccaaccacatccaattaaagacccatttactatttgcttgtaagacgacgctataggcatttacataaaccataaacctacgtcaactttcttggtttccctagagctcaatcatagtatcatacacttctaacatttgagtctttaccagggttcaaacttgactacgttgtatgaacataccgagacttctacatcttaccataacaaggagatcaggagcaaaagaccatgaaagctataaatgtacgtaccaggctgtacgatagtttctgactgttggaaactgtgaccactcttccagtcccagaaccatatacttccattatcacttcatcacacatatatagaatcagtttcagttgaaaatgattatgtncacccattttactatcaaaggaaacaatcacagggacgaaaggaatcagaaatgattata

SEQ ID NO: 6843 - DNA, 1113 bp, Arabidopsis thaliana
tcaagccacgtgtaaacgccgccggattatagtgaacagtctcagtagcgagttgagaaagatcgtcttcttgaacattagacatcataacttcaagctgctcgagtttctgagcaacatcagccatttcggatgacctaaccttgtaaccaagaacagctagaagctcatccatgccgttaccgtcgtcttcttcattcatcatcatagtcttcttatcttgatgatgatgatgatgatgatctctcttcatggttggttttttttcagagatggatctaaaaggtttttccttcaatgtcggatctaggttttgctttatttgggaaggtgaagaatctttagcttcggggatcggttaggactgcttaggatttgttttttcactccactaccacttctaataacaaaataaattgtaaaaatagagaggaaggttataagaaaaaaaatgattattattgttgagaataaaaaggctcgtgatggggctcgatgtccgatgaatcatggatcagagggctaacagcaacatctacagctcaaagagataaggctgaaaatcacacacacaccaaaatttgtaattagggaatatattgaaattaataaactaatatattagggaatatatagctttttacagattaatattttctaaagttagtattactttagagtttagatggtcatacaattttgaacaactaaaaagattgtcatgcaactagtggtacaatttactttttgtcgcttttttaaggagtttgttgtgttggttttgtgtgattgtaacttttgatctaaaatacagatattttttattaaaaagtttaagtatttagtatagtcttattaaataaaatggaacttttgtattgggaaaagtaaaccatcattaaacccattatggaaattaatattccattttattaaaaagagattgagggactatgacgttttcccgttttagttttaaattgttaaaaaatttaaattgaatataagaaaaagctccttttctaacattttttataagatctttaaaaaaaaaattaaaccttattagtatttatctgtaagagtggataagaactagtaacattttcatta

SEQ ID NO: 6844 - DNA, 536 bp, Arabidopsis thaliana
tcatgttatctttctttttggagcagttctctacagagagacataattaacgcagtggctgtgaatgaggatggcgtaatggtcactggaggtattattttcattttcaaatcactctttgatacgggacgaaatactgatacttgtattcacatttcctccacatacaatatcacccgatttcattatttgaactaaaatgtccccgtctttgtgcaactgaaggtgataaaggtggcttatggttctgggactggaagagtggtcacaatttccaacgggcagaaactattgtacagcctggtatcttctgaacctatttcttgatcctttacccttgcgttgcttgaatggttaaaatatttaagtcttaaaggtttatgattattggttcgaaggaacaaaggaagctctcaattttcaagaagtgatagagttttttactctctagaattgctgcaagtagtaaatgtgtcttatctcatatgtgtcttatctcatttacatggttaggtcgctggagagtgaacaggtat

SEQ ID NO: 6845 - DNA, 574 bp, Arabidopsis thaliana columbia
aaaaacactttgatgttggtggtttttttacatgatttctaccttgttgaatgtggttggagcttcttgcaagagaaaagataaaattcgagaaattcagcggaacaaagtgcaggagggaattattagtggtgacattagcactggaaaaagattgagagccttctcttcaaaagcctggaaatactcgttggaattctcatcataaaacgttattgcgtatggttgagttgtttccttctatcattgaagttcttgagtatatccaagatgaaggagtcgatgactcaaaaagacgtcaagcgtttggtcttctcaagtactttcatacatttgattgtgtattctatatgcaattaatgttagtcatcttgagactgaccaaaaatttatcgatggctttgcaaaggaaggatcaagatattttgaataccatgtcacttgttgaatcaactaagcagtaattacagaagctacgtgatgatggatatgactcattttttattgatgtttcgccttttgtgagaacatattgttgactgctaaagatggaagaagctttgttgatcgagga

SEQ ID NO: 6846 - DNA, 755 bp, Arabidopsis thaliana
tctatcaacctctctatttccatacgataatcttcaggaaacagagagcaataaaggaaacaaggtttcaactgcaccttgtataaataatcatagctatactttagaataggaagaatttataccataccagggaattctgcagcatatgagctcaaaacgtcaattgcgttacgccattcttgtaccatccttttgcatgccatggtctcgccaatgacattaagtgccaatggtaggccacaacattttccagcaacttttcttgcaagttcaggaatgtctggatggcctttcaatgtgttttctccaactttcatttggaacaattcccaggcttcgttgggttctaggcaactgacttccatcgggtcatcaacccgcatacgcccacaaacatctctagaacgagtggtgaatactactttgcatccattttgtctgcttggataagggactccaagcacttctaaattcactttctcccatatatcatccaacaacaacacaaatttttgtttcccaaggacattgtatatgtcaagggctctctggttttcatttacattatcccactcttcgcctccaaggtctagtctcttcccgatgtctccttgaatcctatggatatctggactcttagacaccaccacccatatcacaaccccaaacccgctacatttttcagaaaacttgttgttgattcgtgtgagaagggtggttttgcctactccacccatgccataaagacccac

SEQ ID NO: 6847 - DNA, 560 bp, Arabidopsis thaliana
acactctagctataattaataaacggaaagtgaattcttcttgcatggtaattgaaatgagaactttgtaatttatgatgagatattgtcctattgagataaaactcggttccactatgtatgtagggttgaaataggttgataagaaaaagagaaactatagggttaataaatacgctttttttttttacgtatatccagcaatagaactaaagtaattcattttgattgatatgtacatgtaaacttccaacattgagagatattaaagacaagaaacaacgtagaaagaagagagagagcgagtgagagatgggaagaggcaaagtggaagtgaagagaattgagaacaagatcactagacaagtaaccttctccaaaagaaaaagtggtttgctcaagaaagcctacgaactctctgttctttgtgatgcagaggtttctctcataatcttctccaccggtggcaagctctacgagttcagcaatgtcgggtacgtatatccattcattcaagatcattaattcggtttcctaatgatgaaacctaggtttcatgg

SEQ ID NO: 6848 - DNA, 937 bp, Arabidopsis thaliana
atccaccaactaaatgaagaacaatgcaagcgttggcgaaatcgacgagccagaatggtcatagaagccgaaaccggtcaagagatttcccggggtggaatctccaaaggccgcgtacccaaaacatccacaacagaagaagaagaatgtttggatgaataccgcaaccgtcgaggctttcttcatcgtttgcttctctgccggtggtgatctcaatgtgtcctgtccttaattttcatttaacacacgtaaaaaaaaggtttcttgatctctaagagtagtgctatttaatgtgttaattaatcttacttggcgtcattatgcatgaaggtaaaattatttacctgaatctcaagaagtatgattgagaaaggatatgaaaaggcaatgttcccaagagcttggaacactatccataccttttcacctctgttttctgctggtatccccttatacttccctcaatttttcgattctcttcatttcaaaaacaaagttatttgattgtcttcccccatctcaaaataattttatactcaaaatcaaaattgacaaagaaaaagtaatatctatacctatgattttgccaagggcgaggccgatgccaatgaacgagtaagtaaaagacataatagcggcgacaagagagagccataccatgttgtggaaattaggtatttgtgacataaatatctgagtcaaaccaaacaaaaccatgaagtagttgttgttgtctccatatgaacatgttgcattgtgtccatttctatgataacaattcgatttcataattgctctgtaatgaaatgaaaaacaaaaaactctacgtatcaatattggaaaataaaaaattcctaggaaatagaacaacagttgaaatatgtttacatatgttattacctactgcatgtagctataacaatggtataagcaatgc

SEQ ID NO: 6849 - DNA, 655 bp, Arabidopsis thaliana
ccattaaaaataaattcaccgaataagtccctattacacgctaatgttgaaggaatgtttcaagctacccacatggagaagatgatgacccaaagcgagtttcctctttccgatctcatcaactacacccagatccttacacacatcgaccttaaacctaaccaccgtctcttccttctttcctaaacgaatcttctcgaaccctagaagttgcttcctcggcgatccgtgtacctccggcggcgtcgtgaacagaaacactgtctcagtcccctctctgtctccgacattccttaccttcaattgaacctcaaaatccgatctttcaccgacggctttctcgcagtgtggtccgatcgcgtccaaagattgacactccggcgatcgacaggattggctctcgtcaagattgagagagacgaacttcggagctttaataagctggtgactgaaattagtgtaactgagcccatctccgaaggcgtaaacggtttctccgatgtaaaatctgtaagtccgacccagatacccgtttgatttgtcgggtctcatgttcatattcgtcatcggaactttctccacgtatgactgaggataccacgtcatcggtaatttccgcctaaccaataaaaaaatcgccggttatgaaaatgac

SEQ ID NO: 6850 - DNA, 1076 bp, Arabidopsis thaliana
tggtttgtagcaaccttattgatcactcccttctacttcgaaacatggttggtcccagagacaagatcctgcaatgactctatgaaattatcgacataaccggtcacaagtccaggactagttagtgtctccctccacttggtgtgattcttcttcaccagattcccgatctcactgtcccttttcatcacactattgatagcatcgaacaagctctctttcgagaaccatcctgtttcctctcttgccacttcaaccgaaaccttgagttcgtcactcagcaatcttgtgttcaggacttgatcacccaactgtggtactaagactatctgacaatcactcagcaaagactcccacattgatccaaacccacaatggctcacaaagcacccgactgatggatgagacaatatcaatggttgttgaacccatcctccccaaacaaggcctcttcctttaacccgctcttcgaatccttcaggaagtgcttcttgaatcgttgatgagcctctagggggcttaaccgctacaagaaacggtgaacctgttagctccattcctaagcagagttcttggaattgatctttctctaaaatgacttgtgagcccagtgcacaaaacaccactgagtctggttcatacccacttagccacttaacccatcgttcctctagctctctagtcttgtctggctcagggaacaccggacctgtcaagagaacctttttcctgcaatgttttacgataaagtcgcgaaagtttccttccattacgctagctgtccttatcccaatgacatcagagttcataagacttgtagtgagtccttccgatacgtttagtccggcattgattgtatttgtagactccagattcttcatggtgtaagcatcttgtttacgaagcagcaccttcgatgtaggatatcccggcggaggaacacctaactcaccacctggaacaagcatactagctatcgtcgatgcagataccacgacgtactttacagtcttaaggccgaagtctctagctacctctggagatcccatgagcgaagtcaaagaggatcaggtccg

SEQ ID NO: 6851 - DNA, 1079 bp, Arabidopsis thaliana
gtttttgaaaaaattcgttaattttgcagatgatcgatgtgtattggacagtgatacctgtaatgctggttcattacttcgcttcgcatccattgtcacagtacaataagctgagatccatgattgtcataactctgacatggatttggagcattaggttgactcataactacttccggcgggaaaattgggaatggggagctagagaagactggaggttcaacgacttacggaaacagtacgggaaacactggtggtggctctccttcttctctgtctacgtttctcagcaggtacatgaccaccaactgttcgatgaattgcctcaaagagctcgtttttaatctaagcttgcctttatgaggatgatttggagaacaggatagtcttttggttataagggcttgaaccattgttacctttatatatatttgatgcttagcttatatgctttctgtttctcatgttgcttctttttccaaaatttgctcagatcttcctcattgggatatgtctgcctttatatgtcatccattccattgatgagccactaaacatctgggacttcatttcctcggctatctgtttgaccggaatcgtcatggcgtacttcgcagacacacagcttcacgagtttgtaaccggaaaccaaaagctcaaggagcaaggaaagcccaaaatccccaatctggactcgggtttgtggcgttactcaagacatcctaattacttgggagagcaattgtggtggtggggattggtcatatttgcttggaaccttggtcaagggtggactttgattggtgcattggtcaatactctgtgtctggtctatgtaacgatccttgtcgagcgtcggatggtgaaacaacaatacagagctgaagcttatagagcatatcagaagacaacttcggtgtggattccatggttcaaatctcatgctgctgctactaaagacaagaacacttgaagaagctgtgattagtttgtttcaaactttcaatagggttactagagatccttaattgtgtattattatgagcattgtttgttgtttcttcctctgattttgtttc

SEQ ID NO: 6852 - DNA, 867 bp, Arabidopsis thaliana
caacatcatatcagtaattctatagctcatactttgtcccacgtgtgaacttggagtcctccacctgttatccttcctcaaagttgttgtaccgcaaacacgatcgtcacgccttgttgtccttctccgtctactacaagaggttttctcatcggctcatcacaggtcttatgaattgtgatttcatttcgataaggacatgcaaagaaatcgagggtaaattctgcgagtatcttgagcgtcaataccataaaaaggttttcttgacgggtccaatgcttcctgagccaaacaaaggtaaaccactggaagatcgatggagtcattggctgaacgggtttgaacaaggctctgtagtgttctgtgcattgggaagtcaagtcactctagagaaggaccagttccaagaactttgtttaggaatagagcttacaggtttaccgttttttgtagctgtaacaccaccaaaaggcgcaaagacgattcaagatgcgttaccagaagggttcgaggagagggtgaaagatcgtggagtggttttgggagaatgggtgcaacaaccgttattattggctcatccatcagtaggctgcttcttgagtcattgcggattcgggtcaatgtgggaatctataatgagtgattgccaaatagttttgcttccatttttggctgatcaagttctcaacacaagattgatgaccgaagaactcaaggtttcggttgaagtgcaaagagaagaaacaggatggttctcgaaggagagcttgagtgttgctacacatctgtgatggccaagctagtgagatcgggaatctggtgagaaggaccattccaaattgaaggagggttctggtagtgatggat

SEQ ID NO: 6853 - DNA, 565 bp, Arabidopsis thaliana
atagagatgattataaactaaaacagagtatagagatggacaagaaaatagttaccggagataaggttttcatgattttaattgtgattgaaaattcaaggaaatacaaagcatcaccaaaagaacaaaaggtcgagaatttaactctcccttgaaaagatagactactacatgtgaattagaaaaattcaaaagaactaaggctgaaactaaatcagccattattgtaattgaaaacacaattttgaaaaacatgttgagatgaaacaactacatctttgcacaatctgttggcttaaatgacaccgttttggaaacagtgtcgtatccaacaagaaagttcatctgcgccacattaccgtatatggagaaactcgggcttccgcggaaggcaaagcaaaccaaatcctccgagacttgtacaaaggcattggaggagtcaagcttcacatcggctccatcaaaatgcatagtaatgactggaacttttagatctccggttgcactgtaacatagactcaaaccgctttgtggatcttgcttcttctcagcatcgatagaggat

SEQ ID NO: 6854 - DNA, 833 bp, Arabidopsis thaliana
tgactacttttatcttttttgtattctgcttttttcggaaactaaagaaaaaaatgggccaaaagattcacgcttttatgttcccctggtttgcttttggtcatatgactccgtacttgcatctaggcaacaagttagccgagaaaggtcatagggttactttcttgctacctaagaaagctcagaaacaattggaacatcagaatctatttccacacggtatcgtctttcatcctcttgttattcctcatgttgatggcctccctgctggtgccgagacagcctcggatatccccatctcgttggtgaagttcttgtctatagccatggatcttacacgcgatcagatcgaagccgcgattggtgccttgagaccggacctaatcttgttcgatttagctcactgggttccggaaatggctaaagcgcttaaagtcaagagtatgttgtataacgtgatgtcacgtagactcgatgagcaatcgacctagtgcccagtgtgagtgaacttagagttgctccacctggttatccttcatcaaaggcgttgtaccgcgaacatcactgtcacgcgcttttaaccttctccggcttctacaagaggttttatcaccggttcaccacaggtcttatgaattgcgatttcatttcgattcggacatgtgaagaaatcgaaggtaaattttgtgactatattgagagtcaatacaagaagaaggttcttttaaccggtccaatgcttcccgagcctgacaagagtaaaccacttgaagatcaatggagtcattggctgagtgggtttggacaaggctctgtagtgttctgtgcattgg

SEQ ID NO: 6855 - DNA, 562 bp, Arabidopsis thaliana
ctcctcactaaatatctcaattcacctaaccagtctccaagttcatataaggttgtttcagtgacgaagaaaaacagagagaaaaaagcagatacttctttttgtgttcttgaattacttctttacttttgtgttttcacaatttgagaaacgaaatggagccaaagtttcatgcttttatgtttccatggtttgcttttggtcatatgattccatttctacatcttgcaaacaaactagctgaaaaaggtcaccgagttactttcttgctacctaagaaagcacaaaaacagttggaacatcacaacttgttcccagacagtattgtctttcaccctctcacagttcctcctgtcaatggcctccctgctggtgccgagacaacctcggatatccccatctcgttggacaacctcttgtccaaagccttggatctcactcgcgatcaggttgaagctgcggttcgtgctttgagacctgacttgatctttttcgattttgctcaatggattccagatatggctaaagaacatatgatcaagagtgtgagttacatcattgt

SEQ ID NO: 6856 - DNA, 777 bp, Arabidopsis thaliana
caaacatatgaagaggcaatggaagtcaaggaatggagggatgcgatacgcgatgagataaacgctatgaaacgaaatcatacttgggatgaagatgacttacctaaaggaaagaaaacagtgagctcaaggtgggtattcacaatcaagtataagagtaatggagatatcgagagatataaaactcgcttggtggctcgggggttcacgcaaacatatggctccgactacatggagacttttgctccggtggctaagctacacacggtgagagtggttcttgccttagcaacaaatttatcatggggactatggcaaatggatgtcaagaatgcatttctccaaggcgaacttgaagatgatgtgtatatgacgcctccacccggtctagaagataccattccatgtgataaagtgttgagactacgcaaagctatctatggtcttaaacaatctccacgtgcatggtaccacaagctcagccgaactcttaaagatcatggattcaagaagtccgagtccgatcacactttgtttacattacaaagtcctcaaggtattgtcgttgttctcatctatgttgatgatcttatcatcaccggagacaacaaagacggtatagactctaccaagacttttcttaaatcttgttttgatattaaagatcttggtgaactcaaatacttcctaggaattgaagtgtgtcgctctaatgctggactctttctatcacaacgcaaatacactcttgacttgttgaatgagacaggttttatg

SEQ ID NO: 6857 - DNA, 746 bp, Arabidopsis thaliana
tatgcatggttccagacgcgattcctttagcgatttgaaaacgcgcgttccacgacaaaacggctccgcttcttctcggtttactgtaaagcagcgagtccaagcttccgttgggaatataatcgtagatcaacaagagatcgtttctgtgtttacaccatccttggaggttcaccagattcttatgccttaatctccccaaactctcaatctccgcgacaaattctcgaacaccttgcatgctatttggggttatcttcttcactgcgatttgatcagacgatgatctgatgtgtcctctgtaaacaattccgaatcctccggttccgacaaccctattctccttgaatccctcagtagccttgtagaggtctctgtatcgaaatctgtgaggatgatcgatttcccaatcttctagaatctcttcttgctgcattcgttttttgtacatcatgaagaggaacagcaacaccaacatgatcgatataacagtcgataaagccacgataagagcgatgaccttaccattgtaacctctcttcttcgccttattcggaggcggaggaggaagttgggagatgtcgagcatagctgcaagtggatgttctccaccgcttgcgaaactccaacccatgacgtaatgagcactcgattgtccgtgtctcccagtcgctgctgtgaatccgacgaacatttcgtctacgacaatatctgacagttttggaacctctcgtgagatcaagggg

SEQ ID NO: 6858 - DNA, 482 bp, Arabidopsis thaliana
atctcttgttaatttatgattatatccctaacggaagcttagactcgctgctctacagtagaccaagacagagcggtgttgttttgtcgtggaacgcacgttttaagattgctaaaggaatcgcgtctggtttgttgtatctccatgaagaatgggaaaaggtttgtgattcacagagacataaaacctagcaacgttttgattgaggacgatatgaatcctaggttgggagattttggactcgcgaggctttacgaacgcggatcgcaatcgaacacgaccgtagtcgtgggcacaattgggtacatggcaccagagctagcacgcaacggcaaatcttcgtctgcgtctgatgtttttgcgtctggcgttttgttattagagatagtctccgggagaagaccgactgactcaagggacattcttcttggccgattgggttatggaattgcacgcgagaggagagattcccatgcggtgga

SEQ ID NO: 6859 - DNA, 2087 bp, Arabidopsis thaliana
agtgaatgtgctttatccactactgactgatacgagaagtcgaagaaactctggtgattgaggtcgacgaaacatatcctaccaacttggatccgaattcgcttcttgaagactttgaatatccccactcatcgtcaatctcaggtacattctcctctccgtttagatacctaagcacgattctcatcgacggccgagacgccggtttttggtggcaacagagcaatccgacggcgagacaagccttgcttctcctccgtcgtaaccagatcctagtctcggatcaatcgcactgagaatctcaccgttcgcgtgaagctccataacccaatcgaccaagaagaaggtaccggaatccgttggttttctcccgcaaacgatctctaacaacaaaacgccaaacgcgaaaacatcagacgcagatgaggggtttccgttgcgggaaagctctggcgccatgtacccgatggttccaacgagtgctgttgtttccgatagcgttccgcgttcgtaaagcctcgcgagtccaaaatctcccaatctagggttcatctttgaatcgatcaagacattgctaggtttcacgtctctatgaatcacaatcttctcccattcttcgtgaagatacaataaaccagacgcgattcctttagcgatctgaaaacgagcgttccacgacaaaacggcgccgcttcttctcggtacagtgtagagcagagagtctaagcttccgttggggatgtaatcgtaaatcaacaagagatcgtttttgtgtttgcaccatccttggaggttcaccagattcttatgccttagtttccccaaactctcgatctctgcgacaaattctcgaacaccttgcctgctacttggaattatcttcttcactgcgatgggatccgaattcggcagttttcctttgaaaacggttccaaatcctccggttccgatgattccagtctttttgaatccatccgtggctacgtagaggtctctgtatctcaatctgcgaggatgatcgatttcccagtcttcaagagtctcttcttgtcccagtctcttcttgtacatgacgaagaagaagagtaacacaagcatgaccagcattactgccgataacgccacgatcataacaatgacttgagaatttaaaccttccttcttcgccttattcggcggcggcggaggaagctccgagaggattagaacatccgcaattggacgttctccgccgcttgagaaactccaacccatcacgtaatgagcacttgactgacctttccccgtcgatgccgtgaatccgacgtacatttcttcttgcacaatctccaacagttttgggaacatgttgagagatcaaaggctttgtgggtttaaaccctaatctcgcgggataaacggtgacgtttagcatttgtgttgctccatcatactccaaaagggcttgaataggattgccactctcaagctggaaatcttcttttgtgttgtgatcatcattgttgtaatacacgactggttcttggagatccgaagtacgactgttgtaattcagaccgatgtcgtttcctattctgtcggtgttgtcgtctcttgatccttgcaccgtgtcgaattccactgcgaatacgtggttcctaggatccccattgttctctttgttgaaaactcccaagtactgtgcggatccagcattgagacgataaggtgttggagatagtgtgaatgtgaatccaaagcctttattgcttgagcttgaagggattatgacaaagacgaaagacgtgctaaaggaacgaattgtgacgtttgtggaatttctattaagcaacctcaccggtttgtggtagaaagctgtaccggtaacattcgactttcggtcagtgagtctcaatagtccgtcgggtttgatcatcgcggctccttcaatccgaatcttcgattggtttccgttaaaacctcggaaagcaaaatttgttgttgttctctgagctcgaacatggacgctcaaaaacaggaaaagcttgaataagaatgagactatgaacatggatctttgtgtgcccatgggtgagcgaagtaaagaa

SEQ ID NO: 6860 - DNA, 1195 bp, Arabidopsis thaliana
catagaagaaatgtgaataataacttaataggaaaaatgaaaaaaatgtgcaggacggtgttctatgggcagtacaagtgcacgggagcaggagcaaactatggagggagggtggcttgggcaagagagctcaccgacgaagaagctaagccttttctttctcttacctttatcgacggctctgaatggatcaaactctaaccatatacacctttttttattttctttccacctaattaataatgtacattttccctttaataaaataaaaataattctccccacatttcatatgcatgcacacctcattccatgactcgacgcccatattgaacaaccgaacattgccgaccaagtcccatcttgcgatacaccacttagatatgtttttgccaaagcatgtaagaattccggtgtagtccaatgtattttgaaacagattggtgtatttattttaattattttcatatgagtttcaaaacgatacaagtcttgttcagacaaactaacctggattttaccttttatgtaataataagttagggttgggggttgtgttttaaaatgacataatttatcagtggtcatttttgtattttccactcccctgaaggctgaaaagtgtgcattttattggtaaaagctgacaaattaatgttcaattatatgtttaattagtaagactgatgatatcaagaagagaaggataatacaaaaacttggaaagtgggtatattataattttaacacttccaacattagcactaaaaaactttatatgtttgtcacaaatgggacccaaaatcagtatgatgtggtaacaatttatgtatcctaatcaatattctaagtgaaggtgacatactgacattaaagtaaaaagattcctccgaagatcaataattgggaacatcaaatccttatcagaaaaacaacagcaaacaaccaactccattgatgattatctaagaagaagccccattgatgtcgaaatcaaaatctctagccttcgtaatcgctgctttatcttactccttcttctccctcttctcttctccaccaaagtctcactaccacgagctcttcatctccacttccttctccgacaacgcttccgtcgctctaaacctccacaccctcacgcgccgccctcatgtagccggtacagtggccaacgctgaagcagcggaatatg

SEQ ID NO: 6861 - DNA, 498 bp, Arabidopsis thaliana columbia
ggagaagtggcttctcacgttatgaccatctatgtatgcaggctaatacttttgtggaacagactaagtttaaaggaggtatgttttctcttgattactaaaaaagcctggtgagtagttccttttatgagatgatctaattatctgtaatcaactttctctcaatacagaggtctatgcggatccaaaccacgcatcatacgaggcgcttgagttcgtttcaggggtttctgttacatttacacccaaagtagagtgacttctacttagcatattataattaggtaaccaaaatgttctgcttttgtggtctcagactctcagtagcttctgtggcattattataggctgctatgaagatactagagtcttacatggaaggataccgccaagactggaaactctcgtttatgaaagatacagttgaaagaggcggctggtaagtttaagagtatatgaatcattcattccttctggttagagatcgatgagattact

SEQ ID NO: 6862 - DNA, 630 bp, Arabidopsis thaliana
tgatcttctttttgttattgcgagttaaatatgaccttcaaaacatcacaaaaatggtcagattgatatggttttgtgattgtaccttttcttgatctcatgcttatgattgttaatcgaacataatttttgatctcctaggctttttttttttttgtgtccgatcaaaatatggttagtcttattctggttgttaattgaatagaaatgtttttttgcaatgtcggtctaaatgtcccaaccattacaattatatgtatacaccttttggttaaatttgcatgcatatatattgatttgaatctaacgattgttaacttgtatcatttaaaaaaaaggtattgtccctgttgattggagtccctgtcgtcggttcgctacttgccttggctggattacttctagctggttcggtgatcggcttaatggttgctttaccactatttctcctcttcagcccggttatagtcccagcggctctaactatcgggcttgcaatgacaggctttttagcctcggggatgttcggtctaaccgggcttagctcaatctcatgggtcatgaactatcttcgtgggacaaggagaactgtgcctgagcaattggagtatgctaagaggagaatggctg

SEQ ID NO: 6863 - DNA, 611 bp, Arabidopsis thaliana
cacttacaataggaatatctatctttcttattttacaaaattctttcggacgtcctaaatcatattttttatattagggacctggattcaacagagaaaatgaatccattcgcagagcaagaagcttgggaggaccatcagattggtaatttctgttttaactcttttctgttaaccagtcattttttaactatccactgatttaagtgactttgtttacttgtatgctaatttaaatgacattgtaatgcaggaaaagcaacattaaaatttggtgcaaagaataagcaagcctcagacgattatcagtaagatctgttgcatattgttcttttattcttattctactgatttcgaatttgtttatctcgtttgagaaatagtccttgccagctcttaaacatggatagtccatgatctggggattctaaatcttaaacatgtttttcgcaggtttgtgtttgaagccaaataaacttcataaaggaatctgtcatggctggtgaaaatgtattattgcgtatgatgtctattaaacctgatgatccttctttcatatgttgagttttagctgattgcttgttttgtctgcagtatgaagatgctatgga

SEQ ID NO: 6864 - DNA, 562 bp, Arabidopsis thaliana
ctcctgagaattaagagagagagagatcaaagaagtcacaaacacacgcataacggtcaaggagatgataaaactgattagctaattgatacaaaccatatgcgataaacctctccgactatattcgagacgtctatcaacgcttgcctccaactctgcttcacctcttccgttttgcccacacaggttgtctcaaaggctatcccgaaatctccggtctgctttctcacatcagatggatccacttcatagaaaacggtcatcacagtttgaccaaactcttccctgcacttcataatattcaccaattcgttgaggcaccaggtcgacgaagcgtaattctttgagagcaagacaatcgcaatctttgatactataattgcatcagagagtacaggaccgatcgagctacctctcttcatcttagtatcaacgaatggaaaaattcctttgcgttcgaactccttctgaatatgactcagaaaacctttgcgtacgtcttccacgcggaacgtcaggaacacgtggtgtgtcgaggttcgtggtggagtagatgaaagag

SEQ ID NO: 6865 - DNA, 682 bp, Arabidopsis thaliana
acattttgctggctatccattgatgagtatttcgaaatcaactctcaaaaaagttattgtgtgatcatgaggacgacgaatgtatggttagttgtaatagtatgggtaacggtggggtggagttcatgcacagggaggttcgttgtggagaagaacaacctccgagtgacttcgccggagtccatcagaggagtctatgaatgtgccctcggaaattttggcgtccctcaatacggcggaagcatgtccggtgcggtggtttatcctaaaactaatcagaaagcttgcaagaactttgacgattttgagatttctttcagatccagagtcgctggattgcccacattcgttcttgtggatcgaggaggtgtctctctcttcctctttgattattttgttacaatgcaaagagaagacttgtcacacaagaatttcataaaaggtgacttgtgagacaaggcacctaatatatatatgttgttgtctcagattgttactttactttgaaggcgtggaatgcgcaacgagctggtgccgcaaccatcttggtggcggataacagacccgagcaactcatcaccatggacgcaccagaggatgagacgtcagatgcagattacctacaaaatatcacaattccttcagcattagtgagcagatctctagggagtgccacaaaacg

SEQ ID NO: 6866 - DNA, 1568 bp, Arabidopsis thaliana
ttctgtagtaccttcttcgcctacctactctctttcccgaatttatttgccggcggtgatcaatcagaacgggattttagcctgagtaatcggtcactgggaagagaatttcgacggtgagagaagatgaagatatttgtgaaaactctcaaggggactcacttcgagatcgaagtaaaacccgaggattcggtatgcgaatttctacagatagtttccttacttgtcaattgagactgttgaattacgtatccgaggaggtttctcgatcgagtttattgttctctcggtagagtcggttttctcaattaagtttctcgatcgagtatttgatttggtcgattttagaggtttctctgttctttcgtgatctgagagctagttcttataagtggaatgtggtaatttggaggtttctaaagagaatttaaacaattcagcaatctttgtctatgggtttgtttggccatcttttttagtaatttcactgcttgtagtgggaatgagctcatttcatttgcatttgaagtgtgtttgttactactatgtttggatccattaaccttctgcttctcctaagtgttttccaattggggaatttacagtctgtcactgaactgagagttgtgcaacaacatttccattttaaaagatttcgtttggattttatacttccatcctgttatcatctcttttttttttgtgaatgcatttctgatagttgtagtcttgtagttgtaactgacatttttatttttcaatgcgcttgactattttcttggacttgtgctggtaatttatctaatttcaggttgttgatgtgaagaagaacatagagagtgtgcagggcgcagatgtgtatcctgctgcaaaacagatgcttattcaccaaggtaaagtgcttaaagatgagacaactattgaggaaaacaaagttgctgagaacagttttattgtcattatgatgaacaaggtacgttttggatctggggaataaataagtaattctgttgttttctgtttagctctttgattacccgattctgatttatgctctctggtgctaaacatgtaatagagtaaacctgcttcagctgcagcatctagtgcatctgctggcacatcgcaggtgagttggttctgttgttatgacatcattataaaggctcagatgctgcaacttgggatttttggaaaaacttcttgcctctgcaactaatgaaacgaaagtgtcaaatgcttctatgtattttcttgtttgttgaatgatctaactttggtgttggtttaggccaagtcgatacctccctcaacatcacagccttcaatttcccctcagactccagcttctgtatcagcgtgagttttcgagacaagtactctctgtttgaaaaattcctagaatctatctgaaaaaactgtggctacattctacaactaatttcaatattttgccccaatttgaaaactgtgcagaccagtggcacctgcaccaacacgtccaccaccacctgcaccgacaccgacacctgcacctgtagctgcaactgaaactgtgactaccctat

SEQ ID NO: 6867 - DNA, 1003 bp, Arabidopsis thaliana
ttcatcattgtttctctagtcatgtcggattcttggtcgtgattccccaaaatagccacccatggaatccccgattcgatcgcaggagcaaatgccatgtccatcgattttgccacgtcacttgtctcgcacaatccatatacattgtctcctgcaatattgtatgtggtgttttaggttttttttttcacgcataaacattttttatacatacactaagttaactaaaatatttgtatagataacaaaacacaattattgtataaaattttgtattatttgaagaatttggtaccagagaagacgatgagatcgggcttctcggaagcgatagttcgctgtaaaaaggaggtagtattgagatcggagcagtaaggaaattctgcaggtgaaacgtctgagcattgcgtctctttgccaaaaccgtagtgcatatctgacacttgcagtatcttgaaccgaccatcagtattaaaccggagctgccttctaccgaagtcgaaggcggaaacgtgacatgtcgaaagacataagtagatcaaagaaacacttagaacagaggatatgacaaacctcctccgagtttcctccattaattcttttaggttagtgactatgaaactggagatgagaaatgataacgagaataatattttattaggtatttatagcaattttaattagattttttccccaaagattatgatagcatcaacaaacttttattctaatggtatattctacaattttatcagtatctaaccattttggcatatgcttttgatttgttcttgacaaatatatatttttgtgattttctgaaacaatataaattcataaatattaatttctagataaaataactatgattttaaaaaaacacttattagatacgacgtggacgagcccaaatagacaaaaacccattttaatgctaatttacacagaccaaagaaacaaaatcagaggaagaaacaacaaacaatgctcataataatacaca

SEQ ID NO: 6868 - DNA, 894 bp, Arabidopsis thaliana
caaaaggcctgctacataccagaaacatgcagcttacggaaactactccaatgctgcatttcaatatcctcttgtggctgcatctcagattgcaactactacttctcctgtgtttgtccaagctccaggagagaagggatttactaactttgctattgatttcatgatgggtggtgtttctgctgctgtgtcaaagactgctgctgctcccattgagcgtgtcaagcttttgattcaaaaccaggatgagatgcttaaggctggaaggcttactgagccatacaagggtattcgtgactgtttcggcaggacaattagggatgaaggtattggttcgttgtggagaggaaacaccgctaatgttatccgttacttccccactcaggttggtttagtttcacttctttgcttttttaaaatgtcttagttatatatgatgtattggttactgatctatctctcacttgctaggccttgaactttgcattcaaagattacttcaagaggcttttcaacttcaagaaagacaaggatggctactggaagtggtttgctggtaacttggcatctggaggtgctgctggtgcctcttcccttctctttgtgtactctcttgactatgcacgtacccgtcttgccaatgactccaagtctgccaagaagggaggaggtgaaaggcagttcaatggtcttgttgatgtctacaagaagaccctcaagtcagatggtattgctggactttaccgtggtttcaacatctcgtgtgctggtatcattgtctaccgtggtctctactttggactgtacgactctgtgaagcctgtcctcctcactggagacctgcaggtttgtttgagctctattcttatatatctgtaaggtgacagcttaaga

SEQ ID NO: 6869 - DNA, 571 bp, Arabidopsis thaliana
caaaaaagacataaggatacaatccaagaactttgaataaaattaagtgaaataatttgacacatagaatttggttaaaattgaagaaaaaaaaaaagtttgtgaacctctttgctagatgagtcatcaggagcaagaaaacggttgccttgagagttgatggtaggattagcacttcctccaattgcatacatttcccaatgtgtatagtcattgttcaccacatggaaatatccatgtctacacctatatttatataatttttcatttaggttgttaaaatcaattttcatgttctacttgtagaattcatctctctgaattgatctacatctaaaaataagatattaacaaaatgttagctcaactaaccaactattattttttcagttgatttagacatagctagcatacttatttcgggttgatccatcttaggattaattaaagaacgaaacgtattaaagtttagagcagtaattgtatcttggctttgttattttattttaagaatatgtccaccgacaatatacttgacttttatagttggtgcacatataccacaaatata

SEQ ID NO: 6870 - DNA, 778 bp, Arabidopsis thaliana
  unsure (1)..(778): unsure at all n locations
gcaaatagttttgttttgcaggctttaaactttgcgttcaaagattacttcaagaggctgtttaacttcaagaaagaaaaagatggctactggaagtggtttgcagggaacctggcgtctggtggtgcagctggtgcatcatctctgctttttgtgtactctttggattacgctcgtacccgtttagccaatgatgcgaaggcggccaagaaaggtggtcagcggcagtttaatggcatggtcgacgtgtacaagaagactatagcctctgatggcattgtcgggctttaccgtggtttcaacatctcatgcgttggaattgtcgtgtaccgggggctttactttggattgtatgattccttgaagcctgtggttctagttgatggtctccaggtaaaaaacaaagaaaactcctcacttcaacatattgagtcctctgttactgtttactcattgctataatctgtacaggatagcttccttgctagtttcttactgggatggggaatcaccattggagctggattggcgtcttacccaattgacacggttcgcagaagaatgatgatgacgtcaggtgaagcagtgaagtacaagagctctcttcaggccttctctcagatcgtcaagaacgaaggggccaagtcactcttcaagggtgcaggtgcaacatccttcgtgaggttgcaggcgctggtgtactggccggctatgatacttcgagncgattgtgttgggtaagaagtatggctctggtggtggctaacgatgaggatga

SEQ ID NO: 6871 - DNA, 616 bp, Arabidopsis thaliana
agagtccaaagtacagaccacggtagacaatgataccaacacatgagatgttgaatccacggtacagaccagcaataccatcagtcttaagtgtctttctgtagacatcaacaagaccatcaaactgtcttccaccacctcctttctttgcagccttggcatcattagctagacgggtacgggcatagtcaagggagtacacaaacagaagggaagaggcaccagctgctcctccagatgccaagttaccagcaaaccacttccagtaaccatctctgtccttcttaaagttgaaaagtcttttgaagtaatctttgaaggcaaagttcaaggcctacaatagacaaaaaagaaggttagcagaaaattatgttttttcaaaagctataacaagaaagagtatgaaactcaacaaacctgagtggggaaataacggataacattggcagtgtttcctctccatagagaaccaaaaccttcatccttaatcgtcctgccgaaacagtcaccaatacccttgtagggttcagaaagcctgccagctttaatcatctcatcctggttctggatcaaaagcttaacacgttcaataggagcagcagcagtcttggagacg

SEQ ID NO: 6872 - DNA, 624 bp, Arabidopsis thaliana
tggccattatgtcttgatgcgaagttcccattgttctcggctgaaatggaaatcgaggaagcagcttatcatcaaatggaaggttaagcaacggaaacttctcctggaaatcagcaaaagcagcaccagaacttcgaggacgctcaaaatcccctgacggaggaaactacaatgtcacaagattaaagcccatatataagtaatatgtttctgttttaatatgtgtatggaaagtagatgtgtctgatgaaattgcatttagaggagggtggggaatacctgacgatgtggaagccaaccatccatattactaagaggctgctgaaaaggttcttcctttatgttctgtggttttagtttacccataggaggttcctggtcatttgcttccctctcaaccaagttcgatgtttggggtagattgaagggaaaatggggtcctgttatgggtctgttctgtctactacctggacgagaataatttctccgggaggattctgactgagtaaaattaggagcacacagtccaaggactggcaggttgtttgggggtaaagatggcagacattctgcgccatgatgatgttggcttagaagatctggtttaggatctgaagaactggc

SEQ ID NO: 6873 - DNA, 1759 bp, Arabidopsis thaliana
attagaaaagccttcctttttttttcccattttcttcttcttgatgatcttttattgattctctcttcgttttaaaaaaatcttcagccttagggcagaataaatcggagatcagatccaataatcgggtttttctgggttttctcagaaaccctagaccctgatagtaacttcctactcactcaacctatctctctattgatcatggaatcaaacgatgaagagagtgagacacgaagctagcaacaaaaatatcataaagagggttttggaaaggagaaagattcgtttttaattgaggtaagtttgatttttccttttcttgatcgatgatttgatttagttaaaaagtttgattgatattgatagattttactttgatcgtttatgataatttttagtatcttgttttaatttctggaatctgttgatcttcttcttcttataccttgccttgtaaacagatctgaaaacttctattggctatcttgatcttggtttataatcagaaaattgatttctttttccttctatttcactattctattacttgtacggaaattttcgttgcacgaatcacgataacatttatttacaatctcttcaacttcatagcgtctctcatctaatgacttacacgaagcttcctcgatgcatttattttcacgatccctatttcattattttcaagaaaatttattaaaagagactgaatctttttatttctttataatcttttcaggctctcaagtctgaaaagagacaaaaaaaatggcgtcttcaagctctccttgcgcacgttgtaaattcttgagaagaaaatgcacacaagaatgtgtattcgctccatatttcccaccagaccaacctcaaaaattcgcattcgttcacaaagtctttggagcaagtaacgtcgctaagcttctcaacgagcttgcctctaaccaaagagaagacgcagtgaactctcttttctacgaagctgaagctaggttacgtgatccggtttacggttgcgtcggtttaatctcaatccttcaacatcgtcttaaacaagttaaccacgatcttgaaaacgctaagaaagagctcgctacgtacgttggtcctcaagctatgctcccaattcttcaaccgcatttcatgtctctaccacctcaaccgcaacgaccgtcttcttcttcagcgtctgtgttgactcagcatcatcataacttgttgccgatgatggctattccaacaggacaactgtaccatcaacaacaacaacagatctttgaggctcagcagttagcagcggttgcgagagagcaacagaatgagatgtttagagcttatggaggaggaggaggaagtagtagtccacaccatcaaaacccaagctcaagctgagattttgaggtttaataatggttttgactctgtaccggccggttcagttacggttactgggtttaatcagttaagttctggtggtacagcggtaaccggaatgtctcttggaggtaactttgttgatagtccttcgacgaataataattaccatacggatcagcaattacaccatcatcatcaaccgcaacaacatcatgaggctcaactattcataccttcacaatcttctcagccgctaccgctccaaacgcaggagacgcaaacgcagacgcagccgaattcggagagcgaggagggtagaaggaatgtcattggttaatccgctaattgaggaataataaaaaagagggatcgtaaacaaaga

SEQ ID NO: 6874 - DNA, 1297 bp, Arabidopsis thaliana
tgcagaaattttcaggtttctgttgtttaatgaaagatgcttggatgtttggagtatttagaagatccaaacacacgttgtagatagtgttccaacgggttttttctttcctattgctgttgagaagcaaaataaaaacaatcaatgtggttctcataaaagcaggcagagagatagagagaagaattgcagtaatgaccagaaacaagctagagcttcttacctaggatcatctccttgaagccctgaagtttcagtatcgttggagcttttggacaggcttccaaggcatgcattttcggttcttgaaccttgcttgggagtttggtattcaagattcacagaagagcattcttcagcattgtcaatagtatttgccatacttttatcttcatgtttctgttgtggaggcaataaagatgcccaatatcagaagaactaaaagccttagctgaaattttgggtctcacaaagcatttcataaagatacactctatcctgattcctaaaatcagaaagcaggcaacttttttggggttgtacctggtttgaaatggaatcttgacaattggtagcaatatcagatgtttccactttagcttgagcccatttaggaagccgagaaacgctgaacttaaatgaggatgtccatggggagcgttgctgcatctgatctgcgttctcctctactggcttatagtttgcagaacatgatgcatcatttggattgtcttcctccaaatcaaccgcaatttgcttgaacttttccagttgggccacagttaacctgccattttcatttactgcccgtataatacgagtagccattcgcaaaggaagtttccagacaaaaatacagccgtcacttgcaacctgacaataaacaccaaagaaaagttaaaagcaaagttttatctcactttttcgttttcatttgaggcatacaagaaagatagatccaggcttttgagcagagaaagctcttttacggtgattcaattcaataagaatgagacattgatcttgaaatcatccaaaagtcatggttcttacagttgtaagtaacagaaaactacaattcagaaacttactgatatgatatgtttgcaatcaggtaggaaaataacaccagtcacagcttcaccatgtcctgtggcctgagcaaccagctctccggtgacaaagtcacaaagcaaattgtcctgttagagtaggagcatccaagtagttgcagcttgggccaaaatgacctgtggaagagatcatattgtcagcactagaacatcaacaatgttga

SEQ ID NO: 6875 - DNA, 567 bp, Arabidopsis thaliana
caaaattataaatctgagaaccaaccaattagattaacaaaaaattaaaattaaaattaatcgtatatattaccacttgaagcttgctgagcatttttctttaaaggagttttaaaggatgaaatccttggccttttgaaaggagaaacggagactgtctttcccagccttttcttttgggtactgtcttgtttattgtttgcataagctgtatctctgcgatttgttatatcaacaagtggctgatcagcaggccttccaagttgcctagctcttggaatgaaaccgtttcccttggaattattcactgccatatctgatgctaaaggcctgttatttgatagtccatgtgtagcaggtttactgatattcagagcacaattggtctcatcaacagccgtatcaaatttcttgatcaaattaccccctgaagctaggttctccaagttaactgatctaaattgctttgaagatgaatgaagaggagatacaaaactatttgacgtatgtttgttgcttgtcttttctcatgagcaatataacctgtgttgcacttcgattgtttat

SEQ ID NO: 6876 - DNA, 566 bp, Arabidopsis thaliana
gaatgatattgtaaagttaaggggtacgtttgtctttttcaggacaaagcgagaccatagatgacgtgtcaactgctaattttcaaaaactcggtctacaaaccataaccaaacttatttattcaattatttccgtcaaaaaaatataattttctttttgcatctcaatggattgattccatgtgccaagtgttggtgttcatgagaaaattagtcgcagctgatgacaacaaacatcaagcatttataatttatataacactcacgagagcctctttctttatctacctcgtctcctaatcacaaacacacacaaatctctgaagtaaaatgacgttcccttctctttctgtctcatttctcttctttgccttcatattcgttacgcatgcattcgacctcagcatcatccaggttcttcttgttttctactttctggctaacaaagtaaccagaaccggttttctcacttgtatatttgtttttttgagaaaatcatgtagatgcaacagggaacatgtccgtacacggtggttgtcatgacaagctgtctttctccggagtcg

SEQ ID NO: 6877 - DNA, 1044 bp, Arabidopsis thaliana
cttctttcaatcgagccagaagaccgccaaactgcatctgctgctttaaaaagtgaagtaagttcttaggtttgatttttctgctaatttacataaattgttctgatgatgctgagcagatttgaatctgtttactctgcaatttttcctttccagttctttacaagtgaaccatatgcctgtgaacctgctgatctgccaaagtatcccccgagcaaagaaattgatgcaaagcgacgagatgaagaaactcggaggtttgtaacattttctctgtagtgttttaatcatcgctaacctcaactgatagcgtctgtttcttatgaaactagagaaatacatttctaattctttcgggcatgaatgacatgccaatatgattgaatattcatgttcagcatatatgaatcttaccatgacctttgctgaagatgcaaatggttgaaatgttatgtatattttggtgtactccactttaatcatgattcatatactatttccgggtaggaatgaaccacaaaaaaaaacatgtcccacttcgtatttagttgtgcctctcgattttcttaatggagagcttttccgaccataccagataccaatttaggcttcaactttggctggatagaccatccagatttgtcagcatgcttaattttagaaattccgatattattgttgcgtttaccattacttgtagctattttatactgtatttgtcagcatgcatagactaacagttttctcctgtgcagacaaagagctgctagtaaagcccaaggggatggtgcaaggaagaatcggcacagagatcgttcaaatcgagctcttccagctcctgaagctaatgcagaacttcagtcaaatgtcgatgtatgtccttccaactgttttcttttcgataacgtctcttcttttctacatttattcctctgactcgaatcaggttgcttctaggtgagtactgttgttatagataggttttactgtatatactggtgcgattaggctattgtctacgttaggaagtaagctgatattggt

SEQ ID NO: 6878 - DNA, 619 bp, Arabidopsis thaliana
gacaatgctggtgaccgacctgacgctgcgttttgatcctgagttcgagaagatctctcgtcgtttcctcaacgatccgcaggcgttcaacgaagcctttgcccgtgcctggttcaaactgacgcacagggatatggggccgaaatctcgctacatcgggccggaagtgccgaaagaagatctgatctggcaagatccgctgccgcagccgatctacaacccgaccgagcaggacattatcgatctgaaattcgcgattgcggattctggtctgtctgttagtgagctggtatcggtggcctgggcatctgcttctaccttccgtggtggcgacaaacgcggtggtgccaacggtgcgcgtctggcattaatgccgcagcgcgactgggatgtgaacgccgcagccgttcgtgctctgcctgttctggagaaaatccagaaagagtctggtaaagcctcgctggcggatatcatagtgctggctggtgtggttggtgttgagaaagccgcaagcgccgcaggtttgagcattcatgtaccgtttgcgccgggtcgcgttgatgcgcgtcaggatcagactgacattgagatgtttgagctgctggagccactcccgatc

SEQ ID NO: 6879 - DNA, 557 bp, Arabidopsis thaliana
ctaaagtggtaaagcggctattggtcgtctgaaaggtgaggaactggcgcaatataatttgtggctggattatctggacgcactggagctggtcgatacttccagtgcgccagatattgaatggcctactcctccggcagttcaggccagatgacatccggcgcggtgctggtatctgttgccgtcaccgcgtcaatgtaatccagcacagtgttaagtcgggaggtctctgcctgcatcagcttccgcccagcctgtaatttcagttgaatcagactaatggaagccattgcagtatcaatcagcgactggcgctgtgcttctgctgcatctactgcgacgctatgctgtgcctcggtatccgtcacccatttctcaccatcccatttatcgtatggcgttaatggggcgatagtcgcgggacgcatacaaacataacccctggatgttatgtgtctatcgagaatcaaagtggaagtccttatgttaagtataagacaggaatcacttataacgataatcagttagtatatgtatctatcaatgttgatgataat

SEQ ID NO: 6880 - DNA, 531 bp, Arabidopsis thaliana
tcgactctagactagaggatccccctcttttgttattacattcacacttagacataaacactcaaataatacaaaaacgaaagaagaagatgataaattaaggcaaagagagatggagcgtattgcagagaaatcttccatgaaaaatggagaagaagctagagaagcaacaaactctcttcttctcgccatgtttctcccgaacacttcgctccatctctctctttcttctcttacattttcttctccccatttctctcattctctcttcctcttctctttcctcaatctttcgccatggatatcatcaacaacaaccaccgtgacgaaaacgatgacgacgaagaagaagctctctccgccatgagctctgttcctcctcctcgaaaaatccattcctatagccaccagcttcgtgccaccggtcaaaaaggtcaccaccgtcaacgtcaacacagcctcgacgacattcctaaaatcactgaaatcgtctccggttgtggtatcccggcgattcttccgatgacgagt

SEQ ID NO: 6881 - DNA, 796 bp, Arabidopsis thaliana
tgttcttttgcaggtggagatatggttaagggatgagccagtgtgttcgtcactgacactacataacttggtggattggtgggtccaaacaactccattgcctgagcgacaaagcgcgatggtcggaagctccgctgctgaattcatcatggatctctattacagcttcaaatctgacgcctctgactctggctctgcctctgaataattcttctcagaacttcaaactttactcttcttctaaactcatttcttgcagaataagtttcttttgaaagacttctagttttagcatctttctttatttaataattgctgagacctaaatatggaaaactctttatttatttgatttgcttgctttttgaggactcaaacggtatcgttttgtactaattaaatagaagctcattttagctagcttgagttatatttgataagatgcgccggttttgtgctctgtttggtttaaggtagggttaacgaaagatctgtatccaaacagtcttcttttttgcccgccatggataaacacagagccaggagcttagtgacgaactaaaggtgaaatttttattgaaagtttcaatttttatatggattggattacagaaacatttctatgtgaataaaccaacaatggcgatgaagcccagtctccatttttgcccaactactgtcacgaagaagtttgtctactcgtttcaaagctccttctgcttccgtttcttaaggtatagttcatcaatttcacttgggtcttgtaaaggtgttacctttagttcgagaaatgatc

SEQ ID NO: 6882 - DNA, 464 bp, Arabidopsis thaliana
ctctaccccgtatctacaactacatcgcaatattagtcgattactgtatatcagacgtattcatgattttccattgaatataataaatcaatgactatatatactaaatcaatgactataaatatttgtgaacaaagaagtatccttttgacgtacttggaaagagaaaaagcctttcgacgcagttgttggacgaatcggccattgtgaaaagatcgagcagaaggttcataagaaaaattgttgttatccactggaaaaggtgcgtctgcttcttttccatctttataaactgccaaacccgtggctttctgtgcatctatgtcttccaagcaatctatataaattataaacgcatgacatcatggaactaagacgcaatatacatttcttgattggtttacataaatgtaaaatcaaagtaaagcggacacagaccttgaatgccaagtttagaaagcatg

SEQ ID NO: 6883 - DNA, 488 bp, Arabidopsis thaliana
aagaaaagaatcgagctgttcaaaagcagatccagtgattacgctaccgaggaaaacattcacaaggttgaaaatatagtatcgaaaagccgctcttctctctaacgatgatattgaaataaacccttcgaatttcgacatgatcatcaatattgttggcaggaatatcaaaaagagcttcaagacaataccgggaagaaaaccttggatcaatgatttcattaacttgctgcacacgcaagattgatcaagaattgaattaagccttattcttgaaatggtaagtaaaaaacttgagaatgtacctactttttgacaatgggactgaggaacggagcggatttctcgataccttcaatactcgctaaggattgcacaaatgcgattgggatgatgaaaaagaacgtgaggaagaagaaggcgatgtgcattacaaatctccttacagtgagagatacgtaaggcattgcgagatttggccagtacat

SEQ ID NO: 6884 - DNA, 1087 bp, Arabidopsis thaliana
gcactgaagctttgcctcgcctttctgccatccattttgatgatcatgtccaaatttgaaggcttcacatcgatctcatctttagagagacgagcagcgtttcgatattacatcttcaacttagtgaacgtctttcttgctagcgttatcgctggagctgcgtttgaacagcttaactctttcctcaatcaatccgcaaaccaaatccccaaaaccattggtgtggcgataccgatgaaagcaactttcttcatcacgtatataatggttgatggttgggcaggagttgcaggagagattctaatgctgaaaccattgattatgttccatctcaaaaacgccttcttggttaagactgataaagacagagaggaagcaatggacccgggaagcattggttttaacacgggtgagcctcggatacagctctactttcttctcggtcttgtctacgctcctgtgacaccgatgcttcttccttttatcttggtcttcttcgcccttgcttacattgtatatcgccaccaagtaagtttcttcttctttccttaatagggtcgaatttgttttaaagcagtttcttaaacaaatttttgtttctgtcagatcattaacgtatacaatcaagaatacgagagtgctgcagcgttttggccagacgttcatggacgagtcatagcagcattggtaatatcacagttgcttctgatgggtctattgggaacaaagcacgctgcattagctgcaccgtttctcattgctttgcctgtgcttaccattggtttccaccacttctgcaaaggtcgttatgagccagctttcatcagataccctttacaggtttgtcgtttcttctaacaaccatttaacattttagattccacaatcataccaaacacgaatcattcttgtatttgtttactcgtgttacaggaagctatgatgaaagatacattagaaaccgcaagagaaccaaacctgaaccttaaaggctacttgcaaaatgcttacgttcatccggttttcaaaggcgatgaagacgattatgacattgatgacaagctcgggaagtttgaggatgaagccg

SEQ ID NO: 6885 - DNA, 674 bp, Arabidopsis thaliana
tagagaaactcctgaaattgcattaactgaaatatgagctactatgcctgttttctccaattcaaccttctccatatgtacttcttccattttcccactatcttcttcagcttcaaaccgtgtttctttgtacttctcatcaccaaagtaacaaagtttttgattattcttactcctatcttcaatggacaagactttgtgaggttgtgttgtaggatccttaggtctctccatgctagtaagaagaactgtgttatgaacatgctctggtttagatgataaaatccctttagactgactgttattttcactccatttagcaacacaacaattgtttagactgttcttcttgggatgagccttctcatatcccctccctagcatcaaacattggtggattgaatgaggctgaaacattctaacatttatttgagtatccaactgcaatcctttcaaatatgcattaaccaaggactcttcagataagttcactctagagctaatcaactcaaaacgagcatgatactcgtcaattccatctgtttcctgcaattgattcaactcaacaattggatcatttaaaacttcagcaaaacgttcctgcaacacaagcttatacgtttccaattactcaacaatttaccccaaaatcagtgtccacaacgattggtgca

SEQ ID NO: 6886 - DNA, 632 bp, Arabidopsis thaliana columbia
ttcgcaattcagctagtggaactggaagggcgtgccaacccttgtttattgcacacgacaagaaaagggaggaagaatacgaggaagaggaagagcctgcagagcgtatggggagcaggcgagtagaccaagtgcagacgcatttaaactgtaccaagagaaaagaagtgagtgtgtgacgatgcatgcctacactgcacatgcttcaaagcataacatgtatcaaaatatttgcgagctggctttgaccaagaaaaccgctttcattctcttaccttatcagaaagagcgtcttcaagacgcagctcttaccgagctacgtgactccggcatgctatctgtgaacgcagacgtcttggcacacacaccatgttctgtctgtatctattacgagaagggacgacttaagaacgctatggttaggtcatccatggacccacaacacacaacaaattctagccatatgaggcaagaaatgtaccgtttcgtggttctgtttttaggaggagctgataacgagagaagctctgcatctggctgataggatgacggagaatccgttcataaacttgacagtgattaggttcttggcgcacaaccacgaaggagaggacgagagggagaagaagctg

SEQ ID NO: 6887 - DNA, 1437 bp, Arabidopsis thaliana
tgtctcgtttaaaacacggtggggtgctgcggttagtgcacagactcaacagtcgagtgatccgactgaatggttaactgaatgggctcccgaggcacgagaagtgttttggtcgaaccttgcaataccttatgtctctttaacagtaagaagacttataatgcacattgcattcttcttcctcactttcttcttcatgattccaatagcctttgttcaatcccttgcaagcatcgaaggcattgagaaaaatgctcctttcctgaaatccatcatcgagaagtaatgtttctgtctcttactctctccattgtattgcctacttatatgaattagatgttgaatttgctatgttttgcagcgatcttttcaaatcggttatccaaggttttcttccgggtatcgtgttaaagctctttctaatatttctgccaagcattttgatggtaatgtcgaagttcgaagggtttgtatcgttatcatcgttagagagaagagcggcttttcgatattatatctttaatctcatcaatgtcttcctcggaagcgtaatcaccggctctgcatttgaacagcttgattctttcctaaaacaatccgcaaaggagtaagttcccttttctctttctctgtctccattggaacagatatagatccttgagcttatgtattgttgcacttgtcacttgttaggattcctaagacggttggggtagcgataccgataaaagcaacgttttttatcacatatataatggtggacggttgggctggtattgcaggggagattctgaggctgaaacctcttatctttttccatataaagaactccttattggtgaaaaccgaaaaggatagagaagaagcaatgaacccgggacagatcaattatcatgcgacagagcctcggattcaactctacttcctcctcggtcttgtctacgctcctgtgactccagttctactccctttcattatcatcttcttcgcattggcttaccttgtctttcgtcatcaggttagtaaaacaaattctgtttcttcttttaacatcttcaagattcttttctcttgtcaagcttttccaaattttggttaaaccaagattcttcctttgttataacacaagcacactaaaccttctctacttcttgaactttcttgcattgctgattttgcctttttgcagatcataaatgtgtataatcaggaatatgaaagcgcggctaggttctggccagatgttcatggtcgtataatatcagcattgatcatcgcacaaatccttttgatgggactattaagcactaagggagctgctcagtccacgcctatcctacgcttcttaccgatcataacctttttcttccaccggtactgcaaagtgcggtatgaacgagcattcctccgtcaccccttgaaggttagtagataaaa

SEQ ID NO: 6888 - DNA, 493 bp, Arabidopsis thaliana
ttccaagtcagattcatgcttctatcatcattcgtgtgaagcgtatcatctagattcccatttcctacatattcatacactagaagacgttgaccatgctcggtgcagtatccagccaagggaacaatgtttggatgcctcaaccgcgacatatttgaaacggcttctaagaaattatcttcttcttgtaatgaaagtgctgcattatcaatcttcttaatcgccattatctagaattatgttacacagaaaaatttagttcaaagaaagaatattagctttgcttagtgtagaaagctgtcaacttttgagttacctttccattggggaactctgctctatagacacggcctagagaaccttcaccaatgatgttttcttgactaaagctgtttgttgcaacttgcagagaggaaacagtgtattgtgaagcagtgataggagatcttattctacttatagagccgattcattctcaacgaatccagtctag

SEQ ID NO: 6889 - DNA, 1192 bp, Arabidopsis thaliana
gtgcaagcctcaaattgaatataataaaaagaaaaaagatattcaaaccttccataatgcaaaatcagcagggttacgctttctcgaatcaacagcaacacgctcaccagctcgtgtatgttccaacaactgcccagataatttcccataattcggtgatttgtcaacggagaagaacacatccccttccactacatacccacaatctttctcaatgatctgtaaacaaggcaagcatatgtatcaatccccttattgatcattccaatttcaaaattcatgatctttctcaaccaagagacaaacttaccttttctatcatcttaatgatgttgtccatatgttcgctgacacgaggctggtgggtgggagggaggcactgcagagcacccatatctaccaaatattcatcgcaaaaccgattactcaaatctaacgggtcttctccattcttattagcacgatcaataatctgcagagttccaaaattcagatactaacaaaatgtttgtctaccttagcataagaaatgtaactatcattcaaatgttcaatacagttgtgaataagccatattcaataccttgtcatcaacatcagtgaaattgcggacaaaagtatcatcataatccaaatgcttcaagtatctgcataaccagtagaagcaaaattcaaactatagaaaaagctaaccaacatgcaaaacttcaaattgagatcgggtccaaccacatcgatctaatagattctattcaacaaaaccctaatttatcagagaggaagaagaagagagagacctgtaaagaacatcgaaggaaacggcggcgcgacactggccgatatggctgaaatcgtaagcggtgataccacagacgtataatccgattttgccaggagtgattggaatcaaaacttctttctgttgcgtcatcgtgttgtagagcttcaattccattttctccgcctccatatctctcacaatctcaccaccacaactacacggcgaagttaacaaaaacgaaaaaacccttttttcttaattgtttttggtaacttatgcgacctgttgttactttacttttcaacagttctctttcgtgtttgaagatttcaatattaaaacgggcctaagtctgagggtcggccaaccaattacggtagcagatgaattggcggggttttgtcgatgtgg

SEQ ID NO: 6890 - DNA, 783 bp, Arabidopsis thaliana
acaaatccggtgtggaaaaatggttaacgagctgagagatgttgtttaccatgctgaagatgctcttgatgatattgctacagaagctctgcgtctcaacataggagctgaatcttcttcctccaacaggctgagacagcttcgtggcagaatgtccctgggagattttcttgatgggaacagtgaacatttggagacccggcttgagaaggtcacaattaggctcgagcgtttagcctcacaaagaaatatcctgggtttgaaagagcttactgcaatgatacccaaacaaaggttgccaacaacatctcttgtggatgaatctgaagtgtttggtagagacgatgataaagatgagataatgagattcttgattccagagaatgggaaagacaacggtattaccgttgtagctattgttggaattggaggggttggaaaaaccacactttcacaactcctttacaatgatcaacatgttcggagttattttggaacaaaagtctgggctcatgtctcagaggagtttgacgtttttaagatcaccaaaaaggtttatgaatctgttacttcccggccttgtgaattcactgacctggatgtacttcaagtcaaattgaaggagagattaacaggaacaggcttaccgtttctgcttgttctagatgatctgtggaatgaaaattttgcggattgggatcttctacgccaaccttttatacatgctgctcaagggagccagattcttgtgcaacacgaagccacgtgttgccccataatgtg

SEQ ID NO: 6891 - DNA, 742 bp, Arabidopsis thaliana
agcttaggtcgagaaaacattcaataagcaagcgcaagtttgcttaccattggttccatttcatagtcaattggctctaagacaaaatcctctgcttgaacagtgtcatttactaagagctttccatcacaaacctatatgatacagcatcaataggttagacaggaatataacaacaacagaaacaaaggttaagagtctgttttgaggaggctggtcatcaagaagccactacataagtaataccgataaagatgaccaaagacttcaatggagaataggatcaatcaacaagtggattagagataagggcttacttcaacccagtcaccttcgctagcaactatcctttttatgaaaacatcagcacaactgtaaccatgttcctgcaattcaaaggagagtatcaagcacctttgaaaaaggtctaagaacatttgaaaacccagaaatagtgatttgagatatataccaccaaaataggaggagccttgaagataactatgtctgaaacctctggcttcctgaaaaagtatgagacctgtccaacaccaaagcaaatagacagatttgatcacaatggtttagtgtgattaagccacatcaccaattaaaagatcaatgtgcatttcttatgtaagaagaaacacatttaagaccatttccaataacaaattttagttccaacaatgcagaattggttaaagccgtcattttaaaacctctcaagatcaaacatcat

SEQ ID NO: 6892 - DNA, 939 bp, Arabidopsis thaliana
  unsure (1)..(939): unsure at all n locations
catcttggtaagcaccagttagtatatgggcagtattcaaatcgtctaacatctttgattcaaactcagtttttagcttcttaatgatgtcttttccttctgcagtttgttcagattttccaccatcttcagacaatgcgtcttgatatggtgacagaccttcatcaagatcttgtaaagtctgataaacaaaaatcagagattaaagtcagaactgggcataaattatgatggtgtcttacttttagttcacatattcctaatacaaaatactgcaaatggacatgctagttaagtttgatataattttgaaaacaaatctgaagcactgtacctggtaaacatagtataaagcttctgacgaactctctagctgcgaggcagtgaaactcagaggagaccggtactgtgcactcatcaagaagtgcctcagagccaatggatggtagctagcggttatctacacagattgaaacaaaaaatgaaaacctgtcaataattctgcatttagccatgggaacaacatccaaagaaaaagtcgattattatactagtagcaaataagaaacatacttctctaatcgttttaaagttgtgctttgattttgccatcttctcgttgttgatagtgacatgcccattatgcaaccagtaatttacaccactatcctcacatgcagcacatgtctgggcgatctcattttcatgatgcgggaatttaagatctgcaccacctccatgaatatcaaatttcggagacagataatgaacactcattgcactgcactcgatgtgccatcctggtcttcctggaccccaagggctctcccaacttggctcatcaggctttgcgccttgcatagaattatgttcaaacttcacttcatcatatactgtgcaagcctcaaattgaatataataanaagaaaaaagatatca

SEQ ID NO: 6893 - DNA, 570 bp, Arabidopsis thaliana
cgaagcactgaaagcagtgatctataattcagccgaaacaacttagattgtaacggtggtatattaggaccataacgaaattgagatcaatttaataaggtatacctcacctccttaacctcatctcctgtaatacgtccgtccaaatttttgtccacccttatatacataaacacaaagagataactaatcaacttaccatattttatgacaaatgataatcatgcattatacttgtcaaaatactttttttaaatataaaatcatgcttacatatcaaaaaagatttgcagcctatcatcaaaactattgcctgtgatctgctcccagaattcaaacaattcagttttggtgattgacgatgacgtagtccctactccttcggaccaacgcctcaaaaagctcgttcacaaattcgctagattcaaccattcctatattagttgaaataattcttttaaacattcagttattcagttagtaataaagtaacaaaactgtatatgagaatcaggttgagtattgcagtgaaattacagagagacagagatgaaaccaatgaacgtatat

SEQ ID NO: 6894 - DNA, 353 bp, Arabidopsis thaliana
atacctcgccgagatacttttgcacaaactcggatccaacaaccctaatgaaggcagcagttgtgtgattggcaacagccttagccaacatagtctttccagtaccaggaggtccatagagcaagactccacgaggtgggtcaataccaatctgtttgtaaagctcgtggtgggtaagaggcaattcaacagcctcacgaatttcctgtttctgaatatcgcatcctccaatatcctacacaaaaagataaagcaccacataagaaaccaaagatcgtttcaaaaaccctaactttaattcagaaaacagagtcgagatttggagaaaaggaaacattacattgtaggagacg

SEQ ID NO: 6895 - DNA, 505 bp, Arabidopsis thaliana columbia
agctcacctctgagcttctcgacaagtgacaacgtctcgttaagttccatccttaagttctcaacattttcagattcagacagctgtgctttcagtttctggacctcgttcatggtagatgatagagcagcggaatccatggcatgctgtctctgcattgcttcgagttcagactgccacgctttgtctcgttcttgagagagcttgcgaagctaatcgatcctggaatcctcagaggcgttaatctccattaactgctgctttgtttcctctgcttgatcttgagcttccttcttcagagcttctgaagcacttagctgttcctttgccttctttagctcctcttgaagctgagatatctgagatgccaattcgggtgtttttcctgtccgtttcttctgaatcttgcataaaaaagcaacaatgaatattaacaactcaactacgcaacagatgcatcacatatcactttcacatatatcaagtaacaagccacaaaagtaac

SEQ ID NO: 6896 - DNA, 598 bp, Arabidopsis thaliana
catgtacgctgcgattccggcaatgcttgtgtaccattcctatggaggtgtctctcagacagtcaacatcctcctcatgatggttgctggtttgtttgtcaatggtccttatgcactcatcacaaccgcagtctctgcggatctgggaacgcacaagtctttacaaggcgattcaagggcgcttgcgactgttactgctatcattgacgggactggatctgccggtgcggctttaggtccgcttttgacagggtttctttctactctgggttggcaagctgtgttctatatgttggtcgttggagctctctgtgctggtttgcttttgacccgtctggttattgctgaaattagagagaaacttggatatgttgatgaagaaggtaaataaccaaatctcttgagtttccttctactaatcacagtaatctcaattgcagaaacaatgatctgactttatctttgtttgctttgcagttcctgcttctgaaccactgttaaccgatagaagatgatggagaagggagcagcgagagaggcagtgtgaacagaaaccattgtttgcgcaagagttttgttctgttatataattatgagt

SEQ ID NO: 6897 - DNA, 536 bp, Arabidopsis thaliana
agaaaaggtgtttaaggccactgttccatcatcactaagagtgttcggatcaagcaaaacctctggctcagcatccagattatcctgaacccgaatgcaatcaaattcaatgagaaaacaaagctagaacagagtatgcactgatacaaacgcctttatctcaacaaatacctgcatataaagcacactttgagcctgtagaccagtgttatggaagtaaaagtacttatccccttgcctgaatggtgaatcgtaacgaggatgatcaataagtttcgttatattctgacggagcttctcctttgtttcacacttttcaagtacagaatctgtcaatttcacttggctctgcacaaactccttcacttcttcagcatcaggatcctctaacctagcaacaatccagaatgacaaattcaacgctaaatcatagcaaaaatgaacaaatcacacgaaatcacgaacaatttaggaatttctctcaaggtcaatctccaagtcaaatccaatgtctgctaattcctcagagcgatgtg

SEQ ID NO: 6898 - DNA, 509 bp, Arabidopsis thaliana
ttgagattgatccgtcccaatgaaatggtaatacagctcatgataaaggttagaattagtctcagtgccagcatcaatatcctctccttctctgcaaaacaaaaacagataaaattggtaaatcaacttagctttctgaactatatcgaaaggcttcttccaacacatcttgtacttacttgggagctgggtagcgaccatagaaaaatcctttactgtcgtgcgtccatgtaatgccggtaaacttaacctgttccacgagaggaacataaatctatcagaaatctggacggtagaactttattgatcaaccccactagtcagtaccatctttaagaccatacccatgataaagtatcaggctccactttcttatcctcgattttcatcagcttaatcgtcacccagtcgctaccacttgaactaagaccataggccaagtacttagcatcctcgctgacagaaaaggtgtttaaggccactgttccatcatcactaagagtgttcgg

SEQ ID NO: 6899 - DNA, 280 bp, Arabidopsis thaliana
  unsure (1)..(280): unsure at all n locations
ggaaagtgagagagaaagttataagnaataacggtaggagatatggagaaatgatggtttatggtaagtgtgtagattttgggtacggtaaagattttgatgatcgttcacatattggaaaattgcttggatatggttaatttggttatacatatgtagctcatgataaaaaaagtggtgatcgtgtcgcacgtaagaaagatagataggctaaggtatgatgatgaatgaatcatttttgctgtgtttttataatgatagagttttatgttatttaaga

SEQ ID NO: 6900 - DNA, 525 bp, Arabidopsis thaliana columbia
cgcagaaactggcttcatcaaactctataaaactactctttagtttcattctttgctctgtcgtcaatgttcttatctgtggaaatcttgcttcctgcacaaaaaaattgggttcagaagaaaaaaaataaaaataaatggattaagatccgcaatgatagttttgtcttttctttctgacatggtttagtatgtttttacctgctcataaggagggtctttatgtgctggtataagccggcaaacaaaatatctagcttgggaacttccttcctgttatgtttcaatatatacaagattttgaattatgtttcaatggattagcagatagatattgaatccataaaaaaagaaaggttagaaagtgtgtgattcttttgagaaaaattgtataaggttctgaaatgttaaggaccttgaatgcgagaatacgtggagctggaaaccggaattcagttagctcttcagctaacgttctgcaagctgctaagacatgcagcactcttcacctcgtcagctgacagt

SEQ ID NO: 6901 - DNA, 536 bp, Arabidopsis thaliana columbia
tgcattccaacagcgatattttaaaaatcaaccccataaacctcgactagaggaagaaaggtgtttatacttatcttacgaacttgttatagctaatataatctaataatcaacagatattcatgtcccaatagtgttcattgagactagccattttgtgcactgacgatttcgtatgcatagatcacacagctttgaaggaaaatttgacagtgaactcagattttaacatcatttacgaaataaaaaccttgtagctgataaatataactaataaacttagttagggtatgcaaacaggcctttgcctccattttctttacaagattcttaccattttgttggagctcttctttgggtaggggatatctgacagagcacacagtgccaatctctttgactcgactatggactacctctgccatctcagcattagcaagcccaccaaatattacagttcttgcaactcttcacccatttaaaaaagtaaacatatatcaccaagaaaaacaagaacaacaaatctttctaattac

SEQ ID NO: 6902 - DNA, 542 bp, Arabidopsis thaliana
gcacatcattataaaggtttgtcctattgacaaccttacagttccatgctccatataagctgtttgggagcttcaaagtcgagtatgttctcacatggatcctttcctttcttgtcgatgacggcgggaatgtcacatggatcttgcttcacagttagagctgatgcagtgcgtgttttcttctattctctagccttgtgtataaattgtcttccttagagcatgaaataaaataattttattccaaacactaaaataattacttgctctaaataaaataccagaagttcatcaacatgtcaagttcatgtgtgtcttgtattagggcaagtgtcctacaaagagactcccgagagccagaagtattgaaggaatggccataggaatgggcgcatcatgacatcgtgagatgtctcgcccgaacgaattagttggtactagaaatgttagaaaaagtaaacgaaaagagtaataagaagtgaaaaggacagaaatacttcctacctatgaaagcaagttcccactgatggtatacttagtgt

SEQ ID NO: 6903 - DNA, 626 bp, Arabidopsis thaliana
tgctggaaaatcgttttcagacacggattggtactttttattcagacaatggtggtgagttcgtcgcactatgggaatacttctcacaacatggtatctcgcatctcacttctccgccacatacaccagaacacaatgggctctccgaacgcaaacatcgtcacattgttgaaaccggtctcaccttgctatctcacgcatccattccgaagacgtattggccttacgcatttgctgtagctgtttacttgatcaatcgactaccaacacctctacttcagcttgagtctccgtttcagaaattatttggcacatcaccaaattacgataagctccgagtttttggatgcgcctgttatccgtggctgagaccttacaatcaacacaaactcgatgacaaatctagacagtgtgtgtttttgggttactcacttacccaaagtgcttatctctgtcttcatcttcaaacaagccgactatacatctccagacatgtccgctttgatgaaaattgctttcccttctccaattatctcgcgactctctctccggtacaagaacagcgtcgtgaatcatcttgtgtttggtccctcatacaactcttccaactcgcactccagttttgc

SEQ ID NO: 6904 - DNA, 838 bp, Arabidopsis thaliana
ctcctgaatatgcaatgaggggtcacctaacagaaaaggcagatgtttacagcttcggtgtagtagcaatggagatcgttagcggaaagagcaacgcaaattacacgccagataacgaatgttgcgttggccttctcgattgggtacactaaaaccaatccttttacactcacaagaactcagtttttctctcaactgggtacttataaaggttcttgattttcaaattccaggcatttgtactacaaaagaaaggagcatttgatgagattctggatccgaagcttgaaggagtgtttgatgtgatggaggcagagagaatgataaaggtttcacttttatgctccagcaagtctccaacattacgaccaactatgtcagaagttgtgaagatgcttgaaggagagactgagatagaagagatcatatcagaccctggagcgtacggtgatgaattgaggtttaagaaaacggcggagatagggtcatcgtctttaccttccgattatcttgtgtcgattacttcgtcctgtgaatctgcttacgatttgtacccacttagtcccgagtccgttgtttctctagaccctagataccattgtaaacgacctttacataacaatctctgttacatttatatcacaaatttcattgtcaaagactgaaacttttggtttataagaagaagaaaataacgctttgtagtcattgaccaaaaatcgttaaattggggtatgaaattagggttctttcgttcgcgccgtgggtgtactcgtaagccagctatgtcgacgttatcccctctccgccggaaagacatcacgatgatcttcccggt

SEQ ID NO: 6905 - DNA, 563 bp, Arabidopsis thaliana
gtgggtaagcctctgacattcgtaacatcttttttggatcctctcgtaatgaaatttcacagtagcagtctctccattcctcagattaacgaccttggactttctcaaaggccttgatacatcaaagagaacttttacccgtacaaactcttgaatctgagattggtctgggttaaacacaacctctctaacctctccgataagctctcctaaggaagtgattgctttttccgtgtagtagttcaccgggatattccaaatttgaacccaaatgaacataaaccttagataatcatccggaggtttttcataccacctatccaccacaatagcccattcactgaacgtttggacacctttttctagcacttcttccagatcgtgtttcgaatcaaagatgaattggaaacgctcgctagttagagccacacctttgactcttccttccttctcccattttctgggcatattcctaatcagatgcttcataggttgacaagcaggattgaggactcttccaattaagcttaacttatttcttcacatgacatgtacaccgacag

SEQ ID NO: 6906 - DNA, 919 bp, Arabidopsis thaliana
aaacggaatcttcctcctggtccagcaaacttccgatcgtcggaaacctacaccagctacaagggatggttcacagatgtcttcatgagctctccaagaaacacggaccactgatgcatctccagctagggtttgtcccactggtcttgatctcatcgagtgaagcagctgaagaggctcttaaaacacatgacattgagtgttgtacgcgacctaacactaacgccgcaagggttttctcccgtaacaacaaaaacatcggccttggggcatacagtgatgaatggagagagctgcgtaaggttgcggttcgtgagtatttcagcgtaaaaaaggtacaatctttcaggtatgttagggaggaagagaatcacttgatggtcaagaaactgagagacttggctttgaagcaatctccggtggatttgagcaaaaccctcttttgcctagctgcaagtaccgtattcagacctgtctttggacagagtttctcagataacaagcatttcagcgaggaaaagatcgaagaactggtgtttgaagctcagaaaagtttaactttcaaattttctgatctttttcctattcctggtcttggatggtttataggctttgtgtcaggccaacataagggccttcacaaagtgttcatcgaggttgataattttattaatcatatgattgacgatcatcaaaagcagaaccaacctcaagaacgttctgatatcgtcggcatcctcttagatatgatacataatcaagaacaagataaatctttcaagctcaccattgatcatctcaagggaatccccaagtgagaaaaataatgtttttacttcatgattcttacatctagcctatatatactgaattaatactatcatatctttatgttgacctaggatatattcatggctgg

SEQ ID NO: 6907 - DNA, 601 bp, Arabidopsis thaliana columbia
cacatcactgggatgttccaacactatatcacttggatgttaccaagtcttgttctttgatttctttcttcttacattttaacaatcttttgttcctttaggctttatgatatgtcgtaaccggttttgttggtttgctataaatacacacatatagacagaggaagagtcattggatcctcaacgaataaataaccgactttggcggcaaaaacggttgatagaacataatttaatgatttaaggaaagcccccaataaagcaaatacaaaaacagaattagcaatcttcgtggccctttcgtcttctctccctaccccaccttggactaccggaaaatggccaaggtggtggtttacacgatactaaccgccaccatcatcttcctcatcctcctcgctcataagaaacaaaaccagactcaatccattgagggtctcataacccgccgcatcggacggaggcttgaaatgccggtgtttgaccctttggtgacccggattgagaggttgtctcatgagaaagaagctggtacgaagaccgtggaggctgcgaaagaggagaaagatgatatgtttgaggagtatttgcacaagagaga

SEQ ID NO: 6908 - DNA, 949 bp, Arabidopsis thaliana
tccccgatctcgtttgctaagatcctcttgcaagtaacaagacctagaactgcagttctcggaaatattccaagaacttcggtttacagaaatattcaacagtatcctgaagccactatggttccaggggttcttactattcgtgttgactccgccatttacttctccaactcatattatgttagagaaaggtaaaaaccctatacaaaagtttaatattaaccaagatctgttacttggttgacaagaaatttaaatcgaaaaccctttttcatttacaggatccagagatggctacatgaggaagaagaaaaggtaaaagcagcaagcctacctaggattcagtttctcatcatcgaaatgtcacgtaagttaaacttcactcccaatttctatatatatattccttcttaatttttttctcataacacaaagattaacgaacaccattatttttcagctgttacggacatcgatacaagtggtattcacgcattagaagacttatacaagtctctccagaaaagagacattcaggtacatacatatatacacacatactgaattctttaaggattataatctaagcactcaaagtgaattagttgaagaagatttacctgactctgtgttttgtgatgataaacagttgattctggcgaatcctggaccgttggtgataggcaagctacacttgtcgcactttgccgacatgttaggacaagacaatatctatctaacggtggctgatgccgtcgaggcttgctgtccaaaactctccaacgaggtctgaaatttacaagaaagaagaagaagaagaaaatgaagataatgacgaagaagaagaaagatatgctcttttaaatgttgtaacagtagagttaagaaagtgattgtatttctttggaccctttctttatgatcttctacacaccaaggggtcaagtgt

SEQ ID NO: 6909 - DNA, 863 bp, Arabidopsis thaliana
ttcttcggattaaagaaactactttactctatatttgaaatgtgttgtgtcttcgtacttttgagtttatgagattatgcactaaagatttgattcgagcataaatgatgaattgacgataagacagttttcacatggtccaaaagggttttgattttgttcttcaccaagattccttatatatgttgtattcatccttacaagctgtaaattttaaagagaatcacattccaaagttgatattgatgagatcttagaatagtatagaaagagagcttttttgggtgcaacatagaaccaaaaaaaaacattttaagaaaatcacaagacttttgtgcactctcttcgtccgcctttgaaaaactaattcttccatatacttaacgcacatcctctttgtgttttcaccctgaacagacttgggtaaagcgtatgtgggaaccttgtgtatccactttggtgagactgtggagtggtagttgttgcgttggtgctcatggaggtaggacatttatgtggatggcgtgagattgttgaggacgacgacgggtgttgtgagttagttgaagtaagaggtctttggtatcagtttggtgaaacagggcggctctcaagtcacgatgagctagtgcttgttgttgttgttgggtcctcgtcttctgacatgagagagtattgtaattaatggaaaatcatccctggaccctggtgttacgtacgacacatgaatcagatagttatattggaaagttgacaaccatatgcaacatcaaatactccactccaaagtcttaaatagaaagagcaaaatataaagagcatgcttaaatcttctggtatcaaattgtttcaacatgatcaaa

SEQ ID NO: 6910 - DNA, 696 bp, Arabidopsis thaliana
gcacaatctatggtaagacttaagatttttggtttcctaaagatatgtttttgttagtgtgattgaagttatataagcaaagaatgtttgttacagtggaatatgattccccagcatcagattaaggaacaacataatgcgttggtgatgaataagaagatcatgtccatccttgctgagagagacgctgctgtacatgaaagaaatcaagctgtctctgctaaaaaggaagctgtcgctgctcgggacgaagcgcttcagcaacgtgacaaagctctttctgagagagataaagctttgatagagagagataatgcttatgctgctcttcaacaccatgaaaatagtctcaactttgctttgtctggtgggaagtgtgttgatggagatgattgttttggtattggggaaccccacaaacttgaagtcttccctttgtcaactattccgcctgaggttacaaacacgaaggtggtgaacaaaaggaagaaagagaacaagcagggactatcaaaggtgaaaaaagtgggtgaagatctgaaccgtcgagttcctgctcctggaaagaaatctagaacagattgggacagtcaagatgtcggtttgaacttagtcaccttcgatgagacgacaatgcctgtacccatgtgttcgtgcacaggctctacgcgtcagtgttacaaatggggaaatggc

SEQ ID NO: 6911 - DNA, 797 bp, Arabidopsis thaliana columbia
tcccggtattacgctgacttgtgggatatgatacgatttctcgatttatttgggttaaatgtatgttatggaactgcttatgatttggagtatttctgtttttagttactcgtcagcctagtttcacaatgtttgatatcaatttctccattgcagttgaaagtaagaggatggagagtggtgggcagtatgaaaatgggcgctacaagcccgattactacaaaggaacacaatctgtggtaagcaaaaacacttgaagaagcagatcactaaaacaaaaaaacatgttttcgttactttgaatgaaacctaagtacaaactgtgtgtgtgtgcagtagaatgtgatgccgaaaaaggagcaacataatgcattggtgatgaataagaagatcatctccatccttgctgagagggacgcagctgtcaaggaaagaaacgaagcggttgcagcaactaaggaagcattagcctctcgtgatgaagcacttgagcagcgggacaaagctctctctgaaagagataatgctatcatggagacagaaagtgcgttaaatgctcttcgataccgtgaaaacaatcttaactacattttgtcgtgtgccaagcgcggtggtcccaaaggtttataactgaagaaagcacttacctaatcattccctatacaactattccactgaagcagccacacgagaccgccaaaaggaagaaagagagcaacagggaaagaaaatgggcgaggatctgaaccgctcagttgcttctcccggaaagaaaagcagaaaggattgggacagta

SEQ ID NO: 6912 - DNA, 474 bp, Arabidopsis thaliana
cacaatgacacaacatataaagcatggatggatggtgttttacccgaaagttcctaccactcgagtagagatatgagtgaatgatgaattggtgtctgagaaaaacttggctagtccaaagtcagagacctgaagagaacaagaactctaagctacatgtaatcttgttaaatagaacaaaatggtgtgactataaaccgaaaatgggcaaactctgttctaaaaaccagactttgataagattaaagagcagatcacctttgcctcaaatttggaatctagaaggatattagctgctttgatatcacggtgaattatagttggactgcctgcattacaagcaccagaaatcaatatcagtgtcgaaaacccaaaaaaggccattgtcattcccattatgaagagaaacaactcacgagtcctcatgaagataagctaatccttttgctgctcctacagcaatcctgagcctca

SEQ ID NO: 6913 - DNA, 823 bp, Arabidopsis thaliana
agatcattacccctaaacaaagagttatcccttcaatcgccaaaatgtaacaatgaaaaaactaaaatgtcttcctaaattaccaaatccatatgacaaatctgatctaaaccaaacagttaagctgttcatcatcatatgcaaaggtagatacacagaagcgagcggtcaacaaatttaggaacgagcccttttgttgctgcaagaagggcacttgtattgcttgatgtgctcagctcttgctggtgttatcttaacacactttccatgaaaccacatctcacagaggtcacagcaaatccagaactcatcagctgcatagctctcaccacatgctccacactgtgtttcaccttgctcatcctcatcctcctcttccacaccttcctcttcctcctcctcatcatctttcggctccggctttgagaacttggcacgggattcagatcctcgctgtaacgtgagacaaagaaaccagaattagtacaaggattaaactgtagagaagaagtacagtggaaaacaaagtctctaccttggagcttgatttggatctgttgctgctgttgttggaaacagaggacttatcttttccttgtttcttagcagtgccagctacaacctcaaagattgttgggaggtcattcaccatattgaaaagcctcttcctgtaacaaatgtgaaagaacataaatcacagagagctacataaacggtgaaggagtagaacaatgagtgactgagaggcttgcatctatataccaccaaggaacatagatgtaagaagattagacttaaagaggagaaggatatacatactatc

SEQ ID NO: 6914 - DNA, 1101 bp, Arabidopsis thaliana
ttgttttctactgatctttattcctaaaaggtccatttttttaacactatgagctgtaagtgagaatgtgatttgaatatcctaatctgctttggagcctgctctcgagttagttttatgattaatatgtgttaaattattatttgacatttgtgtttaacaatctttcactttatctatcatgttacccttcagattgctgaaaggaggaagctggtctcatctattaaagagagcacacctgacttggatgatgcaaaagcttcttccaaacaagagtctgcttcttctgtgaatgctaatactgatgctactaaaaaagaaattatggatggagatgcaaacggtagtgttagtccaagcacttatggcaagtcatctttaagtaaagaaccagaagctaagactttctctcccagtactgaatccttgaagaaccgcaaacaaagctcggcctctgtgatatcttcttcccctgtaacctctcctcagaaaccatccgatgtagccactaatgggaagccttggtctagcgtagtagcgtctagtgtagatcctccttataaaccttcatctgttatgacctctcctgagaaaacttctgatcctgtaacttctcctggaaagccaagtaaatctcgcgctggtgcattttggtcagatccactaccgtcttatctgactaaagctcctcaaacatcaactatgaagacagagaagtacgtggaaaaaacacctgacgtagctagtagtgaaactaacgaacctggcaaggatgaagagaagccgcctccactggctggagcaaatgtcatgaatgtgatattggtagcagcagagtgtgctccattttcgaaaacaggtaattatttcctttatcatctttgatcgattgtgcgggctatgtttgcataagtagtcttctcttggagtacacaaaactgaataccaataacttttataggtggccttggagatgtagctggtgctttaccaaagtctttggctaggcgtggacacagggttatggtaatatttattagagagtgccttttttcgtgtcagataagctctctggttgattgtggacattgtaactca

SEQ ID NO: 6915 - DNA, 728 bp, Arabidopsis thaliana columbia
aaacctccatctttaagaataagatatttgcttattagaaagtaattgatcaaagataacttcatacaacctgtcagggaattgggttacagatgatgaaatattaaatgtaaagaaatgaatcccttttgtgatggcctgtagggccttagaagattattatgtgaatcagctttacctagtatttcttatactcttcatttgcatcttctttgatctattgcagtcattgcctctagggtccaagattccatatgttttactcttgtatgaggctgaagacttttgtaatcttgttgctaagaaagaacttctagaaaacgtctacagagttcgtgacgaatacccatcttatacaatgtgctacctcaccaataagttactgtcctacgtaaacaaaaagtgcgtttgagaaggtacatttttgttgcattaatgtttccatactgaagctaaacaactctatcttctagggaaagggttgagtacaaggaccctgtaaatggctgtggttggagaaagcctcctattgatgaggtactacagttcctaatcaaaatgtgtctagagggaaaaaaaaaaaatccttaatgctcctttgatgtctttaataaagctctgatgtgttacaggcaattgcgaagttatcaactcactatattggagtacattcccggcattgtgtagacgaggctgaggtggctgaccatgttgttcggttaacaagt

SEQ ID NO: 6916 - DNA, 629 bp, Arabidopsis thaliana
gtgggacaatatgattgaactccatcccaggtggaattttctgaagaagaagtaaaaaacagagtacatttttatgatactacaaaagagtcagaaggatagagtattaaaaatgatctactgtgttaaaacgtaaattaaaaggcatgtctatacaaatccagagcaacaattttgctgcagctaaacgtatcactcatgggctatggcctaaacaaatctatcagtaggttgtcaccaaataagatctcccaatagtaagcactaaagtctcaactgtggaaagcatatatttcagacggtgttaaccatgccaatggtcaaggatgaagaaaacagcgaaggtttaagttacttacaaccatgcgaggcatgaaccgtccatagcagctcacattccgcttgattctggctctcaatttgcgctccaatatggggtcaaatccatcatacagtctccattgctcatcaatctcctgtcgagtgctagttattaccatttcagaaacatcaagagataattcctcaccctctatccgacgcataatcttgtacgttgaatttatttcttcttttgaaaggcggccttgtctcaaaagctgctccaatttatctctcccgagtgagtg

SEQ ID NO: 6917 - DNA, 916 bp, Arabidopsis thaliana
gatgaaagtacctttctgtctttgccaatgttgagaacaattagctccactaaaccctttgtgttcattaaaaccccaagaacaaccgattcacggagccttaccttgcataacaaggcaacactcacagtcccaacgattttgccaaaacaagccgtaacaatcaccaacgcgagtcgtccccacgatttcacaccttgaatcgtagttatatccgttttcaaaccgctcataacgaagtacagtggtagaagaagacccattacaagatcttcaatcttctccacaatcgcgtctgagaaatgtcctttgggaaacaaaacgcccatcacaaacgcaccgaaaatcgcgtgaatcccaatggcgtctgtcgcgaaacccgcgagtagaaccgcgcaaagggcgacgcaaacgtacatttcgcctatgggttcgccttctgggcaacgccgagagatgaatttgaaaattcgcggtacgattaaaaaacacgcgatcacaaacgcgattccacttaacagaacccagagaggaacaagcggagaattcctatcgccggagagagatacagcgagagctaggagaacccaagccgcgacgtcgttaattgcggcggcgttcattgaaatccggccgagatcggttgtgagtagctttaattcagcgagtattctcgccaaaactccgaaagcagtgatcgagagcgcgactcccatgaaaatgatgaacggaagtactttgctattgtcgccagaagaagaagcttcagggaaagcgaaggaggtgacaatgcccataccgaaggggagaagcattccggcggcggcgatggaaatcgcttttttgccggtacgtcggagagatgtcagatcgatctcgagtccgacgaggaaaaggaagagaaggaggccgaggt

SEQ ID NO: 6918 - DNA, 1981 bp, Arabidopsis thaliana
aattcaactcatgatgctaattaacaattggacggtccctcatttgggaccacctcatgtgtgctgcactttgcaactttggatggaacttcagcctcatcagtagcttttcttttgcctcctccatcagccacagtgacagaaggaacttgttgaatggagccagttgctgagaaaccttttgtccttctacttttgtatggacgttttctgatttttccattctttaagagagccccggaagaaggaccaacctcattgagaccagccttaaaagccgttgtgctccctatagagaatgaagaaaccgtacctttatccaaaaaggctcttaagtccggaagcagaaccaaagtcttacacagaggagcagcctgctccaaagatggagagagagcttctagaagtagaggagactgagtgaccggcgcaaggtgggaagcttgaactggagatccatacccgaaaacaatgcctttccctttgtcaatatcagttgaaaccaaagggtaaggttcaagtctcaacattgttttttgaccaatcgggtcatttgcgagatcacttagagatttcttgattctggattcccgaactaatctctcttctcctgaggcaacgagcaggtattgtctcattccttctcttccagttgttggatcaataccaacttgactttcatcaattactccaaaaagaggatatgtctctttgataatcctttctttaggtaaagccgaccctttgccttactgctttgtagccaatcttttgtcttcgacgtctttagcttttagagggcaggcctcttgctcatgtgtaagccgctgacagaaatagcatcttttttgaatcctttcaaagtaataaaggatattcaccataccctccttgaaattaatcttctttgagcgacgaacaggtttggagacatcgaatttgaccttcacacgaacatattccgtaatctgagacttggacggatcgaaagccacttcaacaacttgtccaacgaattctcccaacatagtaatcgttgggatagtgtagtggttaaccggaatattccttatttggacccatacttctatgaattggaggtagtcagtcggagggttctcaacccaacgctctatggctaaagtccactcattgaaggtatgaacaccctttgctagaattcccaacagatcttactcgtaagagaaaatgaactgaaacctctcattagaaagcgcaattcctcttaccctctcactgatttgccatttcctgggaagattctggatgagattggacatcttctgactgtttgggttcagaacacgacccaccaaactcaacacattcttctcactagaacagaattcaggtaaatccggcatcgtaaacggctcatcctcctcctctaaggacattgccattaaagcccgatcgatgctagctgacatagtaacggatcttgaaacttcgagaaaaacagcgagaaacagtttaaaacaaaccctagctgatgaagagaaacggcttagcttttgaagattaaactgaaagtaggttaaagatacggctaagaggaaagaaacaccacgactaaagctctattccacttagaagcgaatactctaagagagaaagaaggtcttaagcccaaaagagggaagctgaaaattttcaaaagagggaagctggtcagttttatgttttcttatataaaatctataatattagtaggctttatgataaattgttactacaaccactccgaagcaactattgcccgcaaacgcacctgtttccaactgaaatcagaaaaagtgccaacaagatatccataacaacacaaacaaaatcacatagaagactctgtttcaagttccaacaacacattattcaaaacccactctttacttactcacttactctcttctgctaagattagcaagctcatcaagaattaatcccctgacgataataatga

SEQ ID NO: 6919 - DNA, 515 bp, Arabidopsis thaliana
gggtatatacaatgcagaatgtgggtccacattttgagacatggaatgctggagttttgggtccagtttcattgaacggtctcaatgggggacggagagatctatcatggcagaaatggacttataaggtacagacacaaagatcacaacacgttttcatcaatatataattgtgtcactatactgattatccgattttgtattttgatttttcaggttggtcttaaaggagagtctctgagtcttcattcacttagtggtagctcatcggttgagtgggcagaaggtgcatttgttgcacagaagcaaccacttacttggtacaaggtaagcttctccatagtcaaaaaccaaaatgcagtttatctcggtaaaacgatttgctccatgtttaacatgtctccatggcttgctttcagacgactttctctgctccagctggagattcgccattggctgtagacatgggaagcatgggaaaaggtcaaatatggataaatgggcagagctgggac

SEQ ID NO: 6920 - DNA, 1222 bp, Arabidopsis thaliana
gttgacccctcaaacacccttcgacctcgtctggacttggtccacacctttctgtaactagtcttctgatgcgatactgaagccttgggagtcattttttgcttgatcggtttatgctcttacttgactgtgttctgtagagctgacttgagtttactatcttcctcttcatgattcgttgtactctttacaaagttcatggtcttaggtctatcaagaggcgtctaggacacagaaggttgataacctaatcctctgtgatcagatccaactattcccatagacagaatttcatcaagattctaacccccattgttcagcattctgatcttcttgtgattctcactcagttctctttctagcaaaagagatttctccttttcttgactaagactcgcgtgaagacaattcatctttctttctattatctgtttctcaggcaatggaaccttttcaccaacagcttcttccttaatttcttcctccaagagatccagttttgctgacagctgcagattctcctttgtaagtctcagcttgtccttgctaaatagtaaccagctatcatacaagatgcgatagctttcacttgtaatttgtgtctcatcactgtctgactcagaatcctcactgcttgattcattgtcgcccttcgcactgaaagcaacaaagttcagcataccacctgtcttatcctcactgtctgactcagagtcactgaaactcagaaaagttttttctttgcttttctgaatacttggacactcagctttgatatgaccaatcacatcacactcatagcacttcatatccttgcgttttgtgacaggacattctggttttgtgtgtcccataccaccacactcatgacatttcacatcgcgccttttaccagaattctcgttcttcacaggcctgctgcctgatttttctgtatcacttctgttccaacgactggattctcttgcatcacgactgtctctggttctgcctctttcaacgcgcttcagagcttttccaaaatttctagccataaggaatagatcatctttgatttcctgcagcggatcaggaactttttctttttcagccttaaacgctatccctttgttcaggtttcattgatcttcagcagcttccatttcttcagacttcagaattccaaccaatgcttcatatttgagagtatttgtattgccgagactctcatgatagctttgtg

SEQ ID NO: 6921 - DNA, 1594 bp, Arabidopsis thaliana
tttttctattaattattataagtatatatccccccctcaacataattgattgtgaactttcgattcctttataggcttattttgtggccaaaacggtaatctcattctacaatatactttagcaccactttggagacgcgttcttaatatgcactataaatgcatacacttattcacacacaaaataggacttcaacgacgcaagccaaagaacctagactaaaatcaatagacacaagaaaggaaaatgaagaagcaaaagattacaacctttgttaaagaactcaacttacggatgaattcgaagaaagaaccgataagtctccgatacattcacatccttggcaccgttgtcttcttctcctctgtctcctctctcgtcatcctccttgctttttaccttaaccaacgcctccaaacatcactcttcctcgtcgaagattatcacactctctcctcaaatcctctcacttctccttccctctctcctcctccttctccttctcctcgcagctctggtagtaatattgcagacgaagagctgatgtggcgagcagcgatggccccacgcagccccatgaagaatgagacccatccaaaggttgcgttcatgtttctaacgaggtggaatttgccgttgtcccctctttgggaaatgttcttcaaaggtcatgaagggttttattccatctacgttcatacctcgccggagttcactcaagagccgccggaatcttcagtattttacaagaaacggataccaagcaaggtatatgattatatatttacattcattaattaggtttaatttgttgccttgttggttaacatattattgtattttacaagataacattgcgatactttgacatttgtaaaatattgtaggccgttgaatggggaaaatgttcgatgatggatgcagagaagcgtcttatatctcatgccctactagaaccttccaacgcacgcttcgtcctcctctccgagacttgtatccctctcttcaacttcaccacaatctacacttacctcacgcgctccactcgctctttcctcggctcattcgacgacccaaggcccatggcccgaggccgttacacccctaaaatgctcccacacgtgtcgctctctgactggcggaaaggaaaccaatggttcgaaatctcacgtagagtcgccgccgagatcgtctctgatcgccggtactacgccgtctttaaggatcactgccgaccgccgtgttatatcgacgagcattatcttccgacgttagttaacaagatttgtccggagatgaattcgaaccggacagtgacgtgggttgattggtcaagaggtgggtcccatccagcgaggtttgtgaggaaagatattcgggtcgggttcttggatcggatccggttcggttcgaattgtagctacgaaggtgaggtgacgaatgtgtgttttcttttcgggaggaagtttcatgtgagcaccctcgagcctctcatgaagattgctccatatttgtctggaatttaattaagactttaatttttcattttaaacacacaaatgattcattcatatactaatatacttgtgatga

SEQ ID NO: 6922 - DNA, 655 bp, Arabidopsis thaliana
tttttcaagtggtcgtaactccctgtctctattacagttccatctacgatcaatgcaatacaatccaaatttttcaaggtgttcagacggtgagccactactacagtagtcatatttcggctagccatgatcctagctagagcgtcctgaacctcctgctctgagttagagtctaaggaactcgtaacctcatcaagtagaaggattatagggcttctcagaaaggctctagcgatagctatcctctgtttttgaccacctgaaagttgtactcctctttctccacattctgttttatatcctttttccattgccctttatagatgaaaaacaaaacataaagagaattgaacatagcaaaaaaaaaaggaagaaaaaataacaaaaagcatacgaaaatattattttgttagctcattcaaaatttacgataagaagtttgaactctaaagtctataaatatcaaacaaaacaaaaatatgttttgaactctagaaactactagccaaaacatacaaggaggatgcaaatactacttgtgtattatatgtaaaaatagaatcacacttacgagatgaaatcatgacattcgcggctttagcagcctccactacctcatcctccgttgcttcgggtcatccgagtataatattag

SEQ ID NO: 6923 - DNA, 753 bp, Arabidopsis thaliana
cccaaactagtcagaaatcaaaatcgaaatcgaattcaaatcaatgtaaacctctatgtagattcaaacgatcttcttcacggatcccttaaactagtgagaaaatcaaacagatcaagccaacgcaaacgaattcgttttaaaaaactgagaacaaatatcgaaacgggatcagagtaaacatacgttttccgccgccgagaaccttatgaacaggtctctctcttccgaacaaacgataaaccttcgatttcaaagactttggagacgatgacgaagacttcttctcgttttcgtcatctgatgatgatgaagacgacgaatcacctttgtgatggatcttctccgataacttctccatcaacgattccctctctacaacctccactgctggatccaaattaggtgaagattcttcatgcttatgttcatccgccattgtttccgattcaagagaagaagaagaacgatcaaagttattgttctagcgttttcgttacacctctgagaagaaagatctcgaagtcgaatgaaaaaaccaacaataaaaggaggaaaattagaataaatctgagccgttgaatattttgtttctgatctgatccgttggttggttcggatccaaacctgctgcttccttaactagagcgatgcttaggaaaagataaatgtcgtggggacatataaaaagtgttttcacaggaccgagatgttacgctgttaaggatacggctttttaagtcacgtgtaatt

SEQ ID NO: 6924 - DNA, 635 bp, Arabidopsis thaliana
gagctcgaattcgaagttgcaccatgtgatctctctgaaatgtaatctcggatcatcataagggtcgacttctggatattgcaagatcaatatatgaagttgtgcaatttttcaaggtcaccactcggtcactaaatgaaataaaagttttaggcctcaaaagtaagatatgtataaataaggggtaggtttggaaaaatattatttataaggcgaccgaagaaaaaaaagtcaacagctttgctttttttgttttgttatgtttttaattgtcgtgagtggttacgatttcttcaatttcgtaaacttctaggggagaaacaagggagatagagaagtgagagagggggaaaccctagattcgatctccattcgatttgattcgtttctcgaatcgaagcgatggttttctacttcaaggcccgtcctgatgctggcgactacaccatcttcatggggcttgataagttcgagaacgaggagctcatcaagtacggcttccctgaagatgtctggtaagccgtcttaatcgagaatcttctcgatttttcccgatcatctattgtttttgtttcgtttctcgagttttctcggatcggtatcagttttgaaatgcccagtttttcatttagttg

SEQ ID NO: 6925 - DNA, 1450 bp, Arabidopsis thaliana
tctagactataggatcccctgcctttatctgaacggtatgcatccttatctttgtctttgtcctgagatttgtcagagaattgtaacttcctcactgtatcaacaaatctatcccccttggagtcactgctactttcaaccttcacagctttccctttatttcctcctttcaagcaggcgttgtgggtatcaatgagttccttctgcctctgagggtccgggcagagtctagccatatccagaactaagtgagacaaaccataacctttcacatattccaagtaagttctggcatcgatggaaccatgacgatactttcctgatgtattcttgaaggccatgaataactcttcatcgtgtccaaggctggcatgtattttttcaaccaaacttttattgtcagactgtacatcagaaacaccttgcgctacttgaatgttccctgcatttgcactggtggatgatgacctgcgatttttcacagcggaaatttgaggagaatcagaatgagaaggctgcgccagtgatcttgtttcagacattttaggggttgaagacgagtgatgattattcctctttgttgcattggcggaactcagagaagaaccagatgagcatccaccaactgtggtacgagcatcttgtggaactgcagaagcaagagttctagtactttcaactctgtcatggtgcctagattgagattgagcagaagcaccagaagattgtaccctgcttgtaattgatatttctgccgggcctcggtttagtgctggccaagcttgagaagaaccagaagttgcacttctatttgtttgatgtctttgacgagtagtcgtggtgttactaactaaactctctgaattctgtccaaatcttgattggccttggtttgcacgatgtctttgacgagtagtcgtggtgttactaactaaactctctgagttctgtccaaatcttgattggccttggtttgcttgcacagagagtggaggaaaagaagattctccaagacgtgaatttccagagcgtcccacatgttgaggaagattattatcgtcgttaaaggcataagatgcttgagattccagaagcacaagattaggctcacgaagagaagatcggcgtcttccacggcgactgttcgggtattggaaactggcttgtatctgaaacagaaccaactattaaacatcataaagcaaaccaaaagatgggaaagataattaactggcaagagttgtactcggaaacgatacatgcctgtagtgatgcattttgttgagaccgagacattctacctccatggtcaatagcattatgcctctagaaaaaaatgcaagtgatcctttaaacatcattgtgtatcccataacaaacagtgtgaataaaaaaaatgtgttttacttttagctcagcttctgatttggaaaactatgaacttcttagc

SEQ ID NO: 6926 - DNA, 1404 bp, Arabidopsis thaliana
tgtatttctcttcatcatgctcctgtgacttgctgtacaaatccagtttcttaacccatactttgccaaactttgaaggctctataaagcattttcgagcttgccagagttgtttgaccttgtttttgaacttgtaacagaagctccttgtgtgtccagtctttccacaatgatagcagtcaaacacccttcgacctcgtctagatttggtccacacctttctgtaactagtcttctgatgcaatactgaagctttgggagttattttttgcttgatcggtttctgctcttgctttactgtgttctacagagctgacttgagtttactttcttcctcttcatgatatgttgtactctttacaaagttcatggtcttaggtctatcaagaggcgtcttggacacagaaggctgataacctaatcctctgtgatcagacccaactattcccatagacagaatttcatcaagattcttacccccattgttcaacattttgattttcttgtgattctcactcagttctctttccagcaaaagagatttctccttttcttgactcagactctcctggagacaattcatctttctttctattatctgtttctcaggcaatggaagcttttcaccaagagcttcttccttaatttcttcctcaaagagatccaattttgctgacagctgcagactctcctttgtaagtctcagcttgtccttgcttaatagtaaccagctatcatacaagatgcgatagtttcacttgtaatttgtgtctcatcactgtctgactcagaatcctcactgcttgattcattgtcgcccttcgcactgaaagcaacaaagttcagcataccacctgtctcatcttcactgtctaattcagagtcactgaagctcagaaaggatttttctttgcctttctgaatgcttggacactcagctttgatgttaccaataccatcacactcatagcacttcatatccttgcgtttggtgacaggacattctggttttgtgtgacccataccatcacactcatgacatgtcacatcacgccttttaccagaagtctcgttcttcacaggcctgctgcctgatttttcttcatcacttctgttccaacaactgggttcccttgcatcacgactgtctttgatttttcctctttcaacacgcgtaagagcttttccaaaatttctagccataagggatagatcatctctgatttcctgcagcggatcaggaactttttctttatcagccttaaacgttatccctttgttctgatttcgttgatcttcagcagcttccatttcttcagacttcagaattccaaacatgtgcttcatatttgagagtatctgtattctcatgatagctttgtgttccgttgataatatcttgga

SEQ ID NO: 6927 - DNA, 401 bp, Arabidopsis thaliana
cgaagatgagagaggtgataatgagagggatcacaagggccgtgtagaagaatgtcttggctcctaagtagccaaacattaccacttggaatagaaacaacgctgctagtatgcgctggtgaatatgcggccacattcttccatagctctcgtatgatggaacgtacactttcaacgcctgtcataccccgaaataaaacagttcaagatcacatttttgataacctaagtgtttatgggtatagtaaatagagagaaagtctgacctgattcctgaggactagccagcctaaaccaaagtaggtgatgccgaatatgaggataagaggagcaatgactgaatagcagaacgtgattgtgaggatgagcatgtctccgggaaccctagtcgcatagcttaa

SEQ ID NO: 6928 - DNA, 1258 bp, Arabidopsis thaliana
tttcccgatggtttgacggtaatggtgccagaaaagcatcaacgtccttggaaacttccttagggattcttctgtatgtacgaaggttactttacagacgctgggcttcgttttcctctccccgattttctcgtacgatactgtcttcgacggaggattgcgttttcccagctcgctcttgctgcggtttgcaatgcagttggcttgatgatgttgggagccgaccgtgaagttgaggttgatgccggccttttggaagaggctacgacctttgctgccccaaaagataatccgggattatgtcaagtgaacgctagacctaaccataagttggtaaaagggatgaagagtaaagttccggattggcggctctacttctttttcgttgagttatccgagatttctgtttcggatcttgacgttttgttcttttttgcgagtggaatatgtttcctggtagatctttttagttatgctcatgtgactgtcgtgaatgttgctttcttaccgcgtttagttttgtttgcagcgcacgattttcaacctcgaggaacttttggagggatatctgcgagtcttgcagctgttaggacgagaaaacctttgcattggccagacgttatcgactcgtttgaaactcgtaagtactttgaaaatattgttcgtttgtcaatttgtctcgatatgtttaaataatggagattgttttgcagattcaccgtcaacttcagagatgggaaaagctagccattagtttccgatttacgctgatacgttcgggaaggtagttcagtagcgatggatgtcgatgttcccgctgttgtaaccaaccgcaacaggtggtggcgaaggttttagagagtggcgagatcgagactaaccaacagattactaacgaggatagggcgacacaactttcagatgctcgagttgggaagaaagcttcgggttctgatagcgaggatagggcgatgcggctcttagacgctcgtgccaggaagatagcttcaaattctgttaccgaggatggagctattttccgtgagccgttgagtgttcatgcttccccgcgcagtaaggtttctcatggaggtagttcaagagattcttttcccgtcgtccatgagagaggctcaactcaggatattcgggaggtagatcattccttttcattcaactatgataggaagggttatccgttttcggacagcaggagttattgcggtgagtttgctagaaaagttaacgggttgtctcg

SEQ ID NO: 6929 - DNA, 675 bp, Arabidopsis thaliana
cttttttaaatgtaaatcatgcggttataagtcatggtatcgtaaagactatgagtcagcttgaagattaccgtagagaaatggagtctagagaggttgatgaagatgacatcgtcgttaacgctcaacatagatctattgtcgcgggacttcgttctctaagatgggctcctattggtgatgagtccatgatcgttcctgatccgcgggatgacggaccaacgttacgcaatagaaagagattgactaacttgattgaccaatccatttttcccaaaggtttgacagtagtggtaccaaaaccgcatcaacgtccttggagacctcctcagggattcttctgtatgtatgaagattattttacagatgttgggcttcgctttcttctccccgattttctcgtgcgatattgtcttcgatggaagattgcgttttctctaactcgctcttgctgcagttcgctatgcagttggcttgatgatgttgggagccgactgtggagttgagatcgatgcggacattttcgaagaggctacgacctttgctgttccaaaagataatccgggattatgtcgagtgaatgccagaccttaccataaggtcgttaaagggatgaagagtaaagttcaggattggcggcactactacattttcgtggagttactgagatttatg

SEQ ID NO: 6930 - DNA, 923 bp, Arabidopsis thaliana
caaatctcaaagacgtaatccatggaagcaaaagacatttcgagaaaccaccaataagtagtcctcgttctattggaagcaatgagtttctaaatcctataactcatgaagttattcttagtaactcaacttgtgagcttaagatcactggtgtcggagcatggcttcacctgtcggagcagcggattccggcggaggtggcggtggaggaaatggtcggtctacgacttatgtagggatgcttagaccaggaacaccgatgcattatcttaaccattcagcttcttacaggagccaaacaagaaagggttcgtttgctttgtcggagagagatcgaggaggaggaggaggaggagaagggttagggtttcatacaaacagaagggtttcattggagatgaacagagaatccaccattaatggaggcaacaattcctctgtttcttgtcataaatgtggtgaacagttcaataagcttgaagctgctgaagctcatcatctctctaaacatgccggtaagtaaatttaacaaattatgcaatttaggcttcatagtaacaaaagttaggttataaaaatcgcaacttttataaagataaaaacagagtcttgaaaaaaacagagttttgcaattaacaattcaaagctaaaatgttaaactttaacaacatttactctaaatttccgattttgattatgcagtttgattcaaagtttctcaaatttatataactttcatctaaattgcagataacggagcttgtagaaggagattcatcaagaaaaatagtggagataatctgcagaacaagctggttaaagtcagagaaccaatgtggaagaatcgatagagttttaaaagtacacaacatgcagaagacattagctagattcgaggaatacagagaaacagatttgtatta

SEQ ID NO: 6931 - DNA, 832 bp, Arabidopsis thaliana columbia
caaagtcaaaggatttcctgcttggcctgccgtggtatgtgcatctatggctttgctttttctgctatttcttctcttttctgtttggttctgcaagaattgcttattagattcatgatttagtttccagttgacggtagaaatagctataaatttagggtttgaagttgcatgtatgtgcatctgtatataattcagatgaaagttcctctctgggattagcaactgcctaagggatatggatattttcagaggggttggtgaccttatctagtttttggcagattgcaggaatacccgtgattagttgttgtagttgttagtagattaccactgatccagactttcgtttagcaactttataggccattttacatcttctaagttttggatatatgatgattattccctataatatcccatttgccactttccagaccagtttgaatttgattttttggatcacttgctcctgtgctaattgctgggagtgatttcaggttgacgaaccggaaaaatggggccactcagccgattcgaagaaagtaactgttcacttttttggcactcaacagatgtgagttctcaggcctttagtatcaccctcatatattttgttttgctttctggtcatacttcccaaatgcttacattttcagtgcgagttcctatttgtcatcctacacttattttaggtccttaaattttgtgtcccgtttgagttgattaattcattttattatgattcttattcgaggagataaacttcggttcttgtctcactagattaggacgtagaagctggtaccttggttatggctgtagattttaa

SEQ ID NO: 6932 - DNA, 588 bp, Arabidopsis thaliana
tgtggtgcttatctttcagccagctgaggaaggtttgagtggagcaaagatgatgagagaagaaggagcgttgaagaacgttgaagctatttttggtatacatctttccccccggactccctttgggaaagctgcttcacttgcaggttcatttatggctggagctggagctttcgaggctgtaatcactgggaaaggaggtcatgctgccatccctcagcatacaatagatcctgttgttgcagcttcaagcattgtcctcagtcttcaacacttggtttcacgtgaaactgacccttcggattcaaaggtttcattttttactctttgatgatttctctcctggtctatgcttaatttgtagtataacttattaaggtttcttctgtaggtggtcacagttactaaggttaatggaggcaacgcgttcaatgtcatccctgattcaatcaccataggaggaactcttcgagcctttactgggtttctcagcttcaggagagaacaaagaggtgatctgatcctttttgatttttttctctgtatgttattttacatagaatcacaaacctggtttcacttttgatc

SEQ ID NO: 6933 - DNA, 868 bp, Arabidopsis thaliana
agtgaatatatgaaaatttcgaatctttaatccacagtattatcttatactttaaatgttggtctttattttatacttgtctctctacctttgaggatccatagcaatggaagtcatagatgttagatcactgaattcattggtagaataaaatcttatataatattgtcactagtaattgcaagttgctatatgttaataactaggcacagatctcattatacatagagagatagcataagaaaacagagaggagacctatgcacagatctgagatctcagtggatgaagtctttgtttatacatagagagatacaatataagaaacagagagaggcctatgcacagtcacagatctctcaattaaattcgcaatggagttagaaaaagttcacgtggttttgttcccatacttgtccaaagggcacatgattcctatgctccaattagctcgtctcctcttatcccactccttcgccggagacatctccgtcaccgtcttcaccactcctttgaaccgtcctttcatcgttgactcactctccggcaccaaagcgaccatcgtcgacgtacctttccctgataacgtcccggagatcccacccggcgtcgagtgcactgacaaactccctgctttgtcgtcctccctcttcgttcctttcacaagagccaccaagtcaatgcaggcagactttgagcgagacgtcatgtcactgccacgtgtcagtttcatggtctcagacggtttcttgtggtggacgcaagagtcagctcgaaagctagggtttctcggcttgttttctttggtatgaatgcgcttccacgttatatgtgacagtgttttcaaaaccacttctaactaatgtta

SEQ ID NO: 6934 - DNA, 334 bp, Arabidopsis thaliana
cgtaatgccacagcttgagtgtttttccggtccggcataattcacgaatgataagtccttagctatgaagccactacctctcacgcctgcacatcatttacaaaagtaaaaactagctgattagtgaatcacaataaacattataatcgttagtcgtgaagcctatgaaaggtatttatttgagtaatatttaatataagctgcagaaatgtttagtattataaaactgagggattaaaattacatttaagaagaaaacgtaccaacggtagcagagtgctaggctgtccatccatctgcatagctgcggttagcttatataactgtccgtccg

SEQ ID NO: 6935 - DNA, 984 bp, Arabidopsis thaliana
caaactactccttatgatcgtcactctagttcgtcatgtcgctgctgctaatggtcagatcgaggtgagtttcagcgatattctccgagatctcgccggaatctcgtcggaatctggtatttttgtttctgatgtatctacttttcatgcagattttgtcattgcttgtggaacgatttacgaatccagatttgttgaatcgtcacaagcaggtttttgattttcgcattgatctgttctgtgtatagttttcatgaatcttttgctgatgctgtgattcgtcttgtagactccgttaatgttggctgcgatgtatggaagaatctcttgtgtgaagaagctagctgaagttggagctaatgtacgtttacttttttgttttgcaattgaatcgattttggatttggtaattgaaaatcttttggaatctgcagattttgatgtttgattctgtgaatcgaagaacatgtttgcattacgctgcttattatggacatgctaattgtgttcaagctattctctctgctgctcaatcaagtcctgttgctgtccattggtaagtctcttcctatctttgatcagagtttacttattcctgagaatgaaacttttgacactcaggggttttcattttcaggggatatgcgagatttgtgaacataagagatgataaaggagcgactccgttgcatttagctgctcgacagagacgacctgaatgtgtgaatgttttgttggatagtggttctcttgtttgtgcatctactagtgtatatgggtaatggtttttcttgtcatgcattgaaatcaacagttcttagatgttttgttctattggaactgattctttaagcttttgttgaaacagttctccaggaagcacacctcttcatttagcagctagaagtggatctatagattgtgtcagaaagttgcttgcttggggtgctgatcgtcttcaacgagacgcttctgggtatatat

SEQ ID NO: 6936 - DNA, 916 bp, Arabidopsis thaliana
atgctaactgcaatttaccgatgctacatacacctaacaatgacagatgtgatgttattatgtgttgtttgtaggtagttatagtagaggatgctaaacatggaaatgagattgtgtgattatattacaatctgtgttggccagtcctctaagccatcgaatatatgagtagcgtagattatggttgctcctcgttcttcacattcctttctcagaaacttcaaaaggtctgctctagcgagaacgtcaagatcaacaatcatttcatccaaaaggagaacttatagatgattcaagaaagtaggattcagataaattgttgaagcaagtttcatgattagatactataatgatcttagtccattgttttaagcatcaaaccatttcatcttctgaagcatcaggtttggctaaaacctgtatacttttggttggagataagggtttaccttgaatggcttcaggagtcccatacagatctgtacacgtcttctttggccatcggataccttgtgcagtctccatgagatgtcgatatccaacacctgaaccaaacacaattagaacaaaacagtaaggtggagaatcacattgatttgatgtaaaaaaacagagtaataatactccagacaatgaagtgctcgtaagtttggtatgtgacaaagatcaaagatcagaccatgctctagctgattttttgttttaacattggaattcagaatgaacaaatgagttaagactatagcaaatacttaaaaagtaaatttgaatccttcccaaaacttcaaagaatctcatgtaaagatgcattaacagaacctaacccatcaaatcaaagtcagatttttgaattatctactcaccttgatcaactcatctcttctctgaggatcaataccagccactccaaatatca

SEQ ID NO: 6937 - DNA, 980 bp, Arabidopsis thaliana
gactaacatctcgggagttaggaataactttattgttcatggaggtgaatttctcgctctatcgtcatctaagatacacatgagtcccacatttcatgaacatgatgttctttcgctttttcttgatctggtgttggagtaaaataagctcaacgttcttgccaagtaatgtgtgtttttctgagttttagaaaattttcgggttcgcaggatttcgcaacacgaatagccaaatctcggcttcacttacatcaaacgggaaattcctagtatcagcaagcgaagactctaatgtgtatgtatggaactacgactcagactctcgagcaggaagaagcaaacgtgtcacagtcacaaactcatacgaaaacttttattgtcgtgacgtctctgtggctgcaccttggcctggcaaaatcagtaacaaccacactaacaacagccccgaacagtcatccttcacagccaataataaccctccgacacctgtcaacgatccaaccaacaacaaaaccgtcaccaacggtatcatttcaagcgccacaaaccgatacttcttcgatagagtctcagcaacatggcctgaagaaaaactcttgctggctgcaaaaaaccgagccagaacaagccctcgtgtgagcgtggacatgtctaacatacaggttaacacaaaaccgagtgcctcggcgtggtctatggtgattgtgactggcagtctacgaggcgaaatcagaatatttcagaattttggatttccagttcgtctatgatgcaaggagaaggttttacaatatcaaaatcctaaggcaaagtgaaattttcccttagtaaaaccatctcctgtcaaaagtgtatagattgagagaaggtttggttcatccactgacttctctcgttttttttttttaccacgcttcttttatttatctgatttgttatctctaaaattcaaatctctagcaaatatatataatggggga

SEQ ID NO: 6938 - DNA, 553 bp, Arabidopsis thaliana
cccgtgaattatgccggaccggaaaaacaccaagctgtggcattacgaatagctctgacctctctgcttactaccgatgcagctttgaaagctaccaagacaccatttacgtccattcacacaaacagttttatcgagaatgtgatatatatggcacagtcgatttcatatttggtgacgcatcggttgtgttccagaattgtagtctctatgctcgtagaccaaatcctaaccagaaaatcatatataccgctcaaggccgggaaaactcacgtgaacccactggtatttctataattagtagcaggattttggcggcacctgacttgatccctgtgcaagccaacttcaaagcatatttaggtctgtccgtggcaactatattctaggacggttattatgaaatcgtttattgatgacttggtggatcctgccggatggttgaagtggaaagatgattttgctcttgaaactttgtattatggagagtacatgaatgaaggacccggttcgaacatgacaaacctgggccaatggcctggttttaagcgta

SEQ ID NO: 6939 - DNA, 838 bp, Arabidopsis thaliana
gaggatcaggatcccctggatcaagaatagcgattttaattccaaaactgcaaccaaggaggatttttcttaaatggttaccacaaaatttgggttgtggaagtcatctttatggagtgtctttaatgtcctgaagagaggatgcttgggagtatcaaatcgtccgttgcacaaatctagccctccaacaaatgctacgatctttcttcggttctgagctgcttcagcgtctacaatcacagttttttgatgatgcgtgtagattgttccaacttcctgatcatcataatgacactcaaatttcagatgatgaaactatacacacgggagtttaagcagtaagcagtaactaatgagcatcttacagatttttttatgaagctgtgacctttccctccagatctgggacaaaggagaacttgcaccgacgaatgcttgaaaaaacggcgagtctcctcatcgcttgtgttcataactccttgctacaacaaaacaaaagctttcattaaaacgatagaaggatcattgcttcagttagtacagacatgtaaaacgatctaactgaagcaaactcatgctttccaacaagatagacagtagcgtggatctattttggatacggaacattagccggattaaatagaaacacagagaaaaacctatgcgaaaaattaagaacatagtattaaacctgcatatttttttaactcagcattcacgcaaacagagaagcaacaacagagttatgtagattcttactgttttgaacccagaagactccttgacgttggatcgcccacaccaaaaccaacactctaacaccttcttgagatttgac

SEQ ID NO: 6940 - DNA, 593 bp, Arabidopsis thaliana
ctcagagttgtggtgctatcttactcttccagtagcttcctttgggtcctttggaaaccctttaactgaactcgaatcaattgaacggaaaacctaaagattaatatcattggagaaaaaatgagattctttttgtcaccaccacaaataacaataactagcaaaaaaattagacttgctaaattacctgaacatgccaagactctggatcattatcattagcagaagaagcttcggaaagtcccattatgtcaggaattctgtctaacctaagcaaagaatcatcagaagaagttcttagtctcccaattccgcgaggttttgaagccttcatccagcgttcctgaaaattagcaagcacatcatatgcagctggaccatcaatcttgctgtgcagatcatgccatggttctcttggatcatcatccgcagtagtctaataagaaaaacagaatttacatggatcaagaatagcggattctaattccaaaattgcaaccaagcaggttttttcttaaatgattccacaaaatttgggttatggaagtcactttatggattgctttaatgtctgaagagaggatcttgggagt

SEQ ID NO: 6941 - DNA, 746 bp, Arabidopsis thaliana columbia
ttaattttgttaacggaatctgttaatctacttaacatcatgtctaatatgaccattagcaaatattttgtatttattaagaaagtcacataagtttgatatttattagaaaaatcaacataaatttgatatttatttcgtttcgttggatgttgagaatttaaacaaatgttttcaaataaaagttggagattttagtgataattttccgataaaagaatgtcatttctttgagaatgccattacagttttaatttacttgatatgttaaaaacatttttgtgggcttaaccagggcccattaatccgagttaccaaaactcgcaactcgttaacactccgagtcattgactcagtatcttcttccaacgaaatttcaatttttcattgttcttgatgaaactgaggccacgacgaatcgcaaatggaggcgatcaaaccacttccacaggtctcgagcttctccgcttcggtatttagctttctcgatggcagattcaaagaatccacggatctctctcattctacgggtctggtttccgagttacagacggagatttccgaattggatcagagattggccggattaaatcgccagctcgagtcaggtctcgcatgttacgcttcgttttccgatcgcgtcggtggtctatttttcgaggttaatgccaaattggctgatctctcttcttctacctccgttactgtccgcgtcaggttcgtatgatttcatcggggatcggatc

SEQ ID NO: 6942 - DNA, 819 bp, Arabidopsis thaliana columbia
  unsure (1)..(819): unsure at all n locations
caagtgcatgctacgttgttctttctttatgcaattgtgcgttccttgtatgtttccacatttttcatgtctatgcactctggttatttatttatcttccaatggctttttcagtatcttatattattgctatatactgtatatagttttttaaaattccaaaaatgcatgaaaaagtagtacaatggactggagagatcgtacaaagtcaatggcattaaaaagaaacttgatgataattatatatattttaaattataaaatagaaatgatatgcaacgtataatgtggtttttattattcttgaaggccacatcgttttaatagaacttttgtgaaatgacttctgaaacgatagttcaacaatttcgttttccttaacaaacaaatttatgaaaggacttgcgtttaactatttcgctggacttattattttgggccttgaccttttctagttattacttttatttatttcaaaaacacagttgctcgtattagctgaatacacaactgttcactctagggagatttttttattatttatgtgccgttgcatatctgtttttcttttctgggaaaatgctatattatggccatgttcgtttgcttgtcgctggtaactgaaaccagcgacacgacgcaaaagttgtttgtttgcctatcgctgattcagcgacaaaaattagcgacagtcgccagcgactgcaatttttagtcgctgaaatttttagcgatcagtcgttggtttcagcgattagttgctgcttttggtcgctggatccagcgacatgcaaacgaacaactttgcgatcanaaaat

SEQ ID NO: 6943 - DNA, 882 bp, Arabidopsis thaliana
cataatgatcagagtcttggcatgttcaggtaatttagcaagtctaatttttttgctagttattgttatttgtggtggtgacaaggaatctcatttttttttccaatgatattaatgtttaggttttccgttctattgattcgacttcagtcaaagggtttccaaaggacccagaggaagctactggaagagtaagcacaactctgaactgttatagtttgtcgtcatgttgctattctctacttattatgtatttgtgaacagaatcttctatgtgggaagaacattctcatagatatgagcatacatgcagcttatgttaaggcgatacgatctgctcagcacttcatttacattgagaaccaatattttcttggatcttcattcaactgggattcaaacaaggacttgggtaagaaaattgaaagcttttgaaggcaagcttaataatggatgcttgcagtatataaacaaagaattttggtattgcaggtgctaataatctaatcccgatggaaatcgcgcttaagattgctaataagattagagcgagggagaatttcgctgcttatattgtcattccaatgtggccagaaggtgctccaacaagtaagcctattcaaagaattctctactggcaggtaaataatctgttgattctttgctagaacaacccaatctcgccttttttataccggaatttttcacaacctctgcagcacaaaaccatgcaaatgatgtatcaaaccatctacaaggcacttctggaagttggtcttgatggccagcttgagccacaagactttttgaacttcttctgtcttggaaacagagaggttggaaccagagaggttcctgatggaacagttaatgtatataatt

SEQ ID NO: 6944 - DNA, 515 bp, Arabidopsis thaliana columbia
tgacaaacagtcatatgaacttcggctacaccatcaaagctttaagaagcaagaagaagcttggttagtgttttggagtgaaatatgactagatgtgatgtgtatgagtgagtataacaactagaaccgcaacaagattttaaaagcctaagtatgtatcttttacattgttcgtttgtctatagctggattcagcgaccaattatagcgacaatccctaataactgtcgctgtgttgttcgtttgactgtcgctataaacagtcgctatattgtttagaaaaattaattattttttgtgctaatttatattttaaaatcaaaatgtaaatcatatatatcatacaccatgagaaaaaataaattaatatatttctttattttagttttatcaaatttaatttgactataattagcttacattatttgaatttcatttattttcccttcatttaatacaccccttaatccttcacctagaactcaaagccctcgtgatatcgcagagaaaaatat

SEQ ID NO: 6945 - DNA, 798 bp, Arabidopsis thaliana
tgttttgtttagggaactgtggtgcttatctttcaaccagctgaggaaggtttgagtggagcaaagaagatgagagaagaaggagcgttgaagaacgtcgaagctattttcgggatacatctttctgcccggattccctttgggaaagccgcttcacgtgcaggttcatttttggctggagctggagtcttcgaggctgtaatcactgggaaaggaggtcatgctgccatccctcagcatactatagatcctgttgttgcagcctcaagcatcgtcctcagtcttcaacaattggtttcacgtgaaactgaccctttggattcaaaggtttcgttttttactctttgatgatcttcacacctggtctatacattatagaacagaactcattgaggtttcttctgcaggtggtcacagtttctaaggttaatggaggcaatgcttttaatgtcatccctgattcaatcaccataggaggaactcttcgagcctttaccggatttactcagcttcaacagagagtcaaagaggtgatgcgacccaagattgcgcctataatatttcccggtattgttgctttacccatagaaccaatctccggtttcaacttttgattctaggtgattaccaagcaagcagccgttcaccgatgcaatgcgtccgttaatctaacaccaaacggtagagaaccaatgccaccaacagtgaacaacaaggacttgtacaagcaattcaagaaggtggttagagatttgttgggtcaagaagcttttgtggaagcagcacgtgtaatgggat

SEQ ID NO: 6946 - DNA, 643 bp, Arabidopsis thaliana
ggttgtttcagttctgaccctttttctgtttatcttattggaaagcatgagtttgcttcaattagataattatacatgtctgtactaacttagcaacaatccttctatctatttaatgaaagctggtgttttgttgcatgtagaaaggacttatgaacacaagcgatgaggagactcgccgttttttcaagcactcatcggtgcaagttctcctttgtcctagatatggggggaaaggtcacagcttcataaaaaaatctgtaagatgcttattagttacttcattactccgtaaactcatgtgtgtatagcttcatagtctaaaatttgagtgtcattatgatgatcaggaagttgaaacaatctacacgcatcatcagaaaactatgattgtagatgctgaagcagctcagaaccgaagaaagattgtagcatttgttggagggctagacttgtgcaacggacgatttgatactcccaagcattctcttttcgggacattaaagacactccataaagatgacttccataacccaaattttgtggtaatcatttaagaaaaatcttgtttggttataattttggaactggatgccactattcttgatccgtgtaaaatatgttttcatattagactactgag

SEQ ID NO: 6947 - DNA, 315 bp, Arabidopsis thaliana columbia
  unsure (1)..(315): unsure at all n locations
gatctaatcatcgagaaataagaaatatataggccctgttcgtttccctgtcgctggatccagcgacacganccagcgacacaaccagcgacacaaccagcgacaacatacattgttcgtttgtctgtcgcttgactcagcgaccaattacagcgacaatcgctaataattgtcgctgtgttgttcgtttgactgtcgctataaacagtcgctatatttttttaaaaaattaattatttttggtgctaatttatattttaaaattaaaatataaatcatatatcccccccaccatgagacaaataaattaatata

SEQ ID NO: 6948 - DNA, 631 bp, Arabidopsis thaliana columbia
tttgcactctgaacggttgtgtcttttaatcataactttttctaaaaaatatttattgttgtttattctcgcatgtgtctactagtgcaaccttcctatattgtaattctctgtcaaaatatttacggttattttttccggttagttatatatatactattgaataactacaaaatttataatatgcatcatttggagttagatttgttttaaagaaattattatataaacaaatttataatatttttctctgcgatatcacgaagggtttgagttctagtttaattaaaataattcttattaaattaagttaaaataaattaaattcaaataacataaactaattatagtaaaattaaatttgataaaactaaaataaataaatatattaatctattttcaccatggtgtaggatatatatgatttatattttgattttaaaatataaattagcaccaaaataattaatttaaaaaaaaaatatagcgactgtttataacgacaatcaaacgaacaacacatcgacaattattagcgattgtcgctgtaattggtcgttgaatctagcgacagacaaacgaacaatgtatgttgtcgattgttgctgtcgctggatccagcgcagagaaa

SEQ ID NO: 6949 - DNA, 503 bp, Arabidopsis thaliana columbia
tcttttattgcaattagcctatattgtaattttctgtcaaaatataaacaaatttataatattttctttgcaatatcacgagggatttgagttctagtttaattaaaataattcttattaaatttgataaaactaaaataaataaatatattaatttatgttttctcatggtgtatgatatatgatttacattttgattttaaaatataaattagcacaaaaaataattatttttttttaaaaatatagcaactgtttataacgacagtcaaacgaacaacactttgacagttattagcgattgtcgctgtaattggtcgctgaatccaacgacaaacaaacgaacaatatatgttgtcgctggttgctgtcgctgatcgctggtcgctgtcgctgaatccagcgacagagaaacgaacaaggctgtatatgatttttttggctacggtaccttcttgtatttatcccgagttatgatatccatttttgaagcgttttttgtg

SEQ ID NO: 6950 - DNA, 561 bp, Arabidopsis thaliana columbia
  unsure (1)..(561): unsure at all n locations
tattctttaatttatattttttgatcgctaagttgttcgtttgcatgtcgctgatccagcgaccaaaaacagtcgactaatcgctgaaaccagtaactgatcgctaaaaatttcagcgaccaaaaattgcggtcgctggtcgttggcgactgtcgctacttttggtcgctgaaccagcgacaagcaaacgaacaacttttagtcgctgtcgctggtttcagtcgccagcgacaggcaaacgaacaggaccatcgtctagaaaaacctattttgggttaattaataattaatgttctaaaatacagtacagtatgcataaccgtatttatgttgtactgtgataaatcgtactgcattttcgctatacaagtttttatacgctggcaattgtatagttgtatatacaacattgatacggtaaacactatatttttaaaatgattcgaaaaccaaaataatattatttttttgtcaaaagttatattattttattagtgttttcgattttttaaatattagaatattttgaatactgttttgccangttggaaattttaaata

SEQ ID NO: 6951 - DNA, 512 bp, Arabidopsis thaliana columbia
aatggttatcgtctcctataatctaggagcacatgattctcatttatggtaacacactgcaaagtaatgctttatatcacaatttggtgatagatttgtaagataatttcaagataaacatctcttagttattatgattctaagtctatgctttaacgaatgacacttcccaaatcaataagttatgaaaggatggttcaatattcttctacaaataaagatgggaaagatcaaagtttccatggaaccgagtcctgcagaaaacaaggcaagtgcgtcgcaagagtttcccattaacaaaaagctctgctgggaagtggaatcactcacaaagacggtctctgacagaggatgaagagttgacaaatgataaaagccattaccagagaagtcgccagctcaaacccaacaattttcgggaaatgccatccattgactctctttagatagcttgtgatcgaaggcattgttgcgatgatgactgcacatgtgtatatgatagagatattgtg

SEQ ID NO: 6952 - DNA, 552 bp, Arabidopsis thaliana columbia
taaaactaaatgtcatggtgtatgatatatatgatttacattttaaatttaaaatataaattaacaccaaaaataattaatttaaaaaaaaaatatagcgactgtttataacgacattcaaacgaacaacacagcgacatttattagcgattgtcgctgtaattggttgctgagtccagcgacagacaaacgaacaatgtatgttgtcgctggttgctgtcgctagtcgctgttgctggatccagcgataagaaaacgaacagaacctatgtaaactataatataaactaagaattcaaatatgacgctttaaaaaagtaagaaaaaattatgcaaaaaaatgaatatgttgcacgttgtaaaagaaaaggcaattttaccttaattcaagacgaatggaaattttgtaaataaaaattcttctacatttttggtcagatatttttttattttgtttcacgtcgctattaatgattcttttatggataacgttgcattatccaaacactgatgaactacagaagttgggtaaacacgtgtctagcaacacat

SEQ ID NO: 6953 - DNA, 647 bp, Arabidopsis thaliana columbia
aaactaacaacacagcgacaattattagtgattatcgctgtaattggtcgctgagtccagcgacagacaaacgaacaatatatgttgtcgctggttgttgtcgctggtcgctgactaagtttgagaaaatatattttaatgaaaaagatatattttagtggtatttttgagaaaatatatattctagttttgactaagtttgatgcaaatactgagttagaagtcgtgataagatttgagggaatgcttagcaaacaatcgatattgataaaaacaaaaattgcttcaaacatttttatttccctcttgatgtcatgacattcctcctaaagaacctccaaaatagagtctaaaaatcttctctttttgctttggatccacttcgtctaataaaaaaacaacaagtatggagtctcaatcgttgaacctccacgagattcctctcactcgacatccttatttgctattgttcatggtttaattacctgaatactttacaaaaaactgaaaatatcgaaccggaatcaaaacaaatcgagaacccaaaaccaacacaagtagtatttttttttttttttaaaagtagtcttttgtaaaatttataatattgatggtaaaatagtattttgtaaaaatttataatattg

SEQ ID NO: 6954 - DNA, 215 bp, Arabidopsis thaliana columbia
caaacgaacaacacatcgacagtttttagcgattgtcgctgtaataggtcgctgaatacagcgacagacaaacgaacaatgtatgatgtcgctggtcgctagtcgatgtatgagttctgaaatcagacatagtctgatagagttaaaataagatatttattttaaactgcaatagctaaacatatatatatatatagtatatatatatatatata

SEQ ID NO: 6955 - DNA, 839 bp, Arabidopsis thaliana columbia
agaggattacaagaagagaaaaaaaacattacagaggatttagtactgaaatacagattcctagttaaccaaaagaaaaaaagagagtagataaactgattcctaccagtattattaacttatgaaacaaatgaaaatgatttagccaatattattaatttattaaaaatttattaaaaatattattttgtttattaagtttaaataaatatttatatatactatttatataatattttgttttgccattctgcatatccattcaacatattttaaacataattttattgtacagtttttcattctgcaaatttttattctacggatttttattatgtaacttatatcattatgatattatgatattatgcaatgtttatcaatgagagcataaaactggtgtctataaggccttcgttaatatgggccgtgtgcaaatacattcttaatcgaatcaaaagaggttcatctcgatgacagatgttattatagacttataccccccacctattattgtttagcttctatttctttttcttccatctacgaaactgaacaatgattagaagatgagaccgtcgacgagattgaggactatggtcctgttcgtttgtctgtcgttggtgactgaaaccagcgacagcaaccaaaagttgttcgtttgcctgtcgttggttcagcgaccaaaagtagcgacagtcgccagcgaccggcgactgcaatttttggtcgctgaaatttttagcgatcaattgctggtttcagcaattagtcgctgcttttggtcgctggattcagcgacatgcaaacgaacaacttagcgacaacaagaggtggaa

SEQ ID NO: 6956 - DNA, 1350 bp, Arabidopsis thaliana
tcgtttatatatttgttttacttgttttgcacatacacacaaaaataaaaaagactttatatttatttactttttaatcacacggattagctccggcgaagtatggtcgtcgtcttcatcttcttcctccatcatcagatttttccttaaatggaagaaaccaaacgaaactccgatcttctccgttctcgtgttttcctctctggcttttattgctgggattgggaatttctcaccgctctcttgctttttagttgctgattctttttccttcgactttctatttccaatctttcttcttctctttgtgtattagattatttttagttttatttttctgtggtaaaataaaaaaagttcgccggagatgacggctgtgacggcggcgcaaagatcagttccggcgccgtttttaagcaaaacgtatcagctagttgatgatcatagcacagacgacgtcgtttcatggaacgaagaaggaacagcttttgtcgtgtggaaaacagcagagtttgctaaagatcttcttcctcaatacttcaagcataataatttctcaagcttcattcgtcagctcaacacttacgtgagtttcactctaacgaaaactcatttactctcaatttaatgcttcatttaattcgtttggtgaattgaatcattcttttgtagttggttagccaatttcgtaattttctcataatttgggggttggtgagaaaaccttctagaagctgagaatgttcttgttctttttttttttttttttttggtttagggatttcgtaaaactgtaccggataaatgggaatttgcaaacgattatttccggagaggcggggaggatctgttgacggacatacgacggcgtaaatcggtgattgcttcaacggcggggaaatgtgttgttgttggttcgccttctgagtctaattctggtggtggtgatgatcacggttcaagctccacgtcatcacccggttcgtcgaagaatcctggttcggtggagaacatggttgctgatttatcaggagagaacgagaagcttaaacgtgaaaacaataacttgagctcggagctcgcggcggcgaagaagcagcgcaatgagctagtgacgttcttgacgggtcatctgaaagtaagaccggaacaaatcgataaaatgatcaaaggagggaaatttaaaccggtggagtctgacgaagagagtgagtgcgaaggttgcgacggcggcggaggagcagaggagggggtaggtgaaggattgaaattgtttggggtgtggttgaaaggagagagaaaaaagagggcccgggatgaaaagaattatgtggtgagtgggtccgtatg

SEQ ID NO: 6957 - DNA, 1361 bp, Arabidopsis thaliana
tgacgaaaaaaagagaaatcaaatccagtaaaaaaaattaattttcgttgattccgtcggagtgaatcaacgtcaatctcctcgtaatcgtagtaaaagtaagatgtattctactaaaggtaaattttcaacttaaccctaatttcgttttatgttttcgattctgtgaatttgtgaatgcttagtaccggaatcccaaattgaaatgcagatccggcggtgtcttccaccggagcttcatcggacgttgataattgggacttaatccctactttgcctaaaggcctcttcgctgttgacggtttgccagagggtgctcggcttaacatctactccacaccggagtatttgggttctctcgtcaagctactgcacggttctgaagcctgggctatattaatgtcttctcaatttaggaaattgttcttactccctgttgaaagatgctctcactcagcgaaattgatccatggaatgctgtcgcgtcaagtgattacccggaaaattaacgaactgtgggtggtttatggtgggtttccttttcgtttttctctgcgcgagttccacatttccactggtcttttgtgtcatcaaattcccactcaagctgaggttgaagaacaccaagaccctgcatatctgtgtgtttggaatcgtctttttggggagaagaaaattgtgtttgtcaccgaagtgcttcagatgctccaagatgatttggaagcgccggctaacaagaagctaacgacttggaaaaaattatgtctagctctaatagtcattgttgatggtgtggttgtatgtagcaaccggttagccgggagagtaacctctcggtttgttgaaatgttacatgaacctgagtttttcatggcttacccatggggccgtgaggctttctcttcaacaatggagcgttttggccctgaccttggggattcgaaccctatagttgaactgaagaaacgtttatgtcagaaaaccagcctttgttatggcttccctcttgcccttcagcttcaagtcctcaactctattccggccctgtgtagcaagataaaagatcctactgatatgaggaatttcatagaccgatctcctgttgtgctgggcaagactattctcctccgtgaatctcctgttcttgaggttgagtgtgatgctaatgtaagtaatattactttttccatcattttctgctttttttcctgatcttctatttatatgataagccacttgtttccatttctcccagttatctgttgcctacactttgactccctctgtagtacttaatgagaatgaatttgcttggtctaaagaaaacgatgatccgaaggttgaacatatgcttggtttga

SEQ ID NO: 6958 - DNA, 839 bp, Arabidopsis thaliana
cccactgccgtgtttctacactaggcgtctggatcagggagagcaaggagagatgcagcatcacgtgctatgcaaggtggcattcacagcgtcttaatggtaacggtgaagttagtgaccctgcaatcaaggtccggtagaatctttttatatgtttcattttacattcacactagatctctcgttttttttttgtcaaacatttaatctatatctcatagtctgaacgaacatactgttttgtaattaataggataagaacttagttcttcatcaaaagcgcgaaaaacagattggaaccacccctggtatgagttctgtttgatgaagaagtgttgttctcatttttattttgaaactttgacatgggttatcacttacatctcacaatgtcatcaggtttgctcaaacgtaagagggctgctgaacatggtgcaaaaaatgccatccatgtatctaaatctatgtacgatttttggctttgtggtctggttttcaatgcgtgataattcacatttgaattctgattccagttgttgtttttcctaggttggatgtgactgttgttgatgttggaccaccagctgactgggtgaagattaacgtacagagaacggtaaaatcaattgccactttcttaaaaacctgagcaatcactttctggtttcacatatattaataaactcttccactatctgcagcaagattgctttgaggtgtatgcattagtcccaggattagtccgtgaagaggtaagctctcaaatctcgttgtgtttacatatggatcccaagattgagtgtagcactcagtttttgtctaggcaacaatcatacagg

SEQ ID NO: 6959 - DNA, 701 bp, Arabidopsis thaliana
ccaccttggtgataataatggcaataacacttttatcaaaaactttgttcgcctccattgttgtttcatctctaagcttttcccttttatgaataagtatttgttgtgcagcaggatattcactagctcccatcacagtctctatgttcttcttcacttcagcaacctaagcaacaaaccatcagctcatggaaacgaacaatcaaaaattcacagaagaatagacgttccaatcgaaaagcaatacaaaagagacgaaaccattcaagaatcgtcagcttaagaaaatatagtaacgccgccctaataaatcacccacactagcaaaacttgcagctcaagaaacgaatgattaacagagaaaaccctaattaccgccatatcaaagaaccagtgaccaaataacttcctcatatacgattcttgagatttgccttaccgaatcgttgggttttacttcgatctcgaagcgaatccccttcaatgttttgacaatgatcttcatcttcttgcacaatgcacaccaacggaatatgattccagttcccgaaaccgattctccggcaagaatctgttccgatcaatcgccgccggtaacaaacttccgtgtagagagagattagagaagagaagaagcgagtaaagagaaatgagaagaaaacggcagaatttatacggtccctcaataactacagttaata

SEQ ID NO: 6960 - DNA, 525 bp, Arabidopsis thaliana columbia
taatatttgttgtatctagaaaggtgaaatttggtcaggaattgtgttcttggagcttattggttggtgaacaactgttgaagttacatgttgcttgtgccgattatgatttatctctataattgagctatttatctcaattcctagcacttggtttcccattactagaaccttggcttgttttgtgtattctcaggtaaatgggtaagtagcagacagatcagatgcaactgggcgacaaaaggtgctacttttggcgaggacaaacatagctctgatggaaaaagtgttgtagaacttactaacggatcttcaggttttcttttgtttactgtgcaacttctaaaatttttattttcttcctcaaagcagattttcatggagattacattgatataatacttgattttgcagaggatggtagagagctgtcaaatgaagatgcccctgaaaacaatcctcaatttacaactgtctatgtaggaaatctctctccagaagtaagttgtcaacttaacgaattgt

SEQ ID NO: 6961 - DNA, 560 bp, Arabidopsis thaliana
tacctcaattgcagtgactgattcacttactgcatcaattcttctctctatcgcactgaagcgtatatccattgcagagtaaagagtaaggatctattctagtattacttccatctgctcagtgaagggggtggtgggtgggcttggctatgatggatgtcactcgtttctacatagcccgatgtgctagcaaaacagatctcttcttgttcaactctcttggttttaattgtttcagctagcattttgcgttaagtatctctgctctttatgctaacactgtaggccatgttctcttttagcaatgttgcttcatttggattcttagtcaagaaattcccattactcgctgcatccaaaactttctggtaatgaaaatcaattcctcggaagaagatacctagaagttgtccttcagcgaacccatgatgcggacaatctctctagtaggcctcaatcgaaaccaagcaccttggaaagcttatgttggttcttgagaagatgtagacatcttgaatcgcagcgcttgagacaacgagtcatcataaaagtagttgatg

SEQ ID NO: 6962 - DNA, 596 bp, Arabidopsis thaliana
tcccatatgatctgataaaagagatgccttttgagccagactcctgcgtctggggagctttgttaaattcttgcaggcttcaaaacaatgtagatttagctgaaatcgcagcagaaaagcttttccatttagaacccgaaaacccagggacttacgttctcttgtccaatatatatgccgctaaaggcatgtggacagaagtagacagtattagaaacaagatggagagtctgggactgaagaagaacccgggatgcagctggattcaagtgaagaacagagtgtacacgcttctggctggtgacaagtcgcatccgcagatagatcaaataacagagaagatggatgagattagcaaagagatgaggaaatcaggtcaccgcccaaatttagattttgctctgcatgatgtggaggagcaagagcaagagcagatgttatggggacacagtgagaaactagcagtagttttcggtcttcttaacacaccagacggcacacctcttcaggtcataaagaaccttaggatatgcggcgattgcatgcagtcattaaatttatatcaagttacgcaggtagagagatttcattagaga

SEQ ID NO: 6963 - DNA, 2100 bp, Arabidopsis thaliana
tctgcccaacaagcctatcaccactcttcgtgaagccacaacagaaggcgttgtcctctgaccttcagcgttagtcacaatcgtaggcttacctccttccatagcagctactgcagagttagtcgtacccaaatcaattccaacaaccttctcgttaaccacacgaaccggaccaaccgcgtatctagaagcgccgccgccatttctggtgcccattctgagaaaagcagaagtgggtgtggagaaaggaccgtgttcttgtaccgaagaaggcacttctcggcataaaggtaccgcctttaccattgagatttctcttggaagaagaagaagaagcgaatccaattccgccgagaacgtggatttgggcggctgaagatgccatttttcgagctaagcaatagagaagtaaaggtaacggagggaagcggagagtgcaaggagggtttgaagctgaaaaaccctaagggaaagtaggaggaagagatatagaaggcagagaagataagaggaaggtgggagaaagagggagagaaattgtggaccccacttgaagtttcgagaagagaagatggatgggcttcaataggccaacaagtgtttgtgagtttgacacccattactagagacttgtggtgagaaacatctacacttttcactaaagcccaccatctcttaaacctctcaaatgccacggatcacttagcttgagattttgaggtacgttttgggtgaaccaaccaagaaagagaaatgatgatggtatttgatgggttgtttgctagaacctttatacgaccgtttttgttcatatagacatagtttacactaccgatccagtttgatgtctgagacaatagcaatagacttttttttaactcttggaatacttgttggtaaatgcggtggcgacatttttgtcataaacttgtcttttgattatgggtattatccctaattactgtatatacctcaaagttcatggaccaaagagttaccaaataaattcgaataaaaataaataaattcgaactccatgtgcaagtgcattgggctggacgactctctctcgagttttacacaaaaggacaatcttggagtcaaggatcctcatcatcttccaaataaagtaatatttagtttattcatcttattgcttgtatgataatttgttaaattctatctttacacagttttctttctttgttatctttcgacggattcagacgcacaaaccacaatgggtctactactactatagttatagaagtaagtgggttgtgactttcagtaaaagatacataaaagaaaatctaaatcgtgtaatatatcacatctcactagtcatcaagaatgcaaaatacgttaaaccactgatccaatacacaaagcgatcgataaaactataaagaaaaatttcttgtattaaacgtttcatgaaaaagatggactctaatcgaaaataacaatgagatctattatatgatagatatggaggtagaggaaacaaaaactggtttcacgagatcccaaaaaaacgcttacaagcctttacgaatgcttttttcttgaagttgttgctcttcttcttcttgtgcaccttctctttatcatcatcatcttcgtcttcatctccttcatggaaaggaagcggccaagtcgtggcagagctctggtcatagattctacagtagcgttcagagacagacgaagatcttctcatagacatctttattggtgaaggaaccgcttgtgctgatgcagacactgacctgttcctgctcagcttcggtttcatttcagcaggttcaagatcgggcttctgaatctgaggatcgaccaccgggtggtccggctcaagtttctggtctgttgaatccatcttggaatagccactcatgatttgttctctctttcttcttcttcttcttctgatatatgttttgatagtgaatggacttctaagctatagtagtatcgcatatatatataaatgtgtcgagaggttcatgaatagagtaatttttatcagaatgagatccgcacaatattacagctggtggagattgtaacaacgtttttacacagggcatgtgactt

SEQ ID NO: 6964 - DNA, 1251 bp, Arabidopsis thaliana
ctctccagaagtaagttgtcaacttaacgaattgttctttataaacactgcaacagctcctggggtttttctttttggcgcctcgtgacagttgtcaatcttgcaggtaactcagcttgatctacaccgtctattctatacccttggtgctggagtgatcgaagaggtccgtgtccagcgagacaaagggtttggttttgtgagatataacactcatgacgaggctgctcttgctattcagatgggcaacgctcagcctttcctctttagcagacagataagggtatttgcttcagttaatgttacatagatctatctgttgttgcatctacgtagacaaccaaagtctgcttgtaattggtttttaccagtatcccctaaacccatttccttgtttctgtgatttattgcagtgttcctggggaaacaaaccaactccatcaggcacagctcaaacccacttcccccaccagccccggcatcagtcccttctctgtctgcaatggacctcttagcctacgagaggcaactggctctagccaagatgcatcctcaggctcaacattctctgaggcaagcaggtcttggagtcaatgttgctggaggaactgcagctatgtatgatggtggctatcagaatgtagctgcggcccatcagcagctcatgtactatcagtaataaaccctcttcactggctctgagatacctttttctgtttctttctttttcttcttcttaattttataactttcttgctttttctagaccttccttgttcaagagtctttatgtatgtgtctctttcatttaaagccgttggttttatttatgtatgcagagctttatgctcagtttgtaacctataggtcttacttggattgtaagccaagcaataagacaacatcaaataaaaggggatttggttttctggggttaatgttgtttgtggttctgtaatgataggtttgaaacaaagtaatttgtcttttataaaagttttatagtttcatttctcatgttagtactttattttgtcggaaatccagtttaactaagcatcaagtgttctgtccacgagtgtcctttgccatgcagcaaagtatataattaaggtttttttatttgcctttgtcgttcataggatgtagtagagaatcttgatataggcttcaacatttaaacgattagaggaaattggcagggttcaaataatattttcaagaccctgtaatagggtacattgattcaag

SEQ ID NO: 6965 - DNA, 539 bp, Arabidopsis thaliana
acttacccaaccttagagagctatgtctagataggaacaaccttaccggtaaaatcccttctagtttcgggaatttgaagaatgtaactcttctcaatatgtttgaaaatcagctctctggtgaaatccctcctgagattggtaatatgaccgctttagatacacttagtctccacacaaataagcttaccggtccaataccttctaccttaggaaacatcaaaaccctagccgttcttcatctttacctgaatcaactcaatggttcgattccaccggaactaggcgaaatggaatcaatgattgatttggagataagtgagaacaaactcaccggtcctgttcccgattcttttggcaagttaaccgcgttggaatggttgttcctacgtgataatcagctctctggtcccatcccaccgggaattgctaactctacagagctcaccgtcctgcagctcgacaccaacaacttcaccggtttcttgcctgataccatctgtagaggtggaaagcttgagaatcttacgctagatgat

SEQ ID NO: 6966 - DNA, 529 bp, Arabidopsis thaliana
tggaaagcttaatttcatgttgattgttgtttttgcagctatggagttggctctttcattggagaaactagtcaatgaaaagctcctaaacctgcacagtgtaagaccatctctctcattaggatccagttcttgtttatggtattcaagtcataatctagtttcttaatacaacttggtatttgaataatgtggtcaacaggtggcttccaagaacgatgatgtccagttggcagattttattgagagtgtgtttctgaacgaacaggtaaaacaaaagacctacacgttctatgttagtggcaaagatatggggttcttgatctgtcaaaaatggaatctaatgaagtttaattaacatcactttgcaggtggaagccattaagaaaatctcagaatatgtttctcaacttaggagacttggcaaaggacatggtaaccatttgtttattcaatttaaaactaataaaacacacctcaattcgtccacttcgtgtcttacactttgtttatttgtaatcaggacatg

SEQ ID NO: 6967 - DNA, 446 bp, Arabidopsis thaliana
atctacaatcaccgcggtaccccgctgccgccacctcctcctccattacccccgccgccgccgccgattctctcacaagaaggacacttcgttagagtcgatgcaggcatgtgcatgtaaaagggctgagtcaattttagggttttgagttcttgaatctctttctgaagtcttatgttctcatctgctaatgtttcacaacacttcttcaaaaactcacaatctacttctgtttgcttcagctttgtcctgctcattcattaaataaaataaataattaaatatatataaccgaaagaaaaatcatatcacctaaaaaatagaaaatattttcacctacaaaattttctgactattaaagaaattttgacacatgaaaaaatcaaatattctgataatttataatataattttttttacctggctcttctattttgaaaccatac

SEQ ID NO: 6968 - DNA, 535 bp, Arabidopsis thaliana columbia
caacatccatcacacagatcatttccccaacgtccctccagattaaccccaaaagaataagaatatatgatgttgctgtacaaaaacatatacatttttctcttttagatttttttttttttttcataaaagaacacaagaaacaagagaacccaacccaagtgaatggatttatgattgtctgttcatcatagctaacgatgatccttgcatctgaccagctgaacttcttctatgtgactgcagatgttttaatcttctgctgaggaaatcaatatatgtcctgagacgatacctgactgagtttgtgagagacagtggcggattcagaatcagcattggtgcttctactaaaaggaataccagcaaacgcactgctttcgaatattggtttccggcgttctctgtatctcccataacctccttaacctgcagaaaaagccacaggcaccatatatgagaatgagtatagacaagttgattgttttgtttcattgtttttggattgttcacaatattctttgtgaaagacaaa

SEQ ID NO: 6969 - DNA, 605 bp, Arabidopsis thaliana columbia
  unsure (1)..(605): unsure at all n locations
nnnnnnnnnnnnnnnnnnnnnnnnctaaagctgtttgctgctggcgctcgatcactctgtgcaaccggctattgctggcaagcgggtggcgtttatgcagggaatcggttttatcatcgccgggcttgcccgtggttttctggcgtgctgcgtagtatcagcggcaattacctgatggactgggcatttcatgcgctgtgcgtcgttgggctgatgatcataaccctgcgttttgcaccagtacgttttccgcagctgtgggtcaaagaggcatgatgcgacgcttgttcctgcgctttgttcatgccggatgcggctaatgtagatcgctgaacttgtaggcctgataagcgcacgttantcaggcaatttttataatttaaactgacgattcaactttataatctttgaaataatagtgcttatcccggtcgtttatttcgcgaataacccgacaaggaacgccagccgccacgacgtttggtggaatgtcttttgtgacgatactacccgcgccaataacagaattatcccgatggtgacgcctggattaataacacatgacttccgatccagacgttattgcaatcgttacggaaaagagt

SEQ ID NO: 6970 - DNA, 551 bp, Arabidopsis thaliana columbia
tttaatttgataaccacctacctataactctaaattagtctattggatttttctaatgatcatcatataaatttattctctttatataatagtaatcgttgtaaataatatatgtgtgtctcccatcaatccgcatcacattcgtagaatcatacacgtatgtaaacgcatttttgacatacggaaaccatacaagtaggatctgttaggtggttattaattcaaaataaaatctcttttcattagaaaatataaagagactacttttataaaaagattgggattgtagttccttgccaaccacccatataataatactccccaacaccaaaaacacaacacaaacttagaaaaatggaagaagaaaagagattggagctaaggctagctcctccttgtcaccaattcacttccaacaacaacatcaatggatctaaacaaaaaagctcgaccaaagaaacatcattcctttccaataacaggttctcttaatctcttctcatgaatgatttgaatcattcttgttcattgtagatgtcttatatgataat

SEQ ID NO: 6971 - DNA, 604 bp, Arabidopsis thaliana
cggaatcgctatatgagatgctgcagtatcaaatgggttcccgtatctttgaatttctcaaagttagtttttaattgatctttgacgttattgtgtccgagtcgcatgaacagttttcttatacttaattttttgtttccttcaagaaactacgtgtaaaaattgtgaggcaaagaaatcaacggaagaggcatcaggaggagttgtctgtcaagcaaaacgaagcaaaatcccaagataagcgtcaaaagacagctgaacatgaagacaaggaagcctcggtgataagcgaatctgctcctgggaaggatgataaagaaacttcaggcaaggaaaccgtggacggtagccgggaaattgcagataaggaagctgtagcaaagaccaaagaaactttgggcagtaaagaagttactgtgggtgaagctgttaatatggaagtggagaatcaggatgaggaggatgacgatggtgatgacgacccagaggaagatcctgaggaggatctgaagaagaccctgaagaagatcggaagaagatcagaagaatgcgaggaaatggacgttgcaatactgagcaagaagagctgctgaagaggtatgat

SEQ ID NO: 6972 - DNA, 1081 bp, Arabidopsis thaliana
tcagatgcggaagaagctgagttcttggttatttgaattccctctgcatagcggagatgtattcagactcctcgatataagatcggtgaacggatttattcaaggcatttggtgttggactaagcaattcaactgcccgaagcatcttgacgataaggatatgatatgacgtagcttgcaggagattttctgtttgtagtttgttggcatataaaatgcaattgatacatcttagccttataggttaccattttttgtatgattcgaaatttcatgatatataccagttagttctgattactcattcattccttgttctttgttataaaaggatttgtggtgggtcaattaataattcatttcctgccaaattcgagcttactcaaaccaaattttgtagaccctttttaacttcaagatgtctcgttgataatgaagagtaacaccaaaatttcggagacttcactattgttgcaataatgaagagtaacacattgaaaagagactactgaccacctccgccagttacagttcatatatagagaccaaacaccaacacaaaagaagaaccaagccaaaagaaaaagcaaagacaatgacaaaattacaagaatagataagaaaaagaaagaagaagattagagggagatttcacatggtgcgtgaaaggttcttccccgacaaatcgcttctagattttctccagcgtacgagcacaatggtgacacttccacacctatttaagctatgagtgttagtgaagtaaaagaatcaactgaaaagaagagttggatggggctctttaccagtcgcatataaaggaacggaatgtgttagaaatccaccagctgctatgacccaacgtgtatgcagtcgtagaaccaacagtcttgcgctttccggtgtgtcgtaattcgacccgtttgcgttcttcaccggtgcaaactcttcctccctcaacacctaaaaagacaagaaaccccacagtaggaaatgagatttgctaacagttaactgaatcctgcaaatatcggtttgtgtgtgttcatacaatataaagaaataatacctcaaaaagtgc

SEQ ID NO: 6973 - DNA, 606 bp, Arabidopsis thaliana
ggtaaaacactcggatctgggtctgcgaagaaggcaacaacaagaagcagcaaagccggtctccaattccctgtgggtcgtatcgctcgtttcttgaagaaaggcaaatacgccgaacgtgttggtgccggagctccggtttacttagccgccgttctcgaatacctcgccgctgaggtaattcctcttccctattcttcaaattttcgatcttttagttcaatttctataaaccctaattttgactgattttggggaaattttgaaaaattaggtattggaattggctggaaacgcagcgagggataacaagaagacgaggattgttccaaggcatattcaattggcggtgaggaacgatgaagaattgagcaaattgcttggagatgtgactattgctaatggaggtgtgatgcctaacattcacaatcttcttcttcctaagaagaccggtgcttccaagccatctgctgaagacgattgattaatcaaccaacatccactctcttgtgttttttgagtttttaaggctttttaagagtaatttagattagatctatggtgaagaaagaatctatcttctgtgttttttgaattgaattgaat

SEQ ID NO: 6974 - DNA, 499 bp, Arabidopsis thaliana
gatgagaagaggattgatgagactgattacagaagaaatattggttgtcttcgttacttactccacacccgtccggatctctcttacaatgttggcatactgagtagatacttgcaggaaccgagagaatcacatggagctgcactcaagcaaatcctaaggtaccttcaaggaacaacttcacatggactttacttcaagaaaggagaaaatgcaggattgatcggctatagtgacagcagtcacaacgtggacttagatgatggtaaaagcaccggaggtcatattttctatcttaatgattgtcccatcacatggtgttcacagaagcaacaagtggttacgctatcttcttgtgaagctgaatttatggcagccactgaggcagctaaacaggctatttggctccaagaacttctggctgaagtcattggtactgagtgtgagaaggtaacaattcgagttgataacaagtctgctatagctctcacaaagaacc

SEQ ID NO: 6975 - DNA, 547 bp, Arabidopsis thaliana columbia
atatggcaagctctagtcattattattacttctgatcactgtaacagaatccatatattcttcctctaatacagttttcaaataatggttcattcgatttggcgagaacgcaataaaaaaaacacacaataaaactctgattcttatcacacatcttcctaagtgaatagataagctggaaaaaaaaaaaactctcaatcatttgaaaggagaaatatagtagatacgaaccaaatctccaaacatggtttgcatctaaaagtccttaaaacctctcttgtataatctaatttcaaaacaattttggaaaagttacatttgatgtatcctaactttattttttcttggtcgaatttaatattttattaaaaataataatagtaataatcacaaaatctaatttgatcattcttaggtgggtaggtacacttattttacatacagcctcgacggcaccaaaacatagaatatatatataaatacaaatacaaatattccaaatataacctctctcccaaagtcctatcatatcagaaaaaagaaaaaa

SEQ ID NO: 6976 - DNA, 541 bp, Arabidopsis thaliana columbia
tgaaactgttgaagccaagaaagagcagatcgtgggtgaggagatcgtggcgatacagtgaacttcttctttggagagcaatgatgatcaacctcggccaaaccggagctgactgattttattttatatgattcaaatggagttccacagcctgtggagatgctggaacttggtgacatatttattgaaggtgttgtcttacctttaggtgatgacgaaaaggaagaaaaaggtgtgaggtttcaatcttttggtcgggtagagaactggactatatctggttatgaagatggttccccggtgatatggatctcaactgtgattgcggattatgattgccgtaaaccttctaagaaatacaagaaattatatgattatttctttgaaaaagcttgtgcttgtgtggaggtatgtaagaacttgtccacgaatcctgatacaagtcttaaagagcttcttgctgcggttgttaggtcgatgaatggaagaaagatcttttctagcggtggagtcaccaagagtttgttatacccaaggagaa

SEQ ID NO: 6977 - DNA, 334 bp, Arabidopsis thaliana
cccctgggtttcctgactgaccttgaccccgataacgcccagcaacagttagccgatgtgctggaaggccactacatcagcgagaaacgttttttgctggaacgcaagtctgtcagcaagattgccagaaacgcatcagcaccgcgataaatgaagtggtgcttcatccaggcaaagtggcgcatatgattgagttcgaagtgtatatcgacgagatctttgcgttttctcagcgatctgatggactaattatttcgacgccaacaggctccaccgcctattccctctctgcaggcggtcctattctgaccccctctctggatgcgattaccct

SEQ ID NO: 6978 - DNA, 589 bp, Arabidopsis thaliana columbia
  unsure (1)..(589): unsure at all n locations
nnnnnnnnnnnnnnnnnnnnctaaagaacggctgtttgccgtcactgaagttaaatccgcgacccggcgcaatacgagccagcatttctggtgaagggccatatcctgccgaccagaccataaacgatggtttcatttcggtcagcagttcaaggttaggttctgtgcgcaaaccgacgtcgatcactgagtccggcaatggtggttcgctgacccacaggcgatagttgatggtatccgccacgccgtaacgacgatgccgagcgccacacgtaattccaccggcaaccactccagcgccacaatacgattgggatcaatagccgccgcgtgggcgatattcatctgccataacaacggagaaagcgccatcgccgttaacagtcgacggcgcgaaataagaggtaagccgctcatcaataaacaaaactcacaggtgcagcacccgccggatgcggcaaaatacccatcgggatgccataaatcatttcgagggtttcgcgcgcataatttccgcaggcgttcctgagcaatcatttcacgccgcgcagggcgaccagataatcacagtagcgtgctgcatattgat

SEQ ID NO: 6979 - DNA, 594 bp, Arabidopsis thaliana
  unsure (1)..(594): unsure at all n locations
ctaagtaagtagtttatcactttcgttgataaactcaggactgaagtattttatcatctaaagactgttcagctcaacatttcaatatatgcaataatacctctacgcgtggcccatttacgtaatttggcttcaactcctccgttccactggttaatgcaggttttggattactattgctaagccctggcgagtataaaagaaaaggataccattcttcatctanaaaacaagaaaataatccatgataactaccaaacaagagttaaactgcttacccgcaacggataaactgctgatttttccattcctttgaggtaacaatccatccagaggtagtgcatttgagttatgggcacgttcaatagaaacagcttgtttggtttcggctctttcgtcaggtgtggtcagattcttcggcattttatcattctgagtgttgtcacatgataacaaggcatctgaggtcttactagaagtaacatctttatccaactcactagcttgccgcacttgattactttcattgacttttcgagggccatttgaccgcatagagttggcaatactagctccattttgaggactgacagc

SEQ ID NO: 6980 - DNA, 550 bp, Arabidopsis thaliana columbia
atcccccataaccgtcaattccgtcaccagatctccgattctcgctccgcgaagagaaacaatcaagagagaaactcgttgcctaagagcatctccgtcagatctcaaggatatctcaagatcaaccatggatttgaagcgtcagatctccaaacgagtcaactcagctctaactcggtaattctcactgtaattttaaaatttaaaatttgtttttatttgattaatgacgtcataaatgttttgtgaaggtgtcttcttctcaaaaggtgtgtgtagtacaaacaaaaggggagagagaagcattagagcttgaggtatatcgtcaagggatgatgaagacggagctttgtaacaaatggcaagagactggagcttgttgttacggcgataattgccaattcgctcacggaatcgacgagctacgtcctgtgattaggcatccacgctacaaaactgaggtttgcagaatgatggtcccggagctatgtgccgtacggcaccgttgccattccgtcactcacttactgatcaagagaggatgatgatg

SEQ ID NO: 6981 - DNA, 1048 bp, Arabidopsis thaliana
caatacgtgtcttcttgttgtctcttgctgcgtttccagctaattcaagaacctgaacaaattcaaaacacacaattcatgatcaaactttccaaatttgagaactttaacaactcaaatcaaattggttaccataattgaaaaaaatttagaatcttgcgagaaaactacaacgattcatatgatctcgattaccatcaaccaatcagaacaaacccaaaattaggtcaattacagaactacaacaattcaattcaaacacgaatctaattcaatttttgcatgtcaaattcggaaaatgtaagaaccctagattcgtaatcgatcacgcaaaaacagagtcagacgaataagatcggaaacggaatgggaaagagagaaaagacgatgtaattttacctcggcggccaaatattcgagaacggcggcgagataaaccggagcaccggcaccaacacgttcggcgtatttaccggcttttaagaaacgagcgatacgacccaccgggaattgaagaccggctttgctactccgagatgtagctttcttcgccccaccggatccaagagtttttccacgaccagccattttcaacaacaacaacccacaaagagcgcaaaaaaatcgaatttttttcttgacgaaattaacagagagaaatctgattgttgtttatatatgttggaggattaagttatttgaccaataagaatagagtacgcggatcgaagaggtttaaaccgttgattataatttaatgaatggctacgatctgaagttttttctcccaccgcttgaacttttgcagtttttgttggtttcttctggacgagggaatttccaaattttccatataaacctcaatttattttatgcccttgaaaataatattatgggcttggaacgctgaacaaatcgaattgagtttacgaagtaaatgggccgcttatgggtttagactcgccaccaaacccagcgaagaaaatgatttacatagcactttactaatctattgtgttgtcatattttatgacacccatgtggaatt

SEQ ID NO: 6982 - DNA, 598 bp, Arabidopsis thaliana
cctaaatacctgatggatcccaagaactttggcaagacaagtctggttgcctaaatcatacgagtccttcatgtatttgaaatactccgtagcaaaagtcacaaatgattcgtactctgtcttcttgatctcttttacgatgaacctatcatccaaagtcttagcgaacacggatttgctcttcccaaccttgggcatcccatggcttacagcggcttagtgaagctatatagtcaagctctgatgaacaacagcgttttctgaggtcacggaaatcatctgcatacagggacacgatagagtacttgggttttccaactgatttgactgacccaaaagtaacgaggacctctggagggggtagtgtttcaaccgatttgtactctcactcgagaaacgggaaacgtctcggtcagtttgcttagaatcctgattattatctaagaacccttgaagagatccatgtatacaccttgaaagaggctttttgctctcttcattgttcagatgggcaagtgcacaagcaattaggctggacagctcgtcttcatagtctgacacaataaaatcatcatccctcaacgagatgcgcagacga

SEQ ID NO: 6983 - DNA, 394 bp, Arabidopsis thaliana
ccgccgcccagtctttgtgagacgggccatcaacggttttctgagtagcggtagtagcgtgaacggtggtcatcagaccttcgatgatgccgaagttatcgttgataactttagccagcggaccaggcagttggtggtgcaggaagcgttggaaacgatgtcctggccagcatatttgtcgaagttagcgcctttaacgaacatcggagtgttgtctttagacggaccagtcataaccactttcttcgcaccagcggtgagtgtgtttacgagcagtttcgtcagtcaggaacagaccagttgcttcagcgacaacgtcaacaccaacttcgtcccatttcaggttagccggatcacgttcagcggtaacacggatttttttaccgttaacgat

SEQ ID NO: 6984 - DNA, 553 bp, Arabidopsis thaliana
gtattactttgaaggatatcctggtgctggtggatatcccgatggatagcccggagctggcggatagccggtgcaggagggtaaccgtgaccgggaggtggatagcctggagcaggagggtaaccatggccaggctgtggatagtaatgctggggataaccagtggctggagggtaaccggcatagggagggaccggttgatcaatgcgagacatttgctgagctggtggcactgacattggttgaggactaatcaaaccatctcttttgtccatctcaatcttgtgttgtgtctgcatacacgcacaaaccctgaaaatcaagaggaaaatacagaatcagcaataataaacatttggtatgagccatttggctaaatttgatgtagtgaaagcatgtcagcgacatggaaattgagaaaggggtaatacatacgtgcaatagaccatatccgccaagcaagaaagaagctgagacgcttcagagagttcatcacttccaacaatgcaagcgacgagagagaaaatgcaagcgatttggttgaggcagaaca

SEQ ID NO: 6985 - DNA, 514 bp, Arabidopsis thaliana
atccgcattgccaatggatctctcttaatcctaatatcagttcccatcattatccggtattctctatctgtttgatgagagaacatctcaatcagttgtgtgttttcatcttcacctgtctcttcaaaatgtttttgtacagcttctcttgacgtgtctctcttccatgctttaacccattcagaataaaaagccattggaccttctttcgctaatctctctcgctcagcttgcagcctgagagaaagaaaactcgaaagaaaatcctaataaaacagattttcacttgaaagttcgttagatcaatatacctctcttccttgaaaagatgccttcttgctctataaagagaagtttctgtgagtgttggttcttcccatagagcttcacttgtcctgtttctgccattgccttgaggaaaacctgcatcaacaacaaaaaaaaataccataatggatcaaacattggggaaacacacacgatgtttaacctgaaatcattgtgatgactaccg

SEQ ID NO: 6986 - DNA, 502 bp, Arabidopsis thaliana
ccaatggtttttcttcagattttcatagatgtgtctgacacacattctatgttcaacctttggcagctctagctcaacagctctgatcaaaccctacaaaatttaaaatcataggttattacaagaagatacaatacatgattaaataaaatcgaaagcaaaccatgaaatcataccttttgacgatcagataccatgataaaaccatcaccatctagcagtcccaaatcatccttcaactttctcacaaaccacacacaattatctatgttttctacttgtacacagccccatgctattgggtatatagcattatctgcatctctacctaaagcaaccagcagctgacctttaacctttcctttcataaaggttccatctactcctatcaatggcctacacgattctatccatgttctcttaatcgcatcaaaacaaacatagaaacggttgaatacctcttctcctccatcatttctcaaagtctgaatttcaacagttg

SEQ ID NO: 6987 - DNA, 688 bp, Arabidopsis thaliana
tgaatttatctctgacccaacaaattggctaatttcattcaacattggatgtaattttttttcaaaccgaaccgaattatagttttggtgcattttttctaaaccgaattttaacacaaatagtaatcgtcttaaaaaattcaccgacttgttaaaaagaggcggaaaaaaaaacccgcgagaacttacaatggtgccacgctggcaatccgcgtgactcacaactaaccaatcaaaatccattatctcaacgctatatatttcagaaatcacaacctaaaccctaaatcactccactcacaaaatcctcagccatctctaatcacattttacaatcgcctcttcaaatttcccgataaacaaaaaatgagttccggcgccggcagtggaacaactaaaggtggcagaggaaagccaaaagctacaaagtccgtctctcgatcttctaaagctggtcttcaatttcccgttggaagaatcgctagattccttaaagccggtaaatacgccgaacgtgttggtgccggtgctcccgtttatctctccgccgttctcgaatacctcgccgctgaggtaacaaacaatcttctgtttggtatttagtcttttagtctctatgatgagaacactcgtaattgatatacactagatttttcgatgtttacgaatctttgattttgatttgatg

SEQ ID NO: 6988 - DNA, 782 bp, Arabidopsis thaliana
acacaacaccattaatgaaaactcgttcagatctaatctaatgaaagactaagctacacattaattagctaaacaaccacaacacaaatccctaatctaatcttcatcagcggaaggttttgaagcaccagctttcttgggaagaagaagactgtgaatgttaggcatcacacctccattagcaatcgtcacatctccaagcagtttactcagctcctcatcgtttctcaccgcgagctgaatgtgacgtggcacaatcctagtcttcttgttatccctagctgcgtttccagccaattccaatacctacaacacaacagatccaatttagaaattagggttttacgaaattgaagatcgaaagagtaaagagatatagggagagaaggggataattacctcagcggcgaggtattcgagaacggcggctaagtaaaccggagctccggcaccaacacgtgttgcgtacttgccgttctttagaaaacgagcgatacgaccaacggggaattggagaccggctttgctgcttctcgatgttgatttcttagcaacgccagatccgagagttttgccgcgacccgccatttgtgatttgggaagagagatagaaaaagttgaaaattctcaatgcgagggaaattaagataagcgtaagaggacgctctttggttattatatatactgtgtagagacggttgagtgattcttatccaataataaacaatcacgcggatcgatgttactgccgttggattagattatgatcgacggtttataat

SEQ ID NO: 6989 - DNA, 808 bp, Arabidopsis thaliana
aaaatattattcaactaaaaatattggataataactctgaaagtttgcatttttcaaataaatcattgattttttttgtttgacataaaacattaatttccccttgtaaatcacacatttaaaatctaactatatttaaacaaaaaaaaaaagtccaattttgactttaattatataaaaaaagcaaagctaattatgggtcaaaagactcaaaggccagaattgacgcagccgtttatgagaagtgagaagacaatttcggagtcacttcctttatttcctctcttccttcactctctcctatataaaccttcctctcctcttcctctcttctcatctcttcaaaccattttcgaaagccttgagagagagaacacagacgataccaactttcttcaatctcgttgccgcagtataattatctcattcctcggatatatctctccttctgcggcggcgacaagaagctacaagaataaaaagtctgttttctctcttttcaagaaaccacttacttcgaaaatggctcgttctatctctaacgttaagatcgtatctgctttcgtctctcgtgaactctccaatgctatcttccggtaagtctctattgttctgttttctactttatgctctgtttttttcttgtagttatgctctgtttttttctaaacggtgtcgttttttgtgtgataacagacgtggttatgcggcacggcggcgcaagggagcgtttcgagcggtggaagaagtggagctgttgcttcggctgtgatgaagaagaagggagtggaagaatcaacccagaaga

SEQ ID NO: 6990 - DNA, 509 bp, Arabidopsis thaliana
atctcaatctttttctcctattcgtagatggggtcagatcaaggatcatgggacgagccatttatcgataatagattctgagagaaatgctgtttcaatgactagtacaatcaacggatactttggggcaataatgctgtctccgagcaccggaatcgttctaaacaacgaaatggacgatttctcgatcccgacgaaatccggaggtgacccagatgtgcccccaccagcaccggctaacttcatccgaccggggaaacgacctttgtcctctatgactcccaccattgtactcaaggcaagaaaaaagaaaaaaccctagctcttgtgctacaagtaactctgagtactttaggttctaaacgatggttacttctgtgttggtttacacaggacggtaaagtgaaagcagcattgggtgcgagtggaggaatgtacatcatcgccggtacaacacaagtttacttaaatcatttcttcctcaacatggatcctctctcttccgttgt

SEQ ID NO: 6991 - DNA, 658 bp, Arabidopsis thaliana columbia
ttcaaactatcgtgtggtgtagaaacgtggagacctgcaagaacaacttgttattcatctactctgtagtctagttgactcgtgagccaagaagactctttctgtcttttattttcaaaacaaacatgcagatttgcaagaagaatgtgtttttattatactacggagtgttggtgttcttgtcttttcaagtttcttcttcaactgacactatttctaccaatcaacctctttcaggatttgagaccattgtttccagcggtgatatattcgaactcggtctcttcaccccaactccagatacttatgatcatagaaactactacataggaatgtggtacaggcacgtctctccacagactattgtttgggtcgcaaaccgagaatctcctcttggaggggatgcttctacttacttattaaagatcttagatggaaacttaattctccatgataatatcagcgccacccgtaaatctcatacggaggggacatctcggagatccctcaaaagatctcagaaggaaacttacttttcgatgaaacagtttggtcgacaggtgttactctagtatgacaaggatgttcagctgttctgttgatagtggtatctagtatgagagatggcctaatcttctcactgtgtgtgcagagtttg

SEQ ID NO: 6992 - DNA, 560 bp, Arabidopsis thaliana
gacgtggttttgacaatgacccgcatgtccagactgggttgatttctttgtatgcggagttggctgtctggattcttgtcataaggtttttaattctattccgtgcccggattttgtgtgtcggacagcgatggtcactgcctgtgcgagatgtggggatgtcgtttttgcgcggaagttgtttgaggggatgccggaaagagacccgattgcctggaacgcgatgatctctggctatgctcaggttggtgagtcaagagaagctctaaacgtgtttcacttgatgcagttggaaggtgtgaaagtcaatggggttgctatgatttatgttttatcggcttgcactcaattgggtgctttagaccaagggagatgggctcattcttacatagagagaaacaaaatcaaaatcactgtgaggcttgctactacgttggtcgacttgtatgcaaaatgtggtgacatggaaaaggctatggaagttttctggggtatggaagagaagaatgtgtatacatggagtagcgcgctgaatgggttaccatgaatgggtcggggag

SEQ ID NO: 6993 - DNA, 525 bp, Arabidopsis thaliana columbia
ttttcggatacaaatgatattacgtgaaaatattgtagcaaagccgaaagtattttaatatctgggcccgcaggatcaagattctgtggcgaaaagttcagaccaagccacatcaagatatgttaatgacgtggcattctattatcggctatgaatctgttctggataacaaaagcatcatccgtaacacacacaaacaacgaaagtcttttttgcactcgccatggtgtctcatcttcaatgtatggcatccacattgtttacttgaggtacaagcaaaacgtctaagctcgtcgacctcctcttaatggcttcaagttcaacttcattcccgttaaccaccgcgccaccgcagggtgtcaggtttaaccggagaaaaccgaggttaaccgtgtgggctaagcaaacggcgtttcaactcgggaaaacgaagggtgatgatgactcggaggggaaacaaaaagggaagaacccgttccagtttgatttcggtaagttacggacatgaagtactgataccggttg

SEQ ID NO: 6994 - DNA, 608 bp, Arabidopsis thaliana columbia
aaacctatttgaatgtagcagacaacagcggggctagagaattgatgtgtattcgaataataggagctagtaatcgccgatatgctcatattggtgacgttattgttgctgtaatcaaagaagcaataccaaatactcctctagaaagatcagaagtgattagagctgtaattgtacgtacttgtaaagaactcaaacgtaacaatgggacgataatacgatatgatgacaatgccgcagttgtcattgatcaagaaggaaatccaaaaggaactcgagtttttggggcgatcccacgggaattgagacaattaaactttactaaaatagtttcattagctcctgaggtattataagatctaaatatcgatagcgatagttagtatcggattaaaaaaacaggtattgaaataaaattaattaatagattctgtatcacgcatatacccttaataataaaatattaagaatttaattcatatattaatatataacgcgacctatatctatatataaatcagccctttgaacatgttgattatatcaaaattatagaacaataaggaattttaacttatcatggggaaagcaccattgctgatataata

SEQ ID NO: 6995 - DNA, 447 bp, Arabidopsis thaliana columbia
tgtgtgcttgagtagtagcaaattcactttggcatattgatgaaactacaggagaatacatatccaagctggtccctgaggacttcaaagcttccatgatgcacggctgaagcttacaggtgcaactactgagaaccttctccacaagcgtcaaagcagctggtgagacatcctaaggcatgccgaccagaaaaatcaaacctcaagtcaattgaaaagctggaagaatttaacctcaaatagcaaaagcctttacctgactgtcctttttgacagtagtcaagagaatctcgagcaagtccatgggtacttcttcactttcatctataactgtgatcataatcgtttccattgagacaagcaccagttgaggatgatccggcctagataaatgcccaaaagaaaagccatcatcagtgtcacataaagtacctaagagttaactga

SEQ ID NO: 6996 - DNA, 533 bp, Arabidopsis thaliana
cctcctctcaagagaacagggtatactttctaagtctattccatattatcttatcttccactgttgtgaggctcacatacatcttgtcttccactgttgtgagtttacatttggctgatttatatgcttctgctgcttgtgtggtttgcaggaaaaaggttgctattatcggaagtggaccggctgggttagctgcggctgaccagctgaacaaaatgggccatttagtaaccgtgtatgagcgctcggacagaattggtgggctgatgatgtatggagtaccaaacatgaagactgacaaaattgacgtcgttcaacggcgggttgatcttatgaccaaagaaggtatcaactttgtggtcaatgccaatattggaaaggacccatcttactcccttgatggacttaaggaagagaatgatgcaatcgttcttgctgttggttccacaaaaccaaggtaatattttgtttcaaacaatgctgaattcctatttatgttaccagacgttcaaatggattatggtgaactaacc

SEQ ID NO: 6997 - DNA, 522 bp, Arabidopsis thaliana
tataatggagagactggccctagtcttgacaataatactgatgccaagaaggtaatcttctgtgtgattaacctttctcatctatatttcagatgatttttcgaataattaaaccattttcggtttcatattatttcaatacagagctgtgataccatgagtgagatctctgatattttgaagtgcaaatttgacgaaaattctggaaacggagaaacagagacgaaagttagtatggaagttgaccatccatcatactcggaggatgaaaatgagctgactgagtcgaaaatcaaagctttcttagatgacaaggtggctcattgataatgttatgtttcctcattgcatttatattctactcagaagtttataaagattgacttggttgtgaaatatcttaatcgtaggctgcagagttaaagaagttacagacgcctctgtacgaagaattctacaacggtatgatcacatgctcccccatctgcatggagagtacatcaataacaataaacgagagga

SEQ ID NO: 6998 - DNA, 728 bp, Arabidopsis thaliana
tcgagaactatatgtgactatttatacgtttatgtcaaaaatgggtttgattcgagtttttggccaatgcatgtgacaggtggcagagatcggtaatgagatagtcgggatgatcagaggaacgatcaaaatggtgacacgtggtgtaaatgcattacgtcaagccgacgacgtttcgccggacataaacaccaccaaacttgccttcgtctccggccttagagtctctccgttttacaggttcgttttctaaatagtatttttccaatatcatatcaactataccaaaaataaataaagaattaagtacaagcacttctatttttgaaaaatgtatgatggttacaacataaagtatactattttgatgatatacataactcctaacggaaaaggaagtttttaactaatcaaatttaaaaatattttaggaggatgggaattggactgaaactggtgcaaagacttgaagagtggtttctacgaaacgacgccgtttactcctacgtgcaaactgaaaacgacaacatagcttcggtcaaactcttcaccgagaaaaagtggttactccaaattccgtacaccaactttcttggtcaacccggtcttcaaccaccgagtcactgtctctcgacgagtcaaaatcatcaaactcgctccctccgacgctgagtcactctaccgcaaccgattctcaaccaccgagtttttccttcggacatcaactc

SEQ ID NO: 6999 - DNA, 948 bp, Arabidopsis thaliana
ggggtagataaaaactggagttgtctctatatacaagtgaagtaaaaaatcaaatgaaagaatcatatgagagagatatatttttttttttaatcaatatatatgagagatatagaccgattataatcaaataacttctactttcaagctataatcatatgctttttgcccttacgagtctccttggtcgcaccactggtcagggacgcacaagaaatgcgttttcatgaatttcctgaaccttgtcttgtaatcaatcgggctgatcactgtcggctgcacattctttggtaccaccaaagacgatttcacccatgtctctaactgcttgtcccatgtgtattgtctcagataatcgatgatcccacacactagctcatgattctcatcatcaactccaaccagcagcgagtagtccatcacgtttatactctgccatttgttttccatttacgataagtggattgtgtacacaatagaaatagaactaagtgaacatatgtatgattatactaagagaaagagagatgaggaaaactcacggttaggaagctggtgtcgttataaaccgctctttggagattttgttttgatgttttgctaacgtaaagcggggatttgttcatgtcgttgacaaagttctgatccaatagaacatcgtcttcgccattagcagaagtggctgtgaaacgagcatgtagagcgcctttgagatcatactggcgagtaacttttctgctaaaactcagattctccatgaccatcaggtcgtgccgtatctctttcccgccaccctttggctgccttacagttacctgaaaataggaatcaaagatccttagaactaagaccaatccattttataacaatgattaggtaaaatgctcatggtcatatgatcaaaagatgattctaaatacctgatggatcccaagaactttggcaaga

SEQ ID NO: 7000 - DNA, 1294 bp, Arabidopsis thaliana
tcatctcgacagaccttcaggtctctgtttttgtttttgtttttgtttccttctcttgattaatcaaaactgtgataccaattcaagttttgttccgttaaatcgcgatgaacgacgactctcgcgtttcaaaatcaaattgttttgaatctgaatttttattattatttgactttttcgttgttgttgatgattgattactagtaatggcgtcatcaaccgctttgatttgtgataccgaagcgtggaaggatttgaaggtaaagtagtctttaaggattttctcttttcttagtttgtcaatggtggtttgtgtagagaagtgatttgggattgttttggtaatttggcagggacatgtagaagatattaagaagactcatttgcgtgatttgatgagtgatgctaatagatgccagtccatgatgatgtatgtcttcttttctactttggctcatatgtgctatgtacattatgtttgttgttgaactcggttgattttgtgtttgtttctagttattgtgcatttacgagtttctattgctctggtattgaacttgttaatgttattggtatgttttaattagggagtttgatgggttgctgttggattattctcgacagcgtgcaactgttgagacaatggacaagcttttgaacttggcaaaggtgagggtagatgtttattgacagattttaatagaattgcaacgaatttcactcgaattttgataatttgtttctatatgcaggcttctcaattgacagagaagatcagccgcatgttcaatggggagcatgtaagtatccgcatgttaatcttactttgatttgatcttatgaaactctttatctagtattacatattagagaatagagaatgcaaatgaattgtaagcgaattattctccatcttcttcggtactgagacagaaacattttctatcatctatggtgtctgatttgtttaaatggcttcctcagattaacagtacagagaacagatcagttcttcatgttgcgctccgtgctccaaaggatgcagttatcaaggctgatggaatgaatgtggttccagaagtgtggaacgttctagataagatcaaggaattttctgacaaaattcgctctggttcatgggtaaattctagatgccattataaaacctacctctttacgttttcatctccttgtgttgagtttttttgaactaattgacaggttggagcactggcaaccgctgaaagatgtcattgcgattggtattggtggtagcttcttaggccactgtttg

SEQ ID NO: 7001 - DNA, 609 bp, Arabidopsis thaliana columbia
gatttagaaaaccaaaaaggtgaaaaataagctcaccagcattactaacatctttgaagtgtagctttttgttctgtattgggtccatttcagaaagtggtaacgagagaggttaccaaaattagggtttgtcaattgataacttcccacacaagtaaattgaccatcggaactattcttgtctacgggatacgagaaaacgaacagaatgtcaccttttcggacggttagcagtacagaaggccgcgatgccaaggacccagtcgcaaaggagttgatgaaattttgactggtggtgttggccgaccagagcttagagacggagcgaaatctcccaaccgatttcgcaggaagtcttgagagtatctcaatggttaaatccaaaggaacatggtctgattgagatgtatcattatcacgtgaggacattgtcgaagaagattatgttcttctctcgatctttcccgtcttctcttccatggtctatcgctccagtttttcactttctctgaaccctaattgagaatactcatttgattattaatataatattataatcttaatgttatctcacaaaattagggactttgtcgtaaagttaatttggta

SEQ ID NO: 7002 - DNA, 577 bp, Arabidopsis thaliana columbia
  unsure (1)..(577): unsure at all n locations
gtaacggtagtaacggccgccaaagatttttccgctggcgggtgtgaccactaacccaagcattatcgccgcgggtaaaaaaccgctggatgttgtgcttccgcaacttcatgaagcgatgggcggtcaggggcgtctgtttgcccaggtaatggctaccactgccgaagggatggttaaatgacgcgcttaagctgcgttctattattgcggatatcgtggtgaaagttccggtgaccgccgaggggctggcagctattaagatgttaaaagcggaagggattccgacgctgggaaccgcggtatatggcgcacgacaagggctgctgtcggcgctggcaggtgcggaatatgttgcgccttacgttaatcgtattgatgctcagggcggtacgggcattcagactgtgaccgacttacaccagttattgaaaatgcatgcgccgcaggagangnntgctggcagcgagtttcaaanaccccgcgtcaggcgctggactgcttactggcaggatgtgaatcaattactctgccactggatgtggcacaacagatgattagctatccggcggttgat

SEQ ID NO: 7003 - DNA, 532 bp, Arabidopsis thaliana columbia
gctataaagacctaaaaggttgtcatatttctccactttcatcttctcttcacaactatcctaaaccttttttccttttcttcttcttcactctctttcttcccggcgtcactatggcggctgcgccaggtaaaggcagcgaactcgaccacatcaagaatgaatccgttgatctggtatatatatttacgtcttcttagttttctattatctatatgttttaaaaaatctttggccctactaattttaaattttctgttacataaaagatacatatatgtatagtacgtaactagtaactactttgatctaatcagttaatatatttgtcccatgcgatttactcatgtttccattagaaatgattagtcaaaattatataaatgatgggtctaggtacgaatacccatggaggaagtgttcgaggagctgaaatgtacaaaacaaggtcttacggcaaatgaagcttctcaccgtcttgacgtttttggcctaacaagcttgaagagaagaaggtttcttctttattttt

SEQ ID NO: 7004 - DNA, 573 bp, Arabidopsis thaliana columbia
ttttattatatttctcattcgtagagtactaattagtaattattatcgtttatgaggtcatagataatcaataatcaagggatgattatttaatattgggccacggcacattcaattatactatgtgtgtttcggcccatcgtctcggatgtgtggctctgtctcctcttttcattttggctggtttagtcttttaggagattggacttctgaatgtggaatgcttctttgaacccatctctcatttctcctcttttcattatgtcgcaactacaataatcaactacaagctgattgaaaacaaaacaaatccctcagaatattccgctcagtatgtacaaatatgacaaagtgtttctttagtgtgagagactggttttggacctaagcatcatagtctagctttgtatactcgagcagcatgtgcggggatctatagatcttcacaagcgtccagtatagaacttcttctactccaagctcaccctctgctctagccgcgtacaagtcctcgcatatggctattaatctacattcaacagtgagtggtcataatctcttagaggttgagag

SEQ ID NO: 7005 - DNA, 658 bp, Arabidopsis thaliana columbia
tcccctagcatcctggctgcgcatagttatctccttccctctcctcttcctccctccatcaccaccctctccgcctcctcccctcttcctcagcaggtagcaccaccggcggagactccggaggattcctctgcggagagtgcaagagaggtaagcgaacggggagggtttaccgttgcaccgtctgtgattaccacttgcatgccgtttgtgccaaagacgccgccgtgaatggcctccgagcaaacggacataaagggagggataagtctccggcagttttgggaacggcggcaaggttggcgtcgcaggttgtgattgattttctcggtggtattatcgatggtcttggcgaaggtgttggtgaagctattatagacggtgtgactagaggtggtggtggtggcggaggcggaaatggcggtggcactagagtaatccacgtgtcagaggagggtaataatgaaatttgaggattgtttgattaactaattatgttttgtatgtggagattgctatgacttgatgatgcttttgataagtacatagatgtgcttgtatttattgagtttgagtttgtgtgggggatatattatgttgattatatttggggatatttacaatctaagaaaatgtgtatatgcttaatagatggatt

SEQ ID NO: 7006 - DNA, 495 bp, Arabidopsis thaliana
tgagcattgtgatgaaaatagaaattaatatcggaaatgtaggctctagaggcccatgaatcatacagattgctgaaagtaactgagcaatcctaaaaagtatgaatcagtaaataggtagttacgtagaagactctgagaaggatacatgaatgacacagcagagactaaacaagctctttaatcatggcatgggcagtacgagatagaaccattctcatgaattcattttattactatagtagcaaactagcaatcagtgtctatgtttgtgataaatgtgagaatcatctgcttaatttttttttcctcttggactgcagaagggagggagatctcagatagttggtgaaggtaaacaagatgagaggccacccgaatgcaagcaacagtaatcttttactacgctctaccagacataaaaggattgcgtgaaaatataattcaggtcattctctgttcatcaagaatgaggattgagaaaaggttttggga

SEQ ID NO: 7007 - DNA, 1130 bp, Arabidopsis thaliana
taaatggaaaatattgaaaaatataaataaataattaaaaagataaaagtatatgcccttttccccaaaaataatagtgtccctatgccataaaagaatggatcgaaaagataggatttaagcgaatatttagaaaataaatctataaacccttgcccgcaagaaagaccaagagaggaaattcatgagtgtgggactctcctaattgcatccctggaccatatgctccatcactaaatcataactaccaacttttttaccttactttttgttacacttgtcttatgttaactggcactagatttgtttatcttaagccattaggtacaagtttttattgttaaggaataataatcgtatttttcttctttaatcatccttaggtatagcttttgtaagaaatatacagtcacttagttacattttagaggttctactacaagcatttcaaaactatccttcaatcattgaagtaaacttaagttggattgttaagtgtcatattttcaactatagtctattataatagataaactaatcaaaactatacaattaaaaaatcctatacattttggtggtattaggttggtaaaacgatgtgtgtgcttgtggagcattatctatgttagtggagaaaagaaatgatacagatcatgtaattttctttaaattgtagatactaatacgggtaatcctcatctttttttccatatgttcatgcatgccaactaatttcttatatacagaattgtctaagttcaactcacaataataaatttctatattagccttaatttaaacacagaaattaagaaaaactaatcaatgcacactgaataaaagacttagtcaaacttaccggttttgaggaccatctcggagacgtagataaaccaagagaagcaaaccggctaatactactcttcgtagacctggcagaaacaggtgacccgggttctgatccgaattcagacccgaccggagaagaaacagagctttcatcaccatcagacatgttttcaagatcagaaccatcaatagttataacatcccaaatcaaccagttctttgtctttgacgtatgaggctcatcgtgagtaacagagtttctccacggcggcgttccaccg

SEQ ID NO: 7008 - DNA, 543 bp, Arabidopsis thaliana columbia
tgatgattcttgtactgattgcttcaagtttgcgatgacttggtctttgttggttagtggctttgttcatgcttttcctattccttttaaaattggtaagaagaggattcataagatgggggatgatgagaacagtctacgtaaacacggccttaaatcaaaggcggcatttgtgagtcggaaagaagtgaggtgtcagtcagttgaatctgtagaaaaggaagggaaccctttttcgattgaatgcgctgttggttttgttgttgaaatgttggctcagaatctccagaagctggaccagtttatacaggatagttcagagaatgaatcttgttgttccaaggaagctagttctaatgatagtccacttatctttaacatctgggaggctagaaaactcgacgtaaatggattcctcgggaacatgatgtttgccagagttggagatgtggcgtcaggtataggtggcctgacatctcacataagtgaagatggtgatgaaagtaatgtcagtactgctggtaaggaggaaagtgcagttga

SEQ ID NO: 7009 - DNA, 743 bp, Arabidopsis thaliana
gaggatcagaggatcccccgtccctagccaggctagctttttccggtgcgtttgcgaggtttctgatgaacttctccagcgtggacctgatgttttctccctctgaaacttccttcttgctaccatctgatatatctgctctccttcaggtatatcccctccctctgctatcctggtaaccctgttttaaccctgttgaactgtgtttaaacctatctgcaacttcctccggctgctcctgaaaatttattgctccttgaaagtttgtttcttccaactattaccatgttctcatttattacccaaacctaacaatgagtacaagaatccatgctcaccttaaaggcaaaagtttagcaagaggctactcctctccaactcgcaaacgaatctgagctccagacctagatacttcagagcttattaaagcaaatgctctcactctcatgggtcgactcactaatccagcggctcaacgtctctggtctctctttcctttcctctccaacagatggaacctcagaggaaaggctgtgggctcaggtctgggaaaagggtgtttccagtttaaatttgattttgaagaggatatgtagaaggttctagataatagaccttaccattatgaccaatggatggtcattctccaaaaatgggacagttttctgtgactcctttccatctatgctgcctttttggattgaactccaaggtctccgtaaacactactggcaagaggaggt

SEQ ID NO: 7010 - DNA, 488 bp, Arabidopsis thaliana
ttttatcgacaatggcaagtggtgcatctgataatttctttgcaaaagcgcgggccctggctactccaccaacatcaggagaaaccactaccaaatcctctgagggaattgacttgctagcaagataatcaagtatcaccggctgaaacaattaagcagataaaggtattatacacaaaggagcatacacacaatgcataaagaggggtatcaagaacgtggctttagaggtgaacctggcagtacacatggtcgactggaatgtcaaaataacccatcgactgtcctgaatgaagatcacaagcaagaactcgatctgcaccagcttcagtgataagatttgcaaccaatttggcagcaatggattcacgcccttgtgtctgcaagcagcaaaacatacaattttatccagaaaagattaccaatagctaagttatcaacaaaccctccatatcatgtgaaagtagctaaaccacacaaagagactt

SEQ ID NO: 7011 - DNA, 557 bp, Arabidopsis thaliana columbia
gtgtgctctaaagctttcgattccgcgtaatacttccgcgaaaacctggttggtgagagaaggtaacaggacgccaatcgcccggctggtggcgttagagaggatatcgggcgcacgattgggaatatagcccagttcatcaagagccgcggcaatcttgccgcgtagagcgacggaaacctgctccgggttgcgtaaaaaacggctgaccgtcattttggtcacgcctacacggtcagccacatcctgaagtacgggtcttttctttttcatcgtcctgaaggtacaaaagagatagattctcttagtttaacacggacacatcagaaccttcccggggaaaacagtgcttgtttacaattattagatatacactaaatcaattgcatcgcattgtgctaacgacgcggcaaaaccccggaagcgtacatcagcacgcgaccggagcgagcgaggaagcctgcaaaaaggcaggcttcaaagatgccgttgagttttaaccggcggcagatcgaacagtaacacttcgctgtcgctatccgcatggatggagattc

SEQ ID NO: 7012 - DNA, 634 bp, Arabidopsis thaliana
cgtggcgacgacttcgtttccgacagcaatgtaacggattgaagttgttaggaggaaggggaggaggttgtcggagagccatgaacgtgcgttggaaagcttggaaagagaaatgatatcggagtttgggacggtgacggtgagggagattcctgtaatgccgggaaaatgcggcgaggatgtcgtggtttgtgtcgaagattttgacgtggttgattattgtttttgttttgatgaagttgacgacttggtgaggcggtgggaggttgttggccacggtgccgtagtttacgccgacttgatatgcagcggagaagggaaggatgagagtgagaattaggaagtaaagttgatgaacaactctagatcccaacatgatcgtgaatgagtttattttatgacttccacgtttagcaaaacttactaggagttgttttttgggagcatgatcgtgttcggtttgattgtggagacgtgagcgagtggccccaaaaaatcactcactcctagtaagttttgctaaacgtggaagttttgctaaacgtggaagttttgctacataatgtaataatcataaattaataacatttgataattgagacgattaataaggatgtaatagttcaaattaatg

SEQ ID NO: 7013 - DNA, 397 bp, Arabidopsis thaliana columbia
tatgccattttactgaagacggcttgttcatatgggctttgtttcgacaggtttcattcaaaatctcataaaaactggacatcgtatcaaggcaatagactacatatactcatttggtatggtccatagattccaacctgtatccgctatcataaacgattccttgaggattacaaaggaatctgcagagaagtcgtatagagaagccaagaacgaatctacaacgcaggtaaaatttaagccttttctttgttcttaacttcttgtatcacaataaaactcaaatagagattgttgtaatacaaagcgtactttacaggttgcagccatagacagacaggttagagcactaagagccgcgattaaatgcatatcgtgtcataaactcgaatcagag

SEQ ID NO: 7014 - DNA, 557 bp, Arabidopsis thaliana columbia
aattctacgattattttgtttctaaatcgcaatggctccgagaatcaggagcatcggaagttacgcaactcagggaaagttctctgtcgatttcttcggagacgagttcatcgtcaccgtaacttcggatccttccgtcatcggccaatggattcacgacgtcctccgcttctcctctcgccctctcgtcgttggagtcggcgtgcaatggacaccacatcctacttctccaccggctaggtatcactctccggttagttatcactccgattcttcgccggttactcatcactatgattctccgccggtttgttatcgctcagactctccgccggctcaatattgctctgtttctccgccggctcgttatagctcagactctccgcctgctcaataccgctccgtttctccgcctgctcaatatcgctccgtttctccaccggctctttatcgctctgtttctccaccagctcgttatcgttccgtttctccgccggttcgttatcgctcagactctccgccggctcaatttcgctctgtttctccgccggctcgtt

SEQ ID NO: 7015 - DNA, 513 bp, Arabidopsis thaliana columbia
tgcttatttataccatacccattcaacaaggctctcatctcccagaggttgggatgcatccacaggcttacgtccagtgattaactccagtagaacaaccccaaaggagaatacgtctgatttctcggttaatttgccacttgatgcatattccggagccatgtagctgaaaacatttaccaatcgtttataagatggaacatatacagaaagaagttttgctcatgagcaatgtcatatgggaccttaaccagcacctacccgaatgttcccatgacccgagttgtaatatgtgtgttacagtcgagagctagctttgcaaggccgaagtcagaaacctacgaataagattctaaccagtgttagaacccatgatttttaattaatcagcagctttgcaaattcagaagagcagatgaatgtataccagggcatggaagttattttctaagagaatgttggatgatttgatgtccctatgtatgatacgagggtgacgtgtaaatgttttac

SEQ ID NO: 7016 - DNA, 526 bp, Arabidopsis thaliana columbia
tctgttccagattcctcacattgtctactatgtgttggattctcttagaaaggctttcgttgtgctgttcgatctgttcaaatagcatctccagatgtcttttgtaagtagccgctctctttttctctgctgctagctgctgcatcagttcctgaattttgtcgtgttcgttctgcaaatgaggagagcaaagttttagaatttaagtcttttctagtaacaactgatatataagcaaaatcaaaacaccagcacatgaatatgaatatgctatatagcaactagtcacgaaccagtatcacatcagcatatatatatatattaaccagctaaccaagaaacgccaatttggattttcaaatgcaatggctgaatataaagaaatattgaccaacgaaagagagtaacaactaaccggatattgatcataaatgcaaccccttcgaactctgccaggcatcaaagagtgattgtgctccttgacaaactttgtgataaccatttaccagagttctcttttctaatc

SEQ ID NO: 7017 - DNA, 587 bp, Arabidopsis thaliana columbia
  unsure (1)..(587): unsure at all n locations
ctnnnnnnnnnnnnnnnnnnnnnnnntaaagtctcctccagacgcgtgctgccgggctttaccttaagcctcggcaccagtctgctgtttgtgtgcctgattttgctgctgccgctctccgcgctggtgatgcaactggcccagatgagctgggcgcagtactgggaggtgatcaccaacccggcagtggtcgcggcctacaaagtaacgctgctgtcggcgtttgtggcatcgatttttaacggcgttttcggtctgctgatggcgtggatcctaacccgctatcgcttcccaggccgcacgctgcttgatgcgctgatggatttaccctttgcgctgccaacggctgtcgccggtttaacgctggcctcgctcttttccgtaaacggtttttacggtgaatggctggcgaagtttgatatcaaagtcacctatacatggctggggattgcggtggctatggcctttaccagcattccgtttgtggtgcgtacgtgcagccggtgctggaagagttaggccggaatatgaagaagcggcggaaaccgttggtgcacgcgctggcagagtttctgcaaagtggtgct

SEQ ID NO: 7018 - DNA, 598 bp, Arabidopsis thaliana columbia
tgcttgcattatttgataaagcggttgatttgaaaggtaatgaagatagatgcaatgagttacaaatttatttgacagaaaaaaactaaggctagagtagaaaataagttggggctgccttatgatattctcagttggtggagacgtaattacccatggttccctatattgtcagaattttctagagatgttctcgcaattcaagcctcatcagttgcctcagagtcagcttttagtacaagtggtcgggtgttggatccttataggtgataataggatttttactcaaataatcctaaaacacgatcctgtcgttgtagtattttaggttgtcaatccaatcccgtgtgatgtaaacagatgagatatgattagaaagctctaagtcaagccaagcagagagttggttggttctaacagtcctactatgtaataacagaaatgaaatgaaactaaaagcagaaatgataacaggcagtcaaatggataaacaattcctaatgatggggtaatcgaatagtgtggtcccttaatctattcaggcggttgacaaactatcctagacacaagttcacacagattaattcctccgtgatag

SEQ ID NO: 7019 - DNA, 486 bp, Arabidopsis thaliana
ctgctgaatcgggtaaacacacaaagtgacacttttctccagagaattgtgacattaattacttaattgaagtattaattaataaggtataaacaaaaaagccacgtggcttctcttctccactcctctttttattccttcccaaacaagaaggttagttattattatttccagagaagcttctcttttgattctctcgctctctctttcttcatcgcctcttcgagcttcgatggttgggaatattctggtgaccggtggtgctggttacatcggaagtcacacggttcttcagcttcttctcggaggctataacaccgtcgttatagacaacctcgacaattcctctctcgtttcgatccaacgcgtcaaggatctcgccggagatcatggacaaaatctcaccgtccaccaggtttggctatcttttcccttgctctgctctttggatcattgcattctgagaatttcggtaatcatgacctc

SEQ ID NO: 7020 - DNA, 544 bp, Arabidopsis thaliana columbia
  unsure (1)..(544): unsure at all n locations
tttgttgatatccaactgtcgcacaagaaaatatagaccggaagtgacagaccaggccggtttgtttggaaatttcaacagcccaccaaggggagaatctctgataagctggatttcgttatcctctaacgaatcaatgataccgtgaagagtcttcatcttgttgtaaacattggccctttctccaagaggttcttcgccagcagagattagacgattagggaattcaagatccatcatctgcatacccatgaaataaatatgcgaattgaataggtaatcgttgcactatatttgagatttaatggcgaacttacaagaataatggaggaaaaagcagcacttcaatcggagagtcgaaagcaaaacggagcaaaaaaccagaaaccacatagagaaatgagagagatgagggtaaatgtaatgagatgaagcggttgcaaaataaacaaaaaaacacaactcctttgtttcgcaccgttctcatgtttattacacacctattccaaaaaatctcggaaacanatctcgtagagagatttga

SEQ ID NO: 7021 - DNA, 532 bp, Arabidopsis thaliana
ccgccgatatcccgagagggaataacaacaatggtggtggtggtggtggtaataatcagaatgcgaaaatgagagtggcgaggcttgtggatagttatctcaccgaagttgctagagatcggaatttgccgttgacaaagtttcaggttttggctgaggcgttaccggaatctgctaggacttgtgacgatggactatacagagccattgattcatatctcaaggtatatatatattgaaggtctttttggtaaattcgtagaatagttttcaacatttttttggcttaattttgttgtgataggcgcatccgacattatcggagcatgagaggaaacggctatgccgagtgatggattgtcaaaaactatcaatggacgcatgtatgcacgcggctcagaacgagaggttgccattgagagtggtggttcaagttctcttctcggagcaagtcaagatcagcaatgctttagccaacacatcactcaaggagtcaccactttaggagaagcatgggtacgtatcagctatg

SEQ ID NO: 7022 - DNA, 531 bp, Arabidopsis thaliana
gggaaggtatcaaatccctcagacagacacaggctaagtatcagccgaatacccttctggcattcaggcatgtcagcaagagaagagtctcctgtagattttgtgtaggctctgagcaatataatccaccaaaaccctgaatcaaccggcgctactcttccaatagcactctcgccaaaatcagctatcagcgtttcatggtttctaacaggatcatggaaaactttgaagctagcaggcataacaccctcaccaagctggaatctatcaatctttttctcccaagattgaagacgaagagtcttcaaaaggaagtttttaactatatctggctctccattcatcaagaatgctaaagcacttggtacaaaatctctcacgaacaccttaaggataaagtcaatgcagagatacaaggtcaatgacagtaaaatgtggttattcagaagttttcagaagatataaagattcttcacctgatcatagttgagttttcttcagaattatcccagcagcaatagtgccacaggt

SEQ ID NO: 7023 - DNA, 304 bp, Arabidopsis thaliana
cgaatttgtagtaaagagtgtgtggaagaactgatctaatcgttatagacttatagtaaactcaccaagataccattactaaaacggaggagaacggtgatagtgatgtagtaagcggccaactcggtagagccaagatggccaatgaaagcttgacttgtcagagatagtccggacgtagagaacctcgtaaagatcgacggcccagccacaacccatagctttttagattccctccagaccatctccttcatccctaacgagtcccgatcttcttcgcgattccccgtcgactttttcagaa

SEQ ID NO: 7024 - DNA, 609 bp, Arabidopsis thaliana columbia
cgtttatgatgattaccttgctcggatgtattttggcggataaaattgacagccaaatgtcgacaggtccacagtacttgcgaaagatattaaggcttacctgatgtacaaaatcaagtattcttttaggatgataggagcttgcagatacttttaagttccgggaaaaaagtaagacttacgagttcccaagctttgacatttcttcctgaattagtctgcaagaactttctgcatgtacaacaaagtgatgaggaatgattttgcggtttgatgactaaggtattaaaagaagtctgacgtacaatactccacgatgcacatctcggtgattgcaatgacccgaaacaccatagttatcgaatgttattatctgaaaacaccacatagagaataagatgcagaaatatttctaagtgacatcctgatgagtgtctttaacgacgctgtaagagccaagtcatactgtgtggatatcgtgtttagtgacttcttcttcgatgatctctgttagcaaatcgtggctccataattggccaaaccatcctgcgagatgcccccaatgagattatatatacagagatcacatgtactggggagatataatag

SEQ ID NO: 7025 - DNA, 458 bp, Arabidopsis thaliana
catgcattctcatgatacactagatcaaagaattttccaggttttctgtagttctcatacgcatgtagttgcagaagcttggtgtctgtttcatcagatgcaaccgaatggagctgaagcgtatccacaaaccatcccaaatgatcagaggaaagagagaaataaaagagagaatggaagtagagagtcaagaagacaagacactagttttgcttacatgcttaacaaacttctgaactagcttgtccaatgtgaaaagaacatatgactgtgctccaaaaatagctcggcactcatcttcaaactttgtattgtcaatagaaccgtcaagtaaattatagagtgcatccatgaacctaaacgtgttatgctttgaatatcagtaaggaattgttttttcaagtaaagctattaacttggaagagaaatcacctgggataagaatcaggagtcgtgtt

SEQ ID NO: 7026 - DNA, 535 bp, Arabidopsis thaliana columbia
gttatacattgtatcctatacaaagagacattctttcaatgatctcaaaactggtttgaacactgaacacaaatggactaataagaggacatgttaagacttaaaccacttggttcggtattttgctcaatttcaagggtaaaattggaaaaatcacaagaaaaacaaaagccctaacattattgtctaaaatcaattttctcctccggtggtgatctctgtgctccggcgcataaacccctgtaaagccaataacttgttgttccccaaagtttggttcttcatgttggaaaccgaaagcagtgtctgcgacaacatcgccggcaatgagaaatggcgagcggaacgtgaaattggtggcaacgagagagctctgcaagcgcttcgagaactcattatcttcccttttcgttaccctctcgaagctcgaactcttggtctcaaagtacatatatccacacctctgttggactcatagcttctctctttcgcttaatttgcttaatttgacttatcattgcagtggcctagagga

SEQ ID NO: 7027 - DNA, 945 bp, Arabidopsis thaliana
  unsure (1)..(945): unsure at all n locations
tatctatcaacgttaacatctactatatctttatacacctcgacacaactatataatgttactgatttacctaatatttatgatttgatattagtcttttttgtgcagccgaagtttgaatgtaaaaaaactcttacccgcttaccgcgatcccaacctttcgaagaatgatcttccaaccggtgtttgttttgcatccggtggatctggacttgatgaacgcactgccagatcacaagtaaaaattacttgtgttgcttagagtttacattgtaatcattcttgattatcttttataatatgttctcttgttgatgtatagggagttatatgggtgcctgatcaggtgaaagatttcaaagaatatatcatgaaactaaacggcgtcgtacgagataaaagaaaagtaaacgcgattatatcaaacgctgtttatctaatctcagctggaaataacgatcttgcaatcacctatcctactctaatggcacaatatactgtttcaacctacactgatcttttggtcacttggactgataatcttttaaaggtacactattttaaaatatttgtgataaaacataattgtatgattggtctttttcgaaatctattaattttgttttttggttatttgaagagtctatatgcaatgggtgcaagaaagtttgcggttcttggaacacttccgttaggttgcttgccaggagcaagacatacaggtggaaattttgggaatatatgcttagtccctataaatcaagtggctgctatattcaaccaaaaattatctgcaaaacttaacaatcttcacacaatacttcccggcgccaaatttgtctatgtagacatgtataacctctccttaatctcatcaacaatcctcgggcttcaggtaatggcctacnnnttatgaaaattagatatatacgtcaaaatataata

SEQ ID NO: 7028 - DNA, 536 bp, Arabidopsis thaliana
ttcgcgccattggacaggccgatacgatgcgtgatcatcggtttgactttgatagcgccgctggctaatagcctgatagcgttacgcatgaggtggagtcataggccatatgcccaatgatgcttttgttccaggcggtaatgtcattaatcgagaaatcaagaggtttgaagcccattccaacgcgtaccacttccccgttcgggcggacgatttcgatggcttgtttcagtgcgatattggcaccggagcattcaatcaccagtcccagattgtctttgccacaaatttgctggcagcgcgccaccacatcttcggtagaaccatttactactgccgtcgcacccaggtcttttgcaaccgggaagcggaccgccacatcttcttgcagaccaacgacgacgatatttaccgcccccataattcgcgccatttgtacggagaacagcccgagtgggcaagtgccgatgacgaccacatcctgaccaggaaggaatttcgattgctgcgcgatggatttgtaggcattacagata

SEQ ID NO: 7029 - DNA, 526 bp, Arabidopsis thaliana columbia
  unsure (1)..(526): unsure at all n locations
nnnnnnnnnnattaaagggctatgacagtgctttaactgcccgcgcactggcaaccagttgatggtggatagcctgataaacttccgcctcgccactctcttctgccagccccacgcccgtgaatggcgcgtgtaacgacatgttgatttcattaaacgtcagccataacgccactttatgttggtagcgagtaaagaccgtgcgggcgtaatgctcgacgtgatcgatgaccgctcgattagcccaaccgccgtagtttttcaccagcccatatggcatttcgtaatgggataacgttatcagcggcttgatccccgcctgcgccatttcatcaaacagcctgatcgtaaaacgctaaccccgcttcattcggttcgacttcgtcgccctgagggaaaattcgcgcccatgcaatggaaatacgcagacaggtgaagccatctcggcacataacgcgatatcttccgggtaacggtgatacaaatcgatggcgacatctgtgatatgctctttcccaggatgcgc

SEQ ID NO: 7030 - DNA, 501 bp, Arabidopsis thaliana columbia
ttatcacataccttcttgcttcttcatcacggacctttgcatcaagttccttgcttggaggatactttggcaaacttgatacattacaagggagtggttccatagtgaagaactagagaacaaaagaagaagaaagaattgagtttgcattgaggaggtgaatcaggaactgctagttgaagaaatataaagctaccttgctacttagtgtcgaagaagccgtgccacgcttcgctggttctaaggatagaagtttgtcaacaagagctagagcagaaggtggtaagttcttgaaagtctctagaaggacacgtttataaggttgttgcggcttgaaacttgttgcaagtggtagctttgtcttttgccagtaatcatcacttggtgaaccacaaaacttgaagatcttatgcatttgctccacctaagagacattctcaaagatatcaataatttgtgcttaatggattcaaagaactgattgtctgatgaactacatgt

SEQ ID NO: 7031 - DNA, 592 bp, Arabidopsis thaliana
taagttaacaatatgcaaagcttaagtttaagagaacatggacttgaaacagaaagaaaataaaggaaaaccaattcaccttgagagatctttcttctttcggaaggtggtacgcaacattgtggctaacgtgttctgtacaaaatcttgaacttcggcatgtattgtctcccataaagcatctgcaactaatgtgtcacagcgctgcagcatcgatcctacactctttatatagccaacaagttctaccaaggctttcctttcttctgcagtataattgaacctcaccacctatttaaaagaatccaaaacttgttaccataaaagataaaacttttcgaaaatatttcacaagtattaccttctcgtaatcagaatatgatccggaggcttcaggagtctctcctgcatccctacatgggcgagagaatttccaagcacattgctcccaaatgcgtgctgtccatctacttaacagttggaaaccttcaacaaccatatcgtacatgtttcctttgacctctctgcaccattcagtatatgctccatcgtttgacttcaacagcaataactgcatgaaagcaagtgagac

SEQ ID NO: 7032 - DNA, 552 bp, Arabidopsis thaliana columbia
tcttctcctccgtcaccgtcttcacatcgtcggcgaagttcagcttccggttcatcattgtctcattgctcttcccggtgtacggaaagagtttctcactcgtgtgatctctcatcctcaaggactagctcaatgcgaacacacgttgactaaactcggtctcaacgtagctcgtgaagctgttgatgataccgccggtgcggcgagtgttatcgctgcgaataatatccgtgacaccgccgcgattgcgagtgcacgcgcggcggagatctacggattggagattttggaagatgggatacaagatgacgcgagtaacgtcacgcgctttgtgatgttggcgcgtgaaccgattataccgagaactgatcggccgtttaagacgagtatagtgtttgctcacgagaaaggcacgtgcgttttgtttaaggttctctctgcttttgcgtttaggaacattagtttgactaagattgagtctaggccgaaccataatgttcctattaggctagtcgatgaggctaatgtgggcacggctaagcattttgagta

SEQ ID NO: 7033 - DNA, 541 bp, Arabidopsis thaliana columbia
cctccgccgtcgcaaaagtcccaagccagagtctagtacgactcgaaggatcacgaatctccgccgcaaattttccccaaggtcgttgtctcactcctctatacttcaccacagactttaccaaatctccaccgttctccgccgcagccgccggggactttttcttcgctttcctcgccggtttaggttcgtcatcttcgtcacagaacctgatctcatccacataacgtttcaccctcggagcaacagatttgttgtcgttttcctcatcgctggaagaatcagtagcgcatgggtcagtgactatgattttgacaatcttcgggaaaccgtcgaacggtgtggatgtgattttccggtgaaccgtgtacttggattttccactcggcttttcatttctcttctagttaaccggagaagaagatagagatatagagagagagcctgaaaaaaagtagaagagagaaagaagagtcaaaaaggctatctatgaaggaagaagaaaacgccgtttcttagtaacaatccctttgttaaatat

SEQ ID NO: 7034 - DNA, 529 bp, Arabidopsis thaliana columbia
tttaaaatcgaatcgacggaatcttgatccggaatccgtatccgttcgatcttccccatctttcaatgcaagaaacaaagtgtctatttattcccaagttccaaaatctgaagaagctgatgttatgacggatttgaaaatgatcgctgattgtatgatatcttcgggttacgaaaacgaatgtatcaagatttacaagaagattagaggatcaatcatggttgaagcgttgagtaacttagggtttgagaatctaagttttggcaagattcaaaaattggattgggatagtatggagaagaacatcaagaaatggttagaagctacgaaagtcctaatcacaaacttgttcgagggagaaagaatccttagcgatcacgttttctcgccttcagtctctgtcgcggagtcttgtttcacggagatcacgttagatagtgctttaacactctttatcttccccgtgagtgtagctcgatgtaagaaaccgtcgagaaaatcttccttactctcgacatttccaaacgat

SEQ ID NO: 7035 - DNA, 642 bp, Arabidopsis thaliana columbia
atcttggtctttttgaaatgaacacaattagctaaaccctgttcttctaagctgcagaaaaatttatcagcttctggtgatgaggcctggaaacaaagggaagctgctgttttggctctcggcgctattgctgaaggctgcatgaatggtctttaccctcacttgtctgaggcaagtttggttttgatccacatcatctcatatatatgatttttctttgctcagttgatatacattaacatgctaacgccttatttctgcagatcgtggcatttcttcttcctcttttagatgataaattcccgctcatacggagcatatcttgctggacgctttctcgatttggcaagtatcttatccaggtatgacttgaacaggatatatcacactttaactgcttcaaacgatttttagatgattcactgtttttattttctaggaaagtggcaatccgaagggttatgaacaatttgagaaagttcttatgggtcttctcgcagactcttggatacgaacaagcgggttcaggaggctgcctgttcagcttttgcaactgttgaagaggtacatgttggctttccaatgtggtttttggtggcatatgcaatgttggttgacatgtaaatctctatgacgtgtaga

SEQ ID NO: 7036 - DNA, 526 bp, Arabidopsis thaliana columbia
cttcttaaaatgcatctcatacctcttctttctaacagactttaccatttggtgaatcttcatttccatgccttcagcaaactcggtatgctcatatccagctttggtccttccggtttccactcttcatatatcttctctgctccttgtacatcatccagcttcaacaaagagctaatcattgttcgatatccattatcaattagctgggaatgttcatacattgatagtggcatttcatcacacttgaggaattcttatgaaaagcaagacaagtcatgaacacactatttgaaatttatacgggatcatagtctacaattaatacatttatcaatcgaaaatacacctaattacattatactgttttaagtgttttatcaccttttggtttataatagctatttcatgtccacgcaaaagtgaaactcaaacatttgacacatgtcttatttaagaaaacctggagcttctcagttctcatatattttagtcggaaccggagtacgaggcgagggtttgactg

SEQ ID NO: 7037 - DNA, 599 bp, Arabidopsis thaliana columbia
tgtgtcactgaaatccgtccttatggagcagtcactctagctgttaagagtggagatttcacagtaaatggtcaaaggctcaagaaatacttagaagatcaaatccttccaaaggtgacttctgttcatctccaggaacctcttgatgattaaaggagtaaggtagtcaaactaacgacttaaaacaagctcacttgggaagaagtcccatgcctttctctgtatatatttttgttttccttgttatttttgatgcattttactagtgttttcaggagataactgcaaatgtttaagtgtaatggattcaacctcaaagagtcactcgaccacatgctgtagagatcgagtgtttcagttggagcttcaacatgtcactcgatcacactaaccacatgctgatgaggaaatgtggtcgagtaagtttgataactgagccttcatactcgaccaagtactcgaccaacataagaaatgtggagacaccggtggaaatcgagtataatgttgtttcgatcaaacgattaaacattatactcgaccaaaagaaatttcaaaggattttaggattactgaggtttatccagtcacagggacag

SEQ ID NO: 7038 - DNA, 1172 bp, Arabidopsis thaliana
attcacttgttacgttttcttttcctgctgcaacttaaaaacaacatattgagaagagaaaagaaccaaacaaacagaaggggaaaacgacggctaacgtctggtcatcgcaccagtctgtcaagggaatgacgtggcgcaacgaaaatggcggaatacgtaagccccatatcatgcaaaggaaggagacaaggtatagcattaaatgaatgaatatgcctgcaaaatacatttaatgctccacgagagacagctttttttttttttttaacttgaaacgatacagatcccatccaacataacatcatcatctcacagttcgcgttttctaaccacaacacaccccacgcgtgtggcttactcgcgctacataataaaaataacaaacacaaacaaaaagagtaaagagggggtttccaaaccccagtcaatacccgaaccaccaactcctccaccgtgatcggacccgaacccttttacgtcgttgtcccatcacggtgacaaaggagttggatctcgcccactcgcgcggttcgttcttgactcgacaccccctccctcccatagtacaagaccaaaaaaacaagttatataaaaattcacaattcattaagaaaaagaaacacacgcacgcgccagtcttgatcaagatcagctttcgcattgtaaagcggcacgaatcttctgaacggtgcatgatattaggttgttgacagtctccaccgactcaaccgtgagttttgccgttgggagattgtttacaaggatttgaaacgccactgtcaagagggatccaccaccaaccggtcgctggtcaccatcacctgacccaccaccgtcaatgcctccgtcaggaagaacagcgaaaccggacggaaggagagccacgtaggatgaatcaccaccgttcatcaccacatgcatggcgggaatgtcgacaggcgcgtatactacaagcgctccagatgcgtcaatgcatgtctcctgaagaattagcatactactctgattcgcgttcattgcctgtagagttgacaaaaccaaaacaacctcagctaaagtgtttatttacgagaattgccattctgaccaaacagtaacgcttcatggttaatagaaaacaagtcaaacgacttttcagatagaccgacaaaaaaaaggaagtggtgaaa

SEQ ID NO: 7039 - DNA, 584 bp, Arabidopsis thaliana columbia
gctattgaatccgaccgttctaggatcaaagaagggactccacggctcgagagacatgctgaagtggcaagaccagaagggccagctccgatgatgatgggaccgtgtacgaggatgatatgctgggtctggtcagttttgttgtgaggatgagactccattcttgatggatgatggaaaatgttttaaagagtggagagactaaagagtgaggtatgtttaacttttggagaaaaatgttcttttgggtgtgagaaagaattggaatttatagaaggggttttcatttgtgatttgggtttgtgggaccttctaagattctctatgacgttttatttacaaacatagtacatttgttttttattgttatatttagatactaaaattatattctgttttttagaccgactccaattctgttctatattctttaaggctactttagaaagcaaaaaaacctcttaattctactatatttttaacttcaaaaataaagattttttttttacgttttaagagatccttatttttaatttacattagatctctattttagaaaattggaattgaataggattggaata

SEQ ID NO: 7040 - DNA, 460 bp, Arabidopsis thaliana columbia
gttgatagcagaaaaaaccacagaaccagcaacaattcttgctgattgacccaaatgaatagttccagatacattgaaggtgatcatacatccttcaacagggcaatcaactaagacatgtgcaagtatgttcagattaccagttccatatacataaacatcggaatcgaatcgcaaattcgagttcaatgtacaagtggtattcaacgatccaacaccatccaggtcttgacaagtcacagaaatcggagaactagtagaatttccagaagcttcatctgaaaacaatctcacagagctctcaaattcagtgaccccatactgtgataagctaaaacatggcgtagagaccaaaaggacacacaagaacacaagtccaagcatcaccaatgaaaagcaaaaatcagtcacacactatcccagagaaccaaaacaacactgacgacatctaagaaaaaac

SEQ ID NO: 7041 - DNA, 460 bp, Arabidopsis thaliana columbia
gagttaggaattacttaattattagaaaatattataaatagagaaaaaaacagaagaagagtaaccaaaaaaagtaactagtctctattacaaagaaactttgaccagaaaaaaaagaagagcaattcctataacaaataagaagaagagacgataagagctaagaattagataactattagaaaagattataaatagaggatagctattcattatttcttaagtacatgaaacacttgcaacaacaaaaaagttaaagatatgggtgctaaatggaattcaatgatcataatggtgtttgtggtgacaatggtaatagcaatggaaaatgtcaatggagagacgagagctcaatgccatgaagattgcattacagattgtgccaccacaggaataattccgatcaagtgccttcagaattgttaccgtcgatgtccggcaaacctcgtcgtacattagg

SEQ ID NO: 7042 - DNA, 372 bp, Arabidopsis thaliana
cagattatattcattgaaattagaacttgttactaatctcttatactaagagataggaacaaaataatcatttcttacagaggatgttcttttgatagatcctcttcggattgatggatctgaattaggactagtcaaaccagagataacacaagctccccattgcattgtcagagcaaagattgtgtgtccaatagtaactccaacgttgtttccaacaatcattaaagcaccctcgtgggtcgctgctagtccaggcgctaagatcaacaaaaaaaatatcaaaaagtacttttttgtcaaactcaaaaccaattggtaatgaatgaagtaatccgtaatatacttaaaaagtttgatatcttagtggga

SEQ ID NO: 7043 - DNA, 890 bp, Arabidopsis thaliana
ctctcagagtttctctccgagctcaagtattacgtaagttttctatatatcctccgaatcgagttttggaatcatgtcactctgtcgtcgtgcgagttatgattctgtgttatattttggtggtagggctttacaagagttaagaagacggactctgggaaaatggaatttagaaatgaagatttcgttagaggccaacctgagcgtttaagggacatgatgctcaaagcttgtaggaagcacagagccaaattcaaagccaaagaagctgccaaagaagcagccaaagaattacaacgtttacagatttgatcagaatcatcatcctcctacttactactactactactagtgctcctctttcatgggttaattaaagttgctttctttcttgtattataacaacaacactttagttagtggcgatgaaatttggggtttttcagaaacaatgtatttgtgacctctagtgtctatctgtttattcatcaaccttgccacttactaaagatttcactgaatgctttcatattcttggacttgttatgaatgttccatcaagatcgtattgcactaacaattaaaaatcttatgattgctaataacttagttgctgcaaaatgctcccggtgaagattctacttggcttatgaggatgaagactttccccaagatttatatgttcaccacttgtttgcttaggtaattagctactttccctatgaaaatgttgttctacctctctgagccaaataatgccaaaggattcatgttttatagtttcaaaactttggcataaattgtatgtcttttgtttaacatctgagttttgatgtctgatgattgtaaagttgctaaagtttattgaacctagtagccagtaggagata

SEQ ID NO: 7044 - DNA, 524 bp, Arabidopsis thaliana columbia
cacttcactaatttttccctttcaaaattttctatattaaaaaaataaataataaaaataatttggtagaaatacaatgatatggactaaaatgatatggaattcattaaaagtagaaaaagtagacatacttattagccctattgtaaaatctaccaaattgatttaaatcaatggtattatatgttaattcataatattaacatatattatctcaggaattgttgaccaaacactaattgattaatttaccataaaactctttccccaaatattttggtcaatggtcttgaattaattgaaaaatgttttgttcctcctccactcttatatattaaaggtttatcttcgatgcttcaaaatcaataaactctctcgtctctctctattgttgattaaaatggaagtgatatggatgttcttaatctgttgcataactggtatcataattataagtcatagcaatgactttgtcgaagctaagagcctttctaaagttgaagatttagaaatcgagaagagac

SEQ ID NO: 7045 - DNA, 531 bp, Arabidopsis thaliana
tgttactgtctcgaggtttcccggtgaagatgatcacgtagatgtgcaagtgcaacttgcgttgctccagcgaacgatgaggcggtggagatgcacttggagacgcttgttgttgagaatgaaggctattgtgtgatatgcatggataatatccgagttgggtcagatgtggaagcgggtcgaatgccgtgttcgcatgtgtttcatcgtacttgtggagaggaatggcttaggaacagtgggatttgtccggtgtgtcgtgccctgtttccggcttaaaactttaaaaccccttttgtattagttttgtgctatatgaaccctagtttcatgctttatctctagattgtcactttcacttttctaatgaagtatgttttacctagttcattgctatttttgtttaaactttgatgtgaaacacactaaataaaaagaaaaggatcagatataagattcataagtccaaaggtacataacaacaacaaaacaagatcacaaagctacattctctcaccacgtcattgtacg

SEQ ID NO: 7046 - DNA, 488 bp, Arabidopsis thaliana columbia
tgtccttcatcataggctactatgtttccctgcattagttacaaataaatatgagaatttgctaaaacaaattgaaaggtactaatataccagtttacctgaaactccttgacaatatttcctctatgaactagatcatgtgttggaagtgggaactgcggaattatctgaaacagaaagatacaaattaagaacagcatctattcattaataataaaacaaagagaaaacattaagaattttacctcactagggagtgcaccccatagaaagaacctcaaacgaaactgagcaagcccataagctccagctgccatcattccattcctcacttggtaattcatctgtagaaggcgtccaacagcaaaccgtgcaagatagcccttagccatcttcagcatgtcaacgacgttttccatcaaaacgaacttaggcttcaaatattctacaatgttcatatacaccaaaagctgcttgtttttctgatc

SEQ ID NO: 7047 - DNA, 105 bp, Arabidopsis thaliana columbia
tgctaacaattttagctccaagcatgttgggtagagttgaacagatgccttcaaaatgtccctacggcattctaactcatctactgcaatcataaacaaggcgta

SEQ ID NO: 7048 - DNA, 503 bp, Arabidopsis thaliana columbia
catttatacttatttctgaatgttcgtgttattttctaacttttattctcggggttcagttgatggctgaagaaagagggttactggttgatgttgatggtttcaacaaagccatggaagaggcgagggaaagatcgagaagtgcccagaataaggtgtttcaactttcctcttgtttactttcttaaagagcgtttaatgccaaacttacgtgtgactatgaacgaagtttgcaatcacatcatctattaaccaatcttttaatgtcatttttttatagcaagctggtggtgccattgttatggatgctgatgctacatcaacattgcacaaggctggtgtttcagcaacagatgattcttttaaatacatttggttccaggtttgtccttttattccagaaaacttgcatgttgcacctgaaatgttcttatgttggcgtagaaatgaagaagttagggcatataatagtaaatggattttgctttaaagaaacatttatt

SEQ ID NO: 7049 - DNA, 600 bp, Arabidopsis thaliana
ccaaactttgatcgatcaccataacaataatattcaagaagggctaatagtgtcatatgcatgtatatacgtacataaaatcatgtagctatgtatactaatgaaaatgtaaaactaccttgtcggctggagctggtctcgaaactttgaggtggtgtgttagaagttgaagtatgagaagtggcttgttgttgttgttgttgttgagaccctacgatcctcggcttcttcgtcccggaggaggtcgaaagagacgagccagccgttggattagcgccggtaggcatgacctgcctctctctccgccgagcagcagagacccacgtgctcttcacgtgagtagaacaatcaaagccacggctcttgcagcaagtcctacaccgcctctgcttacactctttcttcgcctgatttccacagtcttgacacgtggcggttcctgatgcgcctgagccagaccccgagttgttcgagctcgttccgaccgttgtctggttagtactcttgaagtgaagatactgcgtttcagtggttgttgttgttattctgccatctccggttgtttccgaggaagttagtgtcggagtcttctacgttttg

SEQ ID NO: 7050 - DNA, 597 bp, Arabidopsis thaliana
agatctatgtatatatacttttacttgtactaatcccttaaaattctttatatttttttttatatataatcttacgtcaaagtgctttaaagatacgtaaaaatataaattttcatttaaaaaaaaaggaagtaaactaattggttagttttgcacaattttttttacgaattaaaaagataatatagtaaaactttttaatcatttaatttcaattttacccatttcccgtaaacatacaaccctttattttctcaattcgtgtttgaagttaggcttggaatatattcgttgattaaaaagttatattaggattcaaattaaatgtggtactacgataattcgaatgatactaagaatcaatttttagtagagatgtaaaatacctttgggaccatacggctaatgtgtcgtcaccttggctccgatcagcgtacaaaccgctagcccaaacctccgatttgttatacggtgtgatcacacgttgtagttggtgaatgctgccgaatctgtgggtagcatcttggacaagaagtgggcttgaagcagcccaggaagtagcggtatcaacctcattccatgcttagtttttttggt

SEQ ID NO: 7051 - DNA, 456 bp, Arabidopsis thaliana columbia
agtaatcgaggagaatcgataaaccgtacaagagttggatgatatggatcagtggtctcatgggaagtgtcttcaagtatcgatcatagaccacggttagacaaagaagcatcaactgtccaatcactttcgacattccaataaccgaaggatcaagattcagaacttgagtttggtaacagaagactgatcctgagagaatgaggaacatttgcaatggatactactgcccaaatcagaggctgggagatttcatctgcctgaattgcttccttaagattcgatatctgtttcttgacgctctccaaaaccgagcttgtctctgctatccgtggtaagccgaaagattcttctttggaagataaagaaacaacgagctgcagagacaacaaagcagagaatacaagaaaggagatcttaggaggtgttgtgagtaagagatatcctccaagtaag

SEQ ID NO: 7052 - DNA, 534 bp, Arabidopsis thaliana
tcccatacataataacaaatgtaaatgatatttttttgcttttctggttatcaagattctgagtctgagtcacttgaactgctgtaccttgaactctctgacatgaaatttggaggcagaattggaaatctaactgcgttcctttgcggtgcagcagcaacgctcggagtttctgctggtgaacttgatgctcctgctactgttgttgcaggtcgttgttgctgttgtttccgttgattccttgcgatctcactacatgcattatcaaccatccctaagaaatcacggattataacaaacagttgaaacaggttcctctctttcaatgctccagcttggtaatagtttgtagttttcttcactaactccattatcctaagctgttcttccgtaataactttgagttcttcctccgcagattcaaagaaagatctcagctttgttaaacacccatcttccttccctttgctttggtctaaaagacgttttgtttcttcactcgggtgcctaaagcaaggtcgtagctacaaacga

SEQ ID NO: 7053 - DNA, 512 bp, Arabidopsis thaliana columbia
tcagcatgagagaggcgttgacaatgatgacaatggctcttcagatttttgtattccaggtaaaccaatgcttcactaccatcagggaattccaccactgtttcttttgtaataggttggagcccgttaatgaggacttttatctttgctgcagctggtgaaatttcatggtccactacctccccagcttccttgcctatggataaagcatttctttcatccagtagtgcattggaaggccctgcagttcaatccaaaaagggatttctgaggggaaggaaggtgagatcactggtttccacctctggagaatgaccatccactgaccaaagtggtagggtctattatcaaggactttctggaggtcctcttcatattcaaatctgaactggaaacaacctctgcctaggtcagatccagtagctttgcccttaagattccatctgtttgataggaaaggtatgagggaccacaaacgctgggctgagggatttgtgagtattccataaggg

SEQ ID NO: 7054 - DNA, 461 bp, Arabidopsis thaliana columbia
gtgcatacttcatagtaattgggcatatacaatactttctgattacatttttgtgcctgacaagttttctgatttcatgtaatccattttctttgggatataggtttctgaccttgtcaaattggttttgacggcttcacttatctaagaaggaatgcattgtacttaacccatacctttgactgttcttcttaattttaatatattttgcaggccaagcataaagatccctgcgtttatcatgatgccgattgcgcatctggttgaactgacatataaagtgttgggaccatatgggatgacagtaccacaactaacaccttcaagagttaggcttctctcatgcagcagaactttcgattccacgaaagcaaaggatcgactaggctatgctcctgtggtcccacttcaggttatacaatatttgatttgaaagagagagatatttgaagcctttattg

SEQ ID NO: 7055 - DNA, 936 bp, Arabidopsis thaliana
cacaagccattccaagagcacttgcactcacaaaacccgccgatgcctgcattcggattctcaaaggcacacaatcgctgatatatctccggttaacagctcttgctgatcccaacctgcaaatttaaagggttgaaatcagttgaggaaaaggtttcctctttgacacgatatataggaaaatgattgaacttttaactcacccacaacagacacggccgagtaaaagaagcgctatggaattggcatcatatgccaacgcatacatcaaatttccgataaagagtgcgatgctgctaaacacaagaggtttgaagtaagatttgttggaccatgcgctgaaataaaccgatgaaaatacttgagccacagccatagatccgatgacaacaccacaaaccgttgctgcagctccaaggctcatcgaatagtcatccgctgtagggacgatgatataagtgttgaccatgtacaaaaatgtgtttcctagattcaggagtaacgaattaaaatggtaagaccgctcatcgattgtatcctctgaaggagtcaccaaatcatcttgcatgataagagcatgttgtgccaagaagttgaggaaattcgtcgagaaggttaacttgtccaccgcgttatttattgcctcaaccactggatcctgtggagttttgaggaaaagattaggatttacaaagcctgtatagaggattctgatttgatatatttgaaatgtagtacctgagccggaagaacgggttggtcataaattgaataaaagcttccttcattttcttgaagctcatgaagattgcgggaaattgctccaacaacagctccaacaccctacaaattccatacacagaacatttaagattcctaacaagaagagcctacagatgaaaccagtgaaagggtggtaagaatatacatatgcac

SEQ ID NO: 7056 - DNA, 492 bp, Arabidopsis thaliana columbia
agtctaacttttgatttcaatgtgatgaaagctgcaatattgggacaacaatggaggctagagccaatccctagtgagaaaaaattaatgtggagaagagaaatcgaagttcttctttctgttagtgatcacattgttgaattggtaccttcctttcagaatttccccaatggaaacaagattgaggtaatttcattttcaagcttaagcatttagtgattgtgttctgtttcattgatgatttggtggattttaaggtgatgaactgcagaccaagatcagatctctttacttgtcttcctgctcttaggaagctagacaatatgcttattgtaagaatctgatccttccttgttgttctgttctcatgaggggtttcaaatgtgagttcttaatagagttctgtttttgacgtctttaggaaatattagatagttttggagaaacagagttctggtacgttgatcaagggattgtagctgcggaatctgc

SEQ ID NO: 7057 - DNA, 542 bp, Arabidopsis thaliana
gaggatagagcacttctttttttttttaatttttttttaaaccactttttgcttcttcatactacgaataatcatggtaaagctttatgaaagattataaaaaccataggacaaagaaaacaaaatttcgaacatcttaaccagttttgttctaaattatgatattacaacaataatttaaattgtttaaacccttctcaatgaaatgtccttcttctcgtgggattgtccttcgatatcttctcaaaaatgctttttccttttacctacgcttatatctgcacgataaaagtagaaaataccgagttaaaccaacaaattacaatttatgttactggtaaatttcatgtttatgatgaaatgtttcttacctggctttgctcttgaatgagttcttcgacttcgtccgaggttttgctgcagccgcggcaccgcctctgccctgtttcttctcgcccatatcactcttgaacagatctttcatctcttcaccacgaggctggtttcttggttactccggctttgtttcttgccggctttgg

SEQ ID NO: 7058 - DNA, 448 bp, Arabidopsis thaliana
gatacaacatagcatcttcgattccaattgctgtctgaaaccctttttctctttgcccttcttgaatcatacaagctgcaacagagtaagtagtaccagcccaaacttcctttgaaaccaacgaatttgtatccacttttccttccgttgacattccgttcactgcgcctcgtgtccctcctttaactttcatcacattgaactcatagatcgtctctagtgctttctttatccattcttctttcgttatcggcttcaatccacacgctcgtgcatacctaacaaaaactcaaaacaatcgctacttcattagcgtatgggacaagtaatgagaaacacaaacacagtggttgagtcttaccattgtccagccaactgatcagcaagaatcgaagagctcgagccactaccactatcgtcataattgaagtaagaaccattccatagc

SEQ ID NO: 7059 - DNA, 578 bp, Arabidopsis thaliana columbia
gaggacgactacggaacaaaaaagcccaaggttaggcaacaaagtaaaggtttccggaaatcaagcgctggactcgaacgaaaatcattccatgtttctagtcgacaaaagaggaaaacatcatatcaagatgacgactcagaggaagactctgaaaatgacaatgatgagggttttagaagcctggccagaagaggcacaactctccgacaaaacaatggaaggtccaccaataccataggacagagtagtgaagttcgcagctccacccgatcagttcgtaaagtctcttatgtagagagtgaagacagtgaagatatagatgatgggaaaaatcgtaaaaaccaaaaggtatgatatcttgttacattttttaaggttatacatttttacaccctcaacttgcttatgttatcgtgtgggaatctaatacatttgatagagactggcagtagtttcatgagccttctctaaagcggtctaaataactcattgctatagttataatctgcacgtcgtacatattatctttccgttggaacatgtgaaatttggagaacttacggtcttttgatttg

SEQ ID NO: 7060 - DNA, 579 bp, Arabidopsis thaliana columbia
ctgttgcgtgagagagtgaggattcgaaggttagtcattgatttgaaaatatccgggatggttccagagagacggtttccatcgagattaagattcgaaatgagcttgagattagcaatccctaacggtattgttccggttaagagattaccgccaagatttaggtagtttaaccgagttaaattggatatggaactcgggattgaaccgatgaaccggtttcctttaacggttaatgtatctaagcggttaagcgcgccgatgttggctggaagaggaccagagagacgtgtattctcgaggtaaacatactttagatgtggtaatctgaataaaaatggtggaaatggtcctgtgatgtttttgagattgataaagacgaccccttccaaatgctggagtttggccagtgacggagagattgtgccagagagaaagattccggcatcgtcggactctatgcggatagtgagtacgacgacacggttgccgttaggcaactgacaccgttccaagagcagcaatcagtaccttttttccaagtgcttagaatacctgaaggatctttggttataccga

SEQ ID NO: 7061 - DNA, 493 bp, Arabidopsis thaliana
tgacaagttgatgtgctcttgaaatcagagagagtccattggtgtggttaaactgagtagcgatatcttgtccgaaagtgtagcctgcaccacgaggagatattccccaaccgcatcggtcatctggatcagaccataagagatcacacattggtccttcatgtggaacctagaggcaacacaaacatcttagtctcgttatgtaaacatcaagtaaggtgcatccttttgttggtttggattctggaactaacctcttgaattcgatctaaagatcggatgttgtcaagtgtatctaaagaaggtgaaagtcctccatgtaaacagaaaacctacagaaaaaaagagttctgtagtcaagtccaaaacagcagaaacagagaagagattgtctaaggtagtgaaaacgctcataagttttttaaatacctgactctcaataagagctgtaagtggaagatactcaaaaagatcagtgaagtgcttccataca

SEQ ID NO: 7062 - DNA, 1070 bp, Arabidopsis thaliana
ccagacaaccagtcgcgcagggtgccatttgacataaattcgtacaccagcatctgcaaattcagcaacttcataagcaatttttatagacatccaactgataacaccttactcaggcggttctactgggtatcaagagagtacctgctcgctttcttcatcacagtaaccgatcagtgacacaagattccgatgatgcaacctcgagagcagctctatttcattcaagaactccttttcaccttgcaaagacccttcatctgctcgctttattgcagcaacagtattgtcagataagacacctctgtaaacctttccatagcctccgcgcccaaccaaagttgagctgctaaaatcgtcggtggcctctgctagctctttgaaactaaagcctcttatcccagaattcaacaaggaagccttcgaggctgacaaatacaaccagattcagttaaagttggttgtaaatttcagtgggataaattgggaatggaagatttggttacacttacatgaccgtcttctagatatctctcgctcgtgcttgctgtatcttctaagcaacaaggctgcaaccacagcggatatcgcaacagcagtcaccacagcccctgcagttattgctgccaatcgtcgccagctgacgcctttcctttcactgttgaagttaactgagaggagataaagaagactttcacttagctcttagcagtcagtctagatctacttgggtaaaaaacacttattaggctaaaaaggcacaccatatgaataaggcccctgcagagtgaagttgagcagttcatacgggccaaataagtcactaccaggaaatctccatgaagcgaatatgcctcggattctgagaacttcactctcgttaaatgttcttgtataggtttcattaactttcggaaaaagtttcagatacatcctcagacgaggccctttctcccattgatatgagtcgatccagagttgatatggttccatttgaaggaaatcggtaacatactcgccaaattgatcaatatatggagggaagtatgagacactaggacttttgagac

SEQ ID NO: 7063 - DNA, 971 bp, Arabidopsis thaliana
catctccacctgtcatcaacatcaaacatccaattttcctcttctcttctttaccatctccaccgtccataaattcgtaaaaataatttctcctggggagcgtcacactggatctgttcccggcaaaatgcaaaaccagagctggaactttaaccgtctggtttaaatagtaacaaggactcatacccgaactcggttcgacccgatcagcccgttcgtgaacccgcccgacccgactatcgaattcttcaaccaccgaattgtagaatttcgccggaagcatcgtgaacgttgtccctgagtcaacaacaactcctccgccaccgtttttgtcaattcttctgagcatcgccggagctggaatattccgttttccgattgagattccttggagtgaaacagagtagaagtagggatgctttgggttttcaagcatctctgtgaagacgaactcatttttcttcttcttctcatcatcaccgtcatcatgatcatcggtggttccgacacgtttctcttttttatcgacgaagcgaccgaggatgagcggactcggacggcggactcggtccgagtcaaaagagtgagagacgagacaataagagaagctattaccgagatgaggagagtgaacagcgagctgagcgggaagagagagacgtccacggccgaatccagcgacgccgataggttcagcgagagtggtgtgagcgcagcgaaggtgaagttagagacggagacggaagggagagagagtgagtcggagtagagttttgcgacgagagagccgtcaccgtaagcgtagtagaaaggaggacaagggtaagaagaagtgttgcaatctccggtttcgatgaaatcaagaggacagttggagatagcgcagaggtcggaggagggaagggaagagtgagcggcggagcaagaaggggaggagcaggagacggtggtggcggaggaggagagagatg

SEQ ID NO: 7064 - DNA, 655 bp, Arabidopsis thaliana columbia
ctcatgaagagcttgatttggagatgaacaatggtaataggcaaatcactctttataatccaccagacattaatctgcctttgtctgtaggaagaagctctccttcttggaatttggattcttgtgataacattttggatgttggtcttagctctcatgtctatgagaccgagacgtttctcaatgtggtcccgagtaaagtagctaagaagtgtttgaaacgaggggatagtatgtggggagcttggtttttctttagcttctacttcagaccggcgttgaatgagaaatccaagtctaaggtcattagggaaagtggtggtggtggaggaggaggaggaggatgttttactgggtttgataaatctgatctcaagctcgatgtttttcttgttcagcatgatatggagaacatgtatatgtgggcttttaaggataaacctgagaatgcgcttgggaaaatgcagttgagaagctatatgaatgggcattctcgtcaaggtgagcgtccgtttccgtttagtgcggagaaagggtttgttcggcacacagaatgcagaggaacattacaggggactcctaacctcagtgtctcacgggattgagtttgtgcttcgcgagtttgtttggtgctggtgagaagatagagagatga

SEQ ID NO: 7065 - DNA, 630 bp, Arabidopsis thaliana columbia
cacaaccatgttcacttgcataatctgggcagctaatgttcaaatcgcgttaaccatgtcccatttcacttggatccaacacgttttgatatggggaagcatcggtatgtggtatctctttgtggctatctacagtatgatgcctccgagttatgctggagacatcttcaggagtctggatgagatacttgctcctgcacctatctactggatggctacattgttggtcacagtggctgcagttcttccttacgttgctcacattgcattccagagattcttgaatccattggatcatcatatcatccaagagatcaaatactacggaagagatattgaagatgcgagattgtggacccgagagcgtacaaaagcccgagaaaagacaaagatcggattcacagctagagtcgatgcgaaaatcaggcatctaaggtcgaaactgaacaagaaacagtcaaatctctcacatttttcagctcaagacgcaatgtcacctagatcattgtagccttgtatagtgtttgttgttttctacaggtccaattctctgatgcatcagactttggagacaggtcttgaagctaattttgttgagagtttataatagagtgagatcatgtaaagagt

SEQ ID NO: 7066 - DNA, 1135 bp, Arabidopsis thaliana columbia
tgttagacaaagaccaaataagacaatacatatcaaagatctctatcccaacactgcaatttgaacagtgtggctcttgttacaatgttacctttccaaatgtgcttttgctcttgcatatgatgtgaagcttttgtcctttggggggaacatcaaatgcccaagtaaagccttctttccattcaggagtagtgctattgctcacgacctacagaaaaagagacaaaaaccaaatgatacaaagacagtttttggcaatggtgggagtgtagaatattctcctgtgatggatttgttttaccttagtttgccgtggagggcagtttcctattgttaattgacaaaaggcgtttgtggttgccatagactgctttaagttattggcacgcatgacgttcactgttaagcaacctggtaagcagtgcaataagctatctgccttgtcgtgaaacctaggagggcatgttttcatcagcatttgcaggacgggaattgcttcagctgcaatcatggcttgagactttgcaacatctatagacatattcgtccaggagtgtcttagcaagtaaagaatatccaatactaatccctggacgtcttcaacaccagatttgagcgcccctaccaaatgagggatgcagaaagtagcagcttctgaggcacggagcttaggaaaattggagaaaatcacatttaaggttctcaaaacttcaatatttatagttgctgtagaccacaagcctctctcaagtgcagctgttcacaagaataagatgtcaaacagttgaagatagaacaaaacaaattatcagaatataaaaactgtagtgctagagtgacagggacataggattcgtataacttaaattgaaaagtacctgttagtgatcttataagctcattcgagacatattcttggagtgtgtggttggaaaacaaaaatttgaccatcagtgcagcctgcccagaaacttctgggttgcaagaaagcagtagctcttgaattaacaatacgccaccagcctctgcaacagctcgtctattcgttctactattcatcacaaaattctgcaacgcacagatggccaccactttcatttcttctgttggttgttcttctagcacgctaatgagt

SEQ ID NO: 7067 - DNA, 555 bp, Arabidopsis thaliana columbia
ccttcttgcgttgcttatcttgccttaggaaagtaatgataggtctgtgattagagccttcaaactttctataatcacaccttcctcttgagaagagctctaggcaggcaccatttgacatggctctgtccaaccgggctctaaccagatgagtatgcctgactccacgccaagagagggagttacctaagtgcttaaggtcgaagagtccacattcagacatgaatgacctgaactcgacgaaagatccctcagctcttggtggcccttctgatttctcagaattatccagtatctcgttgaagtcccctgtgagaaaccatggctcctctcggttatcagcaagacacttcagcttttcccaggtagctcctttctttgactgttctggtccccataaacataggttgccagaaaggagattcttttgaatgaaactctggcatcaatgaagttatcgcaggaggaaacaattgccatctccacgtcgtgcttccagaacagggccaaacctccgcttcccttgtccagaaggggaaactaggaagtgattat

SEQ ID NO: 7068 - DNA, 487 bp, Arabidopsis thaliana columbia
ctccgtttattcattaacttttgacacgtggcctttttaatttgcagatattggagatgttatgccagaaatatggcgggagagttgacttggccaaagcttacttcaaggcgttaacgtcgtcagtgaataagcattttaacggtaacggcgttatcgccagcatggagcattgcaatgactttatgttccttggaactgaagccatctctcttggtcgtgtcggtaagtcttttactttctgtttaaaatgaaacttaaagactattttcaaaattttcatattaaattatttatactataaactaatgattcatttggatttgttgttggaattaggtgatgacttttggagcacggatccatcaggcgatccaaacggtacgttttggctacaaggatgtcacatggtccactgtgcatacaacagtctctggatgggaaatttcattcagcctgattgggacatgtttcagtccacacatcc

SEQ ID NO: 7069 - DNA, 564 bp, Arabidopsis thaliana columbia
ttcattcatatgcctaataattacgtattttgaaagatatatatactacatgcatagtccactcaattgtttcttggtcgtacgaaattttattaatggtatattagacgtgttttttttccccttaaaattataggtctcaaattatatgcatgtatattctactttcttacagatcttttccctttatagagcttcgttcgaatgctgtaattgtactttagaaaagacgactgtgtatatggtaacatacatgaatttaatttgtgatgtttttatcgtcaggtgaattatccggttttaaggattttataccgccattcgccgaagcatcacctgaacaagctcacaccgggatgaactacgcttccggtggaagtggacttcgtgaagaaactagcgaacacttggtaagaagtaagaactagaaaaacaacttataaatagactttgtttggtgataaatgattgggctttaatatctcataaagtatagttagttacttagctctaacctctcactttgatggagaaaatgatgtgaaccgtgtatatatatatata

SEQ ID NO: 7070 - DNA, 296 bp, Arabidopsis thaliana columbia
gactgtagcctccttcctagctcagaggagaagactgttcatcaaccagttttgatttgggacaatatggattttggataaatagaaagccacttatttaccctatttcccaaacttttagtccattattggaacctaattatcgagctagcaaatccggagacatttacaaggagattgaaagacgtgtagtaccgtagtctttcaggaacttcttatgccgctcgtaagcattcaggccaagaatatgtgcttggtattgcctgcacacacgactgagcaatcaagagaggggg

SEQ ID NO: 7071 - DNA, 528 bp, Arabidopsis thaliana columbia
tgccagttacatggttcattaccaagttcattacaaaggttttattgatcactcacattatgaataataagaataagcccgccaagcaagtttgcaagccccaagaccagaatattcactgcaaccacaacaatacaaacatgtgttgagattttcaagcaagatttagattttcaagcaagaaaaaagtgttttgtgttttacaaatgaaaatggatagctaggggtaagcggtacttacacattgaagcaccagaaccagcggcagatgaaataacaccaaggcttgtgatggcttctagtagacctccgtagacaatgcttttcaagatttccagtttacgtccttgaacaacaactcgtctcattaacggttcccttagagacccttcttccagcaaattccctgctgaaatatcaatttcaggatttgctggaccggtaatactcctctgtcacctgtgtccatcacacctaaacagaagcggaaagtctgcaaggtatgaataggaattactagacagaacg

SEQ ID NO: 7072 - DNA, 1100 bp, Arabidopsis thaliana
caattccccaacctcatcctctctctcatactcatcctgtcaccatcaaacaataaggaatagcattatgaaactcatgatctgtctgaagtttcgagaagccattgactcaatctggagtttacctgacagatgctacattttctatcaacaagagtatgtgatacggatggtttgattttcccaagacaacgatgtatctcgctttcttttagtccagtattcacataaccaattctatcaccaagctcaagaagttgctgcgtagaccaaagcaaacacactcgataaagttgagaagatgagattgcaagtgtttttctcatgagattttgaaaaacatacctcgtatgacatgctatcaacatcgagcctcaattcgtggtagttatcacgggaatctgttattcttcccattacaaaaccattctggagcatcctcatctgcagtgaacagcaggaacatgactacactagctgcatggtttagttctttaacttgctcacttgctattagccatccaaaacagttttacagcaccatacagcaccaaagagaacgattacattatttgtcttccactctatcagtcactagaatatgtaagagacaactctagaataatctcttagttgatatgaagccaagtgacaagtcaaaccttaacatagtgttgagtgtgatcagttaataaactaagaagtcaaatctataacatttaccagatgcaagaaagacaaggcaactatttggcaagaacattctacctcggtaagatcatcagggtaagagcgtggaagatggccacgacatctacttgacaacatcgttggttcagcgcgtgatgatgtcacaaaagtagaatcagagttgaagatatcatgagaatgagtttcttgattgagaaaccgaatgggaagaacagaagaaccctgcagaacatttgtagcattgtgttatcatttctcaaacacttagacatgatgatagatcctaattttcaagtcctctgaagcaatgcgtttctttgatcaaaataaatccaacaactcccctaaccaattgaaccaaccaaaaagaaacttaaacaatgctaaga

SEQ ID NO: 7073 - DNA, 588 bp, Arabidopsis thaliana columbia
agaaagtatcaaagaatacgccattagctcattacatgcttcagctgaagctgggagagcgaaaattaaaaaaaatccagttgacttattagctttcacatgtattactaaaagattgaaaattaataaagtcacggtattcaataatatcccttacagatgtgcctgttggatgctgcagtggcaatctttgccaaagtaccacacgggaaaaagaatgtcttgaagcctgcggttccatcattgaatctttgagaactttgcagataacaaggaagtatagaatgtgaaacgctaatcatctatgtaacagagaaaacaaagtggagccacattgtaaacaaatagtgtggtcttacaaagagaaggttccgagcaacaagctagtaagtcggtatgccattcttcatggtgttgtgcctgtgatgctcttcgtgaaagcagatcatgcccagatgaaacattagaagtggatctgcatggaacaattgtgtaaccgatgttatagaacattgtaccaaatcttagccttcaaacatgaaaacagacctaaaagcattacagtcacagcaaagaattgaagattat

SEQ ID NO: 7074 - DNA, 545 bp, Arabidopsis thaliana columbia
tgacatgaataaatgttgaagtcgggactttagaggaaaataacgcaaaacctttgcaagagctctactctttattttctctgatccagtttcagttcttgtactctttactgaagttgtttctttccagcgggaagctttacaaactttgcatatttctcttcccgcatcagcctcccaaaataacatgcaatcatttggacatgcatgaattgactcagaagtcaatcctaatttgcgaacaactttttcatgtcattaaatgaacctggcaatctcgcatgtgtaaaagcttctttcagtaaatcaagtaccatagatattcccttgtcgctaattccacacatacattcagtggcggatctagaaaccaaatttatatggggcacatattatatttaaaaatattatttatataaccacagggtattagataaatatgatatttaccttaatgtgtttaaatttgaaatctaaagacactaaatcaaaatgcatttaaatatacttaggtacatatattattggatatgtttaatatatat

SEQ ID NO: 7075 - DNA, 1062 bp, Arabidopsis thaliana
tgtcttcagaaagccttgataaaatccaagatcttgtggaaaggatgttccaggaaatccaaaacaccaacaaagttgtccctagatttcctggccaaccatgtactgctgaccatttgcaggtttttttctttccgcatatttagaatatttttacatgaagtgtatcatgctagaatgattatgatgtcgtatttttggtgatgttgtattactttggttttagattcttgtgaaggctattcctataaagcaaggacacaagctgggtgtttcatggcctgtaactcctagcattcatcattatgacgaagcaccaagccagtaccttggccatctaattggccatgagggcgaaggaagtttgtttcatgccttaaaaacgttgggtatgttttctatgggcacacaccaagttcgatcttcagtctccttctcttacactcttgaaatctgacaaaactcttttgaggttccctaaaatgatttatatattcttcagaaactacacctcttttttgtttcaggcgttggtggtatagataaaatattttggtatcttgacatggagtatagcctagggtgccctaaccaatttttaatagagtaggataggagaattttatagaatcattgtagaaagtgggcgtctttgtcttctagaggttccattctagtcatgtaaacaaacttattggatgggacaggttgctgatgtcattcatgtatgaaacatgctcgattacaacatttagtagtctggcttatttcttcttattacttgcaggttgggcaacgggactgtctgctggtgaaggagagtggactctagattattctttcttcaaggtttcgattgatcttaccgatgctggccatggtgggtttctctattatatttttattttcattctaagaagttcacaacagtctttcttgtgttgactagagagtatgggtgtgtttggtgttttgtaactattaaattcatgggttttctccttggtgggtttacagagcatatgcaagagattttggggttggtgttgaactacattcagc

SEQ ID NO: 7076 - DNA, 599 bp, Arabidopsis thaliana columbia
  unsure (1)..(599): unsure at all n locations
gcgttcttcgagcctagtctttggttacctcaacttgttctctgatggtgttgtaagtacgtgttcccttttgaaatattaaagagatagcttcgatcgggatgatgaaagattgccaagagatgattcgtctgagaaaatgaagatttttttttgctctttttgttgtgcagcacaatttcactgatggaatggcattaggaagtgcgtttctcatctatggatcagttggtggttggtcaagaactatgtttttacttgcccacgagcttccccaagaggtctctactctatttcctaaacaaacctaaaaatgtgcatagcaacaagtatcaccccttaaacaactccacggaaacttacatgcagataggtgattttgggattctagtaagatcaggcttcacagtaacaaaagcactcttcttcaacttcctctctgcactcgtcgcacttgccggaactgcattggtaagtcttttctatattaaagcctagcagttctctaaaatattgaaaactgaacggtgatgttttctatntgccacaggtttntggtctggggaatgaccaggacaatcatcgttgattgaggtagt

SEQ ID NO: 7077 - DNA, 581 bp, Arabidopsis thaliana columbia
tttcttgggatggtacagaagcttaatatcttacttcacaaagaatccggattctcgtttagccgatctgaatttggagaactgtgagctatcatgttgtggagttattgagtttcttgataccctgtcgatgctggagaaacctttaaagttcctgtctgttgcagataatgccctcggaaggtattcataaagttacaaactctttatcactttataccgttatgatgtttgtctgttttcttattattcttgttctttagcgaggttgcagaggctgtagtaaactctttcacaatctccatcgagtcgctcaatattatgggtataggactaggtcctctcgggtttcttgcattaggcagaaaacttgaaaaagtgtcgaagaagctgctgagtattaatataaggtccaaagcaaaatccatagcttctatttttgtatacaatgcatcgctttgcctcagtggcctcacgtttgttttgtggttcacgctatagcaaaaaccgtggaggactagagaccgctagattcctgtcaaagctcatacccttggcaccaaaactcatctcaatcgacg

SEQ ID NO: 7078 - DNA, 508 bp, Arabidopsis thaliana columbia
ctgaaacagcttcaaggtatacacataaagcccatgaaattctgtttattatgttatgagaggtcgatggatggatgaacacagctaatgcaacacagggcgcaactgcaaaaattgaaatcagatcattgtcactgtaaatgataacaaacaactcgaggatcaaaaccagattgacttaccacataatagagaggaaagttgtctttgtcctccatgtaactagctcttaacttgaaacgaatcataaatataacccagagagttgttcccaaagtagccaagtcaagaatggtatgtatatcatattccattacaatgctacaatacagcctaacagctaaaaatatcgccgtaagctcctgagatttcagtgacaatcctgcaaaatcattcacaaagttatataaacacatcgaaggtaaacactttcgatttaaaaaaagaaccatagaatgcatcttaaaccctaaattgccaattgaatccttgattataaagatgatga

SEQ ID NO: 7079 - DNA, 528 bp, Arabidopsis thaliana
attgtcgagatcaaacccagatgatcctttggtccctgagatagctcacatgtacaagacagacaagaacaagtacgagtccactgctcggacctggacccaaaagtatgccatgggctgacacaaatactgtccttaaggaagagccctaataattaaactcttcttatttctatgtaatgatcttttatagacttgtctgtcttataaaatttgtgaagacaggatcagtaagaaattatttgatctccattctatggaattgtaaaacgtaaatcatcatcccgtctgctgtttctttattgcgtgatgccgatgcgtctctgtgtttatcaaggctcatattattttggattttattctgtccaaagcccaaactagctacaatcgtaagcctttccgttttcgtaaacattattaacttacatacgtaacattttcattttagtattatgtgggcaatgatttatgtaaatggtgtatggggcgtaagagtgaagttgttcatgagttaagattgtgattgtg

SEQ ID NO: 7080 - DNA, 478 bp, Arabidopsis thaliana columbia
gattactatatggtttggattgtatttttttttgtaagatttttaaaaatttagttactatagttttttctcctgctctttcaagaactctacaaaacgacgcgttttgttctctttagtcgatactgaagttataaaacagaggttttagagaagaagaatcggagaagaaacgtaatcttgcgatggacgttaactcgccggagacgacggagaaacatcttgttcgagagaagtagctatatcttttcttgaaactcatcaatggaatctcaatgctgctgtttccacctttactaagaacgaagtctccgccgacgccgccaagccaaatgttccaaaccctaacgacgaacttctccggcgtaatccaagttcgtttccaaatctacgaatcaaaatccctacttcatctttttctacgtttgatggctcttccggttactctccgtcgcggttacagttacgaccaccgtgg

SEQ ID NO: 7081 - DNA, 790 bp, Arabidopsis thaliana
attagactcattgaggatggaaaattgttgtttgttatcgatcagttctaacaactgctttgcaattaacaggtgctgctatcgatctgttctgtgttaaccgatccaaacccggatgatcctttggtgcccgagatagctcacatgtacaagactgacaagaacaagtacgagtccactgcacgaagctggactcagaagtatgccatgggctaaatggaaaatcccacctactaaattatctctttatgaagaaaaaaatctgccttaatttctatgtatgattcgatagacatctctttgtgtccttttaactttctgaagacaggaccaaatgaagtgggtcttgttttaaacgaaacaaaaaaaaacatcatctttgtgaaaactagaatctgatcatcttctgttgtttcttcttgtggtgaaattatgatttgatgttttcgttgtgtgatgagttgctacgagttgttcaaatttatcaaactagtcttcaaacttatccaactggtcttcaaacttatccaactggtcttcaaatttactctgagttaatcgttgtggccaatgcccgtcatggtgacaatgcgttctgttgtagcacgtatgttgtagaaaatgagttttgtaccttgcaaggtgcgcctgtggattgtggactacatacgtgatgcaacaaacattttaagtatgcaataatatcacaaacaatcctatatccattaaacgacatgtattatgcatgtttgaactcaagtagtactcagcaatgattcactagtacaaa

SEQ ID NO: 7082 - DNA, 588 bp, Arabidopsis thaliana
cggccgccagtgtgctctaaagccgcgcgcagtatttctctggcgagctggaaaccttcctgttgatggcgcgcgacgagcaggacgatccgctcaatctgaaaggttcctttgccggggcgatgggctacggacagtttatgccgtcgtcttacaaacaatatgcggtagatttcagcggcgacgggcatatcaacctgtgggatccggttgatgcgatcggtagcgtggcgaactatttcaaagcgcacggctgggtgaaaggcgatcaggtcgcggtaatggcaaacggtcaggctccaggcttgccaaatggcttcaaaactaagtacagcatttcgcagcttgccgccgcaggtttaacgccacagcagccgctgggcaaccatcaacaagccagcctgctgcgtctggatgttggcaccggctaccagtactggtacggtctgccgaacttctacaccatcacccgttacaaccacagcacccattacgcaatggcggtctggcagttaggacaagccgtgcgcatggccggagtacagtagctatttacaagaggggggcgtgcgttccctctggctaatc

SEQ ID NO: 7083 - DNA, 669 bp, Arabidopsis thaliana
ctaaagagcaccatcgcgaacatggttaaggtgttgacgctgtaaccgaagcgtaaagtacggagaaggttcccatcaacaccaccggcacggcgatagtgggtatcagcgtggcgcggaagttttgcaggaacagatacataacgaggaaaaccagagcgatacgttccagcagcgttttcaccacgtcttcaatggaggctttaacaaacgaggtggtttcatacgccaccttgtattccagtccatgcgggaaatactgcgccacttcgtcgagacgattgagcaccagctccgctgtcgccatttcgttagcgccggaggctagttttacccccagcccggaggctggcttaccattgaagcggctaagataatcgtatttctccgcccccatttcgacggtggcgacatcgcccagccttacctctgagccgtcctgattgacccgcaaggtgatatcgcggaactgttctggtgtttgcagcagtgactgggcgttaatggtggcgttgacgcgtgcttatcgacggaaggtgtaccaccaagttgcccaaccgcaatctgcgcgttctgtgactcaatggcatcagtgacatctttagccgtcatctggaaactgttgagtttcccgggtccaccagatacgcatggaatattgcgaacata

SEQ ID NO: 7084 - DNA, 580 bp, Arabidopsis thaliana columbia
aagtaaaattaatacattgtttcacaagctatttattatccctcaagtcctcaagagaacgcttccgggatccgagattacgttccagcgtctgaggtgtaggtggtgttcttccacggcggaagagcactgccagagaccttgttttccgacaaagatcaaaaacctattcaaaaaaaaaaaagcagatcatttcaaatgtttaaaggcaacaagttctagaattagatgatatctttgtctcataatcttacagaggaggcctcaatctcagcgacaccttcacaccctttccctcccccttgtaataggtcacagtatctaacagcctcattcacatcttcgaaaacctttgagataaaaactaggcatatcacgttgtctgggtttcataaggtcttgaaagtgattcagtgagaatacttaccagtactccatctcgaatgtcttctacgagcatatcgaatttagttttgggtctagcctgctttgtctggttgctgatcctactagggaacaacagtccaagctctttttctacttcactgtttataaggattgctaatgtcatagggagaag

SEQ ID NO: 7085 - DNA, 535 bp, Arabidopsis thaliana columbia
gatttagcgagtcacatattcgaggaaatgcgacagagaaacgttgtctcttggagttctatgatcgtgggttacgcagctaacgggaatacattagaggctttagaatgctttcgtcagatgagagaattcggtgtcagaccatacaagatcacgttcgttggagttctcagtgcttgcgtccatggaggtcttgtggaggaaggaaaaacatattttgcgatgatgaagtcagagttcgagctagaaccgggattatcgcattacggatgcatagttgatctattgagccgtgacgggcagcttaaggaggcaaagaaagttgttgaggagatgccgatgaagcctaacgtgatggtttggggttgtttgatgggagggtgtcagaagtttgcggatgctgagatggctgagtgggtggctccatacatggttgagcctgagccgtggaacgatcggtgtttatgttgtcttggctaatgtgtatgcactcacagggatgtggaaagatgttgagagagttaggaagttgatg

SEQ ID NO: 7086 - DNA, 539 bp, Arabidopsis thaliana
tgttacaaaaatcaacataagctagttgtaacatgaggagctatcaagaggtgtggttcgcggtaggaggtatgaagaggagaggcagagtggtacctgcttatcagcagcagatgtgacaatggtacgatcgtcagagaaaggcataaatttggcttggaaaatattattgaagtggccggaatcgaaggagagtttgacagaagcagtctgccaatcccaaagaataacttgtctgtcatcagaaccagaaagcaagatatctccatcagcattgaaactcactgtgtttacacatcccttatgcttatcaagcttcttgtcaagtccaagacgccgcaatagatcctgcttttgtaaaatcatcaatatctaattaagatagttgtttggtttcctatcactagacatttggacaataaagattttatcatttgcaaacacattcttctgaaagcaattagagtaaaattaaagacaattgagaagaagaatctaaaaacgttcattgagtagcatattgttcgtacgcattgggt

SEQ ID NO: 7087 - DNA, 572 bp, Arabidopsis thaliana
tcgccacttctcttcctgattacggtccaaaattcccacggagaatccaccaccgtggctcctcattaccttgtgttgcaagccacccggccaagatccaatgccaccaaggatttgcaatcatgaactctcaatctccaaaccctaacttccttgttggtgcagtcgttggtggtccggaccagcatgatcgcttcccagacgaacggtctgattacgagcagtccgagccggctacttacatcaattcaccactcgttggagctcttgcctacttcgcccacgcctatggtcaactctagtttagtaacgagtgtgttagtttaagtaaaaataaaaatgaaggaagttttatatttgtttttacttttatttgttagtaatgtagtggaccgaaaatcggatcacaagtggacattggtccgagggatggtttatttggttcgttataatataacgtcaagtgtaatcttattgtggttattaatgttatcatcctattaattactatatccatgtcgttaatttttgatatgtttatatgattttcgatatttttgggagagtggata

SEQ ID NO: 7088 - DNA, 344 bp, Arabidopsis thaliana columbia
aaagatcttttcaccggtacttacatgccgtcaacggaactaaccggaaggtagcgtatcctctcgtacatcgatccatcggagcctaaacacgaaaagctcaaaaatctccttttcttcctcctcgagtcatctcgacaccggatcctccccgaggtgcaagcgacgtactccgagcagttcgattcttcggagatagcgcagtccctgacagggaaagcggagttcggcgattccagagacggaaccgctcggaatcttcttggctcgagctttctacgggacgaatcccgcagatacaaagcacaaagccgacgctgcgggactgatccctaaatgggttc

SEQ ID NO: 7089 - DNA, 428 bp, Arabidopsis thaliana columbia
tggtgctctcagtaacattctcaagaagtatgaattggcttcgggtcagagcattaatttggccaagtcagccatcaccttctcctctaaaacgccctaggatattaagcgcagagtaaagctcactctacttattgataatgaaggaggcataggtaaatacttgggactgccggaacatttaagtagaaggaagagaaacatcttctcgtcgatagttgatagaattcgacaacgctcacatagttggagctccagatttctatcgagtgctgggaaacagttgctgcttaaagttgtgctatctgccatgccatctgatgctatgacatgttttaaattatctgcagcggtgtgtaagcagattcaatcggttctcacgaggttttggtgggatacctaacaagatgagaagaatatggcgtggg

SEQ ID NO: 7090 - DNA, 369 bp, Arabidopsis thaliana
tcagagcaaacactaaaagagaaaacaaaaactgtaaatctacctcggttctaccaggcataataggcttgcctgcatatagttcagcaagaatgcaacctgcactccacaaatcaactgctgctccatagcgagttgctccgagcaaaagctcaggtggacggtaccaaagagttaccacacgactggtcaaaggctgagtttgacgaggatcaaagaaactagctaatccaaagtcagcaatctttaaaactccactattatctattagcaggtttgagccttttatatcccgatggagtacaccacgactgtgacaatgggtctagtccatgtaatagttgctgcaggtagcacttaacctgtatg

SEQ ID NO: 7091 - DNA, 624 bp, Arabidopsis thaliana
cgtgaaaaaagtaaaaagtaaaagtaaaaccatcattattagttggtactctccacttcatctctaaaccaatctgaagtaccccaatcaaacggcgtggacttttcctccggtaagaaccggttccgacaaatcgggcacgttatcttattacagtcaacgatccaacggtctaaacaacgatgatgaaacacgtgtccacacttcggcagctgtctaatcttatcgtcggatacaaaatcggataagcaaaccgtgcagcaatcttccggatcggttaaaagatcggagaaacgaaccaccgggattaactcgttggcaagagttgctgacgtggagagagcgagtcgggtcgggtcggatcgagaggtctcgttgtggtcaagaaaacttggtagaccgatgtaaggacaaagagcatcgaccatgtctctaaagaaactgatgacgtaaagtgtttttagtacgtaacctggaatctgaagctctttgaaatctgttggaagacccatgagtgtgagagaaagatagagaggagagaaagaaagagataaagcttgaattgttgaattatagagaaaagtataatatatagtgagactgatgttggagttataataattg

SEQ ID NO: 7092 - DNA, 516 bp, Arabidopsis thaliana columbia
ggcaagagcagttcatgcagctgaagatgactttacctgtttcttaggtagagtatattttcatggatggcttcgactgcgccttcgagtttcctgatctccagctccacacccttaagcaattgtcatagagtaacaaattttagaaatattttgaagcaaaattataagcaataccactctctgaactgtaaaatctcttgaaagctaacctcgatcttctctttcttagcaatagaggcccaatccttagcagcgattccagttctccagtcaatgttgatgctaacatttttgtttccgtgactcttttcatctgcccaaaagcacgccaagtagttccctgattcttgggttgtaaatgcaaattggccatgcgttacgttttccatattgtgcagattgttgccatatggggatgtcacctgcaccataatgattctcaaaactcagagccaagaataaaaaggaacagaggttccattcagaaacattgtatcctttttacaagtcgct

SEQ ID NO: 7093 - DNA, 575 bp, Arabidopsis thaliana
caaacttgggatcaaacttgtcttgattcctaaagaaaaacgacaaaatcaattagaattagttgtcgagtcattccgtcttaatcttgtaaattttcctataaatgaatgaatttttatgtatatatagacaataactcaaaatacatatggataataactcaaataaaagaatgggaaggccacatgttgtggtcataccttaccctgcacaaggtcatgttcttcctctaataagtttctcacgttaccttgcgaaacaaggaatccaaattacattcataaacaccgagtttaaccataaccgcatcatcagttccttacccaattcacctcatgaagattatgttggggatcagatcaatcttgtttcaatccctgacggtttagaagattcaccagaagagaggaacattccagggaagttgtcggagtctgttttgcgttttatgcctaaaaaagtagaggaattgatcgagaggatgatggcagaaactagcggtggtacgatcattagctgcgttgtagcggatcagagcttgggatgggcaattgaagttgcagctaagtttggg

SEQ ID NO: 7094 - DNA, 663 bp, Arabidopsis thaliana
gctaattcgtacaatgattctatgttaaagcaaatttcaaaatgagtatgttctggaagaaataactatacgaaccactttaatccactcaatgttaaaccaggtcgcaagtaaacggagagcaacacggtgacgcgcatcatagccttttctacaccgtttacatttcttatcctcgtgatgtttatctgacaagcaagcagaaagtagctcataaagaacatttatcttcctctgatgactaagcaatgttacttcctcaacagacttctcattttcaagaacttcaggcttgtggcttccatctataataaccacacccgcttcaagaccttctcttgcagcactttcagccgcttccttcttatccttctctttatccaaatcaacatcttttgattttacctcaggaacagcatatttctcacggcattcgttttcgtattcttgatgcttctccttcttagcatctatagatacagagcattgaatgctatgcaccatagcatcagcagctttagctaaggccatctcttgctccaccatctcggcagaagcatcattcgcttcttctgagagtaacctcgtgaactacaataaaaacaaaatagaagttaatgaacaatagctgcgagtgaaaggtgtaaaccaaactcaacaatt

SEQ ID NO: 7095 - DNA, 557 bp, Arabidopsis thaliana
ctagaatctctttatcactactatatttatattttttggaaaggatttagtactataatcaaattacaaaacatcattagtgctgttttctttttggtttttcttgcagttttcgtgaatggcaaattctgtaaagatccaaaatcagtaacggccaatgatttctcttattcgggactcaacatcgcccgaaacaccaccaacttcctcggttctaatgtcacaaccgtagatgtcaacaaaatccctggcctcaacaccctcggagtctccctcgctcgcttagactttgctcagggaggtcaaaacccaccgcacatacatccacgcgccactgaaatactcgtagtcaccaaaggaaaactcctggttgggtttgtgtcttcgaaccaagacaacaatagactgttctacaaggttcttaaacgaggagacgtttttgtgttcccattggtttgatacattttcaaatgaacgttcggaggacaagggcggtcgcgtttgctgggtttgggaccagaatcctggtaccattaggattgcagacgcggtttttg

SEQ ID NO: 7096 - DNA, 585 bp, Arabidopsis thaliana columbia
atcccctaataaacagaacttggattgtcacacatcattacaagctataaaactcaatactagtttagctacttacttgtccataatgctgagaagttgtttcctcacatcttgagcacgtcgtaacgatcttgactgtatgaagttttcgaaacaccatggacctgagaagtttttagccttccaagcttcatacacagctagcaatgtcaagtgatcaccttcgggctggaaaaactttgcccgtttttggtctgcctgtgcttgcttctcccttggtctataaaatatgttacccgtctggatcatagcaatcatcgttaaaatctcatcgctgcacccgagatccacactagctagcaacattttagagagcggcggttcaagaggaaactcagccatttttctacctagctttgtcaacaatccttcctcatccaaagctcccaggctgtacaactgttccattgcagaaatcaatgcttgaggttggggtggaccatgaagtcaaacgatacaggcattgatgcccattgcttcatggcaaggttgcatccaaggttgatctttggattcagggatgat

SEQ ID NO: 7097 - DNA, 592 bp, Arabidopsis thaliana columbia
ggagaagaattatcacttaagaatagcagccatcctcagtgacattgaagccgaggttagtattggatgaatctttcccacatctttttctcatcaaaggctcacacttttggtcttaccgcgtagatggtaaccgagaaacaacacaaagaatctgctcctcctgcgattccaacagagaacggctcagagaaaacgtcatactttcttgctgaagtaagttttatcttccgtaatattatcatcgcatatctcacagaaagaaaaagactctccataagcaacatatatgttctctcgcaggtgattcatccattttccgctgcttcagagaaagagttagacttggacaaaggagattacatcgttgtccgaaaggttcacatcttcttactagtatcaaagaactaacttctgtagtgagagagcatgaaacttaactctctgtgtgctgtttttctttcgtattctcaggtgagccaaaccggttgggctgaaggagaatgcaaaggcaaagctggttggtttcctatggcttacattgagaagcgacagagacttccactaccaactttgctgctgaagtttctga

SEQ ID NO: 7098 - DNA, 611 bp, Arabidopsis thaliana columbia
cagtttatctacataggcgcgatgataagctacgaagaaggtagcgtcgcggtcgaaccagttagagagatttgagattttggctgctacacttttatttcgaccaaagaaagtctctgcattggacaacataactgatacgtcgtgtcgtaatgcttccacacttcggtaatagttgttctcaagccttgatctgattacttcaagagacaaaggaactgggaacctgcagaatgaatccatagaacaaaaccatgtcagctttggctccaccaaagactcttccagggttgtagaaatttacctgttggagtagctggaatttccacggtctggttcagttttcggaggccaaaagaatcctgaaacacattagcccacattatatcactattgttagttcttgggataatgttgtgtcttaatccactaagctttagaatgtgatctataaaccaactaagctaatgtcaacatgggcctaagctctttgggtgaagtctgactttggtggggaggctaggctagatttaacaccatgagatattatattcattaggatcacatacctgggttctcttgtctgaagctctaactttgttaaggcgaga

SEQ ID NO: 7099 - DNA, 547 bp, Arabidopsis thaliana columbia
tagattcggcagcacaccctctgacacagcgggttcgaacacgatagacgtggaattgaataaaacctataatgccaacactagcagtagtgacgatgatgaagttgtggttggagaagaagacgatgatctaactggaaacccaaaagacaacgcgttgaacaccacttgaacccactttcaaatggagagtccactggatttcttcgacttcaacacctcacagaaagctgaagaagcttttgctgaacagccacccgaatgggtcgggtggggagaaccatctgatatgcaagcgagtggcaccggtctgaacccatttatcgatgatgatgatgatgatgacagcaagcacataatgaacctcgacataccaatggctgaggtcaaatctgaatccatgattccaaacgggtcagaaagatcgttatttgagaaggacgtggaatttgtgggagtggaacagaaggggcagagaaagcgatggagcaagcgatgaaagaagggatagtaggagaagctggagtgatgacgaagacacagagat

SEQ ID NO: 7100 - DNA, 577 bp, Arabidopsis thaliana
ctttcaatgatctggttcaacagatctctctttctcctacaaaacatctcaggtaagcccaaatactttcctagctctctgtaagttgtatgccaaggatttgctgagcttccaatttgatggcatggggtgttttcccagaaaaagtgatagctgactttgccttgttaatcatttgaccagagtctgatcgacagaaaaatatcgtgtcgtcaacaaaaagaagatgattgattttgggactgccttttgaaactcgaagaccaattagcactccatcctgttgggctttcttgcataaccaagaaagtacttcactacaaataatgaagaggtaaggtgagagaggatctccctgcttgagtcctctctccggagttactgaaccttgggccgctccgttgaggagaaaagagtaagtaacagtagttacacattgcatatccagcttatccatgcttggtagtggagtgcttcatgtgtaataaggacattatcattaatcgctctttttggcacaaaagctgattgggtttctgagattatatcttgcaggaccggttgcagacgccttgag

SEQ ID NO: 7101 - DNA, 870 bp, Arabidopsis thaliana
tttttgacatacctgtttagatctgagtttgacatagatttcttgttggttgattcaagatctgttcgttgaacaaaaaaaatattctaggtttgtttagaagatgcaaatcgatctatttcccatatacttaagcttctatatgcttagtgcatactgtatgagtttgtattgatatgttttggatctggaatgttacagcctgatggccagatgccgagtgacaagactgttggtggaggtgacgatgctttcaacaccttcttcagtgaaaccggtgcaggtaagcacgtcccacgtgctgtctttgttgatcttgagccaactgtgatcgacgaggtcaggactggtacttaccgtcagcttttccaccctgaacaactcatcagcggtaaagaagacgctgctaacaatttcgcccgtggtcattacaccattgggaaagagattgttgatctctgcttggaccggatcagaaagctcgctgataactgtactggtcttcaaggattccttgttttcaacgctgatggtggtgggactggatctggtcttggatctcttctccttgagagactttctgttgactatgggaaaaagtccaagttgggtttcactgtttacccatctccacaggtgtctacctctgtggttgagccttacaacagtgtcctctccactcactctctcttggaacacactgatgtctccatcctcctcgacaatgaagctatctatgacatctgtagacgctcccttaacattgagagacctacctacaccaacctcaaccgtctcgtctctcaggttatttcttccttgactgcgtctctgaggttcgatggtgccttgaatgttgatgttactgag

SEQ ID NO: 7102 - DNA, 566 bp, Arabidopsis thaliana columbia
atctcatcatttattttttgttgtggaacaattatcaggtaaaacatacagatttaggatatcgaatgtagggcttcaacacactctgaatttcagaatccaaggtcatcagatgaagctcgttgaggtagagggaacacacacagtccagtccatgtatacctctctcgacattcacgttggacagtcttactcggtcttggtcaccatggaccagcctgaccaagactatgacattgtcgtctccacaaaatttgtcgccaaaaaactcttggtctcatctactatcgcactactccaactcaagacatagccactcatcttctgctaattcagtccatgttcaacaacctgccgatgaactagattggtctatcaaacaagcccggtccattaggaccaatctaaccgcgtctgggccaaggcctaaccctcagggttcgtaccactatggtcgaatcaagatttctaggactttgatattggaaagctcagcggcactagtgaagaggaagcaacgctacgccataaacggagtgtcgtttgtacctggagatactcgctaa

SEQ ID NO: 7103 - DNA, 497 bp, Arabidopsis thaliana
aggtaagcccagattatttccctagtcctccaaccagctgaattccaagtatttgttgagcttctgttttgatatgatcaggggttttccttgaaaaagtgattgctgattttgatttattgatcatttgaccagatgcctcttcatatttcttgagaatgcacaagaaagtcttacaacttttgagatcagagcggcagaaaaatatcgtatcatctgcaaaaagaagatgattaactctaggattgcctttagagacccgtaatccgagaagagatccatcgagctgagctttcctgcacaaaccagagagaacttcgctgcagattatgaagaggaacggtgagagaggatcccttgtctcaatcctctctctggagtaactgcaccttgagcagagccattgaggaggaaggagtatgaaactgtggtgatacattgtaaaatccagcttatccaagtttggtgaaacccatctcttgcataaccagtttgat

SEQ ID NO: 7104 - DNA, 568 bp, Arabidopsis thaliana columbia
  unsure (1)..(568): unsure at all n locations
actgtgcctggctctcataaaggatcatgtattcataccttgttgtttgcagcagcatgttcacgtaccaactgaatggattctggtgataccgtgaggaagaatccagcaatgtaataaaacttggccttctcaactgccaagaaagaaatatgtttcacaaaatctcagataactccaacatatgacaatatccgatctcagaataaaaaggtcagaagatgagttttgtacccagagcccagttctcaggcttcttcaagtgttcaaccttgtagcaattagcagcagaaagattggcaatgagcgatctgcaaaaggggaaacacgcctcagtacaactcagcagaaacacatcttattaagacaaatgataagcagacatagaaagaattattgtaaactgacctttctccaccaagaacacagacaccgcaagttccggtaggtgttgcctcatcttcgtaatnagtggcctggatacagaacaagcgcagattaacagtctatttcctgatgattgaacatgaagcaaaaccaccaccaataattaataattgataacata

SEQ ID NO: 7105 - DNA, 1609 bp, Arabidopsis thaliana
  unsure (1)..(1609): unsure at all n locations
agaaatcttcttcaccagaagcagagcatgaagcagcagcaacaacaacaacacaaaccagtttcttctttaacggattgcaacatcaactacatctcgactgctactagtctcaccacaaccaccaccaccaccactaccacggccataccgctcaataatgtgtaccgaccagattcatcggtcattgggcaaccagaaaccgagggtctccagcttccttattcgtggccccttgtctctggattcaaccatcagattccattggctcaggcagggggagaaacacatggacatctcaacgatcactactcaaccgatcaacatttgggtcttgcagaaattgaaagacagatatctgcgtccctatatgcaatgaatggagctaacagttactatgacaacatgaatgcagaatatgcaattttcgatcctaccgatcccatttgggatctcccttcactctcccaactcttctgccctacgtgatttccaatttacttttcctgatcaattcatgtaatgtttggatcaatgatccatgattgtaaagtagaacacatctctacaatgttccaatagacaagattgtacctaaagaaaatggacaatgtaagaagataatgaaggtttcgtacaacaaaagcttgataatgaactcgggatcttccccaatggtcgctctaccaatgaaaatgtatctaaccgagatgaaacacgaaggaggatcgaatattgtacaggattaaaacaaacatgtaatcaacaagaatcattaatgaaaacagataaacgaaaaaactttttggtagcacattgcttgagaaaaggtgtcaatagtcttcaccttcatcttcttcatcgtctccaccttcagcaccaacttcttcgtagtctttctccagtgcggccaagtcttcacgtgcctcagagaattcaccttcctccattccttcaccaacgtaccagtgcacgaatgccctcttcgcatacatgagatcaaacttgtggtcgatccgtgagaacacctctgcaactgctgtgttgttactgatcatgcatacagctctctgaaccttagcgaggtcaccacctggaacaactgttggaggttggtagttgattccacatttgaacccagttgggcacctgcaaaacaaaacccatgccaaaggagttactatataataacaacataaaggtagaaaaattagcagctatatccatttctagatcataccagtcaacaaactgaacagtcctctttgtcttgatggtgccaacggagncattaacatctttgggaacaacatctcctcggtacatcaaacaacatgccatgtactttccgtgccttgggtcacactttgccatcatgctcgctggctcaaacacggcattggtgatctcagggactgatagctgctcgtggtaagccttggcggctgagatgactggtgcataagatgacagcatgaaatggatacggggatatgggacaagattggtctggaactcagtgatatccacgttgatggcccatcaaacctcaaagatgttgcaaggatgaaatgatctgtgatatcacctgttcaagtttgtgtaggtt

SEQ ID NO: 7106 - DNA, 547 bp, Arabidopsis thaliana columbia
catgacagctttcaagacacccattggtacaacttcttttaagcttctctatggaaaatcatgtcacctacctgttgagctcgagtacaaagctatgtggacggtaaaactcctgaactttgacataaaaaccgctgaggagaagcggttgatccaactccgtgaccttgatgagatccgtttagaagcttatgagagatctaaaatatacaaggagggaactaagctttttcatgacaagaaaatcatcaccaaagatttccaggttggtgatcaggtgctgctattcaactctcgcttgaaactcttcccaggaaagcttaagtctagatggtctggtcttttctgtatcactgaaattcgtccttatggagcagtcactctagctggtaagagtggagattcacagtaaatgatcaaaggctcaagaaatacttagcagatcaaatccttccggaggtaacgtcggttcatctccaggaactttttgatgattaaaagagtaagggagtcaagttaatgacttaaaataagctaacttggaaga

SEQ ID NO: 7107 - DNA, 1817 bp, Arabidopsis thaliana
tactactgaaataatgtttcagtgccatcttttgtatccagatagttcttagcagcttatgcagatatgataaaggttgactttaggagaagtctagttcaactaacaaaaatacccagctaaaattcagtttttgagattactttatcacatagtaagagagatattaccacatgcatgagtcaatacactaacggactagataatacttgtcaaaccaccagcaagagatagaaatataggtttagacaaacacacaactaagactcgtaagagtttcgagcccccattcatcacaacacgaggtaatagagctgaacccaacgccatatccaattttcacggcacattcttcttagtattacactacttcatcctcctcatcgtcaccaacttcagcaccgacctcttcataatccttctccaatgctgcaagatcctcacgagcctctgagaattctccttcttccataccctcaccaacataccagtgaacgaaagcacgtttggcgtacataagatcaaacttgtgatcaatacgggagaatacctcagcaacactggttgagtttgagatcatacaaacagctctctggactttagcaagatcacctccaggaacaacagttggtggctggtagttgataccacacttgaatccagtaggacaccagtcaacaaactgaatagttcgcttggtcttgatggtgccaacagctgcgttcacatccttggggactacatcaccacggtacatcaaacagcaagccatgtactttccgtgacgagggtcacactttgccatcatggatgctggctcaaaagcactgtttgtgatctcagcaaccgagagctgctcatggaaggccttctctgcggagatgactggggcataggaggaaagcatgaagtggattcttgggtatgggaccaagttggtttggaactcagtcacatcaacattcaaggcaccatcgaacctcagagaagcagtcaaggatgagataacctgaaaccatcaagagagagttaaacataagaaacgaaacagcaaaaagactgactgatgtaaatgattgaagctggctctatacctgagagacgagacggttgaggttggtgtaggtgggtctctcaatgcttagggaacgtctgcagatgtcatagatagcttcattgtcgaggaggatagagacatcagtgtgttccaagagtgagtgagtggagaggacactgttgtaaggctcaacaacagaggtggagacctgtggagatgggtaaactgtgaaacccaacttggactttttcccgtagtcaacagaaagtctctcaaggaggagagatccaagaccagatccagtccctccaccaacagcgttgaagacgaggaatccttggagaccagtacagttatcagcgagctttctgatacggtccaagcacagatcaacaatctctttcccaactgaaataagatttcaaaagtaaatcagtgaatgaacagtaaattcaacaagatatggttgatgatgaagaaacaagggaaggagtaacttactggtgtaatgcccacgggcgaaattgttagctgcgtcttctttaccgctgatgagttgctcagggtggaaaagctgacggtaagtaccagtcctgacctcatcgatcacagttggctcaagatcaacaaagacagcacgtgggacgtgcttccctgcaccggtctcactgaagaaggtgttgaaagcatcgtcacctccgccaacagtcttgtcactcggcatctggccatcaggctgtaacattccacatccaagaca

SEQ ID NO: 7108 - DNA, 562 bp, Arabidopsis thaliana columbia
cattgacttgattggttctgttagagctcgttgaagaaggagcaataacagttccatttgctccattcgaattcgatgcggatgatttcgaagaaggcttcgagatactactaatacccgaattgggaatgtaatatgaattaaccccaccttctccgtttggattcgagtcattatgcgaagattttgaaggttttctgggcaatttcccaaatatctgtttgatcataattacagaaaccctaaattatctccccacaaaagggccaaaacccttccctttttttctctacttcgcaacaagcctaaactaaaccagtaaaacccaaaagctttggttctaaatcaaaaccctaatcattgaacacagccctgcatgtagacaaagcctaaattcataatcggaaacacaatctcataaacagaatcaaagattagcttaagaagatccagagaaaacaacaaaatgtaaactttggagagaggaggaagaagaggagcttacaaatggcagatgagtagagagagagatctgggcactggagatgaatgaaatcaagag

SEQ ID NO: 7109 - DNA, 532 bp, Arabidopsis thaliana columbia
tatcaccaagtgcctgaaggcggagtttgcctcgcaggtgcgcgccattattaagcaactccgtgaaaacaaagagttgcgaggcgtggtgtttgtctccgctaaaccggacaacttcattgctggcgcagacatcaacatgatcggcaactgcaaaacggcgcaagaagcggaactactggcgcggcagggccaacagttgatggcggagattcatgctttgcccattcaggttatcgcggctattcatggcgcttgcctgggtggtgggctggagttggcgctggcgtgccacggtcgcgtttgtactgacgatcctaaaacggtgctcggtttgcctgaagtacaacttggattgttacccggttcaggcggcacccagcgtttaccgcgtctgataggcgtcacgacagcattagagatgatcctcaccggaaaacaacttcgggcgaaacaggcattaaagctggggctggtggatgacgttgtccgcactccattctgctggaaccgctgttgactggcaaagaag

SEQ ID NO: 7110 - DNA, 552 bp, Arabidopsis thaliana columbia
cctccggccgccggtcgccagtgtgctgtaaagacacagcaagccgccaatctgtctggtagatttggttattcaatagcttggtgtaactgttcttgtgacgatatggttactgtctgatctggtgtctaatcttaggagttttgttgattcgttttgttgtgtggtttcaggtgtcgagataagcagaggaaagaggcgtcgaggctccagagcgtaaaccggaagctctctgcgatgaataaactgttgatggaggagaatgataggttgcagaagcaggtttctcagcttgtctgcgaaaatggatatatgaaacagcagctaactactgttgtatgtaacttaacatttccttttgtcaaatgtgttcttaaagaatcatttgttactcctatcagttcaacatgtagcttgagttataaagttactgacttgttgttttaacttcaggttaacgatccaagctgtgaatctgtggtccaactcctcagcattcgcttagagatgcgaatagtcctgctgggtagagtttcatttttggttttgaag

SEQ ID NO: 7111 - DNA, 599 bp, Arabidopsis thaliana columbia
  unsure (1)..(599): unsure at all n locations
tagtaacgtgcgccagtgtgctctaaagctactgcttgatgagccatcgctcggtcttgcgccgattatcatccagcaaattttcgacaccatcgagcagctgcgcgagcaggggatgactatctttctcgtcgagcagaacgccaaccaggcgctaaagctggcggatcgcggctacgtgctggaaaacggccatgtagtgctttccgatactggtgatgcgctgctggcgaatgaagcggtgagaagtgcgtatttaggcgggtaataacacgttgattgatagggagtcaaaagactcctttgagacaggtgacaaatgtaaaattgcctgatgcgctgcgcttatcaggcctactgggtgagtggcaatatgttgaatttgcacgatcttgtaggcctgataaggcgtttacgcgcnatccggcatgaaacgatgagcaatctgtagagtttgattcagaccttctatattttcccgcttatccgtgccccatctcccattttccctcacccacgccgtcaccgccttgtcatctttctgacaccttactatcttacaaatgtaacaaaaaagttatttttctgtaatctttaga

SEQ ID NO: 7112 - DNA, 569 bp, Arabidopsis thaliana columbia
  unsure (1)..(569): unsure at all n locations
ctnnnnnnnnnnnnnnnnnnnnnnnntaaagccgtcagaacctgctcggtaagcgtgttgactactccggtcgttctgtaatcaccgtagtccatacctgcgtctgcatcagtgcggtctgccgaagaaaatggcactggagctgttcaaaccgttcatctacggcaagctggaactgcgtggtcttgctaccaccattaaagctgcgaagaaaatggttgagcgcgaagaagctgtcgtttgggatatcctggacgaagttatccgcgaacacccggtactgctgaaccgtgcaccgactctgcaccgtctgggtatccaggcatttgaaccggtactgatcgaaggtaaagctatccagctgcacccgctggtttgtgcggcatataacgccgacttcgatggtgaccagatggctgttcacgtaccgctgacgctggaacccagctggaacgcgtgcgtgcatgatgtctaccaacaacatcctgtccccggcgaacggcgaaccaatcatcgttccgtctcaggacgttgtactgggtctgtactacatgacccgtgactgtgtt

SEQ ID NO: 7113 - DNA, 649 bp, Arabidopsis thaliana
ctttttttatgaaccattttatatgttgctttctctaaagacatttcttttggagctgagcttgcaggggagctcttggatgctggtgtgaaccgtagtcccagtgcttaccttaacaatccggcacatgaacgtagtaaatatgaatatgatgtagataaagagatgacacttgtcaaattcgttgatgatcaatggggtccagtgggtagtttcaattggtttgcaactcatggcacttcgatgagccgtacaaatgccttgaatcagcggggacaataaaggcactgcagcacgtatcatggaagactggtttgaacgagaaaacggttgtagatcagttgatgttgaatctcctagaagagtctcaagcataatcagtgatccttatggtgagcgtaaataaccatagctccaagagttttagtaatggcttgttattgtaaaactaactttttgttgcttttattgcagatcaagatttgatggaaatggcatcctcgttactgtctaccggcggtaaaaccgttacaaggatgtcaagcgttgctagacgggtcagaagtagatttagacacgctgacaaacctagatttgtctctgccttctgtcaaactaactgcggtgatgttagccgaatgtgttggga

SEQ ID NO: 7114 - DNA, 494 bp, Arabidopsis thaliana
gcttcattccacagcgcaatctcggtgtagtaaacaagagcttcgtcaagctgattctttcggagacacccatcaatcattgtaccccacgagacaatatctttctcagtaatctgatcaaacaattcctcagcctgttcaataagtccagcttttgagtacccatttaacatcacgttccaagtaactaaatttctctcaggcatttcatcaaacaacttccgagcatccttcaaacacaaacaaagacagtacatatgcagcaaattcgtcgaaacaaaaacacgaccttcaagcttgagtttaatagccaaactctgcaacatcctacaatcccaaatcccacccaaatgtgagcaagcagatataacagtggctaaagtaacttcatttagcataattcccaaatttctcatctccctaaaaagctccatagcttcactccactgattgttttgagcataaccctttatcaaagtagtatacgagacaca

SEQ ID NO: 7115 - DNA, 599 bp, Arabidopsis thaliana
ttcagaaagagaaggatgctcaggataattctacttatccagcctttcctgttcctttgactgagttatctcaggagatacagagaggtccttttcctttcaaagctaacctcaagaagatccaagaatctgaagctctgtctggatttttggacatggaattatcatctgattctcagactactttagaggaagcaagttcgtcagggctaagtattaggcagaaaaacccgataaaaaggaaagtttacacattgagaaagaagtcactcagtcgagaagacttaaaacttccaaggtgataccgaggctaaaagaagaaatcaagttgttggttctgggaattctcaagataataagggtgtggactctacggttgttccttgtgaactgtcgcagtatcaataaggcgtccttagctggaattgccaaggactgaggaatccttggacaattcgatacttaaaggaaatgaagaaagatcattttcctgatatttttttcgtcatggagacgatgaattctgatccttttgttatgagatctttacttggcttgggtatgattattttcatcaatagaccagaaggaaaagtgga

SEQ ID NO: 7116 - DNA, 656 bp, Arabidopsis thaliana
cccaatcgaacctattcatcgaaattagggttttttttttggtcccttaatttttcccttctagtagcttctgatccttcgatttccatggcggatgggtactggaaccagcagcgacaggacatcatcctcctggtggtcctatgaaacgtccccgttccgatttcggtaagctcctgagtcctttcacgtttcctcaacacatagatagttatgctcctagtttgcttgaaataaacaatgcttgtcgtcttgtagaagctccatcatcaacaatgactatagggcacggtggtggttattatccgcgagatgaggatctcgatgttcccgatactagaactatcggttcagcttacgatcgctatctccagagcgtggtaccattctttcttgcaagtttttcagttcattcttctttttttattgacctgaaaagtttttttttttttgttgaagcaatcaggagaaggtggttctgtttccatgggaagatcaggaggaggaggaggaggaggaggaggtaacgttcaaaccatagatgattttatgttgagacgtggtggagtttccctttagaccatggtccaaatggtcacaccattggttttgatccccagaacctgttggtaggcgtaacttacttcagatgcatc

SEQ ID NO: 7117 - DNA, 568 bp, Arabidopsis thaliana
tcatacaccaagctgattttcttgtcaaacctatctcctttaatctgtccaaaagggtatatctaagatgctgtttgggatttccataaacacaagaaacaaaccagcttttactatcctgagaaaccttcatatccagtaaattcttatcttcaaacaaaaactctatctccaagtgttgtttccaaaagattgccaaaccaccactctttccaatcggttcaatagagtgaaaataatcatagcctaaccatctgaatattttcataatgaactgatcagaattcatggtctccatgaggaataacatgtctgggaaatgatctttcttcatttcctttagataccgaattgtccaaggattcctcaagccttggcaattccagctaaggatgccttactgatactgcggtggttcatcatgaaccaccgtttccttaacatccttgctacattcagatttaacagaagcaaccaaatcctttttccttttgaaaacattaggaaattcaaagattttactaacctctgtatcaatagctttctcactaggctccagagagccaat

SEQ ID NO: 7118 - DNA, 680 bp, Arabidopsis thaliana
ttgaatcactttcaaatccaaaagattcttgtcttcatacaaaaactcaatttctaggttatttttccaaaaaagagcgagacctccacttttgccttctggttctattgtgtgaaaataatcatatccaagccaagtaaagattttcataacaaaaggatcacaattcatggtctccatgaggaacaaaatatcaggaaaatgatcttttttcatttcctttaagtatcgaattgtccaaggattcctcagtccttggcaattccaactaaggacgccctattgatactgcggcagttcacaaggaaccaccgtagagtccacacccttattatcttgagaaatcccagaaccaacagcttgatttcttcttttagcatctgtgtcaccttgaacgatgaaatttgcatccggaagatttaagtcttctctaccaagtgacttctttctcaaagtgtaaactttcctttttcttggatttttctgcctaatacttaaccctgacgaacttgcttcctctaaagtagttttaggatcagaagataaatccatttccaaaaatccagacaaagcttcagattcatgactcttccttagtttagctttgaatggaaaaagacctctctgtaattccttagataactcattcaaaggagcaggagaggctggataaggagaag

SEQ ID NO: 7119 - DNA, 916 bp, Arabidopsis thaliana
cacctccatgtttacatttagtcatggtattgagggtcttcagcaaatcttttatcaaatctaaaagttcctcggaaaagctcctgatcattgacaaatttcaccaaaaccggtctgtgatctgatccaagcttctccaaaaaccattgatgtgaattaggaaacaaagaaaaccactgtgaatttccaaaacagcgatctaatttacattgaatccattctcttcatttcttttccctccccaagtgaaactattcccagtactgcccagttcatgcatatcacaggttgataacatattcttgaagtcctgaaaggaggattctactctagatgggccacctatcttctccttattagacaagatatcattaaaatcccctatcagactccaagctgccattcgattcacaccaatgttactgattttatccagaagcaagtgtctgagattctgccttggattaccataaacacaagagataaaccatctcttacatccttgagatatttccaaatccagcaaatttttgtcttcataaagaaactctatatgaagatgttgtttccagaatattgctaaccaccactctttccttccggttcaatagtatgaaagtaatcataacccaaccacctaaaaactttcaaaataaacaggtcagaattcatggtctccatgaggaacaagatgtcagggaaatattcctttttcatttctctcaagtgccgaattgtccaagggttcctcagtccttggcaattccaactaaggatgccttattgatactgcggtggttcttgaggaaccaccgtaagtgagagactttactgtactatcagatctttccgagtctgcaattttcttattccttttgatagcagaagcaaactcgatattaagactaacctcttt

SEQ ID NO: 7120 - DNA, 509 bp, Arabidopsis thaliana columbia
ccctgacaagagatgcatagacgccattgcacatccatccaagtattcttgaccaatcaaagaagaggttctttgtgccttgttggtataaagctgggaactacacaagcacaagcgaaaaaaacacagattattgtcgatgatcagcagagattcgaaatagcttttcaagaagggagatttataaagcttacctgtaagcagatctcggaagaaacatcctgttcaaagacaccaagggcgattactggcaatgaggtaaggacaacattgaagagcaacaagtagtagtcattgtatactgattgcccggaaaacctggtgaaagcctcaaagtagaagagagtgagaccaaatgctatgtttttgtagaagaaatagcaaatctggatgtagaacaacataaggttagaaacaaactaaatgtaagagtaactaaaatggccaaaagaactacatattaccatctgagctatccttttgtagcccagtgtccgtggacgacgagt

SEQ ID NO: 7121 - DNA, 626 bp, Arabidopsis thaliana
tatgtaccttgtcctgaccccccacatcccaaacagtgaagctgatgttcttgtattcaacagtctccacgttgaatcctggaaacgaaaccctccttaacattaaattttaagaaacaaaacttccatgcagaagaggattacataaaatccgtagcggaggattacacacaggtaagaaacacataaaatattaatctaagtgtacacatcgacagacactgtgatttaaggaatccttaaaccttaccgatggtcgggatggtagtgacgatttcgccaagcttcagcttatacaagatagtggtcttaccagcagcatcaagacctaccatcagaatcctcatttctttcttggcaaaaagccggctgaacaactttgtgaaattaagcccatttttttcctttagctagcacttacatccaaagcaaaccagaatactctaaagaaatctctgtatacctgagccaacaaaagaaacacgaaacactaaatctttattgataacacgatcacgttaacattcgaaaaaccttacgacaaagttcgtatagattaaaaaatatagaaatgagatcttgacaaagccagtgcgaataccctttagccatgacaaaagaagaga

SEQ ID NO: 7122 - DNA, 630 bp, Arabidopsis thaliana columbia
ttcccgcaaagggattagaatctgaaacacaacagatggtttgtcaaaaaaagacaagaaacatgcaacaaacctgggctgatgtatcggttcttcaatgcccattcttcacgcagtgatgcgaatttcttaaatggtgcacctgcagagctcaaaaagacagtcagcaagacaatctaaccgccaatcgaaaactatgaaaagggaagggaatcaaagggtcaccttcaagttccaccattgctttcttgatcacaggcttgaacttacctgcaagttgaaatcaactctgattttttaatatctagatttcaaaatgtgtcttagtaagctttattgatttatatttctgtaccgtgtctcctctcgacatccatcaaggctgtgagagcagtcccacctacagtccattcttccacaggagcagccaagttcccaacctgcgccaataagttaactcatctcattctaagcacatactagtttaccaaaggctattatgatcacagatggaaaacagattttagtggaaatggtggagtcaaaccgaagaaattagtccggcttccactgttgaggagtctccagcgccataaccaagtggatacagtatgtggcacaaaatttgtg

SEQ ID NO: 7123 - DNA, 550 bp, Arabidopsis thaliana
cagctcctggaacaattttcccggaatatgaatctccaccaacgtaaaaaggattcgatataaactccgggtgtttcacaaaccactgcaagtaatcagaatcaaaactaactcttaagataaacataaatatcactagaaaaactcatcaaaaactgtaacaaagcaaaaacaacacttaacactcctaagaaattgatcaatttggtgcatttgtttggtgtcgctcgactcaaaagcacgccgagttttcgcataagagtatccagagccagcaggagcttccaaatataaaatgttagccacctgaaaaacaatcgagtatacatgaattcaaaatgttgttacatattagagagaaatagaatcataaaaattggtgaaattatctctcaaacctttgtccatgaaaaagatgtcaactctagaggaggtactgtcccattatactcatcccctttaaaagctaaaggacctaagaaagaaagaaaaaacaataaaacttcaacttgaaagacttgtcttaaggagcaatcaagaaacatgacat

SEQ ID NO: 7124 - DNA, 769 bp, Arabidopsis thaliana
aattattgtcaatttagtttttgttcgatcaggtctaaatctaatgataccaatttaatatgtgcagtcggcttaaccggtgttttagaagtgaaaccggtagaatatattcacacatccgaaatcaaactagggaagacatacacgggacaattgtcgccgacaacaccgtcggtgttaaccacgaccatttcgtgacattccgtcttcatcttgacatcgacggtaccgaaaattcctttgttcgtaacgaacttgtgaccacgaggtctccaaaatctgttaacacaccgagaaaaacctattggacaacgaagccaaagacggccaagaccgaggcagaggctcgggtgaaactaggtttgaaggcggaggagttagttgtggttaaccctaaccgaaagacgaagcatggcaatgaggttggataccgtttacttcatggatccgctgcaggcccactcctggcccaagatgatttcccgcagattcgagctgcattcaccaactataacgtgtggatcacgccgtataacaggtcagaggtttgggcaggtggtttgtacgctgacaggagccaaggcgacgatacgttggcagtgtggtctcaaaggtactttatatttctgataaaatttgactatatttcgtccgttgcatgattagaataattaatcgtattatcaatgctataagttggagatttgtagaattacatataagtatatgacaggaatagaaaaatagagaaggaagatatagtgatgtg

SEQ ID NO: 7125 - DNA, 570 bp, Arabidopsis thaliana columbia
acaaactcccacagtataaaacatataagtacataacagaatatagaaaaacgttatcataataatgtaaaaatcatatgagggcataagaaatacttagatagtagtaaacgatcacctctttccaatctgggattccgccctcaggaacccaaataggatgatcaaacctgcagctttctccaaatttacatgttcttgtttgcatatagtgggtacaatctttctctcctgccctctgtggatatataggcaaatggcttgtactctccaacttagggcgcttggtaaaatagtctgtagtataccaagcttcggtttgaccaattgtattatgggcacccaacagagtcggatagtagagcgctaaattacataataaacaataatatacaacgaaatgagaagatatatactgactataagtataatttgaaaataaatttgggagatactatagcaaaaaccaagatatagcatcaataatcaattgtatctttagttaaacttacagtaagaaattctggcttacatacaatcatgtctgaaaatctattggaaaccatagag

SEQ ID NO: 7126 - DNA, 533 bp, Arabidopsis thaliana columbia
agaataatcattgaatggtaaattgtatcaattcttacgtctagtagctctatcatcagcttgttatttcggtgtctccttgaaagagagaggtcataaaccaggatatctcctgtgcttttatcactgctcaggtggttaaccattttctttgtaaagcatatatgtttttctctatgacagtcaagaaagacagagacaattcacacgcaacacaggtgatcaaaaccatgatgtgttttactctttgtcactgatattattatccatacatgtatcgactgattccacaataggattctcagttttccctttccgtcttcttcattgatagctctcctcctcctgatccttttggcttcctatgacgtgatgtagactttctactatgagtagaactatctgaaagagggtaagaaccttccatatcgttggtggtaccgagacaacacgcctcctcctaactgatggatcattcgatgaatctatcgacccgtgcctactcctgtggtgacgtcttgtgttttttggtt

SEQ ID NO: 7127 - DNA, 307 bp, Arabidopsis thaliana columbia
tatttaaaaaatatctgaaaccttctgagtcagagagaggctttgatgtgttccctattataaaaccctaattcgtttgtctattaaacccaaactaaaaccctagctaccttgttctcctcagcgcatcagtcttccctgaactcagaacttagaacagagaactctcgtagacgaagaagaagatgacggtagaaggagtgaacgctaaggcgtatccgttagctgattctcagttatcgataacgattcttgatctagttcaacaggctacgaattacgagcagttaaagaatggggctaatga

SEQ ID NO: 7128 - DNA, 562 bp, Arabidopsis thaliana columbia
  unsure (1)..(562): unsure at all n locations
nnnnnnnnnnnnnnnnnnnnnnnctaaagactgcgggaccgctgtctgttacgtttgcatgtgaaagatgacaccgtgtactgggtggagtctgatacgacaggtgacgacgtctacggtaatcatcaggttcgagcgtgtttacgcgggcgctctatccgccgacggatgaatcatcctgataggttgaaatatcccatgaagcgcgtcggcaagcgcggtgaaggtaaatttgaacggataagttgggacgaagccctggataccatcagtgataatcttcggcggatcctgaaagattacggcaatgaggctgtacatgtcctgtacggaacaggcgtagatggcggaaacatcaccaactcaaacgtcccgtaccgtctgatgaactcttgcggtggttttctcagtcgctatggcagctacagtaccgcacagatcagtgccgcaatgagttatatgttcggtgccaatgatggcaacagctcggatgatatcgccaatacgaaactggtcgttatgttcggaaatacccggcagaaacgcggatgacggcggtggt

SEQ ID NO: 7129 - DNA, 562 bp, Arabidopsis thaliana columbia
taacaaaaatttttcttctagatttggtatctcgttttctccgaaaatctcgatcttgatctttgcttttctcggattcgtaacgcatgtgtctgattagagttcatatacttgtgaatttcttgtttttcgtatttagggatttgatttcgtagaagtggttttgggaaacactgagatgagtaatcatcacacggtcgtatatgttaatggattggttcgaccggttctcgcggaggctgagtatagtatgagaacagagtctccggcggataatgcaattgatatctacgacggagatactacggagaatgaggaggaggattcactgatttcttccgcggagtgtcggatttgtcaggatgaatgtgatattaagaatcttgagagtccttgtgcttgcaatggcagcttaaaggtagttttttccttcattgtttcatgatcactataggaacctatagttagttatcaagagaacatttgagtattgacttttaagttttacgttgtgatcagtatgccacagaaaatgtgttcaacgttggtgtaatgaaaaggg

SEQ ID NO: 7130 - DNA, 556 bp, Arabidopsis thaliana columbia
ctacacggccatcgatttatcagggaatcaactacatggaaagattcctgattctattggtctgctgaaggagcttcgaattctgaacatgtcaagcaatggttttacaggccacatcccatcttctttagcaaacctgaagaatcttgagtcactcgacatatcccaaaacaatatctctggtgagattcctcctgagctcgggactctctcttctctcgcgtggataaacgtttcacataaccagcttgtaggttccataccacaaggcacacaatttcaacggcaaaaatgctcttcctacgaaggaaaccccggacttaatggtccttctcttgagaatgtttgtggacatatcaaagagtcaacaccaacacaaaccgaaccgttggagacaaaagaagaagaagaagaagaatcatttagttggatagcagcaggtttaggctttgcacctggagttgtatttggactagcgatgggatacatagtggtttcatacaagcatcaatggttcatgaagactttcggacgaagcaagcaacagaacaccaga

SEQ ID NO: 7131 - DNA, 607 bp, Arabidopsis thaliana columbia
tctgcatattctaagggactgccccgcaatggtgggaatctggactcgtctggttcctccaagaaagcaaggtatgttcttcttacaatctctgttggagtggctctatggaaacttaggagacagtggggtagctggtgggtgcccatggtcgacaatgttttctgtagctgcttggtggggttgaaagtggagatgtgggaatgtgtttggtaataatgggagatgtagagatagagtgcggtttgttaagaactcatcgcgggaggtttttgaggcgcatcacatttggagagggcagaaacaacttggagctcggattgagaggctcatttcgttgataccaccggggaaggagtggctgaagttgaatacggatggcgcgtcgaaaggaaatccggggttagcggcacgaggggggtaatccgggatcacgcaggtacttggtgtggcgggttcgcgtgaatttggggatacgttctgctctcttgcggaactttggggagtgtattatgggctgtatttggcatggaagaagaaggcttcgagagtggttttggaggttgactaggagattgttgtcgggttttacggacaggggttagtg

SEQ ID NO: 7132 - DNA, 319 bp, Arabidopsis thaliana columbia
taaaaagggtccgaactgaattggtattgttatccttatcccaattcattacttgcttttgatcctatttcaacttgtaggtacttcagtcctctaggaatggcaccggttgtcggattggttggtctcgggatgtttcagcgaggatttcctcaggtaattcatacaaagccccactccacacccattgaatttgcattaacatcaagaatctcttctaaactttgattctgtagctcgggaactgcatcgagattggactaccgatgctattgcttgtcattggactaacccaagtaagagctatgtgttgtgtaga

SEQ ID NO: 7133 - DNA, 570 bp, Arabidopsis thaliana columbia
  unsure (1)..(570): unsure at all n locations
nnnnnnnnnnnnnnnnnnnnnnntaaagaatgataagtgtttttaccacttccccttttcgtcaagatcggccaaaattccacgcttacactatttgcgtactggccattgaccccttcctgacgctccgtgtcgtttttccggcgtaccgcaacacttttgttgtgcgtaaggtgtgtaaaggcaaacgtttaccttgcgattttgcaggagctgaagttagggtctggagtgaaatggaatggcaacaataaaagatgtagcgaaacgagcaaacgtttccactacaactgtgtcacacgtgatcaacaaaacacgtttcgtcgctgaagaaacgcgcaacgccgtgtgggcagcgattaaagaattacactactcccctagcgcggtggcggtacgctgaaggttaaccacaccaagtctatcggtttgctggcgaccagcagcgaacgccgtattttgccgagatcattgaagcagttgaaaaaaattgcttccagaaaggttacacctgattctgggcaatgcgtggaacaatcttgagaaacagcgggcttatctgtcgatgat

SEQ ID NO: 7134 - DNA, 617 bp, Arabidopsis thaliana columbia
caggcactcaaaaagaaaacagaaacaattgacttgggaactatgcgatatgggtacaagaaaaatttgatcaccaaatgcaaacagaatctccgtcttctctacaggtactttcttgcaagtgcacgtactttggtgtcaaaatgtgacgacgttatccgagaaccaggaagatacaagggattcagaagaatctgcatgaacaaatcatttggtttccatcaacaaaatcaggacagaacaaacaactgcgaattcatttcatcaagaaaatttacctttatataaagctcatgcacctcttgaaagaagctcttgatgccgtcctcattccgtgaatcatgaaggagcatcagtcgggtatgtgttgataaattaaggaagaaacagatatttacaactgcataagaatctgttatgcacaaaagccaatataccagcctgacactttttacatcaaatttttatttgcacttaaatctcaaagggtctaacgaaaaaggatatggcctgcggtaacatatactgacacaaccagatcgttaaacctgtccactgacttcaagaacatgaagacttgtatgacaatgagatggatcctttagaatgataatata

SEQ ID NO: 7135 - DNA, 559 bp, Arabidopsis thaliana columbia
gctaatcaacagattgaatgattatcacgtcataaaaagagtaaagaatagacttaagaagaatggtgtataagctgtttcccaccttttttaaacttagagctaagcttttgtaatagtccaatcagcgtagtgcttcaaatccagatttacttggtcttggatcgagaatattccctgagctggaattaacataaaatgttttggttgtgcctgttatgcagtacttgttaccttccaaggtcacaacatctaaatatattagatctcctacaagcctgcaacaaatatattcataagagacaacataaatggtaaatttatgcctttacaaatgctaaaataagttgctcaataccttctgtggcttggaggagggttgaacgatgagaacacaatgttttccacagatctgatctcttctgatgtagaatttattaacttcttgagagagccaggcacatcttccataaaacccaaacattccagctctggaacgtcagactttggtttatctgtttcaatatagaggccataaataaatcattcgcagtgcatg

SEQ ID NO: 7136 - DNA, 862 bp, Arabidopsis thaliana
gtaacggccgccagtgaatctgcatcttcgacaaaacataaacgtgaaacaagttaacaagtaaaacataaaagtgaaaaccctaatttagtaaacatgtagtcaactgtgtagtttgtcaacaggtttgcgacagagagggcatgagttattatctcgagtcaaccactcagtgagacatggttcatgaaaataatgggaacaagtaggcatctcgcagtaatcctccgatctcaacaaattctccaaacagatggcacaagtcttcgattcctcttcttcttcttgttggctctcttggtcgaaatctgttgccaacggagcagaatcacaagacacaacgttgtaaaccttgtgtgtcaatttgacagagacgattatgaataaaggtggttgttgtggcaagtaaacactttgacttgtttgccgttgttgggcttcgacaatcttacaagatatttgctcggacaagtcatgatcgtggagttgggtctggagatgttgatagacgtcgtttggtttgaaacttgggagtgtcagagagattagtgggtcgtgacaagtagaagaatcatccgggtaagatccgagactcgtgacacaattatccttgttgttaatgagaaattcctctacttctctgtattgactgattactaccgtacttaagaaccctaacgacggaggttgagacaaagcttttacatgaacatcgagtttgaaagattcagtttccattgtcgagcgagtgaaactagacaaaactcagagagacagagtgaaatattgttgagaaattagatgatgattcgtaaggaagagagaaaaccagagattgttgagaaaattgtaattgtggaga

SEQ ID NO: 7137 - DNA, 529 bp, Arabidopsis thaliana columbia
ggatgtatgtcacaagcataatataacaacattctagtgttcaagaaccctaactctgaacttaatccactcgtgttggcgagagactatcaacagaaaagccctacataaatcccagtcgcttagaacgtaagaaacaacatctatgaagacgaaggaacccatagagatgaagcatacacgattctacctttccacccttgaagtaaccagttaccgttttgatcaacatcgaagtttttatcgtacccgttttcgattttcaacttcagattctgcatcagttccttctcaagcggaagtggtctaaatccggctcggatcagtctcgcctgccactgcttatatgtctctggtctctccactctctctgttccttcacaagccacaacattcacaatctctctcccataaaactctttctcatacatcagcctcatctcgtcttccctagctagcttcgagtcacacatatcaaacacagccgagtaatgaaacaacgcttctctgaacctcgtgacaaagaatg

SEQ ID NO: 7138 - DNA, 530 bp, Arabidopsis thaliana columbia
aacaataaggagcagctagctgaagtaatcagcatcttgaactcgtatcctccttcggtgtttgtaggacacaaagccatggatgtgtctagaaaaagctttgctggatctggtgtgcatttgagagcatttgagagatcctcactctccttcagaggttgcttttctactagctcccttaacatgtccgccttaatggaaccagagagaatgttaagcttggtttcggtacctgatggatgagttgctatggtgtctggctgatgatctgcgccggattctttaacttgcttcccagtaggaacgcacacaacctcgggctgcttcactggatgatttaaaggcataagcaaactttaaggtcgatcacacatatcttaaacaacagaaaaatgttctgattgaatttatgtctcaaagtttccccaaagacagtaatagaaagattcattacagaggtaagctctttgtgcatttcattgaagcaaactaagccactgaatacagacactcatcagtgttacatgagt

SEQ ID NO: 7139 - DNA, 540 bp, Arabidopsis thaliana columbia
  unsure (1)..(540): unsure at all n locations
ccagtgtgctctaaagataaagagttttccggctgtaaccgcgcgatggagctgctgaccggaaaaagcgaaaaacaactggttcacctgaaacctgctgatgtttactcaccggaagccgccgcaaaagtcattgaaaccgatgaaaaagtgttccgtcataatgtgtcactgacctatgaacagtggctggattacccggacgggcgcaaaccctgctttgaaatccgtaaagtgccgtactacgaccgcgtgggtaaacgtcacggtttgatgggctttggtcgcgacattaccgagcgtaacggtnatcaggatgcgcttgaacgggccagccgcgacaaaacgacgtttatctccaccatcagtcacgaattgcgtacaccgctgaacggtatcgtcggtctgagccgcattctgctggataccgaactcaccgccgagcaggaaaaatatctcaagaccatccatgtttcggccgtcacgctggggaatatctttaacgatattatcgacatggataagatggaacggcgcaag

SEQ ID NO: 7140 - DNA, 540 bp, Arabidopsis thaliana columbia
ttctcttttgtcttaccgtctgaatttttgtcccattaattttgtcaaaattttataatcctagtactatctattaattttgctttttcaattttcccacatttaacattaaaaacgaaagtgaaacgtagccactatggaatatgtttcattcatcgttagtgttggcagttgcaggtggggacaagctgcatttccatgttgcttccaaagtcaaacagatcaaagcagcctctttgaccaaaagaatccaacttttttcctcaactttcatggccgccaaaatcaatcactcactttccaccaccaaaaaacctcagattctccaaacccatatcttcgatttcaccataatccaacataaacatgcctaactcgattctctttcttcttctttcattcctgtatctcacaaactgcgttgctcaatctccatcacaaacttgtcctttagatttctctcatgtcctaacaatcccatggaacacaacagattgtcaaaagtccgacaaatcagcccgatagcaagacagttgttgc

SEQ ID NO: 7141 - DNA, 883 bp, Arabidopsis thaliana
tttgcagtcgatatttgacatacgtgatgagaccttggttcttgatgaaatcgatgagcttttagaactgatgaagaagacatggataatgttggggatcacacgagctatacataacttgtgtttcacttgggttctgtttcatcagtacattgtgacatcacagatggagccagacttgcttggtgcctctcacgccatgttggctgaagttgccaatgacgccaagaagtctgatcgcgaggctctttacgtgaagctcttgacctcgacattggcctctatgcaaggatggactgaaaaaaggtatttctttttgccttgtaaatggacttgatcacacaaaactgaatctgattgtgaatgtgtgattataggttgttgagctatcatgattattttcaacgagggaacgtgggattgatcgagaatcttctgccattagcgttgtcttcttctaagatcttgggggaggacgtgacaatctctcaaatgaatggtctagagaaaggtgatgtgaaattggtggattcttcaggggatcgcgtcgattactatataagagcatctattaaaaacgccttctcaaaggtaatagaaaacatgaaggccgaaatcgaagaaacagaggaaggagaagaagaagcggcaactatgttgcttcggctagctaaggagacagaggatcttgctttgcgcgagacgagctgttttagcccgatacttaagagatggcacttggttgcagctggagtcgcctcggtttcgcttcaccaatgttatggttccatcttgatgcagtacttagctggtcgatcgacaatcactaatgagactgttgaagttctgcaaactgcggggaagctcgaaaaggttcttgtgc

SEQ ID NO: 7142 - DNA, 557 bp, Arabidopsis thaliana
tctagtttcttttcctaggatgtttccatttatttcttgtgataaaaggtgattgatgggggatacacttttcctttgcagcatgatgctgcttgtcgtgtgattgctaggcttaaaaagaaagagacgaatcacgacaattgcttgcagaggctgaaaggcagttgcctgcagcccccgaagttgccacatcgaatgctgctcttagtaatggtaaacgaggtatgcttgcacgtttgcttctcaatgtaagttggctatgtggtaatttctcttataacaagctactatgtttttggttgcaatataggtatcgatgatggtgagcaggggcctaatgcaaagaaaatgcgtcttggaatttcggctgaagttatcacagaactcacagattgtaatgctgctctttctcagcagcgtaaaaagagacaggtaactgcatatatcagtatattagttaggaaatagaaggcaatagagaattacatatatatatagtttgtctgtaacatcaatggatatctcacttctggagttcattagattgcgagtggtct

SEQ ID NO: 7143 - DNA, 559 bp, Arabidopsis thaliana
tttcaaagcgtatcttccgggagtggatcaagacgaagtgattgcgttcgtagatgaagaaggatatcttcagatctgtactggcgacaacaagttcatgagcagatttaagcttcctaacaacgccttgacggatcaggtcacggcgtggatggaggacgagtttcttgtcgtgttcgttgagaaagatgcttcttcgtcgccgccacagctgccggagattgaggagaatcgtaacgtgagagttgtggaaatcaccggcgatgatgattaattaagtgttacatgttgtcgagatatatgtgaattaaagggaaacttaaaagtttagtgtactaaatgaacaagttaatcgcttgtttaggttgtgttaaaaaaaaaaaaaaaatcgattgaatgtttagtttaatgaaaacaatatctatatgatttggtttacataaataatccaatgtcatctatgaagacagatataactcatacatagcatgtcattctagatatgtaacacacaacatgtacctgctcctcttataaaccatatgagtttcaaagagag

SEQ ID NO: 7144 - DNA, 574 bp, Arabidopsis thaliana columbia
taagtacaaaatgaccaccccaactgtcttcatcgtcctccgggagcaaacacctccgaaaatccgagctctctacggctaacgctaagaacacgataaccgacacgaaagcatgcacgaaatctacaaaactgagcttatatctctctctcttatcagccgttaagccggactctggatcataaccttcgtctggatagtcgttgaggatgtggagaccgttagaggtggcaattccgtagtaaatgcggccatcttggcctacatatgagtcggtgaaggaggagaagaagcaagccgcggcgcaaaaggagatgagagtaatggtgaggagtttattgacgggtttgttgttgcactcgccgccattggagaaagacggtagtagggtttcgaatatgagggcggtcccggtcggcaataggttggcgaagtttccggcagacggtagcgatctaatgaacgacgcctccatttcgtaatttgatcggaagtgaggaaagtttgtatgtaatgtggagaaagagtgttttgtatgttctctatacgtaatgcatgcatgcgtgaggatatg

SEQ ID NO: 7145 - DNA, 440 bp, Arabidopsis thaliana columbia
taccagtacagacaccttttttaaacttaaaagtatacacatggacgtcaaaaacaaacagcagaaatagaattaacgtgcacatagttgtgacaacgtaatacacatttaaactcatatccatgcaaagacaattaagtctgagcaaagtaggaaactacaaatcatagacaccaagaaaaggcacgagaacagaaccaatccaaagcttgccgtctttctcttccacttcacttataaacctcaatgtctttccttccttatcctcaagtacctccaaaaccttacctgattcactcagctttatggctgtagcatgaggtattctccagtgaacagcgagtgcaggcgttggggactgatcggaagtctaagcaccaaatccctgaaccaagtttgagtaagtgatagtttcgcgaaaagacctttctttgagtgta

SEQ ID NO: 7146 - DNA, 598 bp, Arabidopsis thaliana
atcgcggcaactttatgtacagccagtggaatggcggtgaaggccagtacggtcaatgcgccatgaaggtcgatttcaaagaaaaagctgccgaaccaccagcgcgtgcacgcggtgccagttgcgcgcacctacttctatatgcgcgaccaatacaacctgacactctctcgccagcaaacgcagctgttcaacgcatggaacaagatgtatccggttaccgactgggagtgcgagcgcgatgaacgcatcgcgaaggtgcagggcaatcataacccgtatgtgcaacgcgcttgccaggcgcgaaagagctaacctacactagcgggattctttttgttaacccctaccccacgcgtacaaccgcgtggggagacgacgcggatttttaactatgcgtatccccgcatttatcatcctgaaccactgaccagccattctcacatcgcgctttgcgaagatgccgccaaccatatcgggcgcgtactgccgatggggccggggcaggcgttgcaattgtttgacggtagcaacaggtctttgcgccgaaattacagcgccacaaaaaaagcgtggaagtgaaggtgctggaagccag

SEQ ID NO: 7147 - DNA, 605 bp, Arabidopsis thaliana
gcttatgtctgcctcaacagcagcagtcactcgcgttgatgattgggtttcaaactggggaaaagacgagttcacagagatggcaagtgcctcgattgctatgtccttcctggccttccttgcctttgctttcagttccctcatttcaggctataacctatttaaccaaggctctctctgatcctcccacctttttgtataggtccacactccttgtgtgatgtataataaaaatgatcaatatatcttagcattgtaattattatactatttttgtagcctatataaaggtttccaaaaactatgaggttaataagagaggcatatcctgttgtcaaaagggtctttatagccaactaaataaagactctgacagagcaaaaggcaacaacttttcagctcttgagccatatgagtgtcctcgattgtaaatgagacctcagacttatccattgtgcatcttgaaccctgaagaaggaagaagaaaccatcttgcacaagcccaatgtttaaaaatggaaaagggtattttagtcatttacgttttcgacactcggacttcctagttcctacgcctggagaatatcaatagccgcaaaggattg

SEQ ID NO: 7148 - DNA, 413 bp, Arabidopsis thaliana
gtcgactctccccgggtaccgtgctcactggatcgcaaaaaacaaataaacaccgttagatcgcgattaaattaaataccaacggtggatattagacgggtgtaggatatttaccgtgggtgtggtgagcccttgatcggtttttgtccgtacttcctccacgaatattcgtccggtggaatatcggcgatctttgcacttatcgccggtactctcacggttctcttcatccgatttttcctgcttcattaaaaatcaaatagaaaatattaattaacggaaaaaacattgggttccaaaagtcaacggtcaaaacttgagttattcattgagctcaaccggttctagtcattgtcggcgcgcaataccaaaacatgcccgacatttaaagcaactagaccgataaccgggac

SEQ ID NO: 7149 - DNA, 564 bp, Arabidopsis thaliana columbia
gatctggaatgcaaccagggggttatgtgctgagtttggaaatcatctcttctaccaacttcaacatggttccaggtattcgctctccttcttgatcaatctcccgcataatttgctcaacaatctcaatctttgactgtttgtttttgatgacatagccagagcagtcccttagtagtagcagtagctctctagccatttctttagccctccgtgtcccgtctacgctcacttgaagcaatccaggcatcactccttctctaagtatcattcctcggtttgtctctctgtcgttgttgcatataccaagtagtattcccacggcatgctctttacactgtgctgacccttcttcaatggcttccaccagaaccccaattgctccaccgatgctggaaacagattctggtgaatgagaaattatgttttcaagcaaagctactgccttatcagccaattcggaagatttatcgcaaaagttgatgacttgaagcaaagcatatggtgctcccgaagctataaccaggggaacaatctgatggagagtagatagattttgtagtg

SEQ ID NO: 7150 - DNA, 586 bp, Arabidopsis thaliana
catcttaaagccttcataatctcaagaaaacagcgacaaaaacagtaaaaagccgagacaagagtcctgttcattcactgctaacctaatcactgctgctgattatgtggtggcatgccaggacgcggtggagcaaaaccaccaggagcaggaggcattccagggcgaggcggaggaggtccttgcattccatgaggtggaggaggaggtcctctcatcataccaccaggaggaggaatcattggcctttgcccatactgaggcggtggtggtccagaaaactgctgtggcggtagcctcataccataaggcggtggaggacctcttcccataggaggaccttgaccaccaaaaggaggcggtggcaacatctgtcccggaggtcgaataatcggaggagctgaaagctgtggtggacgagagatctgaggctgcatcattccaggagcagagtccaccaattccacgatacaggaccagataaaccaggctgagcttgaaccaatggaccagtaggtactccacgtccagcagcacgaccgattccgggaccagccacagcggttacagatccagatttggcgcg

SEQ ID NO: 7151 - DNA, 555 bp, Arabidopsis thaliana columbia
ctatgggtagccaatcgagacaaagcagtttccgacaaaaactcatcagttttcaaaatctccaacggaaacttaatcctactcgacggtaattaccagactccggtttggtccaccggtctcaactccacttcctctgtttctgctcttgaagcggttttgcaagacgacggcaatcttgttctcagaaccggcggctctagcttatcagctaacgtattgtggcaaagctttgatcacccgggagacacgtggcttcccggagtgaagatccggttagataaacgaaccggaaagagccagcgactcacttcgtggaagagtctcgaagatccatcaccaggtttgttctctctcgagctagacgaatccacagcttacgaaattctctggaacggatctaatgagtactggtcaagtggtccttggaaccctcagagcaggatctttgattaggttcccgagatgagactcgattacatctacaacttcagctttttctctaacaccacagactcatacttcacgtactctatctataaccagttgaacgtg

SEQ ID NO: 7152 - DNA, 541 bp, Arabidopsis thaliana columbia
taatgaaataatgaattggattaaccacatacccgaactcagaagccgcaacacaatctcatcaagtgcagagtttgatggagcacagacaagtacacgtaatctgtacttccgactcgcattaaccacctccggtttctgaacatcaaaagagaatcagaaaagtggggttactatatgataaaagaaataaatgtggggttaccatttgtctcagaataaaatcttccgacttaccaattcatttcctgaggttggaaagaacccatcgtcaccatcttcaggcataatagcatctcgagggttgacacccaaaatccaaggagaggctcttccccagtgattgtatctgcagacaagacatagtgaaatatgttcaacaagagggatgtatggtatgtgatatttcagaccaaactattgatgcaatgcaatattattccaattactcttaagttgcaagatttcaaataaaacaccatatgatatagataataataacattttcgaatcattatgaacgcacatctgggtatgcgag

SEQ ID NO: 7153 - DNA, 535 bp, Arabidopsis thaliana columbia
ggcgtttcacagaagaggccgcgagtctagagataacattcaatatatttggctttggagcttacatgttatcttctctgatgagtttgttgacaggttctacgcgtctgaagtgctattggctttggagtatctacacatgctgggggttgtgtacagagacttaaagccagagaacatccttgttcgagatgaaggccacataatgctctcagacttcgacctctccctccgttgcacctttaatccgaccctcgttaaatcctcctcagtctgcagcgggggaggtgctatcctcaatgaggagtttgctgtcaatggctgcatgcatccatccgcctttcttccccgcctactcccttccaagaaaacccgtaaagcgaaatcagactctggtctcggtggcctctctatgccagagctcatggcagagccaacagatgtgcggtcaatgtcctttgtgggcaccacgagtacctagctccagagatcatacgtggcgagggacatggcagcgctgtggactggtggacat

SEQ ID NO: 7154 - DNA, 732 bp, Arabidopsis thaliana columbia
ccttctgactcttttgagttttgagtaattgggaattcgatttgattccgttgcaatggtggagagacggaatcctctggttctatcatccacaagaagtactctccgttcagtgctcaattcgtcacaacccagctctgccgacggcgaccgagttctgaataaagacggtgacttgttacgagggaacgctaggttgtctgcgggcattctccggtggcggaaggacggagaaaatgtttccgatgcaaaattggattctttagatgactctgcattggttggactctccactcaattgcttaagagactatctatcaactctggttctttggtatgtccttctcatcttgttcagtcaacaaagctggatcttttctggataattttgttgcttttgatgttaacaattgagtttttaaaatgcaaggttgttgtcaagaacattgagataggcattcaaagggttgcgcaagttgttgtacttgatcctcccaagacgacgctggaagatgcatctctcactcaagtacctgtttcggactctcttcatacgatgcttgtctttcccacttatgatttgatgggccagcagttattagatcaagaggttgcttacttgccccaatgttagcttttaatcttagcttgcacatatcttgcctgaaatcgctcgtacatcgagggaacggggtcttagagaagtattttgaagctaagtgtgatgaggag

SEQ ID NO: 7155 - DNA, 513 bp, Arabidopsis thaliana columbia
ttcttgttctactctaatctcaaattttatctaccacaatatctgatgttatgttatccttgttttttccgattatcatcgttcaagagttgtcttgtatatgtatatatagatgtcgagtgatagacagatatcgctattacttgtcttcgtatgtttctctgttattgctcttacaaatttctctagcagcttcctaaaagtttcgtatgaatttctatactgaggacatttgcagttcatcgggagtgaaaagtagtaccttggaggtacgatgtcaggcacttcaagataacttagtcaagatttcctgttgtgtaggtctatgggatgctgatggcaagatcaacttacgaagggatggagctagctgataagaataagcgaccttttgtattgacaagggctggattcataggtagccagagatatgctgcgacttggacaggagatacctttcaaactgggagcatctacatatgtctatatccatggtccttcagctggtaagta

SEQ ID NO: 7156 - DNA, 1072 bp, Arabidopsis thaliana
ctaaagtgtggcaaaacgattacagcaattcgttgctggcgtaccgtcaggcgttgcaactacgtggtgagaacgctgaactgtatgcggcgctggcgacggtgctttattaccaggccagccagcatatgaccgcccagactcgcgcaatgatcgacaaagccctcgcgctggacagtaatgaaatcaccgccctgatgctgctggcttccgatgcgtttatgcaggcgaactacgcgcaaccatcgaactatggcaaaaagtgatggatctcaactcaccgcgagttaaccgaacacagctggttgagtcgattaatatggcgaaattgttgcagcggagattggattaatcatctggtgatgaagattatgtcattgagctgcataaaaaataatcgaatgaacatatgccaaaaataatcactaatcagtattattgcagattaaacaaataaaaatcgtttcgataacaaatggttattcattaatcctgccataaactcgcgttattatgcattaatgcagcgaaaagctctgttgttaaagggttgcgcaacataccgcgcaaatgatactgatcataagcgttaaaaaaatctacaaaccaacgcaacacaattcatgccctggcagtatgtcacgttctcgcgtttctgaacggggaacggcgctccattgaggaagtcattcatatgaaaaatataaaattcagcctggcctggcagattctgtttgctatggtgctgggcattctcctgggaagctacctgcactaccatagcgacagccgcgactggctggtcgtcaatttgctctctccggcgggtgatatcttcatccatctgattaaaatgattgttgtgccgattgtgatctccacgctggtggtgggtatcgcgggtgttggtgatgccaaacagctcgggcgtattggcgcgaaaaccattatctacttcgaggtgatcaccaccgtcgccatcattttggggatcactctggcgaacgtcttccagcccggtgccggggtggatatgtcgcagttggcgaccgtcgatatctcgaaactttag

SEQ ID NO: 7157 - DNA, 1277 bp, Arabidopsis thaliana
agatatgagcaaagcttatgaccgggttgaatggtgttttcttcaagcgcttatgttgaaaatgggtttttcccaaaaatgggttgacttaataaccttttgtatctcttcggtcacttataaagtccttgtaaatggttccccgagaggctttattaaaccatcaagaggtatccgtcaaggagacccaatctcccctttcctcttcatcttgtgcacagaggctttggtagcaagcctcaaagatgcggagtggcacggccggattcaaggcctacaaatctctcgtgcgagcccttcaacctctcacctattgttcgcggatgacagtcttttcttctgtagagcggatcctgtccaagggcaggaaattattaaaattcttcggacatacggggaggcctcgggtcagcagttaaactctgctaagtcttccattttgtttggacatgatgtggaaaatactattcgtaacaacattaaagtagctattgggatccataaggatggcggtatgggttcatatctgggcttaccagagaagatccatggttcaaaagttcaagtcttctcttttgtaagagatcgtcttcaaaaacgcttgaatacttggacggctaaattcttgtcaaaaggcgacaaagaagtacttataaagtctgtagctcaggcccttccgacatacgtcatgtcgtgcttccttctcccaaaagcaattcgctccaagctaagtaatgccattgccaatgtttggtggaaaaccaatgaaaacagtaacggtattcattggatagcttgggataccctttgtaaaccccattcggagggggggataggctttagaacacttgaagagtttaacttagctctgttagctaaacaattatggcggctgattcgatttccgaattctcttctcagtagaatcttacgtggaagatatttccgttttagtgatccactccatattggtgcttcgtttagaccctcttatggatggagaagtattatggcggcgaaaccccttcttcttttgggcctccgtcggaccataggttctggaatgttgactcgcgtctgggaagatccttggatcccctcaattcctgcaaggccagctaagagcatccttgatacaagagatcccatctttatgtaaacgacctgattgataaaacactcaatcgtggaagatcgaccgtcttacatccttgatagaccccgttgacatccacttatattaggaattgacaagtcggactacttgagtgatggat

SEQ ID NO: 7158 - DNA, 527 bp, Arabidopsis thaliana columbia
taatagagtttggcggaactaccgtaccaaatttgattgtatttgtgagtatcatttttgcaaacctaattagcctgaagactgagatatccttgtccactcttatgaagaaccaatttaacaaggtgaaaaccagaatctctaaaccaaacatggcatcaactgtaccggatcaggcagacttaaaccaaaacaaagaacaagcacacgtagcatgaggcaaaattaagcacatgcttgctttacttcaaaacaaaaaccagctgttcacagctaaaactacacaagagtcacaaacggcgaactatactacaaaaagactaagacttgcctcccttatataaaacccccaacacataaggtcccaatgaatgatttcaattctctatcttattgacacataaacatggaccggtccactttcatcttatctctactcttcacactcactgtctcgactacgaccctcttctctccggttttcgcaggaacgttcgacacagaattcgatatcacttggggtgatg

SEQ ID NO: 7159 - DNA, 585 bp, Arabidopsis thaliana columbia
tatttaaggaattcacaactgcttatcatcatcacatgtgattatgcgaaccgtacatatcattcatttgaatttaatcaaacaatcattagctattataatttaaacgtacgtttactttttaaaaaatatccaaacataccactatctacacaattacatataaatacccgtcataaccgtttacgattattacttcaccctcacacttcaacaaaaaaacaaaacataaatactttacaaaatccaaaatctacaaagatctattactctttctctttgtaattaagaaacattaaacatggataataataagcttgtagctgttttgctgatgttcttttcaagtttcttgctgatgaaatcatcaacggctgcttccaactacaatgttgtcagcttcggtgctaaaccggacggtcgaaccgactccactaaagccttccttggcgcgtggcaagcagcttgccgttcagctgcagcggttactgtaacggtcccgagaggaagcttcttgctcaaaccggtggagtttcgaggtccatgccgcagtagaataacgtttccagatctatggacgattgt

SEQ ID NO: 7160 - DNA, 560 bp, Arabidopsis thaliana columbia
tcacttcattggttcgtcatgtgaggttgttaaatgtcatactcgagcttatcttttgtatcttattggtagtaccatttttgctactactgatggtgataaagtctctgttaagtatttgcctttgtttgaggattttgatcaagctgggagatatgcttggggagctgctgcgttggcttgtctttaccgagcgctcggtaatgcgtcgcttaaatctcagagcaacatttgcggttgtttgactttgctacaggttggcttctatgttagttttggttttctgtccagttgagatttcaatatctttaggaaatgtaacatatgattgtctcatgtatatagtgttggagttattttcatctggatatcggtagacccgagaaatccgaagcgtgtttcccgcttgctcttttgtggaaaggtaaaggaagcagatccaaaaccgacctatctgagtaccgcagagaactggacgatcttgatcctagcaaggtaaacccttcagtcatccttatgaattttgtattgctctaaatgttaataattgatggttgtga

SEQ ID NO: 7161 - DNA, 425 bp, Arabidopsis thaliana columbia
gactttatcacttccctaggtggctcagcgctaccaatttccccattaacttcacattctcatcaacaagtttaaaaatcttatcaacactcctcttatctccatttcccatctgttccttaaccacaacagcctcagataacccaaacgatgtatctgactccgaaatcaatactaacccacctctagaaatcgtcgatttcacagtagaggacgcttctaactttgcaaatacatggatttgacaagggattctgtacctattggagttagaacgagtattgggtacaataccctcgacgacgatcgtgtgagaatcaatcatcggcgcgagaacagctgctactgtacgctcgatgtgacccacttgctcagatcgcgtgttgagtactctgattgcattattgtcatatacgttcaagggt

SEQ ID NO: 7162 - DNA, 923 bp, Arabidopsis thaliana
tatttacatactttgatttgctcggctccggctccatgagaaccaagcctgtgctcagaatcacaaagcaacctacaaatgagatctcttgcctcaggtgtcaaccttgcaccctcggggaatactaaatgagttctccagctcacaatctaaattccatcaaatgtcaatttagagatataaaagaagatgtgaaagatcctaagaaaaacagacccaacacagaaagcttccaccgtcttaaaatctcattttaccatcaacaagaatattcaaaatgatataagagcaaagtggaaactactgtaaatttagttacaagtagacctttctacatgttgttacagggtcatcggagtaaaatggtggataccaacgagcatctcatacataatggcccccaaagaccacctgcactcaaatgaatgcatatgagtcgatgatgaaagaaaatagatatgtgtcgatcaactagtagataagcagcaagaaaagatgaaaagctgatcatgaatattttatgtaatgttaacgtagataaccctaatgatataataaggaagggttctatggagaataatctataagatcattaatgtaacgcaccagtcacactctacaccgtatcccttcttcagcaacacctctggtgcaatataatctggggtacctaccgtagaatatgcctgtttcaaaacaagagcacaccaaagccagagagtttagacataaacccaaaggagcagtttaaagcataccccaaagattgatatgataaataaaaggttttaaacagagttttgtactacaccagttttcttctgtttatctgccaatgctgcagctgttccagtgggctcttccaacgccttccacgacgtcctatcgagcagttctcatcaccatcgattgattcatttata

SEQ ID NO: 7163 - DNA, 567 bp, Arabidopsis thaliana columbia
gtaactttgtactgttcgttaatagggtaatgtccaaaatagtaacaccacttcgacctttctggagccgaggttttggtttttaattttatggtgggcaaggtcacaagttgtctggtggtagggttatacattcgcggttttttcaaaaatgtgtagcagatgaagccactaagtttttgtaagatcttgcctcccctatctcggatggtcaacaaccaaggaaggaagatggactagtagcggatggagctaatgataggattttagagggacggtagtcctcgaaatgtgatacacaaatgtaaattcgttgagatgggaccttaatgaaacgactggtaaagtatggactatggagagcgtatgatagatgaccagagctttgagacgcacttgaatccattagggttttaacagggaatctcgtaagaatctctgtcaccacatccgttggaatctccagtagtgcttggcttcgtcttcttttcttctttctccactgttggatcactgttagaacgaaagacaaacccatctcaatccccacccgagtttgaagacaga

SEQ ID NO: 7164 - DNA, 548 bp, Arabidopsis thaliana columbia
cccctcacaaagttatgatgtcatgcattatcgtggaatcactataagtattttgcattcaagagctgatattggatttgtggacttacaatgaggaggaaaagaggaagaagttcggttaatgcttggtaatctttggttttggggtctgtttccatgtcaagattggcaagaacacaaagaagagcaagcgcgccaatgctgaatcccacaaagagaacttgtttgtagccaagttcagttccttgtttgaaaccaaatatgaaggaataatttactcgatactgcctccaaaaataaatattagcagcatacatagtcatgtgtaacataataaacccgaacaagctgcaagaacaaataaaaaaaccagacaaacattagccaagtaaagtgtggattatttcaaatgtaatttctgcgtttgcgtttagatgagtgataaaatcgagacaagagaacttttcaattgtgtttaacttttactatacttttaacaaatctgatgtgttaacatgtttaaagtggtgaattcattaagaaagaat

SEQ ID NO: 7165 - DNA, 800 bp, Arabidopsis thaliana
gtggtgcggagataggggaggaagaggcagaagaagatatgtcttattttgccctgtatatctccaatgacgatccggatcactactacgatgctgcaagggaagaaaagtggcagagtgctatggaaatggagatccaatctatcgaaaagaataacactagggatcttgtggagctgccaccgcaagcgaaaaaaattggcgtaaagtgggtctataaaacgaagctgaatgaggaaggaaaggtggaaaaatgcaaggctcgattagttgcaaaaggctactcacagagggaaggtgtggactacactgaggtttatgctcctgttgcaagatgggataccatcagaagtctcttggcagttgcagctcaacaaggttggagtgtgtatcaactagacgtgaagagtgcttttctctatggagaattaaaagaggaggtgtatgttgatcagcctgatgggtttgtcagagtaggggaggaagacaaagtctacaagctgagaaaagcgctttacggcttgaagcaggcgccgagagcttggttcagccgaattgagagctatttcaagagagaaggatttcagaaaagcagctatgatcacactttattttttaagaaatctgagagcaagatattgatggtgagcttgtacgttgatgacttattattcacaggaaatgatgagttgatgtgtgtggagtttaaggcatcaatgcaaaaggagtttgagatgacagacatggggaagatgaagttcttccttggagtggaggttcatacactggcggacgttact

SEQ ID NO: 7166 - DNA, 577 bp, Arabidopsis thaliana columbia
gggaaggaaggcaagagaacagtaagtacctaactgtcctttctaggccatttttttccagagttctcatctcttatttatgtcattgaaagtggcaatgatcagcttctgataccaaattcacattgcaatttcaggattataccccttatgcttgttcaaagatcatcacatctgctcctggtgctggggatcatcacggctgcccttatcgacatttcaggtcagttttctcagcaaaaatatgttctctttccctgaaagaaaagggtaaccgttatatattattattcaaatagtatctcttatccatcaccaacatctcatatcaacacaaccagcggctgaaaataatggagtttttgtatatattttgattagtgaacataagaagatcatctttatagagacagaaactccttccttggaattatatatataattatgtgtgcaaaagcgaatccgagcgcattgtagcttgcttcatttgctcagcagaagttgttgcctttgcgctttgtctagctataaagagaaacaataattacatatgtgtagatgtgtgaatgattaggtg

SEQ ID NO: 7167 - DNA, 607 bp, Arabidopsis thaliana
atgtgtatactcttcagccactatcttctgtgttacacttggatcgggaccacacgccttcacgctagaccattccacaggagaatttgttcttacccatcaaaacatcaagatcccaactcgggtaaaaagcgtctaatgacacatatgacttgatccattgcgacattcctattcatggctctgaacaacctgcattaatcgttgttttttgtatgatcaacaataggacaaatctactcagtgaacgatgcgaggtactttgattggccagaaggtttaaggaagtacattgacacagtgagacaaggcaaaggtcaaaacccgaaaaaatactctgcgcgttatatttgttctctagtagctgatcttcacaggactctcttatacggtggagtggctatgaatccaagagaccatcttcgtttagtctatgaaggtaaccctttggcttttctcgtggagcaagctggtggcaaatcctctgatggaaaaagagggatactttcgatacaacccgtgaagcttcccaagaatgcctctgtttcttgggagcttagaggatgttgctgagctagagagctattgagatgtgcagcagactgtg

SEQ ID NO: 7168 - DNA, 838 bp, Arabidopsis thaliana
ggagaggaaactgaacttcagcgtacctcttctttcaacaagacggatgcagaagacagcaggagtctctgtgcgtagaaacaagagtaataacttcactgattatgactctaagacaagtgaatgtccttctgttccagttcttgttccatatatgatgggtttagatgatgaggttactgaaactgcctctgttcctttcacttgggaacaagctcctggaagattaaagggcaatgatttcaaaccccaagtttgtgttttgatgaaagaagaagaacaagtttttacaccatgtcttccaccgggtaaagccgttgatgcaaacatgacaagattgcagagttcaaagggtaaacaagttgaagaatcagatgatgatgaagatgatgtgttttctgatgctcttgacactctctctccaaaggactcgttttcttttaacaatagcattagtggtgtgagtgaatatggtggcgttgagaccaagaaaccactggatgctcaatctcgggatttcatgatgagtcgttttttaccagctgccaaagctatgactgtggagcagtctcattatgcttcgaatcgaaaaccatccacttttatggctgaaccaacgatacagataagagagttagtaccgggggagaagcagcaaactcctaatagatatgatgtgtctatagtcccatcttactattaccaccaagacattgatgatgaagaaagcaaggtgggtgaggaagatgatgaagtttctgagtacgcctatctgtcaaagagaggttgtggaatgttgccacaattgtgctttaaagactctctcggcatgctgaac

SEQ ID NO: 7169 - DNA, 430 bp, Arabidopsis thaliana
atctccatttgtaccatttctcttgctccttgaatctcctaaaaactccatctatcgccacatcaaaagcgtctttgaaagtctctaacccattcggagacttagcgtaaaccaaattcggtatcaaatcaatcactctttctctcatcttcctcacatcttctttgctataccgttccaacacttcctttatagacgtcgtgccgtttgttacctcgttccggtctataaaaaccgaataactatccggtttatccggtaaaaaccactgatactgcatgtaagcgcttcgtctccaaaagaaaaccggaatcgaaccggccaacatacaatcaaatatcgaccggcgtgtgaagctatctcctcgtggctggagacaaaaatcagacccgagaaacgtctccaaaatcgccgacgaaccattcgagca

SEQ ID NO: 7170 - DNA, 596 bp, Arabidopsis thaliana
ggtcaatgcgcgtggcctttccacgcgcaggtgtacggtccacagagtccaccactagtggcaccaaacaatgacgtgggactcgatgggatggttattaacttagctagtcttttagctggaaccgcaacgaacccttttggtaatggttactatcaaggtccacaaaacgcaccgcttgaagctgcttctgcttgtcctggcgtttatggtaaaggagcttatcctggttacgctggagatttgcttgtggatactacaacgggaggtagttttaatgcgtatggtgcaaacggcaggaagtttttgcttcctgctttgtatgatcctacgacgtcggcttgctctactatggtctgaatactaaaaaaaagtccaatgtttggtctttggtagtagaaaataatattctagcgtaattcttttgttatgtttggttacaaattctagtataattcaatttattcattaatattattctcatttttcccttcatgttgtatgactgaaatcttgtcgcttggactataatttaacggaatattattaagacactttggcttatccgtatacattgtcgaatacaaagccaatgc

SEQ ID NO: 7171 - DNA, 489 bp, Arabidopsis thaliana columbia
tcttccggggaggagcttcgcgataacagcccatttgtttccgtggatggcatgtgctgcgatgatagcctgatcctctacctcttcataaaccaaaacaaaaacaaaaagagagacaaagaagtgcctggtttagtgttactgatgatatgttacagaacaagaacacaataatctactaatgtccccctaaataaaactgtgtttcgatcagctataacaatacaactagaggtagtcaaatggtatccaacctaactttgttgttcttttgggattcaaggagtagatcaaaatccaaaaaaacttgcaagtctcaaactttaaaacatttcgatacaaactaaaaatataaaactagaaatggactaacaatctctcagccaagttcacatttcacatccatttcacaaaaaaacacaaggttgctcaacagccacactccgaaagacagcataagaaccctagattcctcaattcaacacagat

SEQ ID NO: 7172 - DNA, 426 bp, Arabidopsis thaliana
tttcaaatgattttgatgttctttatctcgggagcagttgttccttgctagtcattgaccgcggaaacctagccatcagagagattcagctccattttgacgactgtgctgatcagtatggaagtggctttcctctgggtaatatttacataccaaagtttttcgtttgggtcccctcttgcattcttcagtcatctctatctcaattactctttattgtatcactggttcaatgctgaaatattgcagggatggcagttcttgtagcggcagttttctatggctatatgctggccttgttgcaaggtagactcagtgctatcgagtcatatcatactgtgagtgtacattcgcattgtaacatcattctcttatgctaccctagaattgagttataccaacacatctacctgtcgtgtatatgtt

SEQ ID NO: 7173 - DNA, 544 bp, Arabidopsis thaliana
cagaaatatcccaaaaatttctcttcacttatgtccacactgcagcaataaatagaacatatcagattaagcgaatataagcatttctcagtaaagaagagtgaaaaacaggattatgctagcgaagtattgttggttcctgattatatgagggccggtaactatatatttattttctcaaaattttcagcaaacttagaaaaacttacccatccaaacgaaatctttcccggacatcaatgaggtgaggtgaagtgaagagtccagttcgaaagccatagtttcgaataatagactctgtaaaggtacatgtggatcccttcatgccacataagaaacaaaaaggaatactgttaggtgctggatcagatagtaatcagccatgctaacaatgaaccactttcatcaaacaagttcactgaaggtttgaatcaaaaagtaagcaagtactagtttcataacaatttcctttgtgctatccaaatctactatcacataagtgatatgagtcaagattaaagtagcaacttttgcaaaactgaca

SEQ ID NO: 7174 - DNA, 580 bp, Arabidopsis thaliana
  unsure (1)..(580): unsure at all n locations
cgacgttgaggcgatccgatttctgaatgtcaacgtcttgaaacaagcaccttgctctgtcggcattcttatcgaacgccatctcgttaacaagaagcaagaaccacatgaaagccttaaggtatacttacaattacatctactatgcttccatgttggtcgttgtagatgctttaactatatatatagaaaaactaagcacactaagctatttgatgataggtgtgtgtaatattcgtgggaggaaaagacgatagggaagctttggcctttgcgaacgaactggcccgtcaagagaacgtaacattaacagttctacgcctcctagcatcaggaaagagcaaagacgcgacaggatgggatcaaatgcttgacacggtggaactaagagagttgattaaaagcaacaatgccggaatggtaaaagaagaaacatcaacaatttatttggaacaagagatattggatggagcggatacgtcaatgcttctacgttccatggctttcgattacgatcttttcgtcgtgggaagacatgctgcgagaccacgagggcactanagtatagagaattggtgtg

SEQ ID NO: 7175 - DNA, 311 bp, Arabidopsis thaliana columbia
gtccctgtttggctgctcattctgtggatttattctgcgtttacattatttacactctgttatatcgttattgtttcgcataggagcaacaagaactataagcactactggcttagaatttcattaaccttaatgcagcttgatattgtggcaaagaagcgtgtatcacacctcgctcagcaaacactcgacctagcctgacgcggagagaatcatgtgcataatccttgagacatcggtcaagtagtgatacagcatcgccattccacccttcccgtagatgaagctcagctagggccaacacagctcca

SEQ ID NO: 7176 - DNA, 525 bp, Arabidopsis thaliana columbia
tgagtcacgtcgagtaagttacttatagtttgtatgaatcatcacattcatcaatatattagaggtttaatcaaatgttttcttacaggccactattggagcaaaacttgtactatacaggcatgcagctcacaacgcccactttcacttccggaatgttcaacctactcccggccattacatttgtgatggcctgtatattcaggtagccttctattttctttcaaacatttagttctgtatgagtaataatcaaatcagtatgtgtgttttgactttagttccaacatgtaatgtctcgtacccttttgcaaggttggagaaagtggctattcacagtcatcgaggaaaagcaaaagttcttggaacgtgtgtggcggttgctggagcaatgctgatgacattttggagaggccaggtgattccattgccatggaacagcttgctgcacgcaaagaagatccacagacatgatgaggacacctaagaggagggcttatgctagtgtgcagctgcttgagttgg

SEQ ID NO: 7177 - DNA, 566 bp, Arabidopsis thaliana
gagtctcacgacacaattttcattttccttttttcgataatgccgtatttgaaaaaaaccataccgacccacaactacattcaaatactcaacttcaaacaaaattttgtagaatccaagtttacatcatatataattcactcacgcaacaaacaagaagatacaaaaacaagatgcattcccgctaataaacaaattacacaactaagtgataatttatttcattttggcgtttggtcttttggctaactcatatggaatcataaaccgatgtatcaagaacccaaacggccggccaatacacagatccgatccataactttccatcttttgtctcataagcctcactaacatatttcaccgtcttcccttcactgtcctcaagtatctcaagaatctctcctgtctctccagagagtttcacgacaattccatgaggtttcctccgttcatgaaatgaattacagtctccatcttcatcgtgttcatgaaaaaccttccgacccaagtgtgaatcaaaactgcacgtgtgaacaaattctttttgcaatgtaatgcgacccaga

SEQ ID NO: 7178 - DNA, 523 bp, Arabidopsis thaliana
aagaatcggtgtccttaacgttaagttctgtttcaagattcgcaacgcgggtttgatcctcccgttcgcgacatctccggggtataggctttcgtagaatacagagtatgagtctaggaagattaaccggtaagctgcaacctcagagacatgttggcatgcagattcgattcctgcttgagtgaattcgaaataagacgatgatttggtccgttcgcggcacggttttcgcgtcgcggggaggaccctcgggttgagtgagagggatttgttgagagagtgaagttgtgagcttaggaaatgtaaagtgttgagacgaatgtagaggcgttgggttcctcggctagtggaaggacgcgggtggttgccactggggcttacccatttggttaagttcttccccgaggcagcacatggcgtggctttcttccaaagcttcacgaactttgagtctcggttacatcttgtaagtggaggaatcgtaggaatgtaactctgttttgaacctgacaaaaaacaaaac

SEQ ID NO: 7179 - DNA, 416 bp, Arabidopsis thaliana
gctccgaaagccagcagcaggaacttttctgtagagaaagagccgcccaaaacttccccaaaagcgtcaccgtcaaaaccgcctttctccccaaaaggcaagaatggagctctcccaagtaacaaatgggtccgagatcctaacgcttactgtgaaattcacaaaatgaatggtcatgccacaaaggactgtaaggctttgggaaggttgttggctgcaaagtttgcctcgggtgaaattcctgacattgacgtcacaaaaatcgatctggctcaaatagcatacgaggtgttagattccaaaaaatcttcaccccccaacaaaaaggaaaagagtgaaccagctcccgttgctccaaagggcccgaagaagatggtcaaagtaattatgggaggaccaagctctttcgggattct

SEQ ID NO: 7180 - DNA, 599 bp, Arabidopsis thaliana columbia
tttttcaatattcaaaacaaaaaccccatcaaaataatctccggaccagtttctctttcgattcagtcggaccggaaaaacaatggcgtctgtgaaccctttcgatctcttggacgatgacgcagaggatcccagccagattgttgcgtctaagccattgaaggttgtggctccggttcagactgctaagtctggtaagatgccgactaagccgcctcctccttctcaagctggtaagttttattctagattagagtttggtagattcaatatttagttggatgtgttaggactcatagttttgactacatagtgattattgtcttgtttagttaagtttgacttagtatggtagttgtagatttgggatatgaatctcttagattgctttaataaccagagatgttgttaatttgttgcctttgtagttgatttaatcagatgttacattttctttgatttgagtagtgagggaggcaaggaacgctcctggtggaggtcgtggtgctggacgtggagggagttatggtcgtggtggacgtggtggaaacaatagggattcaaggacaatgatggtcatgcaatgaaacggatatggt

SEQ ID NO: 7181 - DNA, 1033 bp, Arabidopsis thaliana
tgcaagtaattctcggaaaatttgtcaggtctcgctcttatctggttcacctagttggaggagggttcaatcgacaatttcaaacaactctccactgccttcatcaagcaatacgagtacttcatcaaaagcgacgtcactgaggcccagctttggaatctctctcaagcagcagatgagccacttcggacttataatactgccttcaaagagatcatggttcaagtacccggcttatctgattcagcagctcaatccgccctcaagaatggtttgtggcatgagtcgcgtttccgtgaatctctaacagtaaaccgacctgaatcgattcaagacgctcttcatggagtaacgaactggagcgagcttttttggccaaaaagtttaatgttgcaccaaaagcttctccgccagccacttcgaaaaaacctgccgagctccaaaaaacgagcagaaggaactttctaagtagagaaggagctgcccaaaacttccccaaaagcatctccgtcaaaacctcccttctccccaaaaggcaagaatggagctttctcgagcaacaagtgggtccgagatccagacgcgtattgtgaaattcataaaatgaacggtcatgccactaaggattgcaaggctttggggaggctgttagctgcaaagtatgtctcgggagagattccttacattgacgtcacaacaatcgagctggcccagacagcgtacgacgtgttagattccgagaaaaattcacctcccaacaagaagcaaaaaagcgacccagctcttgtagctccaaagggaccgaagaagatggtcaaagtgattatgggaggatcaaactctttcaagattctatcagcgtcatcaagcaccacgaagggaaagtagtcactccggtggcaaaaaagcctaaaaccaatcaagctgaatggcccgagatttccttttctgaggaagagacctgccactaggataaacctgacgatgacgctctcgtaatttctctcgatgtggggactgcgaagtgcaaaga

SEQ ID NO: 7182 - DNA, 504 bp, Arabidopsis thaliana columbia
ttctatatttcgttattccgtacaaagtagagttggtaatataaaaccattccgaaatatattatagataaattattattacagaaacatcatgcatgcacctggggatatacatatatgcattgtgtatatatcgatagacgtaggtataaatattgttccaaaatgctaatttgctttatagagtataaccactaatgagcaaaatgaggaacctagtagaagaaaagttcctagagttctatgagagttgggttattcaacttgagctatatcttcatcaacttttaattgctcataacaataacactatgagtgagaccgagcttcgacatttgatctcgaagctaactacacatcacaaagcttattatacagccagatgggcagccataagagaagatgtcttagcttgtttcggatcagtgttggttaaaccggttagaagaatgcttgctcgttggttaacctggatggaaactcgtcgatggtggtttcggatgg

SEQ ID NO: 7183 - DNA, 1668 bp, Arabidopsis thaliana
cattaagcagtacgggtactttatcaaaagtgacgtcactgaggatcatctttggaacctctcttaaggagctgacgatccacttcgaacttatatcactgccttcaaagagatcatggtccaagtacccaacctgtctgattcggcagctcagtccgccctcaagaacggtttgtggcatgagtcgcatttccgtgaatctctaactgtaaactgccccgaatcgattcaggacgcccttcatcaagcaacgaactggatcaatgccgaagaagaacgggcttttttggctacgaagtttaacgctgcaccaaaagcctccccacctgcaacctcgaagaaaccctccgagctccgaaagccagcagcaggaactttttctgttgagaaggagccgctcaaaacttccccaaaagcgtcaccatcgaaaccgcctttctctccaaaaggcaagaatggagctctcccgagcaacaaatgggtccgagatcctaacgcatactgtgagattcacaaaatgaatggtcatgcgacaaagcgattataaggctttgcggaaggttgttggctgcaaaatttgcttcgggagaaattcatgatatcgatgtcacaacaatcgatttggctcagacagcgtacgacgtgttagatttcgagatatcttcacctcccaacaaaaagcaaaagaacgagccagctcccgtcactccaaaaggcccgaagaagatggtcaaagtaattatgggaggatctaaactctttcgggattctgtcagcgcaattaagcagcacgaaaggaaggtggtcgctccggtggcgaaaaggcctaagaccaatcaaattgactgccctgaaatttcattttcggaggaagaaacctccgacttagataaaccgcacgacgatgccctcgtgatatcgctcgacgtggggaactgcgaggtgcaaagagtcctcattgatactgggagttctgtcgacctaatttttctggataccctcgtacgtatgggaatttctaagaaggatatcaaaggagctttgagtcctctcgtttccttcacgagcgagacttcaatgttactcagaacgattacacttccggtcactgctcaagggattgtgaaaatgatcgaattcaccgtttttgatcgacctgccgcttacaatataatacttggaacaccttggctttacgagatgaaagcagtcccttcgacttaccatcaatgtgtcaagtttccaactcccaccggagtaaagcaaatcttgggaagtcagcgtacatctagaatgtgttatatgactggacacaagctcaaagtcaaatagcaaccacagctcgaggccgctccgaatccaattaaaaaagtaggagacgacctcgtagagcgggtgataataagcgaggagcatccagatcagcttgtcggtatcggagctaatctaggcgaaagtttccgaagcaaacttgttcttttcctcaagcgaaacaagggaactttcgtctcgagcgttggcgaaatgaccgggatcagcacggaagtcatttcgcatgagttaaacgtcgacccaactttcaaaccggtcaagcaaaaatattggaaacttggtccggaccgcgcggaacgagtaaatgccgaagtcgtcagctcctcgaagaaggat

SEQ ID NO: 7184 - DNA, 1173 bp, Arabidopsis thaliana
ccagtgtgctctaaagcaactcgcaggaattggtgcgctgaagttgctggatgataaacacggcgagctgaaatcaatgcgtaccgcgccaaattatttacgtcgtggtgtcgccagtctgattttacgccacattttgcaggtcgcccaggacagatgccttcatcgcctgagcttagaaacgggtacacaggctggatttacggcctgccatcaactttatttgaagcatggtttcgctgattgcgaaccgtttgctgattatcgacttgatccacacagtcgatttttatcattgacgctatgcgaaaataatgaattgccatgagccagacgcagcacattcttgcattcgacgtgctgcgcctttatttatcaccagcaggaaacgccttgtccatagacgccccttccacatgcgccacaagaaacctctattccagtgacacaattgcgcctaattaattacatttaatatttaattatgagttcctcaccatctattacatactttttaaccatatcggaatatttatcataatcagcgggattcgtaacaatatattttcgctgcgatctttcatagcaaatccctgtcaaagtccatgatataaaaatgtctcttcaaaagaattacattctttaaaaagtaattctttattgctatatatcgcagagacaacctcaatatcacactccatacgtgctttctccagatgatttgggaagtattgaatttcttttatcttattatcgccacaattaaacagcttagtagtctcaggcattgctggtatttaccatattttattgcgataaatagaaattgtcatagcctttgacggagatgagtcaacacgcgatatcagattattatctacggagacctgggtaattccatcggatacttttggaaataccatataattattgaaatcgagctctaattctttgcagaatttgggaatttgtattgtggcaaggccattatgacgaagataaagcacctcaatccaggatggaagaggtggcaaagacccaagtgaagatgtgttaagtcaagtttactattgtggagtcaacacatttaaacaatctcaccaatgctataccacattttttttgaagcattcgatgcgccttcttttactgaattacccagtcgctgaacct

SEQ ID NO: 7185 - DNA, 541 bp, Arabidopsis thaliana columbia
  unsure (1)..(541): unsure at all n locations
aatgttgtaaacaatttaatcaattgtcatgtgtaatgaaaatctcatagcatgttaatacaataactgttgacctaatttttcgtttgtcaaccctgaatcacacaatttattaggattttctcttcatttgtatattaatgtaatttgcggcgatttttttgttgattttacttctcacttgtgcattgtgtctttgtaggaatgaacaaagagttcgagaactctatcttcttcccctcgactttggtatctgttttgtttttcgcaggttaagtttcaactcttacaagttcactattaaggtgtcatccatagactatgaaagttgtttatatgaaactaagttctctagacatttgtaccaacctgctaatttcttctgaccatgggaaagtatcgaattttccaagttgaaaggggggaaaaatgagttacttctctgttctaacatcaaaaaagtcactgcaaacacgatttnggctatcctacgtcaaacaaaaatttcatcttatcaaatttatcaaaatgccaataattg

SEQ ID NO: 7186 - DNA, 491 bp, Arabidopsis thaliana columbia
tttaggtgagtgagcgtgatgacaaattgcttgctgagcacatggctaagcttagaatggataatgaagaaatgagtggtgatgagggaagcgaagatgaagaagaagacactggaatgggagaagtcgatatcgatggaggtagcgggataattgaatgaacaaaagcaaaagcattgtaactgctgtttctgctttagatcctacaattttgtttccctttgagcaaaaacagtattttttgtttgaccccaaacatggttagtagtacaagcatctcttattcacgacaagtgtttcataacattggttatgataagctgctcaatagtgttgagctctgagaatgaagacgaagtacaagaatcagatgaactgtcctgggcaatctccccattagccgcaacgatggtgcgggaataacagctgaattcatcgatatagctaagactctgttttgtgctcgcttcaccagccaagacattgtgatc

SEQ ID NO: 7187 - DNA, 493 bp, Arabidopsis thaliana columbia
taactctagcagtccatagctctaatcaaatacaaaactaaacctaatcatccacaattgaggtacacacttcccatggatcatactgcaaagattgtgctacgagagaaaaagcaatgaagcaaaaatctagatcaaaggattatcctttcttatcaatcatacatcaataagagtcagtgctaagctttgcatcttgagtatagccacaagatcaaacagattcattaattcgattgagaacagtctttacatcttgaggatagtaacaagggtaacgagacccctaatacgatagaaaatgagtaaaatctaatctgacaagagatgagaaattctttgaaaagatcaaaccctgagaatttgcagcttagtagagaaagcaattgcgacccaatcaggctgagaagaggccactgaagctgctcaatctcagcaccagcagtgtaagctagaatagggtcaagaccacttcaacatgctgtccatggat

SEQ ID NO: 7188 - DNA, 519 bp, Arabidopsis thaliana
ctttaaagaacagaagacaacccgatttagatattgctaacgcgaacgcgaacgagactctccttctcctggctcaccagagttccaaacagttcaggtaacataattaacagcgatgttcttttgagaatcttcttgttcataccatcttggtttctattagtgaatccacgtcgatatattagagaagaaatgtatattgttccatctaggtttttatatataccaactgatatttagaaaaattattataagaaaacgaagtttatagtttcttttcttgtatactatgcagattcctagacagggcagctatttcttgtgaattggctgaaattgaagaagcaaaggcggttcttaggcttattcccatatggataacttctgtagtctacaccattgtacatgcacaatcccctactttttttacaaagcaaggagccacaatggacaggtcaatctcaccaggactcttagttcctgcagctacacttcaaagtttcataaacctctcagtag

SEQ ID NO: 7189 - DNA, 533 bp, Arabidopsis thaliana columbia
  unsure (1)..(533): unsure at all n locations
nnnnnnnnnnnnnnnnnnnnnnctaaagaacggttttaacctttagttgccaattttcttcagtgacagatttcacgaaaatataagttacattattaatatcgtgaatgaataatcatgcataagtattttgcttaaaatatcggcaatatttggaacttattactggaaatttgggtaatacgttgttggaccgacccggtctggttatcatatcgcgctcttaattgcgggaggatgtaacatgaaccttgacgacaaatcgctgtttcttgacgccatggaagatgtccagccgctgaaacgtgctaccgatgtccactggcatccaacgcgtaaccaacgtgcgccgcagcgtatcgacacgctgcagcttgataatttcctcacaccggatttctcgacatcatcccactaagtcagccgctggagtttcggcgggaagggttgaacatggggtgctggataagctgcgcagtggtaaatatccgcaacaggcgagcctgaatcttttgcgccacgcggtggaagag

SEQ ID NO: 7190 - DNA, 577 bp, Arabidopsis thaliana columbia
gagtcctaaaagagcagaaggtccactctcgaatccttccgctatatcctcaacgtatgttatcttcccttctctaatgtaaggaagcacaaaatccaaaaacttaggatatttgtcgtagaaatcacaaacaccaaacccttgaagttgtatcctcttgtaaagaatggtgggtaagttgtgtacgccttctggatccactaaattatactgtgagatcattccacatactgcgacacgaccatgcaacttcatgtttatgagtacggcatctaacattttgcctccaacgttctcaaaatatatgtcgatcccttccggaaaatacctataattataataagtcatcgcttttaattatattatgtatgacttcctatctatatataactagagatagatgtgtaaactgacctctttagggcagcactaaagtccttctcttccttgtaattgaaagcatcatcaaacccaaactttgtcttgagtagataaaccttagagaaactccggataatgagaaaatggctttctttatatgcattaaagttttgacaagtaatgtagagttttaagt

SEQ ID NO: 7191 - DNA, 959 bp, Arabidopsis thaliana
taacaatttatcagcacaaaaaaaaaaaaagcttttcatcacaaataaaaccatgcgagcattacactcatgacgcaaaacgacaccgcatcacacacagaaccaacattacgcaaagcaaacgaagcatccgccggagaatcatcactggaactatcactgtcatccttcttcttctttgatttcgatacagacggagccggagccggagcaggaggacgaggatcgaaaacttgttgtggaagcaaaaccttatcgacctgataaacagcgagctgtccatcgctgtagacattgccggagacggtggtgttggttacgccggacgtgatatttacggtattgccactggtggtaacgttgagaggaaaatgtccatcggcggagtcaccggcctgagtccggagagggttacttattgtttggaagtttgaggaagagacgtaacttggtatgacatgaaactgaataagctctacttgttgctcatcggttaacgaatttagggtcccggctttgagaccggtgaacgaggaatcactcggtgcgaatatagtgattccattgtcggagttgtttagttggccgtagagttggttagcgactccagtggatttgaggagtcggatgaagacggtgaattgaccagctttctctaggattttggtaacgtttgtgggtcctggtggggccggagcgacggctggagagggctgagataggattccgggagtggtggtgaggaggaggaggacggtgaagaggaggatgatgagagaatgttccatggctctggttttcaagagtgttgatattttgtttgtgtgagtttatatgaagagtaaggggttatattgaactgggggaaattgattggttaagaggtcaacatattttaacaactaagttgattgttaataaccaatgatgattttatcacatgaattgctttacctaca

SEQ ID NO: 7192 - DNA, 404 bp, Arabidopsis thaliana columbia
ggctgcttcttcctccgacgaattcctcttctccaccaacagtcgtcgtgaagcagaggagtttgttacagccgttagacatctacaaagcacgatgcatcgtttggtttccgttaacccttcctcggagaagctaatctacgcacagaatctaatgcaatcggcgatgaagcttctcgaatcagagtttcatcgtgttttaaaagcgaaccgtgagtatttagatcctgaatgtgtctctgtacgttcttacagatcatcgagattcagtacttcgactacgactagtgtctccgattccgaagacgaaagcagttacgaagaaaacgctgacgaagagcatagattctccggtggagattccgacgcaatggatgatctcaagatgattgctgattgtatga
